United States Patent Application Publication US 2026/0103690 A1 - sequence listing, part 48

SEQ ID NO: 229363 - protein, 391 aa, unidentified
MPTVADQAEAPIAIQTHLACIFTSLELSRSIWLITSLSPGSGEKMSKHSVRAGDVAALLARFSELKRKASGRTGKSFPIVVIQEAGLDGFWLHRVLQSEGIESHVVDPASIATSHRRRRAKTDRIDGEALLRALLAHKRGEPRVCAMVRVPTPEEEDRRRLCRERKVLIAERVEHVNRIKGLLFSQGVFDYEPLRRDRRQRLDELATGDGRPLPTHLKAHIGRELDRLELLLDQLKTAEAERNTLLAEQQAATERPAPVGRMLLDFRGIGAEFAAVLWLEALFRHFDNRRQLASYAGLAPTPWQSGSVDREQGVSKAGNPRLRNTLIQLAWLWLRHQPQSALALWFKERVNRNGGRMKKTTIVALARKLLVALWKYVTAGVVIEGAVTKSH

SEQ ID NO: 229364 - protein, 319 aa, unidentified
MAQNELVVVGIDVAKHKVDVCIRSPLLRQTFENTAQGQRKLVAWLRKHRVNKAVMEASGGYERGWVRLLRQAGIEVRIVDPRRVRSFALSTGRLAKNDAIDAEMIAWFAETFSEAPCQVYDAAHEELLALAKARISLVDLKARLESQSEHAAPSLVQAARRRLLKNLVGEIAKIEAAIAARIKATPHLAERAEIIESIPGFAETTSANLVAGMPELGQVSNEVAAALIGLAPYDDDSGKRRGERHIKGGRRWVRNAIYMPCVGAATLNNPVLKVYYQRLIAKGKEPKVALVACMRKLIIILNTMIARRQKWDSSRYALG

SEQ ID NO: 229365 - protein, 387 aa, unidentified
MSQSNQRVVGLDVHPDSFAGAILEGSDPWSARVVRTSTRVALGELEGWAARQTGPGDVLVLEASGNAFCVAERLRSLKRKVVILDSHRAGKVGKAYCATDRVDAIKIARIYLSALSPVVWQPDPGTRERREVFSAYQGVVKETVRLKQQLKSMLNEHCVRLEKGFRLSHPTALGRLRKRREWSGAQAMLLGQLHAGLVGACQRRQQLRHYMAQEILAETELLRLTRLCGISLITLYGLISSIGQITRFENARKLSAYFGLNPSVCQSGNYEGATALKRHGRGAMRALLVQSAKKLLQVENPLRKWGLAVAARRGRNKAAVAVARKLCVAVWHVLQGHTIGALERLDTLHTKLHKFATELGVPAIKALGYQTKEAFVQKKLYLLKAYP

SEQ ID NO: 229366 - protein, 422 aa, unidentified
MEGTESNYQWYVGIDWGAERYEVCVLDRQAHVVARRSVAHSGTGIAEFVDWLVKLCEGKPERVAISIETPRGAMVESLVERTFAVFAINPKQVDRFRDRYTVAGAKDDSRDAFVLGDSLRTDEHCFHRVGLDEAAILRMRELSRLEENLQQESNRLSNQLWEQLHRYYPQMLALSKAADEPWLWELIEWAPRPAEAGKLELARVQPLLGSHRIRRIRAEQVLEALKKEPLRLAPGAEEAASEHALLLLPRLRLAHEQRTQVAKRIQRMLREMSAAEPTEKADKREHSDVKILLSLPGVGRVVPATVLAEASGPLRERDYHRLRNYGGIAPVTRQSGKKKVVSMRYGCNMRLRNALYHWARTSVQKDAAAKKHYAALRQAGHSHGRATRGVADRWLAVLMAMLKAGTLYDPERRGKGQATKVS

SEQ ID NO: 229367 - protein, 351 aa, unidentified
MKKFFIGIDFAKEKLDAAIIEACGLKEFGVRQFGTFPNDKKGYRQFLKWVRGIAGPAAESECLFCGEDTGSCSLGLSKWLYGKGYDIWIENAYVIKHSNGIQRIKTDRADASMIAEYAWRHQDKAALFEPLSDSLAQLREVFLYRHKLVQQRVSIDVRRQDKEASDKTKALSFINRKSKHLIAELDKAIKECDAMIDRIIDSDEELRENYAIVTSIKGVARQNGACLLIFTNNFKRFDLDARKIACYYGVAPFAKESGTSVHSPARTSHFANKLIKSLLSQAAQIAKIFNPEIKEYYDRLIKRGKKHAVAMNNVKNKILRIIVALVRKKTLYDPDAYKFWRNRLNKQFSPS

SEQ ID NO: 229368 - protein, 423 aa, unidentified
MAYRIAGIDVHKKKLAVVVADVEVEEEYQFEQRWYGSNPAQLQLLSEWLMEQQVEEVVMESTSQYWKPVWEVLERHWKPMCQRREGAGRMSGTLHLAQALSNRGRRGRKKDFRDAERLVKRLVSQELILSFVPDAEQRLWRTVTRTKYQLRRDRVRLQNQLEALLEEAHIKLSSLVSDLLGVSARRMLQALAEGETDPAALAALAHENLRATPAQLRDALGACTELNPVYRRLVKMALEELQLIEQQIGQLDQEIASLLRQHQDAVERLAEVPGLGVDSAQQIIAEVGAKATTFASAKNLVSWVGACPGDEESAGVNRSKHSPKGNRQMRRILNQAANAAVKHKGSIFEIVYRRLVLRLGHNKTIGAIAHRLCQLIWIILHRGVRYEERGPAVSEKSKRLRTTRMIRTLRNLGYRVEPLGNPA

SEQ ID NO: 229369 - protein, 357 aa, unidentified
MCILKENGEKIEEVFGTLTPDLERLRDTLIAHGVGHVAMESTSVYWIPIWRVLEPDFDVKLVNPYFIRQLPGRKTDVKDAQWIATVLQKGLIKGSFVPEGRIQELRLYNRRIAYLRRNLQRADQSIDLILQRCNIRLSNYVSDIGGKSMRKVVRAISQGQTDPEVLVTLVHTRTKNKHGVQVIKEAVTGVLSLTDMDILAMALQESEFYEKQLTACQEKLIEICGNYYREELELLQSVPGIKEQSAASIIAEVGADMAYFQTASNLVGWAGLRPRNDQSAGKIKGRKTLHGNKYLRIMLVQCAWGASRTTNSSFSLRFNLLRKRMNHNKALIANARKLLLVIWNILAKKQAYMAKAA

SEQ ID NO: 229370 - protein, 344 aa, unidentified
MDNHTQYLGFAGVDLAKKVMQIHFVTADGEITDKSAKRAEFLDFFRNRGKCLIGMEACGSSQDWARKLEAMGHEVHLLPPKAVKPFVSGQKNDHNDAIGIYKAMFNGVRRVPVKSTEIRDLQTLRRIRSQVTKDKVKEINHVRGLLAEYGIVMGKSLNAFNKDISSALEILTERGDVSPLVAEELRTTVEAIKAKIERQKKLDQEIEQLARGCKNYENFLKTPGVGPFTAAMLCVLLCDPSIFANGRQFAAYIGLAPRSRGSGGKNYVIGIPSKFNCDSESRAVFVECAQAIARCKNKSPWVEGILRRKPKKVALIAIATKLARQVWAMANKGESFKQMAVLTA

SEQ ID NO: 229371 - protein, 367 aa, unidentified
MASVSYLLAPIHLGLDVHRDTISVGILTPDQQVPDVDRIAHDEPSVRRLVGRLGDPRMLRACYEAGPTGFELARLLASMGVRCEVVAPSLIPKAPGDKVKTDKRDCRRLARLHRAGELVAIRIPTVQEEAVRDLCRTRADMVEDRTRARHRLSKFLLRHGRVWRGGTTAWTQAHERWLCCQQFDEPALQTTYAHYRAALQSRDAQLDAIEADLAGWYDRPPFAAQVARLAAYRGVTRLGALTLAAEVGDWRRFARASQFMGFCGLVPSEYSSGQRTVRGHLTKAGNAHLRAQLVESAWSYQHHPSVGAQIARRQQGLDPQVVARAWAAQLRLCGRFRRLAARKTSKNLVVAAVARELAGFLWAEMTA

SEQ ID NO: 229372 - protein, 338 aa, unidentified
MNIVFLGIDLAKNVFQLCGLNQAGKPVYTKRTGRKELLQTLANIPACLIGIEASTGAFYWQREFEKLGHKVKVISPQYVKPFVRGQKNDGNDAQAIAVALMQPTMQFVPPKSPEQQDIQALHRARQRIVNHRTATACQIRGLLLDRGIPIGSAVSRARRAIPLILEDAENGLSSRMRRTIAELYDLFNDLGRRIHFFDKEIETVFRQSEACQRIAKVKGIGPETATAVVAAIGKGTEFKNGRHFAAWPGLVPRQHSSGDRQVLMSMTKKGDKHLRTLFIHGARAVVRVATNNNDGHMNQWVNQLKERRGFNKTTVAVANKNARIIWSVLRNDTGYQVV

SEQ ID NO: 229373 - protein, 369 aa, unidentified
MGDGITYVGLDVHKDGIVVAVAEGGLRGEVRDYGRVANTPAALQRLVRKLGHQGVELRFCYEAGPCGYGIQRQLSAAGHDCVVVAPSLIPKRPGDRIKTDRRDASSLARLHRAGELTAVWVPDAGHEAMRDLVRARLDAVHALRRARQQLSGFLLRQGCHYGRPAWTKLHRRWLAGLRFEQAVHHLVLEDYIEAVEAAQARRDRLTAQIEAMLPHWTLAPVVAALQTMRGMALVNAATLIAELGDLSRFANPRQLMAYLGLVPSEYSSGASIKRGGLTKAGNSAARRLLIEAAWCYRFPARVSRELLLRQEEQPRPIREIAWKAQLRLCARYRKLARSGKPANVATAAIARELAGFVWAIARRVPPTAG

SEQ ID NO: 229374 - protein, 423 aa, unidentified
MKYALVRVLPEVPPGGVCAGIDWASADHAVCVVDLAGRVRDRFTAVHDRAGIAGLIARLRGSGAAEVAIERGDGVLVDALLAAGLTVVVIGSRQVKNLRSRYGSSGAKDDRFDAFVLADTLRTDRARLRPLIPDSPATLALRAAVRARRDLVAHRVSACNQLRAHLAVAFPGATGLFSELDSPLSLAFLAAFPGQQAAARLDEQALAAWLATVPRRGNTAPAGVLAARLAAAPRGAAGADAAQAAVTAQLAAATAGLAGRVRALEAEIAAQLAAHPDQHIFTSLPRAGTLRAARLLAETGDCRARYPDPWSLAGLAGVAPVTRRSGTYISHEFRWNVNRQLRDAICDFADGSRHASPWAATACAAARDRGKDHPHAVRITARAWVLIIWRCWQDGTSYDPAKHRALQDVLTRQAAAGTPQPHR

SEQ ID NO: 229375 - protein, 345 aa, unidentified
MKITTAGIDLAKNVFHVHGVDERGKTVLRKQLRRAQVAVFFGNLPPCLIGMEACASAHHWGRTLERYGHTVRLMASQFVKPYVKTNKNDAADAEAICEAVGRPNMRFVPIKSVEQQAILSVHRVRQGFVKARTAQANQIRGLLGEFGLVIPQGIWNVTKRIPELLEDACNELPVPFRHLIDRLTEHLKELDRQVKDLEKQIIAWHRSSELSRKLENIPGIGPLAASALVASIADASSFNNGRQVSAWLGLVPRQHSSGGKPTLLGMSKRGNPYLRTLLIHGARSAILAAQRKTENTNVWLANLLNRRHPNIAAVALANKNVRTVWAMLAHGREFKANYVPARTAA

SEQ ID NO: 229376 - protein, 399 aa, unidentified
MNCVGIDVSKGKSMIAVMRPFGEVVVSPFEVRHTANELSELAGLLKSLDGETRVVMESTGNYHAPVAWLLHGAGLYVSVVNAMLVHDYGNNSLRRGKTDKKDAVKLANYGLDHWLTLPRYVPEEDTRLMLKTCYRQYQQYSKVQTMLKNNLISLLDTAFPDANRLFTSPPRTDGSEKWVDFVATFWHCECVCGLSKKAKYQKWCRKHGYNFSQDKALDIYASACGRFGVMPKTNTAKLLVEQAISQLQTTSAALAALKQEMQSLAASLPEYPVVMGMFGVGPTLGPQLIAEIGDVRRFHSKKALVAFAGIDAPPYQSGQIDVRSRSISKRGSASLRRTLFLVMGVLLQCAPMDEPVYQFMNKKRSEGKPYRVYMMASANKFLRIYYASVKAYLDSLEHD

SEQ ID NO: 229377 - protein, 346 aa, unidentified
MGIVCRIGLDIAKNYFQAYGVDKHGKQVFNKKLRRADVLPFFANLPSSLIGLEACGGAHFWARELAKLDAGHTVRLISPRHVKPFVINNKTDAADAKAICEVVGRPSTCFVNERTVEQQDLSAWQRMRERKVKERTALVNQIRALLYEQGIIIPQGIEHVCRQLPYIYENTDNELSIQARDYLSELWSELLDCDALVDKYESRVEAFAKNDEACKRIQKIPGVGPLTATAIVAHVGCARHFKNGRSFAAYLGLTPRECSSGGKQKLLGITKRGNSRIRCLLIQGAQTVIRPYLHKPPEQVEPRLRWMQGVAARRGWQIASVALANKTARIIWALLARGEDYKPSVA

SEQ ID NO: 229378 - protein, 460 aa, unidentified
MARKKIRAKKNVCLPVLNADAAGIDIGATEIYVAVPVDRDPEPIRMFATFTHDLQALADWLQRCGIRTVAMESTGVYWIPLMQILEARGMIVYLVNAKHVKNVPGRKTDVSDCQWLQYLHSVGLLRASFRPAQEICAIRSLWRHRDTLVELATCHVQHIQKALDQMNLQIHHVISDITGFTGLSIVDAILEGERDTEKLALLKDPRIRASHETIVKSLVGDYRQEHLFTLRQSRDMYHEYQRKILECEAEIARLMQKLEGKADPSTLPPAKDSVKKCKVMNPSKAISLRDEGYRILGVDLTTIPGISVLHVQTIVGELGPDLSKFRSPAAFSSWMGLCPDNDISGGKVLWRGTRRIKNRIAITLRMAAQSLQNSKSSLGAFYRRMRTRLGAPKAITATAHKLARIVFHLLTTKEPYDDSVFAKAEERCQYRAKQRLIAQARTLGFNLVPIQTQTGEVSMA

SEQ ID NO: 229379 - protein, 365 aa, unidentified
MWEAPVKIQRTSVGLDVHARSVVACALDGDTGEVFQRRLTPNHGEIVAWLGDLPGPVAVTYEAGPTGFGLARALTTAGICCEVAAPSKLIRPAGDRVKTDTRDAAHLARLLHLGQITEVTIPSASQEAARDLVRARDDCRGDLMTARHRVSKLLLRQGIVYSGGKAWTRKHELWLRAQRFDNPALQLSYEAAFDAMLACVDRRDRLDKAITTMAAASEFTPVVHRLGCIRGVATLTAFGLAVEIGDWHRLTGRSIGAYVGLVPCEYSSGESRTQGGVTKTGNGHVRRLLVEAAWHHRTQYRPGVELRRRWDLASPAARARGQAANRRLHLRWAGFDTRKKRPVIANVAIARELAGWCWSLAVMPD

SEQ ID NO: 229380 - protein, 346 aa, unidentified
MKKVLKQVVGVDVAQKELVTTLGRMYDDFSIELYSHRVFKNTEKGMLTLLDWVKKQTTEEAKIHYVMESTGVYHQKFAYYLDESFLDLSVVLPNKIANYIRTLEVKTITDKTCSEAIAQFGLERKLNLWHAPNKVYMELQQLTRERDQIVAERSAIKNQLHAETIQAKPNTNSVRRLKERIAFLNRQEKEIKGEIDVIIDNNEDVKKEIKNIISIPGIGKLTAVIVLAETNGFELIRNKKQLTSYAGLDVKEKQSGTSVRGKPRISKKGNRSLRKAMYLPSLSAVKYDENFKGQYVRIVSKHGIKKKGLIAVQRKMLELIYTLFKNKTVYDKNYESKKSSAKILVA

SEQ ID NO: 229381 - protein, 348 aa, unidentified
MSTGYDGRQIVGMDLHRRRSVLVRMTSEGRRLGKARITNSPAALRAEIARAGRRPKVVLEATYGWYWAADTLALAGAEVHLAHPLGVKAFCYRRVKNDERDAADLADLLRMGRLPEAWIAPQDVRDLRELTRYRCKLVAMRTSAKDQVHAVLAKLGIPVRHSDLFGPGGGAWLDGLALPQPYCGKVASLRQLIEVHTGEIGLLEEVIAELLAGHAGYRAIQALPGIGPVLAAVIVAEIGDITRFDRPERLCCWAGLTPRHRESDLKVARGHITKQGSTLLRWALIEAVQKQPVGSPVRATRDRIIARRGTQARNIAKVAAARRLLTLVFYGLRDGHVRALQHPARDAA

SEQ ID NO: 229382 - protein, 407 aa, unidentified
MDLLKTVFGIDVSSRKSNVCIMVNGKKVNDYAISNDMVGFNRLIGDLKQVTKPQIIFEATGVYSRRLQAFLDMHELRYVMTNPLEAKRKTKDDLHQNKTDKLDALYLAKLQSEHPQRLAYVQNKEYQELMANNRIYEQASHDLITNKNRLHKAVQLTFPEIEHLLANPRGKNYWSIALRFPHPDIVLETKEADIIDFLKGLSGIGKKRANDITQNLIRLAKVACPAVKKNSAHIRGLKMAINNILSAEEECQTALQEMAKLAPKRDLEILTSIPGIGENTALRIISELGDIRRFNNPSQLNAFVGVDPQVYESGNLTAHLSISKRGTAIGRKVLYLAINQIQSAKKVGNPYHIADYYEKRKRSSETASHKKAAIASIHKLLRTIFALIKNDQLYSYDVAKHNQRLLS

SEQ ID NO: 229383 - protein, 341 aa, unidentified
MPGPRARIRKVGQPDVPSTSRKEPVKSESEVFVGIDVSKARLDIHVLPSHQAWSTANEGPHLDALVARLAALKTTLIVLEATGGLERRALALLLAAKLPAVAVNPRQVRDFAKATGHLAKTDTLDAAVLALFAERIRPEVRPPLDQQTQELDALMVRRRQVVDMITAEKNRLAAAPPSKRVVRAIRKTISCLQKQLDEIDTDINSAIRNSPAWKAKDDLLRAVPGVGKVVARTLLAQAPEIGSLTRKKIGALIGLAPLNCDSGTYRGRRRIWGGRAQVRAVLYMGTLSAIKHNPVIAAFHARLIAAGKLPKVAIVACMHKLLTILNAMLRSNSPWSPEISS

SEQ ID NO: 229384 - protein, 298 aa, unidentified
MRIVVALDVHRRQITYKTLDRESGEVRRGRIAPATRVAVRDWLEQFAGCEAEFALEGTTGWRFVVEEIERAGHRARLADPAETAVKRGRKRRAKTDNADCDLQLRLLLAGELPESWIPPAHILELRIRVRTRKLLIDQRTAWQQRLQAQLLHQGVAAGLKPRTRAGREALARAELSPAGRELVALALRTIEAIDRELAPLDRALRSFARRQPACRALIANLYGVGPISATAILAELGDCRRFASSDDAVRHSGLDVTVHQSDNKRSAGHLSHQGPELLRWALFEAAHQSARRGSPDHD

SEQ ID NO: 229385 - protein, 350 aa, unidentified
MMIIGCDYHPAFQQIAFVDTETGELQERRLQHREEAEKFYRALAAAGQKVRVGMEASGHARWFERLLAELQFELWIGDAAEIRTKRVRKQKTDRQDAQLILKLMLKDDFPQIWVPSWENRDLRQLLWHRHRMVQARTRIMNQLQAVALNEGLRCKKRLWREAGREQLEAFRLAPWASRRRRDLLELLDRLNPTITDLTQTIEQEAEKCPEAQRLMTHPGVGPLTALAFVLIIGRAERFQCGKQVASYLGLVPLEESSGNRRRLGHITKQGNALLRFLLVEAAQVSVRSIPEWRNKYFHLMMRRGRKIAKVAMARRLAVQMFWMWRKGWDYEQVRKFGSHAGQPGHRDGVQ

SEQ ID NO: 229386 - protein, 425 aa, unidentified
MLGVGIDWSEEFHLVALGRPGEGVIDISRVEHTPTAVDTLVGRIAGLEPDPAEVRVVIETRHGLLVERLIDAGYVVVPVNPDLVARRRGPAKKKDDSEDARIACLIALDRHERLRPLIPHGEIAGELRSIARDDERAARDERRLGNRLRQDLIATFPAALQIGGDDLGAPTFLRLLERWPTANALAGASRQELVAFARSCRHGWPERFADRVATSLAADHFRPKEYLVRAKADTIRLAATQLLAIARQRRAWERRMGELLLGAPRRGRDHQPRGDGLGNGFPDGEIYLSFPGLGDRLAARIAGEIGDHPEQFDSPSSLQCYAGKAPVTRRSGKSELVVACRLAHNRFLGAAVQQWAFCSLKRSGWAREFYDAQRARGKGHHAALRALGNRWLEILWHCVRRGVLYDETVHVANRNRALGRTAEAA

SEQ ID NO: 229387 - protein, 364 aa, unidentified
MKIIGCDYHPSGQQVFGIDKESGEIFADQWIGHSGSELEEFYSKLPAGTVVGVESSGNMQWFESRLEQWGHRLRLGDAAQIRARETRKQKHDRRDAELIARLLVEDTFPELKWVPTLAERDQRQLLMHRHKLVGMRTQVKNQLQHIAMNQGEQKKRRLWTKAGRELLEGLVLDRWTARRRDDLLRWLDLLHRDCESLEREVEQAAEAREDARLLMTHPGIGPVISLGFVLTVGRIERFERSRQLVSYLGLNPSEASSGERRRRGGISKQGSSFMRRLLIQGAQTAVRGDEDLNRQYRRLASKKHRAVAKVMVARKLAVRMFWMLKTQKTHAELVRMRGSSSHPGVGKTDRLSERPASSRIEPQG

SEQ ID NO: 229388 - protein, 408 aa, unidentified
MTVFVGDDWAEAHHDVHVMDSSGERLVSRRLPEGLVGIRGFHDLMADHASDPSEVVVGIETDRGLWVEALVAAGYRVYAINPMSVARYRDRHNVAGAKSDAGDAKVLADLVRTDRHNHRPVAGDSPDVEAVKVLARAHQSLIWGRNRHTNRLRNALREYYPAALEAFPNLADSDTLAVLHRATTPDAGARLTVTQIRAVLKRGGRQRNLESRATQIQEALRTDQLTAPAQVTAAFGATTGAAVGIIRELNQQITALETEMGTGFEQHPDAEIIRSLPGLGMILGARVLGEFGDDPNRYADAKSRRNYAGTSPVTRASGTKRAVIARHIRNRRLYDAIDQWAFCSITPSPGCRAYYDQHRAKGDLHHQALRALGNRLVGILHGCLQHHTHYDEHTAWAHRQPPSIEIAA

SEQ ID NO: 229389 - protein, 424 aa, unidentified
MSQRTLTERVTMVKPGMLLVGIDLGRDDNVAVVLTDTAQRLTRFKFPHTRAGYDFFYRQLEQLRAQHPGQGLLIGMEPTNHYWKWLAADLEAHQPPLPYRLVNAYTVRKHREGEQLERAKDDLRDAFQIAELLRTGKFTETQLLQGAYAQLRQYATLHMRLQHDAAQLQNVLTTAVDLGFPELRQVFKDLSGETALALLRTASCASTIRELPLSEFLAQVREQLQGHRLSVSKLKQAHALAQTSVGLVDTGALHFTIQVYSEQLAHAHESLKRTETALVELFLTLPEAPYLLSLPAISPLFAALLLAELGDPRDFSCASQWVKLAGVQPVADSSGHRTRSPTPMSHKGRSRLRELLYWLVLRWVQHDPYFKAEYERLQTRPQHPLTKMEALGALMNKALHVIWAVLRDRTFYDPQYRQAGAGAL

SEQ ID NO: 229390 - protein, 375 aa, unidentified
MMSIESSPRGEHVVQQDDLFMSLELGDKRWKLSIGDARHGTSRYDVAAGDTAAVAKCVAKTRERLQTPNAVVHSCYEAGRDGWWLHRWLTQFGVDNIIVDASSIEVNRRARRAKTDRLDADKLRTMLVRHHSGERVWSVLREPTEQEEDARRVHRELQRLAHERTSHINRIRALLVLHNVRPDIVLAGRDWPAWWQENREQVAPKLRAEIEREVARLTLVKDQVRSIELARRRELACGVHPMVSQLTRLAAIGPTGAWVLVHEVFGWRRFSNRRQLAGCLGLAPTPYASGDTAVEQGISKVGNKRVRALLVEQAWGWLRRQPNSALTLWFNRRFAHSGARMRRVGIVALARRLAIALWRFLQNGEIPLGASLKPT

SEQ ID NO: 229391 - protein, 370 aa, unidentified
MKEVYVGLDVHRKKTVYVMQATGGEVVAEGTVPTHREGIQEIVVRHQLDPGTKVCLECGAQAGMVCDALEEVEMVPVVVDATEVRRKARRRGQKTDRRDAFEICDGLRRGIWASVVYMPPPPIRKLRRILSRRRHFVRLGSQQVNAAKFLLRMEGVLTEEEISLTSDPAWSTFVARPEVEALRGHLELHSKTWSLASEHVAVLQKELLLALKPFADVMGWLTSMPAVGLITAASFIAVVGDPKRFADSNHLVSYLGLAPSMYDTGERERHGHITKAGPPYMRGLLCEIAQHTARPTHPLNPYFVRIAAKSGYKKAAIAIAQRLARIMYRMWLNREPFDSSKLNVEKDGKVRTKVYHWKIKQPAQALAAAS

SEQ ID NO: 229392 - protein, 316 aa, unidentified
MENIKVQSVVGMDVAQDSLDLFDTRTQQSRSMPYSTAALQSLIESFDTNRPDLIVCEATGGLERRAVAQWVAAGFAVAVVNPRQVRDFAKATGRLAKTDRIDAQVIAAFGLAVQPAARPPKDELAQHLDDQLRRRGQLIEMLTAEKNRLARASRPVIKNIKLHITWLERQIDNVDHDIDTTLKGSPVWQAKLDLLKDFKGIGPVTRASLMAWLPELGQLNRKQIAALSGVAPFNCDSGTLKGQRHIWGGRQTVRNVVYMATLVGVRHNPTLRAHYRQLRARGKAAKVALVACMRKLLVILNAVFRTGSPYVERVTT

SEQ ID NO: 229393 - protein, 394 aa, unidentified
MLEDGQEPNKHLKFSNDSLGVATLVDRLNNLISLYKPTTLKIGVESTNLYWWHLFELLSSDNSGLTLKPELYLINPNRVSSYRKSFSNLPKTDPTDSWFIAEVVRIGRLKPNHPYDLRYAPLQRLTRFRFQLVESLIKEKNRALNLIFLKFSSYADKSNNPFSDIFGKTSSALIEHFTPDEIANTNIEDLVRFISKSSKNHISEEDILKCIEILNDLSKKAYRLNPKLLDTVNVTLTMTLENIRYFESQIKKIDKVIEREFSAFPEKQILSLVKGLGPVLAAGITAEIGDISKFKSDKKLASYAGLVWKKHQSGNYESEDTPLTRSGNEYLRYYLVESANCLRMHNAEYSEYYNRKYHEVRTHQHKRAMVLTARKLVRLVFALLSRSQNLLGRS

SEQ ID NO: 229394 - protein, 347 aa, unidentified
MQVITIGIDLAKNVFQVHGVDANDKVVFNKPLRRSQVLPFFAKLAPCLIGMEACASAHYWARELKKLGHDVRLMPAKDVKAYVKRNKNDSVDATACCEAVRRPTVRTVPVKTPEQQAQLMQHRVRDLLVRQRTQAINALRSHLAELGIVAAQGYDGLKVLLAVIADCSDVRLPENARASLSALVAQIASCQAEIGAIEKRLLAQHRKNADSKRLETIPGIGVVGASAIVATVPDASIFKTGSDFAAWIGIVSREDSTGGKQRLGPISKQGDRYLRRILIVGAFAVIKQARAHPEKYPWLTQLLARKPAKVAAVALANKTARIAWAVLTKKEIYRSRPITAAPASLGS

SEQ ID NO: 229395 - protein, 391 aa, unidentified
MWRVAGVWKVQSPSTDACKGGKEPAVTSSLAASAGAIHLGMDTSKNTIVVAVLMPGEEVPVIDRMWNEEGSVRHLVGRFPDRAALRACYEAGPCGFELHRLLASMGVACEVVAPSLIPRRAGDRVKTDRRDAGRLARLHRAGELTAIRVPTEAEEAVRDLVRARAALLADRKRAQQRITAMLLRHGRAWRGTYWTAAHEQWLAAQRFGEPALASALAHYSAALDTRRAELEAVEDELAVWAARPPLAAAVARLGCYRGIAELNGLTLAAEVVDWRRFPSARAFMCFTGLVPAEYSSGERTRRGSITKAGSAAARTALIEAAWSYRFRPAIGVTLRRRQHDADPQTLARSWRAQRRLHTRYKAMTARGKPAAVAVTAMARELAGFAWAEMTS

SEQ ID NO: 229396 - protein, 408 aa, unidentified
MDVIVERPAALDVHKAQVTACVRVPDGGGGREPHLAEFATTVRGLLALRDWLAAHRVSQVVMEATGVYWKPVWHILEDDFELMLVNARHVKQVPGRKTDMSDAAWLCQLAEAGLLKANFVPPKPIRDLRQLTRYRKTQIAERQREAQRLHKALEDTNIKLDCVASDLLGVSGRAMLDALGSGTTDPEILAELAKGRLRQKLPALREALEGRFDDLHALLIGAILAHLDFLDEQIDRLSDAIEERIAPFAGAVELLCTIPGVQRRTAEVIIAEIGPDMTVFPTARHLASWAGQCPGNDRSAGKQRSGRTRKGSRWLNAALKDAAMAAIRTKNTYLRALYDRHRSRIGHGKAIGAVKHSILVAVWHMLSTGQLYDDLGGDYFRRRDPTRTTKRLVAQLERLGHTVTLEAA

SEQ ID NO: 229397 - protein, 359 aa, unidentified
MTFSGHGKSSPAFIYKLDAGDPYSQYVPRENAMHNFTYIGIDIGKEEICCSLPDRRPFILANDRAGIKALLDQARIIDAPGNLCFVMESTSVYSSRAAEAILELADTWVAIVPPACVNGFKQAGLIRTKNDMVDAVAIRQFAEAKHPTPWLPPTEAQHRLRNLQVVMDNLVKAATRMKNVREKLVHEHRPDSCALASCERMIKLVGVELDELQAEIDRVIAADAVMAADSAHLLSIPSIGPRVRNVIMSVIYAQLRNLPQRKLLTHCGMSPKDHISGKHRGRTLMSKAGDARVRGALYMAALVAIQQGGLMHDYYQKQKKAGKPSKIAIVNVMRRLLYTIQGVVKSNTPFAIEVFQSRG

SEQ ID NO: 229398 - protein, 392 aa, unidentified
MQVIADRPEAPSVIRTNLDAIFASLELSHSTWLITSLSPGSGEKMSKHVVRGGDIAGLLQRFAQLREKALAQRCRNIPIIVIHEAGLDGFWIDRVLKNEGIESHVVDPASVATSRRRRRAKTDKIDGEALVRTLLAYKRGEPRVCAMVKAPTPEEEDHRRLSRERKVLITERVKHVNRIKGLLFSQGVFGYEPLRRDRRRRLDELRTGDGRPLPKHLKAQISRELDRLELLLEQIKAVETERDALLAAQQIAAPPSAAMLLAIKGIGPEFAAILWSEGLFRHFDNRRQIASYAGLAPTPWKSGSIDREQGVSKAGNPRLRTTLIQLAWLWLRHQPQSALALWFKERVVHNRGRLKKAAIVALARKLLVSLWKYVAAGVLIEGAIMQAAWCER

SEQ ID NO: 229399 - protein, 325 aa, unidentified
MTRIICGVDISSQSLDARIGREGAFAQFPNTTDGIHALRAFCQAHQVELAAMEATGGYEQLAFAGLSEQGLPVAILNPRSVRQFAQSMGSLEKTDRIDSGMIAWYAEVKKSQPVCLAPKSQQQLRALVTRLRQLTDARTAQFNQQRLVTDRTVQKLFARLLDEITRQIHVLEKKIAALLDKDPLWRELNLAFRTIKGVADRTVARLMAEMPEIGVLSNKSISKLGGVAPLAKDSGQHQGKRLVRGGRASVREILFIVASVVARYEPDFIAFQQRLRAAGKPPKVVRIALAHKLLVRLNAKARQVRQRMQVLESNPMAMPAASPAY

SEQ ID NO: 229400 - protein, 338 aa, unidentified
MKMYGAIDLHSNNNVMVLIDEKDKVVYQKRLANDLPLILEQLSPYASSLEGIVVESTYNWYWLVDGLMEKGHRVHLANTAAIQQYEGLKYTDDDSDARWLAHMLRLGVLPEGYIYPKQERAVRDLLRKRSQLVHQKTANVLSIQNLYSRTTGSSLSANRIKQLTPEEVERIFTAGDVALAVKANLTVMRCLEGEISSLERVVQTRVKLRPGYRYLLSVSGIGKILALTIMLETGEIRRFPSVGDFASYCRCVKSEKMSNGKRKGSGNTKNGNKYLSWAFVEAANFAIRFEPLIARFYQRKKAKTHRVVALKAVAHKLARACYYVMRDEVPFDVGRAFA

SEQ ID NO: 229401 - protein, 392 aa, unidentified
MVCVGIDVAKNKHDCFILSSEGEVLADVFTIANNRDGFETLLQRIRSCTQPSDNIKVGLEATGHYSYNILGFLLDNGLPTFVLNPLHTNLYRKSHSLRKTKTDRIDARTIAAMLMSDVDLKSYTDTAYHNEELKSLTRYRFDKVKERAKLKTSVSRLVNILFPELETLASSLHTASVYALLSEFPGAKQIADAHLTHLKTVLSNASNGRFGRQKALEIRDAAKRSVGSMMPAKSLELRHTIRLIHELDREIEEIEAQISALMETISSPITSIPGVGIRMGAMILAEIGDFSRFDSPDKILAFAGLSPSTYQSGNMNATGAYAHMEKRGSRYLRYALFNAAKYVCQWEPSFAAYLSKKLAEGKHYNVAISHAAKKLVRLIFSLQTSGQMYLPA

SEQ ID NO: 229402 - protein, 350 aa, unidentified
MMIIGCDLHTRYQQIAMVDTETGEFVQRRLEHESGEARGFYAGLKGAVRVGIEATGHTHWFEAMLSELGHELWMGDAAKIRAAVVRKQKTDARDAAHLLDLLCSERFPKIWRPGLAERDLRQLLWHRQKLVWMRGAVKNPMHALAMGEGVCRKKKLFTAKGRKELEGLMLGPWASYRRQELLRMFDELQGSVTKLDEAVEQAAQSQPLAVRLMTHPGVGPITSLAFVLIIGPIERFERSRQLVSYLGLNPREHSSGGRQRLGSISKQGNPMMRSLLVEAGHTAARLDPQLQRMYQRLKFRRGAAVAKVAIARKLAVRMYWMLRSPADYAQLVRMRGSSWATLVEDNPSLG

SEQ ID NO: 229403 - protein, 342 aa, unidentified
MEVDVLGIDLAKRVFQLHGATRTGVVVHRSKVSRPSFLESIRRLSPKLVVMEACSSAHHWARVLQRQGIEVRLISPQYVAPFVKTNKNDRNDAEAIVEAASRPSMRFVSIKTVEQQDLQALHRLRQLLVQQRTAIINQVRGVLAERGIVVAQSPTAFHRAMPTVLAGQDDELSQFCRGLLVELLEHLKSVEEKIDSCDARVKVFMASSQACKRIGEIDGVGPLTATAIVAAVGDASEFKNGRHLAAWLGLVPRQYSSGGKSKLYGISKRGDTYLRTLLIHGARAVLRYVAGKTDSQSRWLQQLIERRGYNRAAVAVANKNARIIQALLSSERAYVRPAAVGS

SEQ ID NO: 229404 - protein, 337 aa, unidentified
MEYFAGLDVSMEETHVCVVDRDGKIILEARTPTAPKTIAAALAKGPPVERVLFETGRMAPTLFHGLTALGMPVVCVESRQAYQALRSMVTLKTDRNGARGLAHLARAGFFKPVHVKSLPSHAVRALLIARKKLVGQRVTLENQIRGLAVAFGVRLPRGLSSGFSEKAMAAGRGIPGLDGAMRGLLAARDAILKAIVAINADMKSLERSSAACRRLMTIPGVGRLTALAFVAAIDDPDRFRRSRDVGAYLGLVPRRYQSGEIDYTGSISKCGDGRLRTLLYEAANVMLTRYRGSLALKNWALDIARRSTLRKARVALARRLAVIMFAMLKHGTEFQPA

SEQ ID NO: 229405 - protein, 349 aa, unidentified
MPKMIWLGMDVHAASITVAQYEDQAPTAMVQTIANDPAQVRRLVRRLPAGSDVRACYEAGSCGYGLHRQLTALGVHCDVIAPALIPRRPGERIKTDRRDAEKLGRFYRSGELTTITVPTPSQEGVRDLVRAREDVRRDRTAARQRLAKFLLRHGHRYPGSHWTKRHWEWVCGHTFDGPARTVFVHYCDHVLALNERLAHLEREIRTLAESAAYQPVVTRLSCLRGLATLSALVLIAELYDLRRFRTPRELMAYLGLVPSEHSSGARERRGRITKTGNALHPARQTRRVHQALTTQPPEVHAISDRALHRLTARYRRLLSRGKTPHHAVTAIARELCGFVWAIALVPDLA

SEQ ID NO: 229406 - protein, 355 aa, unidentified
MTSTKYIGLDVHKESISIAVMNSVGKVVMECVIETKASTILQFIDGLRGDVRVTFEEGSWAAWLYDLLKPRVTEVVVCNPRKAALLKDGSKGDRIDAHKLAELLYMNKIKSVYHGEHGLRTMKELARSYLTISADLTRVMNRLKSLYRSWGILCTGKEVYAPRYRAEWLGKIREAGVRRRAELYYQQLDVLRLLRQQVRQDLLVEAKKHKAWKLLRQIPGIGPIRAAVLIAVMQTPHRFRTKRQLWTYSGLALETHDSAQYHAVKGELQRSKRPATVRGLNKDHNHDLKDIFKGAAMRASTTAGPLHDFYENLLAKGRKPTMARLTLARKIAAITLIVWKKEVRFDANHLKQQAA

SEQ ID NO: 229407 - protein, 322 aa, unidentified
MSVSNQRCAGIDVSKSTLDIAISSIAQPFTVPNEDDGFNQILKELKRNETQLILMEATGGLESGVAGYLQSEGFDVVVINPRQARDFARAMGYLAKTDQIDARVLLQMAKVINLHPEREKYIRPLPDVHRQLLAAMVVRRRQLTIMLTAERNRLHPSHPQNHESIRFIISVLKSEMARIEAEMSAYISKNFSELSALLSAVKGVGAATVAVLLAEVPELGALSRREISALIVVAPVNRDSGTMRGRRTVFGGRASVRTALYMSALVGTRHNPVIKEFYTRLVAAGKPKKVALTACIRKLLTILNAMLKNNEAWDPLYHQHAS

SEQ ID NO: 229408 - protein, 379 aa, unidentified
MDDTIRFVGLDVHKRRTVVAIADSGRDGEVRQYGAVETERSAIAKLAGKLARGGKTLRFCYEAGPCGYSMHRWLTGLGHECEVVAPSLIPRRPGERVRTDRRDAVKLARLHRAGELTAVWVPDPAHEAMRDVVRARAVAVSAVRRARQQLSGYLLRHDRIYSRKAWTGAHRRWLAELKFEHAAQRVVLEDYIDAVGAAERRRDGLTEQIRELLPRWSLAPIVEAVQALRGVAAIAAIIIVAELGDPRRFDNPRQLMAYLGLVPSEASSGEKVYRGGITKAGNRTARRALVEAAWTYRFPARRSRHLLARCQAASPAIQAIAWKAQLRLSSKYRKLVGRGKLATVAVTAVARELIGFIWAIARELPAIPPEPVPSVSSQR

SEQ ID NO: 229409 - protein, 477 aa, unidentified
MNVKTSKAKKQVNLDNQAINLLSKEELGKKVEVVEKELKSYTWRELETNGKFAKNDKLSFITDDMLIVGCDVGSETHYIRAIDVRGREVSRGAFEFSNTEEGFENARTWMLILAAENGKKQIVLGLEPTGHYWFALAAWMISNGISVVQVNPYAVKQSKEIEDNSQRKDDRKNPKLIANLVKDGNYGMPYLPEKIYADMRRLSMFRDQLTEDRIRNINRLHRELKIYFPEYMDAFGKIDGAFTLEVLKVSAIPTDIVALGTDGLRNIWHNAKLRGRGYSRAHEIVSCAETSVGLTDGIDAGCEAMKWYAGQILKLDVQLAAIESTLHKKCREIPYAENILAINGVGENILSGILAEMGDISRFDDVKEIQKLSGMGLVACSSGKHKGQTKISHRGRKRLRYWLFQAAKSAVSHADEFKQLHEYYTTRADNPLKKMQLLIVIACKILRIVYTILKTGTTYDRQKMLKDIKRPVSSQAA

SEQ ID NO: 229410 - protein, 318 aa, unidentified
MKTQTNQNINVGVDTGKFTLDIYIRPLDIYFTVSNDDKGIKEAVKTIKKHKPERIVIEATGRLEMPFILACANAKLPFTIANPIHVKRFAGAIGQRAKTDKLDAQLIAHYSEAIKPPLSKLKPENMQAMSDLVTRRNQLLTMQTMEKNRLQIMPKELAMTIKPVLTLFKSQIIKIEDKIAKLIDSCPEYQAKNMILQSMTGIGKIAAASIISNLPELGYINSKQASALIGVAPINRESGRYKGKRKIQGGRPQVRTVLYMAMMSAMQSNPVFKATYQRLLAAGKPKKVAIIACIRKMIVILNSMLRDGVMWDATTVKN

SEQ ID NO: 229411 - protein, 392 aa, unidentified
MSKTIMIGCDLHDRSMLVRYAIDAGEPQQKSFRNDFEGRQKMIQQFSKLAAKHQIERIVFAYEASGQGYGLSDLLEENGIECYVLSPTLLPKTPKSAKLKTDAKDAQMLLEQLRGFVLAGNRLPVVWTPPQRLRDDRELIRNRIDIADESTRIKLQILSMLKRRGIEKPSFYGTWSKRFVKWLRDVANQLDPVVGPVLESLVCRFELFRDEMTKLEKRIRELSRAPRYADAHDALRKLPGVGLLTAMTFLSEMGDLTRFHNRREVGAYLGLCPASFESGETSNRKGHITRQGPSRLRRMLCQAVWVSLSRDAQISAAYDRIKGGKPQRNKKAIVALMRQLGIKMWHRAIACGVSTELAGRGGPHDPRTLARAQQRGTVPYVSPSPQPLASTG

SEQ ID NO: 229412 - protein, 372 aa, unidentified
MPQRSRVFVGLDTSKLKISVALAEEGRQGEVRFLGEIDNTPEAVRRLVGKLASRYSEVLFCYEAGPTGYGLQRQIAALGHECDVIAPSLIPKRPGERVKTNRRDALTLARLHRAGELTAIWVPDPGHEAVRELVRARDAAMADLRAKRQHLQSFLLRHGRLFPGRKPWTRAHARWLSELAFEHPAQYLVLREYRQGIEDAEARLERLTQQIADVVTTWSMAPVVEAYQALRGVALLTAVTFVAEIGDVRRFESPRQLMAYLGLVPCESSTGERVRRGSITKAGNTRVRRVLIEGAWTYRFPARMSRLLQERQANLPQIVRTIAWKAQVRLCARYRRLMAAGKRQTVVTTAIAREMAAFLWAIGHAIEPRSAA

SEQ ID NO: 229413 - protein, 316 aa, unidentified
MSKRTMVCAGIDTGKRKLDAALHRRRERLEVENSPEGHRKLSAWLREHGVKRVGIEASGGYEMDVVAVLRRDGFKVVVFQPAQVRAYAKFHLQLAKNDKIDASLIAACTAAAVNIHAPPDPRLAPLAAHLTWIDQIAEDIKCHKTRLETCRDTRAREFWTQEIARLEKIAKIERAALEKAIRQHRDLAERLDLIASVDGIGLKTAVIILVRIPEIGRLSREQVAALVGLAPYDDDSGDRHGRRQIAGGRKRVRCGVFAAALPASFHHNPQLIAMYQRLIAAGKEHKVALVACARKLVIFANTVVARGTPWQPQGAL

SEQ ID NO: 229414 - protein, 350 aa, unidentified
MLIIGCDYHPGFQQIAFVDTETGECGERRLTHREEAEQFYRKLQERSLRVRVGMEASGHARWFERFLRELQFELWIGDAAEIRTRRVRKQKTDRQDAQLLLRLMVEDRFPRIWVADAENRDLRQLLWHRHRLVQMRTRVMNQLHVVALNEGLRRKKALWRPAGRNQLESLKLAPWASRRRQDLLDLLDQLTPKIQELTRALEEEVEKRPVTRRLMTHPGVGPLTALAFELVIGTAERFHCGKQIASYVGLVPSEESSGDRRRLGHISKQGNTLLRFLLVEAAQVTVRSQAQWRSKFLHLALRRGRKIAKVAMARKLAVHLYWMWRWGWDYGQLEKLGSHAGEPGNPHGVQ

SEQ ID NO: 229415 - protein, 343 aa, unidentified
MEHFAGLDVSVKETSVCVVDDTGKIIREVKVASEPGTLLAVLKNPAYHLKRIGLEAGPLSQWLFSALAEAGLPAICVETRHMRAALKAQINKTDRNDARGIAQMMRAGLYRPVHVKTVRSQKLRMLLTHRKLLQSKAIAIENDLRATLRNFGLKVGMVGTVKFEARIKELVENLPDLTVLVEPLLIVRRVLREQIGILHRRLMAIVRDDDVCRRLMTVPGVGPVVALTYRATVDVPARFRNSKAVGAVFGLTPSRYQSGEINLTGAISRCGDEMMRAVLYEAAQVMLTRTIKWSWLKAWAMQIARRRGMKKAIVALARRLAVIMHRIWVDGSEFRWTREAAAA

SEQ ID NO: 229416 - protein, 407 aa, unidentified
MTVAVGIDIGSCSHAVAVCHEGAQEAERKGLKIAANRGGFDDLDAWLRRQPEPVARVVMESSGHYWFNLASHLRRQGYPVAVVNPLEAKYFGKRRLQRSKSDPADARTLATFAMVDQPPTRELLVGAELREASRFAMRLTREQGQVCQRILRLVDIGFPEFAEVWDDPTCVSALAVLRRAPTARAVARMSVEKLPQLRRPGSGGRAIGPSKAAELKRLAATSVAAPELEAQVGFEMRLLIGQYDLLEQQIEEADRRVAALLDGEVAQRLLTIPWVGPSTAGTLMAEIGDIWRFADVDQLLAYAGVHPREQSSGKKGANPETSWVMAKTGNAFLREAAYRMAVVGIQHNPVIRAHYARKRAAGKSRMNAVGHCMSKALSLVWGVWRGGKAFDAAHGSAAKAPQTAPEA

SEQ ID NO: 229417 - protein, 356 aa, unidentified
MPRQKSSKNPDSQNVYIGLDVHLRQWNVCIYQGGIARKPFQQSPSASVLLAHLKAHYPEMNYYSAYEAGVCGCSVHYELLAAGIENIIFNAADISQTHKERVRKTDAVDAAKIARSLAYGELRCIHIPPKWRLDDRNLLRLRSALVSDMKRLKSRLRHYLHVNGITIPPEFQPRRWPLAFIKWLKKTAIDNNNTTGSTLAMMVDKIENAVTELKNIDKLLLAMMKEKRYKSDYQLLRSIPGVGAQTATTILLECGDLADFGSADAFCAFVGLIPDIYRSDEHDGKCGITRRHHRVLRYMFTECAWRSIRKDPYLSGLYAGYCRRMPTTKAIVKIANKLARITKFVLKNKKAYVQTE

SEQ ID NO: 229418 - protein, 330 aa, unidentified
MKFKWFVGIDISKKTLDSALYDKASLKRSKHIKVSNDTKGFKEIIKWLKKNTTALDEVLICMEHTGVYGVDLAVFMNKNKIAYSMVSPLHIKRSLGLTRGKNDKIDSFQISRFCYLHREELKLSKLPSETIQKLRNLLNERERLVKMQAVEKQILKEFKASIPISSINRIKSRLVLFTGDIQTIEQEIGQVIKSDSEVCNNYVLIRSVPGIGLVNAVLFVIYSNNFQGFTDARKYACYSGVAPFENSSGTSFRGKTRVSHLANKRLKANLSNGARSAVQNDPELRLYYDRKAEEGKEHGVIMNAVKFKLITRVFAVVNRGTPFVRMRQAG

SEQ ID NO: 229419 - protein, 310 aa, unidentified
MEQLFIGIDVSQDRLDAHVRPSDQSFAVARDSEGLAALVERLKAFDPYLVVLEATGGFEVTVAAAVVAAQIPLAVVNPRQIRDFARATGQLAKTDALDAKAIARFAEAVRPEPRPVPNAQARALGELVARRRQIIEMMTAERNRRRQLTSQRLIKSVDRLLTVLQQELSELEQDLDQSIRGTPAWREREELLRSVPGVGNVVARTLIADLPELGRLDRKQIAALVGVAPLNRDSGKMRGKRTTWGGRAKVRCTLYMAALVASRHNPILKAFYQRLLSAGKPKKLALTAVMRKLLTILNAIVRDNIRWQSA

SEQ ID NO: 229420 - protein, 359 aa, unidentified
MKKIRNSILIGKEIFVGLEDSKKTWKICVRSGRTVVHETSMPADYDVLRNYFLNNYPDCKIRVMYEAGFRGFELHDKLVADGWQCVVTPPHTVTQEKCNKQKNDRIDSRRLAKNNENGDYRSCRVPSRQEREDRQVSRLCNQIQKDITRICNRIRRAIQYHGLERHFSLKDKWGPRHYREAEEMLTKLSISDSLRFTFQVYFKELHEVRTEKAEILKRLRALGKSERYKKVVSLLQSAPGIGPLTAIRLALEWGDIRRFGRKEEFAAFLGLIPSDYSTGENDHKGHITKQGNRQVRAWLVESAWISIRHDPVLLEKYQAVISRCGSGKKAIVAVARKLAMRLRGILLSGEPYQIGLIEG

SEQ ID NO: 229421 - protein, 449 aa, unidentified
MPRTRNKSSGLPIVNDRAAAIDIGSRFHVVAVAPDMCDEPVQTFQTFTTDLERMADWIVSLGVTTVAMESTGVYWIPAYEILEGRGIDVVVANARESRAVPGRKSDVNDAQWLQRLHACGLLRPSFRPSGEIAALRAYLRLRERHLDYAAAHIQHMQKALTFMNVQLHHVVTDITGATGMRIIRAIVGGERNPSVLAAMRDRNCKSSVETIQSALVGNYQPEHIFALQQALALYDFYQLRIDECDVQIERTLATLAAGKVLPQEALAKARSRAQQSNGLSFDARGALYQLAGVDLTQIHGIGPYLAVRLVGECGTDLSRWPSAKHFTSWLTLSPGCKVSGGKVLSAHTRKTTNRVAALLRLAAVTVGKSNTALGAFYRRLASRIGKAKAVTATARKIAVLFYNAMRFGMKYADPGADHYEQRYKERVVKQLHRRAAQFGFALQPVEGVS

SEQ ID NO: 229422 - protein, 308 aa, unidentified
MELFVGIDVAKETLEVCVRPDNVRKSFVNDDQGRVDMARFLAETKPALIIMEASGGYEIPVVEVLALRCLKVAVINPRQVRDFAKAIGRLAKTDTIDAEIIARFAEAIRPDVRPLKDKDAQQLQAFITRRRQLVQMLTEEKNRLPIAPSWTKPDIEAHIKWLTDCISKVEKDISALIRKTPLWKEKENLLRTFKGIGPVNACTLLARLPESGQLGRRKIAALAGLAPVNRDSGKYRGRRTIFGGRADVRAALYMAAVSAARHNPVIRAFYERLVHAGKLPKVALTACMHKILIILNAMVRTNTPWCAR

SEQ ID NO: 229423 - protein, 402 aa, unidentified
MNCVGIDVSKGKSMIAVMRPFGEVVVSPFEVRHTANELSELAGLLKSLDGETRVVMESTGNYHAPVAWLLHDAGLYVSVVNAMLVHDYGNNSLRRAKTDKKDAVKLANYGLDHWLILPRYVPEEDTRLMLKTCYRQYQQYSKVQTMLKNNLISLLDTAFPDANRLFTSPPRADGSEKWVDFVATFWHCECVCGRSEKAFTTQYQKWCRKHGYNFSEDKALDIYASACRHFGVIPKTDTAKLLVEQAISQLQTTSSALAALKQEMQSLAASLPEYPVVMGMFGVGPTLGPQLLAEIGDVRRFHSKKALVAFAGIDAPPYQSGQIDVRSRSISKRGSASLRRTLFLVMSVILQCAPIDEPVYQFMDKKRSEGKPYRVYMMASANKFLRIYYASVKAYLESLEHD

SEQ ID NO: 229424 - protein, 366 aa, unidentified
MKKIITGAKNRNEIFKQQQLTIGVDLGDRISHYCILDETGNVILEQSVPTTPKGIQQVFSKISRSRMALETGTHSPWVSRLLTQLGHEVIVAHARNVRLITESSRKDDRLDARTLAKLARIDPELLGPVRHRSAQAQIHLTAIRARATLVGARTALVNAARGLTKSYGERLPKCGTEQMNREIAKGLSPELRDVLEPLLGEIESLKERIAEYDRRIEQIAKEVHPEVALLKQVKGVGTLIALTYVLTLDDPHRFGRSRDAGCFLGLRPGRRNSGMSEPQMHISKEGDAYLRTLLVQGAHYILGPFGQDSDLRRWGLKLAERGGKNAKKRAVVAVARKLAVLLHKLWISGEVYEPLRNNHEVVSAVA

SEQ ID NO: 229425 - protein, 418 aa, unidentified
MEVLHERCAGLDVHKNTVVGCVRLAQGGRVEKEVRTFKTTTGELLALAEWLDGHGVNHVVMEATGVYWKPVWHVLDDGERQLVLANAAHVKNVPGRKSDVSDCDWLSDLEAHGLIRPSFVPDNQTQELRSLLRTRKQLVRERTSHTLRIQKTLEDANIKLDSVISNIVGVSGRRMIEALVAGESDPAALACLADRRIKAPPEVLCEALRGRVTKHHRFLLGLHLGHIDAIDEAIDKIDQEVAASLQPFCAAVGLLTTIPGVSDLAAQGIIAEIGLDMSRFETCGHLISWAGLCPRSDESAGKRRSTRIRKGAPWLKTLLVQSAWAASKTKATYLHAQFLRIRSRRGARKAIVAVAASILTAAYHMLKTATPYRDSGPQHFDSRHNQAQITKLLTRLRNLGVVAHFDTLKRPDQAAVSC

SEQ ID NO: 229426 - protein, 410 aa, unidentified
MIFVGDDWAEAHHDVYVCNEAGTKLASKRLPEGIEGMARFHDLVATHADGPGDVIVGIETDRGLWVQALIEAGYVVYAINPKAASRYRDRHTLSGAKSDPGDAKMLAELVRTDRHNHRQVAGDTALSEGVKVIARAHQTLIWERTRATNRLRCSLREYFPAALDTFSELADRDTLAVLAAAATPSEAAKLTPAKIRTVLRRAGRQRNIETRADAIAAGLRSDALRAPATVEVAHGATTRSSVAILAELNTQIDALAAELADHFEQHPDSDFYLSLPGVGVVLGARALGEFGDDPNRYADAKSRKNYAGTSPITRASGTRSVALARFVRNNRLADALDQWAFSSITASPGARAFYNRRRAAGDSHHKALRALANRWVGILHGCLDHRTCYDENTAWAHRIDIDLKKIAQAA

SEQ ID NO: 229427 - protein, 340 aa, unidentified
MKKVSTIGLDLAKNVFQAHGADASGAVIFRKKLRRAHVLEFFATQPACTVAMEACGGSHFWGREIGNYGHRVRLIPPAYVKPFVKRQKNDAADAEAICEAAQRPTMRFVAVKSEAAQGAAVVFRTRDMLVRQRTQIINALRGHLAEFGLIVAQGPAHVAKLIMAVQDPKQPLPEAARPILCVLVDMLNLLDQRIKLLDIAIARRAKEDEVARRLMSIPGVGPVIATAVAALAPPAETFKRGRDFAAWLGLTPLQHSTGGKQRLGATSKMGERTLRRLLIIGASSVVRWAARKGAPAGSWLASMIARKPAMLVRVALANKMARVIWALMAKGGTYRAPVVA

SEQ ID NO: 229428 - protein, 376 aa, unidentified
MQQRSIILGLDVHKETITAARADRSGGAPISVGTIPNDPQAVVKLLRKQGPYEQIAACYEAGPCGYGLYRQLSGLGVECTVVAPSLVPKAPGDRVKTDRRDAQHLAQLHRSGLLTPVWVPDADHEAVRDLVRSREQARQDLQRARQRLAKFLLRLDLAPPSGVRAWTKGYHRWLDARHLEHSAQQLVLAELVEMEAHAKRRIQRLDTAIADHMQASTLAPLWQALQTMRGVSTVTASVLVAELGDLSRFPHPRQLMAYAGLTPSEHSSGSRQHRGGLTHTGNSAVRRVLVEMAWHYLRRPHVGAPLKMRQRGQSEVVIAIAWTAQTRLYPRFHRLLYRGKPKPQAAVAIARELLGVIWEIAETVRMIEPTPSPQPR

SEQ ID NO: 229429 - protein, 410 aa, unidentified
METIVERPAALDVHKAQVTACVRVPAAAGVGREQHLAEFATTVRGLLALRDWLAAHRVQQVTMEATGVFWKPVWAILEDEFPLLLVNARHVKQVPGRKTDVSDAAWLCQLAEAGLLRASFVPPKPIRALRNLTRYRKTQIQERAREANRLHKALEDTGIKLDCVATDILGASGRAMLAALIEGTTDPQLLAELAKGRLRAKLPALREALEGRFGGLHAVWVGAILAHVDFLDEQIDRLSEAIEEQIAPFAKAIELLCTIPGVKRRSAEVIVAEIGVEMSVFPTPKHLASWAGQCPGNDQSAGRRRSGKSRHGSKWLDWTLEEAALAAVRSKDAYLAAQYARLRPRRGHKKALGAVKHSIICACWHMLTTGELYHDLGGDYYQRRDPERTTRRLVAQLEALGHTVTLQEAA

SEQ ID NO: 229430 - protein, 371 aa, unidentified
MSELLAETRPARLRVEASPRPPGARKPETELGAVSTTAVPHPDSRSGPSPHLQGRVMDEQRTVFVGIDVSKDRLDVHLRPSGEAFCVPREGKGMDDLVIRLQGLSVALVVLEATGGFEATVAAALAGVGLPLCVVNPRQIRDFARAMGRLAKTDTLDAEVIALFAERVRPQARPLREPERVHLAELVGRRRQIIEMIGMETNRGRQAIDKPLARRLARHVAYLQKELDAIDHDIGDAIKHSPAWREAEALLKSVPCIGDVTARTLLAELPELGTVSRHQVAALVGVAPINRDSGLMRGRRAIAGGRTSVRAVLYMAALTAIRRRSPFRAFYDQLTAHGRPKKVALVAVMRKLLTILNAILRDHTPWRPLNA

SEQ ID NO: 229431 - protein, 387 aa, unidentified
MSEAFDPRKSATAFDQASTLVVVLELSGKSWRVGASVPGVSRRPLRTIAARDIDAVLKTIERWKEEARKAGCEVRRVVAGYEAGLDGFWIARALTAHGVEVYVMHPASISVERRGRRAKTDRIDVDILLRTLLGWLRGEPRHCTMAPIPSETEEDMREPGRQREALTAARLKVENQMRSLLARFGVANFRPRLKKAAEHLARLRTVDGRPLPPNTMASLERLLAQHRLLSEQLKEIETAREKVMAVADPDRLQRMIQMLAGLVGVGVETATTLVHEVFSRRFRDRRALAAFVGMTGTPYDSGGSTREQGLSKNGNPRVRRMLTQLMWRWTIFQPQSALARWFVARTGGAKGRMKKIMAVALARKLLVALWRYVEDGVVPEGARLAAA

SEQ ID NO: 229432 - protein, 300 aa, unidentified
MNNTNTKSTSGSEGNEAREQHKGDRVLKLGLDLHYRQVTVAMQEDGGRIKGAGKMSHQAFGHWMDKKLAAGWQIESCYEAGASGYWLHRQLVALGVKNLVVAPKAMGQGGKRQKTDRRDSAELVDGLDRYLRGQDKALSVVAVPSVEGEEKRALIRYHRQVMADRSRCEGRGKGLLCAQGIEVRGRWWQAKGWRELNADPGLKDWMKEQLEAWRQKVLSAEEEQRELRRRIEALAPAMRPKGVGAYSTAVLEYEMKGWQRFHNRGQVSSYTGLCPGIHQSDGRGKEGSINRCGNRVVRWN

SEQ ID NO: 229433 - protein, 312 aa, unidentified
MTNQVFAGVDVGKDKLFVNIHQERQVRDYPNTHSGLGRMSRYLIKNGVDLVVMEASGGYERLPASDLRSDGLSVAVVNPTFIRRFAQGMGTLAKTDTIDARLIAHFASVKQPKPQLNKAADEEALSALVERREQLVSLLSVEKNRFSKASEYSKVSIQISIQFLSEQIGSIETEIKALVAKSPERLARMRCMCSFIGVGNITAVTLLTEMPELGMESGKRIAALAGVAPINHDSGKMKGKRRTYGGRARVRRTLYLAALSASKHNPVIRPFYERLIAAGKEKKVALVACMHKVLTILNAMLRKGELFNPVRS

SEQ ID NO: 229434 - protein, 410 aa, unidentified
MKHAPEHTTGTNVAIRLPAAPPGGLTAGLDWARDDHVVCVVDTSSGAVRDRFTVEHTAAGLSAAVIRLAKLGCAEVAIERPDGPVVAELLEAGLMVVVISPNQLKNLRGRYGSAGNKDDRFDAYVLADTLRTDRARLRPLTPDSPATVALRGTCRARKDLVGHRVALANQLRAHLQTAIPGAVGLFHELDSAISLKFLTRFDTQDKLDWLSPKRLAAWLANAGYSGRIDPAVLHGRLAAAPRGLTGADGAAPAHTTRALLTVLASLVQQIKALSEQIGEQLDLHADAHIFTSLPRSGTVRAARLLAEIGDCRARFPTPEALACLAGVAPSTRQSGRSRSVGFRWACDKQLRDAVCDFAGDSRHANPWAQDLYTRARGRGHDHPHAVRILARAWLYVIWHCWQDNTAYQPT

SEQ ID NO: 229435 - protein, 520 aa, unidentified
MARTRSRKQRRSRRPQVLQKPRGTFHPRVQRVGPEHFGIVSVDPAKARSKWMLCDFYGKVLVPPTFVPHHRGELQAALATLRDAVQTHGLKDLLVAVERTGRYHHPIKHAFAAAGFEVRIVHPFATKQFRQASDPGQKTDDTDLAAIHRAASSGFALAEAPLDRPWRELQLLVRHRRDLVHKSSALCCQIREHLDAALPGYAACFAELWESPLALHLPRHLGSSQAIGQAGLEGLRARLRQDRVGFQERSLHRLLVWASQAPPPDVAAERHLAIALLLDDDRRQKRHEIQALEQQIAAHLTRTPYVLLLSFPGIHVVSAADFAGEMGPISHYANSRAITGRAGLYPSRYQSDQVDHPHGPLVRCANRKLRATILAIADNLLACNRHFAALAAHWKAAGKDPRKTHVKVAARFCRIAYQIVAGRQVFRHPSLPGRSYILQKLLDFQSQHQTPTAECLAQLQAATDQLPRREHAAEAAPLVRALRHTRQARRRGPQPLGQILPIVLARLGVTPVQSPESGDS

SEQ ID NO: 229436 - protein, 352 aa, unidentified
MREYIAFDSHKRYSLVEREDVASGKIVQQVRLTHGPGAVRRYLARCTPGTAVALEATGNWYWIVEEIEQAGLQPRLVHPRKAKLMMGLINKTDKLDVHGLNRLQRNGTLPTVWIPPRPLRDLRELTRTRLVLVEQRTRLKNRLTATLAKYGVPPSEYSDAYGKSARAELEARIEPMPEQTRWVCKQLLAQIDFLVRQIRQLEQRLEDLVEVTPEMERLMTLPGIAEILAATIALEIGDIGRFPDAPHLASYAGTTPRVHASGGRVRYGRLRADVNRYLKWAFVEAANSVAVNHRRCPERHVSQLYDRLRQRKGHHKAIGAVARHLAEAAFHVLRRQEAYRDPVLERGCTGEV

SEQ ID NO: 229437 - protein, 408 aa, unidentified
MDVLYPRCAGLDLAKDTLVACVRIHGRPVQQETRTFGMTTRELLTLATWLAEHGVTHVAMEATGSYWKAVWYLLEETFTLTLANAAHIRNVPGRKSDVKDAAWIADLLAHGLIRGSFVPPAPIQEVRDLTRTRKQLVREIAQHTQRIQKTLDTANLKITGLVSNIIGVSGRAILRALIAGQTDPVQLVDLARGTLKNKRAALVDALTGQVRPHHLRLLKLHLDLIEQLERAVADIDTQLGEALAPFREAIARIDAVPGIDTVVAQAILGEIGLDMTRFPTHQHLIAWACLCRRLDESAGKRKSTRTRKGACWLKTVLVQAAWAAVRTKNSYYRAQFLRLRARRGPKKAIVAVAASMLTAIYYILRDSAEYRELGGQYFERLDRTKATQRLVKRLRDLGYRVQLEEVAA

SEQ ID NO: 229438 - protein, 372 aa, unidentified
MQSYYVGLDVHSRESVFVVEDDAGTIVARGSIPTTVNGLKQLRDRCGLPAATGVALETGASAFFVARELARLELKPVVIDAHEVRRKAQRPEQKSDTRDALELCEGLRRGFYRSLVHVPTPAISDLRTTLSRRRHFIRIQTAEVNAVKRLLRGVGQNSGQRGSLRTDAHWQGLLAGNLVPEQIQEHVRHHYAVWRQAAEQARALDLSLGDRARERREAVKRLETVPGVGPIVALTAIAVFAEVSRFPSAKHAASYAGLVPSTFQSGERDAHGHITKRGSAELRAMLCEAAHHARRSTHPLHPHFARVCARRGYKAAVVAVAHRLCRILFAMLRDGTDFSVTRTGVEQGAFERTTTYKYRLRPKPAGRLPVAG

SEQ ID NO: 229439 - protein, 401 aa, unidentified
MNANPSGRVLLVVMARWVPEWRRHRCAQDVIDHGLHKHHRRPEMNRKTGMNAGQILGTIDGLQVVGLDIAKLVFQMHTVDMATGEIVGVQIKRAKVLEHFANRAPCLIGMEACGGAHHWARELQALGHTVRLLHAKAVRPFVSGNKTDAADARAIWLAVQQPGTKCVGVKSLAQQATLTLHRQRELLMKMRTMQTNALRGLLYEFGATFAKGTKTMLGEVEVALEALSNKLPQMVADSLREQVLRIKALGEDIAAIEKRLALQLRQDADMRRIADIPGVGVLTATAAIATMGDPRAFRSAREFCAWLGLVPRQWGTGGKVRLQGISKRGDAYVRTLLIHGARSVLMHAKEPGPWLEQIKARRPANVVVVAQAAKMARAIWAVTARQQEYHRGYRSVRPQAV

SEQ ID NO: 229440 - protein, 384 aa, unidentified
MTLAYWDFCRCKRLDYQIIILYMTIQERQRTLFVGVDVHKDTHTAVGVSPFGEKMFEMTIGNGEKDFQSLVERTDGAAKEAGLVPWYGLEDVHSWGERLSAFLVEEGLPVCAVAPILVDRLRGMQTHPEKNDSLDALGVAEVMLRKSDSLPAYTLTEDAKKAKQIRELSVEREWLVDERTRLKNQLHNLLHRVHNTGYRTMFKDPFSKKALAYWMKSIPKNTEPILASRTKRAVKRLQNLRDDIIAIERDLESLVLKSGHTLTSASGCGVVIAAEIIGEVGDIKRFKSPGSLAKYAGCAPRECSSGKTIRYRKTRSGNRRLNRSFHRMALSQISRMGNPLALAYFKRKVSEGKSKSQALVCLRRQMVPIVWMMMKHKTTFRYPQ

SEQ ID NO: 229441 - protein, 380 aa, unidentified
MPEAVIGLDVGKSSHWACVATRDGEVLLSAPVANREDDLDSLFGRFPDALVVVDQSRNIGALALARARAAGMSAAYLPGLAAHGAARLFAGDAKTDERDAMVIAKTALGIPDALLPVGDPGPTIAAARALAAQRNFLTCENTRNKNRLRSILLESCPAFEALVDLSDGPQLRLMASLGGAWSVADAGPRRAAALTRGAARGKIEALVRSTTSSTRPDASVVAAEDRAVKLLARRISENSAEIEAITAEISALLEGDDTYRCLLTVPGIGPKTASELAISIDIEDFPSHDRLASYCGLAPRNRQSGTSISSVTASRQGNKRLKNLLIFSCNCLTRTEGRWGDYYTRCRERGMSHGKALKALARKRLKVIYAVMRDRVPYAA

SEQ ID NO: 229442 - protein, 347 aa, unidentified
MIIIGCDLHTRFQQIAMLDTETGEVVEKRLEHEKGEARRFYEGLKTPALVGIESTGYSLWFAEMLGKLGHEPAVGDAAKIRASETRKQKHDRRDAWHILELLAEGRFPRLWLPSVEEREVRVLLEHRHQLVQLRTRAKNGLQAVALNHGLRWRGRLWTEVGRKRLEELPLGEGSKRRREDLGCLLQQLDTWVEELDERLKAEVARRPSAQRLMTHPGVGPLTALATVLILGPAERFAEVRQVTSYVGLIPAEESSGGRQRFGHLTKQGNRLLRFLLVEAGQSASRMDPGLRRTYKRLTFRKGRSIAKVAIARKLLIRLYIMLRDKIDYQEFCRRGSHAGMLGEVALA

SEQ ID NO: 229443 - protein, 319 aa, unidentified
MTRVICGVDISSESLAARIGRDGAEASFANTPQGIAALAVFCRTHQAELVVMEATGGYEQRAFQLLWAEQLPVAIVNPRAVRRFAEAMGLVEKTDAIDAGMIAWFAETRRTLAQPPASAQQQHLRALVTRLRQLTLVHAAQRNQRRLVTDAAVLAMTDQLLALVQQQIGELETAIAALLASDPLWSELDQQFRSIKGVASRTVARLMAEMPEIGTLSAKSISKLAGLAPLARDSGKHQGRRMIRGGRAPVREILFVVASVAARYEPDFTAFHQRLRLAGKPPKVVRIALAHKLLVRLNAKAREVRNRITPVTPALLVAA

SEQ ID NO: 229444 - protein, 356 aa, unidentified
MNGPKHQMEKRSMEHFAGLDVSVNETSVCIVDETGRIIREVKVASEPDALLAVLKTSAYRFKRIGLEAGPLSQWLYNALGEANLPVICVETRHMRAVLKAQINKTDRNDARGIAQMMRAGLYRPVHVKTLRSQKLRMLLTHRKLLQSKAIAIENDLRGTLRNFGLKVGVAGAVKFEARIRELIKAFPDLTVLIEPLLVVRRTLREQLGVLHRHLLAIARDDEVCRRLMTIPGVGPVVALTYRATIDVPARFRNSRAVGAVLGLTPCKYQSGESGYTGSISKCGDDMMRVMLYEAAQILLMRSTQWSWLKAWAMQIARRRGMKKAVVALARRLAVVMHRIWVEGTTFRWTREEAAAA

SEQ ID NO: 229445 - protein, 345 aa, unidentified
MTVYIGVDFHARAQTISYLTTEDGEIQRLQLDHGQPDEIRAFYQQFAGQRVLVGFESSGYAAWFEELLEELGYEIWIGHATAIRLFARRRQKNDRRDADLILDLLWRGDFPRIHRYSPQSRAVLQQLRYRQRLVKMRTMVVNSLVFMASSRGVSLRTQLKSRRGIERLQQIALPQPLIEQRAEMCQLLQELKTKIDRVENWLAAKAEANVGVQRLRTHYGIGPLTGLCLVHTLECVERFANARKVTAYVGFDPVEDSSGERRRIGSISKQGSRLLRFYLVEAGQIAMRKDPDLARVYHRVRLRRGHAKAKVAVGRRLLVRAFIMLRDEIDYAEFQRRGVAARSSR

SEQ ID NO: 229446 - protein, 437 aa, unidentified
MRVVHEHVAGIDVHKDMIKVAIRSPGEKDTRKTEIFEFRTFYGVLQEVARELRRRGVTHVVMEASGVYTEPVYHAMCEQDFTEVAVVNPAHVKALRGHKTDAADCKRLAGLYECGLLRGSYVPSAEQKEVRDLTRYRMKTVQARTSEIQRLGKALESAGIKLGSVVSEITGASATAMIDSLIDGERRGAVLADLAHWRMRAAGKTADLSMALTGRFTGHHALMCRLHRDRIALFDEAIAGLDEQIAAGTARWAREAGLLKSVPGFGDVVSQGWLAEIGPAPHLWFDSHEKLACWVTVCPGNNISARKRKHGRTGDAGTYLKPLLIQAAWNAIRTRGRLQARYNRLVRRFGGTKNPGAKKKAILAIAHTLLKIAYQVLKSGTPYQDLGADFYTRRESPAQRQAWLERQLQKLHPGHTVTITIGPPPGGPAEAALPPRR

SEQ ID NO: 229447 - protein, 382 aa, unidentified
MHYRTSSQHTDETVIHAALELSKNSWLLAIEATEHNRPSLHHLKGGDSSALLAKLHTACEQFECRTGNRAKIVLCYEAGYDGFWLARLLESHGIDCLVVDPASLQVDRRARRVKTDRIDVEAILRTVIAWRRGERHVCSLVHVPSRDEEDLRRSHRERDRLVKERTAHTNRIKGLLFTQGIRDINLRRRRKPLVIDFADLVTGDGRCIPPRLKSEVERELQRLALVDEQLAIAEAERDQVAKQCEDSEKKRRQLALLRGVGETGAAILVREVFYRTFSNRRQVGSYLGLAPCPYDSGSSTRSHGISKAGNARARSTMIELAWFWLRYQPDSQLTLWFERRVTGQSKRIRRIMIVALARKLAIAFWRYVETGLVPSGAIVAKV

SEQ ID NO: 229448 - protein, 337 aa, unidentified
MMYSGIDLHSNNSVIAIIDDGDRVVAQKRLPNDVVKIVGFLARWQEQLAGVVVESTYNWYWLVDGLQDAGFHMHLAHTAAIKQYEGLKHSGDETDAQHLAHLLRLGILPTGTILPREHRAVRDLARKRMQLVQSCTAHVLAVENIMARQLAGRMTSNQIKRLTDDAIDSLPLAADVGLAIKANVAVIATLQSQIELLEKRLQERVKPRPQYGLLTSMPGIGQTLATVIFLETGPIDRFASVGNFASYARCVDSVHTSNRKKKGEGNVKNGNKYLAWAFVEAANFARRFCPEARRFYERKKARTNNIVATKALAHKLARACYHILKEGKPFDVTRCFT

SEQ ID NO: 229449 - protein, 327 aa, unidentified
MTASVSSHNHIFIGIDVGGASFEAAWHRGGCTQYQNRPDAIAAFVARLSAEKQIIRIAVEPTGGYEKRLVKALRGAGLPVEMVHTSRFAAYRTLIGAKAKSDTSDARLLAAYAAAPEEVRGRKAGHVVLPQDDVREQLAELAARRDQLKHMIHAETCRLSTVRSRSIRDDITAHLQALRQADCKTYDAMMQLVRQRDELRNAKRLLQTIKGIGDKTALTSIAAVPELGLISNKAAAALVGVAPFVRQSGTMRAPAHIRGGRAAVRNAFYMAAVTASRHNPVLAPFYARLIAAGKPVKVALVAVMRRLVVFANAVLRSGQPWKGAQID

SEQ ID NO: 229450 - protein, 338 aa, unidentified
MRTYAGIDLHSSNCYLAVIDEQQRRLFSKRLPNSLGHIQAALQPFKDELMGVVVESTYNWYWLVDGLQEEGYRMHLANPSAIRQYEGLKHTDDQWDAFWLAQLLMLGILPQGYIYPKAERPTRDLLRRRLLFVRHRTAHILSLQSMVDRCCGRRISVHEIKQLTPSEAEALFSETQLGLTARFQVETIGFLSQQIRSIEKAVLAKVKLRPEFVILLTIPGIGKILALTIMLEVGDIRRFAKAGNYASYCRCVKSQKLSDTKKKGEGNRKNGNRYLSWAYVEAANFAVRHSPRAKAFHQRKCAKTKNVVAIKALANKLARASFYILRDQSAFDEKRLYG

SEQ ID NO: 229451 - protein, 426 aa, unidentified
MNETDDIRLKEFHQLKNEIRGSKEHLIVGIDVAKEKHHAFFGTATGKTLLKRLVFENTIEGFEKFFAHVKALKAQHGLKKVVFGLEPTANYHKPLGEHLIKCGYQVVLVSGVAVKRNRELLDGRWDKHDAKDSANVADLISQGKCLYYEYPPMVLRDLRNLLSLKRRLKKEEHGYRVRIRNHLLAQYFPELDGYYGSRESEAIVRWCLEPSRIAGLEVKEFGCLVGGGKRNIAQQRRLEAIWQKAIDSIGCEAGESVEFEARIMVEGLRGIRETIKATEGKIEEICLSFPEYAYLRSIPGFGPDIASKVLGAIGNPDRFHSTKQVLKMAGLDLSANRSGKTSDTATPVISKRGKADLRYALYQAALIASTKNRYFMAYYTDKFLGREKEKGIKTKMRVKLAAKLLVIAWTLMKKKEAFNPEYLNNE

SEQ ID NO: 229452 - protein, 340 aa, unidentified
MNTITIGLDLAKSVFQVHGVDAGGHVTVRRKLRRAELLAFFGSLPACLVGMEACATAHHWAREIAALGHRVRLMPPSYVKAYVRRQKNDAADAEAICEAVTRPTMRFVPVKSAERQGVLVLHRTRELLVRQRTMLINAIRGHCAEFGLVVPQGARRAAELVERVRHGETHGLPDLARSALLMLADQLNALACQIHALERRLLAWHRQDQASQRLATIPGVGIITATALSATVVDPSAFRSGREFAAFLGLVPRQNSSGGKDRLGRISKKGDGYLRKLLVVGATSVIRRARTGAMAAGPWIRSLLERRPARVVTVAMANKTARIAWAVLKRGEVYCPPVAA

SEQ ID NO: 229453 - protein, 340 aa, unidentified
MNGTTYGLDVAKRVFQLYWVDGQSGEVVNRRFGREELIGFLAKRPAGRVALEACGSAHWWARKIAALGHEVVLLHARFIRPFVQNNKTDAADARAIWTAAHQPGMRTVAAKTEDQQAMLGVHRMRALLVKFRTMQLNQLRGLLYEFGVTFRAGRVAGLAEIRGRMAQLEGALPGALLSGLQDQLQRIDALQIDIETLEERIGAWNKQEAACRAIAQVPGIGRLTATALVATMGQAQAFRSGREFAAFLGLVPRQSGTGGKLRLGSISKRGDTYLRTLLIHGARAVLTHAKAPSPWQQEIRARRPANVVAVALANKMARTAWAILAHGRAYQRDYVSVKPA

SEQ ID NO: 229454 - protein, 341 aa, unidentified
MEHTLIAVDLAKNVFEIAVSERPGVVTRRRRLRRSKFLEFFVRQEPATVLLEACGSAHHWGRKIGELGHRVVVLPPHLVHPYVTRNKTDRSDAKGLLEAYRNKEIQAVPIKSLEQQGLTALHRLRSAWQAERTARINSLRGILREFGLTIPVGANHVVPCVWEFLEDAETPVPDFLRPALAEVACEVRQLEERVKGIEVQLKQLVAQSAVAQRLLSIPGVGLITATALIAFVGDVQRFRSARHFASYLGLTPRERSSGSRRRLGRISKRGDVYLRMLLVHGARAAARRSKQQPDRLRAWALKLHARSGHNRATVALANKLARIVWATWRREVNFVSQPVAA

SEQ ID NO: 229455 - protein, 392 aa, unidentified
MYIVGIDIGKNHHEASIVSPEGKQIGRSLRFATTHKGADSLMSFIFKNIGNSPCVFGMEATGHYWYPIYSFLKAKGYTIYVINPIQSDSLRKMYIRQTKNDSIDSFLIAKVIRFGQFGTTSMADENILAMRQLCRYRDSVISSRTEIKLRIGTIMEQIFPEYEKQFSSLWVSTSMGILEKYLTPENIENAPIDELFEIIKDKSHNRLTKAKAISIKEAAADTFGIKIAQDAFSFQLKQLIDRMNFLDKQIEALDIEIMKYYEQFDCYLHTIPGIGMIATATILAEIGDIHRFKSSSALVAFAGIDPTVRQSGEFNSTHNHMSKRGSPYLRHAIFLAATTCSFHNSPLNAYYKKKRDQGKHHLTATGAVARKLTTVIYAVLRDSKPYEPKKFC

SEQ ID NO: 229456 - protein, 353 aa, unidentified
MQKEKVIKQSVGIDCGKVELVVAYGVMQVGFEEKIISNTAFKNNAEGFKKLQKWASKLTDPAVELVYVIEATGVYHEKVSLYLHNEGCKICVMLPNKVKSFSQTLMVKTVNDKTSSQAIAYLGLEKRLDAWQPPHPVYRELKQLTREREQLIEERTLCKNQLHAEESGAWPNTRSVKRIKQRVKLLNKQMTEIEADIAAIVAKHEWLKKKLEYVCSIKGVALLSAVIIVAETNGFNLVRNKKQLVSYAGLDVVEKESGISVKGKTKISRKGNKYLRKSLHFPALVAIRHNEQMKAMYNRLLSRHGIKMKAAVAVQKKILEFVYVLWKKEEMFDQQYLKNKGQQLKVATLCELT

SEQ ID NO: 229457 - protein, 533 aa, unidentified
MATKRNPRKSRTISPAVLGKPKGVIQARVQKVGPERFGIVAVDCAKARSKWMLCDFYGKVLIPPTVVEHQRNALELATLQLHEAIEKHGLQDHLVAVEMTGTYHRPVQRAFRKAGSETRLVHPFASRHYRLPAHADSKTDDHDLEGIFRATVNGFGLLEPEWDETYRQLQVLARHRRDLVQKRAKLQNQIRQLLERCLPGYAAMFPEDDLWTRPVAMAVARRAVRPEVILAAGVTGVWCWLREDKVQAQSRTVERLLAWAGNAAAADPLCEHLARVRQALYEDWQAKTRQIDRLEEDLAGILVKTPYLLLLSHPGINVVSASELAGEMGPIEHYAHAKAVSGRAGLFPSRYQSDEVDRADGPLARFRNARLRAAWMRVADCLLKSNAHYRGKAEFWKQRGVDARDIRCRVANRATRTVFQMVSGRRLYQHPSRLDRSYILDKLLKFHQEHDTVPLDILRDLREAAAQIPQGEHAKEAQPLQETCRKARRSRRQGPQAIGEILVAVLAKLGVGEVESGLEAPSPDAKVSGTSSR

SEQ ID NO: 229458 - protein, 355 aa, unidentified
MNDAKYIGMDVHQATISVAVRDSRGNLVMEAILETKAETILQFIRGLRGGLYVAFEEGTWAAWLHDLLQPHVARVLASDPRKNALLKAGNKSDRIDARKLSELLYLNKLSPVYHGEQGIRTLKELARSYITITRDLTRVMSRLKAIYRGWGIPCAGQQVYAPRYRAEWLAKISEAGVRRRAELYYHQFDALAALRQGTRRELLAEARKHPAMRLLRQIPAIGPIRAALLIALIQTPNRFRTKRQLWAYCGLALRTYTSGEYRFVGGQLKRSKKVLAVRGLNINHNHDLKNIFKGAATRAAATAGPFQDFYQATVARGMKPHLARLTLARKIASITLLVWKKGARFDAEHLKQQAA

SEQ ID NO: 229459 - protein, 350 aa, unidentified
MTIVETRAETRVITGGVDTHADVHVAAALDPVGGLPGVREFPATTAGYARLPGWLGGFGTVALVGIEGTGSYGAGLARHITAAGIRVVEVDRPGRQDRRRQGKSDPLDAVSAARAARSGRARGASKGRDGAVEAIRALMVARRSAAGERTRTINQARALILTGPDDLRARFAKHAPAALVTGIASLRPRPGDVAGYPTRVALRELGRRAVFLDGQLERPGELIVPLVTGRAPGPLALYGIGPNTAALLLIAAGDHPGRLRSEAAWAHLCAAAPIPASSGKVTRHRLNPGGDRQASHALWRIVFTRMGSDPATRAYVERRTKEGKSKAEIIRCLKRYVARQVYPHLRPAAD

SEQ ID NO: 229460 - protein, 410 aa, unidentified
MVKENFIYVGIDLHKETHTAVMIDCYNQKLGEITFPNRPADFPKLVTKVKKCNTDGKEVVYGLENAYGYGRALAVWLIDKGYLVKDVNTAISHRQAKHRGAMYRKSDSDDAEAIALATLNMLDKLPDAYPNDAYWSLGQLVHRRDNIMKQRTRLVNQLHEQLCIAYPSYKQFFNDISRPTALYFWEHYPSRKYLKGKSVEDLRAELVPVSHNKCSTKTCEKILYAVASDKVKNNAYQDARDMVTLSIVSDLQYYDKQLAEVDKMLEQMYKMLGCTLTTIPGVNVITAVKILAEIGDIKRFSNANKLAQFAGIAPLHLSSSGKGKDVATKQGNRRLQATIYFLAIQMVQVSSKSTPRNSVVRAYYEKRKAEGKTSQQALICISRRLISIIYGMLKHGTEYRMPVVESAGEK

SEQ ID NO: 229461 - protein, 412 aa, unidentified
MTDETRRWFAGVDWGSEKHQVCLLDDAGAVVGERAFRHDAAGLAALCDWLVSVAGAAGAVAVAIEVPHGPVVDALLDRGFAVHAINPKQLDRLRDRFSMAGAKDDRRDARVAAAGLRTDPHLFRPLQVGDPAVIELREWSRLAEELQQERVRLANRIRQQLWRYYPQLLELTDDLTAEWILELWAMAPTPARAARLREATIAKLLSQHRIRRLDAAGVLGVLRQPAITVAAGVTEAAVLHLHSLVARLHLANTEFHQAERKLDELCAGLSQNAGAAAHGPGDAAILRSLPGVGTVTLATLLTEAGDPLARRDHAALRTLSGVAPVTKRSGKTRVVIMRYAAQVRLRQAVFHWARVAILHDRKSRSRYHALRARGHSYGRALRGVADRLLGVACVLLRQQVLFDADHGKPAAA

SEQ ID NO: 229462 - protein, 358 aa, unidentified
MSEITRVGVDLAKNVIQVHAVDAGGKLVTNKALQRDKFMQWCALLPAHCLIAMEACASAHHWARKLVALRFDARIIAAHLVSPYRLQGKGGKNDANDAAAICEAASRPTMRFVAIKTLSQQGMLCVHRLREGLKSERTACINRIRGLLAEFGLVFAQSPDALRGNLSAAIEDASNELPGIARLVIERAQSQWDEIDAHIAWCDQRIAAHIKQDEHAKAATQLLGVGPVTASAVIATVGDFKQFKNGAQFGAWLGLTPKQNSSGGKNNLGSITKRGDMYLRMLLIQGAKAALRTAQRHDDPISQWAHQLREKSGWQKAAVALANKNARILWAVFARGKPFDARHESVKPGVPQAAMPAT

SEQ ID NO: 229463 - protein, 410 aa, unidentified
MELLHRRCCGLDVHKETVVACLRLVADGKVTTEVRTFQTTTADLLRLSEWLAANGCTHVAMEATGIYWKPVWHILDDGEFELVLANAAHVKNVPGRKTDVNDAMWLAELLAHGLIRASFVPDAQTQEMRNLLRTRKQLVREQSSHVLRVQKTLEDANIKLDSVLSDVMGKSGRAMIEALIAGETNPAKLANLADRRVKASPEELREALRGRTTKHHRFLLRLHLNQIDALDAAMATVDAQVEANLAPFRTAVELIMSIPGIKNLSAHAIVAEIGIDMSRFPSAPHLISWACICPRNDVSAGKRRSNRQRKGATWLKTTLVQCALAAAKKKGSYLQAQFHRIKARRGPKKAIMAVVASILTAIYHMLKDGTMYRDLGCDHFNRRSTDQQKKRLVKRLADLGYTVELKPLAA

SEQ ID NO: 229464 - protein, 340 aa, unidentified
MTGLYAGSDLHSNNNMIGLIDEQGRRVFRRRIPNDREMVREVLSPYKGDIVGIAVESTYNWYWLVDTWMDEGYKVHLANPSAIQQYNGLKHADDKHDAFWLAEMLRLGILPEGYIYPKQERPIRDLLRKRGHLMRLRTSLVVSLQNILSRNLGRKMKVNDVKGLQQDRVTPLLEGSEDLAMAGRISKETIDFLTHQIDQIERRIEKTVRVKEAYRFLQTLPGVGKILALTIMLETGPISRFETVGDYVSYCRKVPSQWMSNGKWKGSGNTKNGNRYLAWAYAEASDFARRYYPEPRAYYQRKRQQTNAVVAHSALSHKLARAAYYVMRDQVPFDSEKLFR

SEQ ID NO: 229465 - protein, 416 aa, unidentified
MKQKSVIEFEQVVERGCGMDVHKETVVVTIQGKGIKTITKSYSTFTNSLIKLKEWLLKHGVTHVAMESTGVYWKPIFNVLGDDFTILLVNARHVKNIPGHKTDKRDSRWLSKLLLSGLLKGSFIPERVFRELRDLARYKTKLTNMVAADKNRFLRILEDANIKISMVLTDVFGVSGIKMINHILEHEDYRSEELMQYVHPNVKASLEDINEALTGYITEHHRFMMRTILANMARTKSTISEVERRIDTAIEPYKEVKELLETIPGVGSDVAIVIIAEISTDMDNFPDHKHLASWAGMSSGSNESAGKNKSGRITYGNKHLRTYLTEAGWAASRTKGTYFNSKYKSLVGRRGKKKTIIALGHKILIAAYFIIKDKVEYKELGEDHLNNFRRDKLIAYYKKQIERLDPNFEFDKEEAA

SEQ ID NO: 229466 - protein, 371 aa, unidentified
MKKDTLYVGLDTDKKHIDVAVAEPLPDGEVRYWGRTANTPEAAERLIKKLRQGGRRDLLVCYEAGPCGYGLYRQLASKPGVRCVVVAPSMVPRRPGERVKTNRRDALKLAKLLRAKELSEVWVPDGGHEAMRDLVRLRATAVSVLRRCRQHISSFLLRQGIGYLGKPWTKKHRAWLETLSLEHVAHRLMFAELLGALDQAQARRDRLTDHIGELVPGWSLAWLVAAVQALRGYDLINAAIVVAEIGDPRRFASPRQLMGFLGLNVSEHSSGETIRRGHLTKAGNKRARTALIEAAWTYSRPPSARSKPAARRLPPEVQQIADKARHRLSRRFRYLVMRGKLRQVAVAAVARESVGFIWAIAHAAAPPSARR

SEQ ID NO: 229467 - protein, 339 aa, unidentified
MYPFYLGIDLHLKRTYMVLMDAKGEILDKGRISNQEITKYLQEKVPQETYAVLEATRNWPFMYDLLNEHVQKVDLVHSKGVRAIANAAVKTDQIDATTLAHLARMNYIPKAYAASKEMRDLRQLLRHRGWMVNQRSKAKNRIHATLAAYNLVSPVTDLFGVAGQEYLHEVMDKELRPSARQVVEDHLAMIDHLTERIHVLEKNISLNERQDHIVNILKSMPGVGRLIALILLAEIGDISRFRSPKSLCSWAGLTPRVHNSDTVVQHGHITKEGSRYLRTAMVQAATTACRVSPRWYKTHEHMALRCGRRAARVAVARRLLTVIYYMWKKDRPYQENYGQ

SEQ ID NO: 229468 - protein, 402 aa, unidentified
MNCVGIDVSKGKSMIAVMRPFGEVVVSPFEVRHTANELSELAGLLKSLDGETRVVMESTGNYHAPVAWLLHDAGLYVSVVNAMLVHDYGNNSLRRAKTDKKDAVKLANYGLDHWLTLPRYVPEEDTRLMLKICYRQYQQYSKVQTMLKNNLISLLDTTFPDANRLFTSPPRADGSEKWVDFVAAFWHCECVCGLSKKAFTTKYQKWCRKHGYNFSEDKALDIYASACRHFGVIPKTDTAKLLVEQAISQLQTTSSALAALKQEMQSLAASLPEYPVVMGMFGVGPTLGPQLIAEIGDVRRFHSKKALVAFAGIDAPPYQSGQIDVRSRSISKRGSASLRRTLFLVMGVLLQCAPMDEPVYQFMNKKRSEGKPYRVYMMASANKFLRIYYASVKAYLESLEHD

SEQ ID NO: 229469 - protein, 412 aa, unidentified
MEILYRACAGLDVHKETVVVCVRRLGAAGQVHQEVRTFGTMTRDLLALSDWLTTQEVTHVAMESTGVYWKPIFNILENQFQMILVNAQHIKHMPGRKTDVKDCEWIAQLLQLGLLRASFVPPRPVRELRDLTRQRAQLVQERARTANRIQKVLEDANLKLGSVATDILGVSGRDMLEAIVAGETDAEKLAELARQRLRAKIPALRLALEGRVTEHHRFLLRTLLDHVAHLETVIGQYSARIEAVLSPFEAAVDRLKTIPGVDRRAAEVIVAEIGKDMSQFSSDDHLSSWAGVCPGNDQSAGKRRSGRTTKGSRWLRTLLVPVAWAASRTKGSYFSAQYRRLAPRRGKKRALAALGHAILVIAYHLLKDGTTYQELGADFFEKLEPERLVRYLVRRLEKLGHKVTLEPREDAA

SEQ ID NO: 229470 - protein, 296 aa, unidentified
MLIIGCDFHPRYQQIAMMDTETGELVERRLEHENGEARAFYASLPKPVLVGMEAPGYAQWFGRMLAEFGHELWIGHASEIRAGVVRKQKTDARDAQHLLRLLLEKRFPRIWIPSPAERDARQLLRHRYKLVCFRVSVKNQLHGLAMSQGVCRKKKLFTAQGREELEKLSLGPWGSCRRQELLGMLDQLNPVIDELDRAVRQEAESRADAARLMIHPGVGPVTALAFVLTLGPVARFRRSKQVVSYLGLNPKERSSGDKQHTYAISKQGRRNAVDLARGRAVNFSESRREPHKFGQR

SEQ ID NO: 229471 - protein, 357 aa, unidentified
MSPQINQLDFKGQLFFVGLDVHKQNWRVTILSEERELGTFSMDPDPKQLARHLQQRYPGGVYKSAYETGFSGFWIHRQLVELGIDNIVVHAADIPTTSKEKSYKSDSVDSRKIARELRNGSLQGVWIPDQKLQDLRSLCRLRLKLVRDQSRVKNRIKSYLHFSGIAIPERSEIWPWTGAFITWLEGIPFENPPARDCLLGYVQELKNLKTQIAEVLKKLRYYTQEPGIKEVVLDCLRSIPGIGFITAITLYTELGDINRFPKLDALASFVGLVPSVASSGDKEIVHGISDRHNRYLRNLLLEAAWVATSKDPAMLLAYKELSKRMSKQKAIIRIARKMLNRVRYVWRTKKTYVASVC

SEQ ID NO: 229472 - protein, 371 aa, unidentified
MEKNTIFVGLDVHKNTIDVGLADAGRDSEVRFYGSIGGDLDSLHKVIRKLQSTGAMLRVVYEAGPCGYDIYRSLTRRGVECMVVAPSKIPRKSGDRIKNDRRDALNLARLHRAGELTPVYVPTVEDEAMRDLTRGREDAVKAHRTSRQVLLAFLLRHGYRYSGVSYWSKAHWNWIGDIKMPHPAQQITLQEYVHAVQEQSARVQRLTQQIQELVAQWDLALLVQGVQGLRGISLIVAATTVAELGDLTRFASAKQIMAYLGLVPSEHSSGDSIKRGGITKTGNSHVRRALTEAAQAYSHPARESRVLLARLAGLPEEVRKIAWKAQVRLCDRFRRLTARGKNRNTVITAIARELAAFMWAIANELRPMRKA

SEQ ID NO: 229473 - protein, 347 aa, unidentified
MVTVGSDSHKRSHTLVAVDSNGKRLDSCTVAADSAGHLEALRWAGQWPERKWALEDCRHVSRRLEADLLRAGEVVLRVPPRLAAGARESGRERGKSDAIDGLAVARAALREPSLPVAKLEGREREAKLLLDHREDLVGERTRMQNRLRWHLHELEPGFEVAAGGLDRKRVLAKVTAQLERHRGVVAELARDLVGRIGNLTVDINELERRLRELMAELSPRLLNLEGCAALSAAKAVGETADVSRFRSSSAYAMNNGSAPIPVSSGNRQRFRLNPGGNRQLNAALHRIAVTQLRGNGAGRAYFERRLAAGATRREAMRSLRRRISDEVYRRLKQDFLERATCVSAGAA

SEQ ID NO: 229474 - protein, 400 aa, unidentified
MRVVFGIDVSKVSSEVAILVNGEKVHNYTISNDAIGFARLLGDLKTVHKPEIIFEATGVYSRRLQAFLDEHDYAYTRLNPLEAKKQLDSLRVRKTDKIDAEKLAQSQCVLNRKPPYVQEEVYQNLRDLSRFYQNLTEDIVRAKNRLHKALQVTFPELENILSTPTGEQYWNLIITFPCKDFVLDLSKYELSESIRQSTSKRISDKRVAYLAEKLIALAKQSYCAVKKNSPMLEEVRYYTKELLRLSEQRQAVLDEMVELAQPLPEYDILLSIPGIAETTATSIIGELGDIRRFQSANQINAFIGIDLRHYESGNFLAKEHITKRGNPYARKILFKCIHNIASASHTNPCHIADFYEKRKRQSQTASTKPHTIASIHRLIRTMYYLIMHNKLYDYASTQNR

SEQ ID NO: 229475 - protein, 367 aa, unidentified
MKQQQKAVSKGTGDEATQDNGLVRALNLGLDVHYRQVTVAMQEDGGRITAAGKMSHEAFVSWVGKKLNKGWRIQSCYEAGASGYWLHRKLVELGVKNLVVAPKAMGGPEAKGQKTDKRDSGQLCDALDRYLRGQDKALSVVTVPTLEQEQNRALIRYHRQIIADRTRAEARGKGLLCAQGIEVGGLWWDGKDWRALRRDPRLKDWMKEQLEDWRNKILSAQEQEAPLRERIQALAPQSRPKGVGAYSAAVLKYEMKGWERFHNRRQVASYTGLCPGIHLSDGRGKEGSINRCGNPTVRWTLVEMVWRLMIWQPYYKPIRQLASGLIKSRRAKKRLVVMAARRLAIDLWRLETGQTTPEKLGLIMADT

SEQ ID NO: 229476 - protein, 402 aa, unidentified
MNAVGIDVSKGKSMVAIMRPFGEIVSAPFEIKHTASDINSLVELINSVEGESRIVMEHTGRYYEVLAHQLSEANLFVSAINPKLIKDFDNDSLRKVKSDKADAVKIARYALDKWQNLKQYSVMDELRNQLKTMNRQFGFYMKHKTAMKNNLIGILDQTYPGVNTYFDSPARSDGSQKWVDFASTYWHVDCVRKMSINAFIDHYENWCKRKKYNFSKSKAEEIYGKAKELVPVLPKDDITKLIIKQAVDQLNSASITVESLRTLMNETASKLPEYPVVMAMKGVGTSLGPQLMAEIGDVSRFTHKGAITAFAGVDPGVNESGSYEQKSVPTSKRGSSDLRKTLFQVMDVLIKTHPQDDPVYQFLDKKRAQKKPYYVYMTAGANKFLRIYYGRVKEYLASLPES

SEQ ID NO: 229477 - protein, 367 aa, unidentified
MSSVASQAGLIHLGMDTSKNTIVVATLLPGEENPVTERVANEEAPIRRLVGRFADRSVLRCWYEAGPGGYELYRLLASMGVACQVVAPSLIPKGGSDKVKTDKRDSRRLARLGRAGELTPVRVPGPAEEAVRDLVRARTAVVEDRRRAQQRLTAVLMRHGRIWRGGSYWTAAHRSWIAGQRFAEPALAAAISYYRATLQVRESELAAIEAELAPWAAREPLAGPAGRLGCYRGIAELTALSLAAEVVDWHRFPAARAFMSFTGLVPAEYSSGERTRRGHITKAGSEPVRSALTEAAWSYRHAPAIGARLARRQAGADPATLARSWTAQRRLHARYVHLLHAGKAAPEAATAVARELAGFVWAEMTAA

SEQ ID NO: 229478 - protein, 338 aa, unidentified
MNEVTLIGIDLGKHSFHLHAQDAAGRMVFRKKLSRQQLLRTLANVPCCRVVMEACAGSHWLARQLAGMGHEPRLISPQFVRPFVAGNKNDFGDAQAICEAACRPSMRFVSPRNEAQQTVSAMHRLRERLVRERTATVNQIHGFLLEFGISLPRGAALMSRLPTVLDHETLPPRLVGLVVRLRAQVHYLEEQLRQVVQDLKASLREDDKSRRLLEIPGIGPITASALAVELGDARQFANARQFAASIGLVPRQYSTGGKPTLLGISKRGDRNLRRLLVQCARAVMQHTASRTDALSLWVKTLSTRRHSNVVACALANKLARIAWAILARGTHYKARALT

SEQ ID NO: 229479 - protein, 355 aa, unidentified
MYYYVGADLHKEQTWFYVMDHNGTKIDSKSIANSPDSLKSYFASIPTPFTLAVEATYNWYFFMDIAEQFAQTAYLANSYELKAFAKRHKKTDKIDARLIADILRKGFLPMVFIPSREIRNLKELLHYRINLVRDRCRNIFRLKNTLDKLGADSSGDFTTEKRLRTIPTDSLSERYHYIISGYINRIVTLSQRLHSMKTYLKKELLEDKEIQNLITIDGLDYFSAALIKSEIADINRFASFNRLCAYAGLAPRVSQSGNKEAHHGALMVNRRKNLQWILLETVFHFIKATSKRHARYEELKIRKGANTAKVIMARQYLKIIYHVLKEQRPYYREESERPEMVYQIQPVAAAALYGV

SEQ ID NO: 229480 - protein, 331 aa, unidentified
MDVHDRYCQVAILDDDTTEPEERRIRTERAELEEFAREHQGAQAAIEATRNYWFVYDCLEPELDVSVANPHKTGLIGDQKVKSDRLDAKRLAVLLRVDALSTSYIPPDEFREARKLVRRRKALVDDRTAAKNRVRSALADRGVTYDGDLFGQEGREFLADEELPLSPADRHIIEADLAVIETLDEQIERLQREIDEIAATWDETQLLMTIPGVGPVLSVTITAELGEIDRFNNKKQVVSYAGLDPRVRQSGEKETTDAITKEGPPVLRWALGQAALNVVKYDSYLGNYHTRMKRRKNSQKALVATARKLLVSIYAMLTRKEEYNPPEATAH

SEQ ID NO: 229481 - protein, 453 aa, unidentified
MGRRTASGTKKKKNRQIFKQVNFNAGGIDAGAEYHWVAVPEDRATPSVRKFSTVTSGLYALADWLVECGVDTVAVEATGVYCVPLLEVLDARGIKVVLAKPSSLKSINNCQKTDMRDCQWLQMLHTFGLLMASYRPTQLVASFRSYARQRRMLIEHASSSIEHMKKALTQMNIRLDLAVSDVTGKTGMAIIGSILKGERDPKELAGLRDERCSKSEEAIAEALTGKYSDEHLFELDQAVRTWEHYQGLIAECNKRIEEQANQFEKKASREDIPVPRRKEHVRKNVLTFKARELFFEVLGQDLTQIDGISTGTISTFLAEIGTSVAGFKTFKQFASWLRLSPGSNKSGGKNKSGRNRPTTNRLATALRVAAQTLQSSKSALGAYYRRMKARLGPEKAINASAHKLARMIYLTLKEQRPYLDPGADYYDQRNADRILKQMEKRARQLGYQLVKAA

SEQ ID NO: 229482 - protein, 339 aa, unidentified
MEPVSNTPSDSATDQPAFALGIDVSKDHLEVALLTPGGRLHTKSVRNAAVGFKALLAWINRLTSNQELHACLEATGGFEEAAALALDEAGHRVSVVNPRRIKAYAGAQLQRNKTDRADAALIARFCQRERPMSWQPPSAEQRRLRELTRGLEALKQQRDQLRNRRDSGPPDGPVYASLTRVLETIELQITHLEDEIEGHLQATALLQQRHHLLCSIPGIGSTTASVVLAELGRVERFESARAVAAYAGLTPRNYRSGSSVVGRTRLSKVGNRRLRRALFFPALSALRHNAVIRQFGERLRGHGLAGKAVVGAAMRKLLHICYGVLRSGRAFDASLHLSA

SEQ ID NO: 229483 - protein, 486 aa, unidentified
MKTTRERRQEKAKPAAGSAPSKSQRMNRKQRRELARKIQADDVSLEVVHPDAAGIDIGNECHYVAVPSKRDPKQAVRRFGCVTAALKTMAEWLKQCGIRTVAMQSTGVYWIPVYDILEAAGMEVYLVNARETKNLPGKKTDVQESQWLMKLHTYGLLRNSFRPTAEIRRMRNYWRQRNDLIQSAARHIQRMQKVLTEMNVQLANVISDLSGVTGQAIVKAILGGERDPHKLAELRDPRIKATPEQIARSLEGNWQEDLLFILRQEHEAYQFCQKQIAACDQELKQYLNEQEDRSQGAQLEEEKRKNRRRKKKGHKPQQFDMREALFRMTGVDLTRIDGIDVMTAATVISEAGWDMSKWRTENHFVSWLRLCPDNKVSGEKIIGKGRLPTNNRLTIALKIAATSLKQSETYLGAQFRRLRTRLGSPVAIKAMAAKLARLVYRMLRYGMRYVDRGAQIYEEQHRQRQILFLKRKAAELGLKVVETAAA

SEQ ID NO: 229484 - protein, 370 aa, unidentified
MLDTTTFVGLDVHARSIKAVSLDVMTGEVRAATFGYDAGAVAEWVRSVDPKARCVYESGVTGFDLQKRLSGLGVDCVVGAVSKMIKPSADRRRKNDRNDAEFLARMLSVGNVVEVWVPDDECEAARDLTRALEDARDDLSRAKQRLSKFLLRHGLAFDERTPTGRRKGNWTRAHWSWIESIRFAEGADNDVLAYYVDAVRRAAEEKARLEGLVEAEARKPRWRRRVDSLRCLKGVDTATAADLVFEAGEFSRFRNARSFAAWVGLTPSEHSSGESDRRGAITKAGNKHLRKALVEAAWHYLTCSGRPKGLAKGQAPDRVARRHAAKGVRRLVERRESLLARGVHNNKANVATARELACWVWAVGLMAEEA

SEQ ID NO: 229485 - protein, 407 aa, unidentified
MNTAVGIDVAKGKSVVAAMRPFGEVALPPREFLHTSEGLSALSEALRLIDGNTRVILEATGRYHEPVVMALRNAGIFVSVVNPKLIKDFGNNSLRKVKTDKADAVKIARYGLEYWEEMREYTETDTTRQQLKLFSRQYNLHMKTVVSLQNNLISLLDAVFPGINELFKSPVREDGHLKWVDFVCTFYHRDCVSGVSIAAFSERYQKWCKRKGYNYSTAKAAEIYAASREMVVTMPKNALTKALITAAAGQLIAATEMLATLKAEFIRLASSLPEYEVVRSMYGVGDITGAQLMAEIGDVRRFANRGALIAFAGVDPGVNESGKHSSQRVRTTKRGSPHLRKTLFQIVSTHLKRSPQDEPVYQFLDRKRAEGKPYLVYMTAAANKFLRIYHAKVRDHLNALEQMHSNT

SEQ ID NO: 229486 - protein, 517 aa, unidentified
MTASLNGALMPVRQHGSEFPATPLVKYRRLLVRPAVLSRLEDCSIFMPSSGHRPSHNTMKRSSSQKKKTMPKIAMDPNWSIINPNAAGIDLGSREHWVAVPPERDPQTVQCFGTTTPQLEALAHWLKQCRVTHVAMEATGVYWIAVYQYLEKQGFQVLLVNARQIKNVSGRKSDVLDCQWIQRLHTYGLLGGSFRPGDGYCVVRSLMRYRDELIAGRTTQVQHMQKALLQMNLQLRVVLSDICGESGLAIIEAILGGERDPLKLAALAHRRVKSSRDQIAQALVGDYRSEHLFVLKMGWELYHHYQHQINQCEQELTMALERLPERANPQERPLPAKTKGKKLDEALRQSLYRKLGVDLTAIESIGTTVALTALTEVGPDLSAFGTEKRFCSWLGLCPEHRITGGKILSSHTRRVVNRLSDALRLAATSLENSASALGAYYRRMKRKLGSPQAITATAHKLARIIYRMLKHGEAYVRQGLEDYEQQAREQTLNRLRRAAATVGYQLTKCEPLVKAVS

SEQ ID NO: 229487 - protein, 391 aa, unidentified
MLICGIDIGKNHHEACLIDETGRQLAKTLRFPNTTAGANTLMDYFSGCNSEHDVIVVGMEATGHYWLSLYCFLFDQGFQVNVINPVQSDAVRNLFLRKTKNDAKDSFLIAETIRIGRYSNTELADEDVLCLRQLCRHRMDLVDYIADQKRKIIGVMDRVFPEYQTLFSNMFGSASTELLTRAVTPEEILEIPTDELCMILSKASHGRFGAIKAEEIRNAAKSSFGITIGTTAFAMQLRQLLELIGLLERQLDELEMEIGGYLAKMNTCITSCPGVGNVLGATILGEIGDISRFPEPKKLVAFVGIDPSVHQSGEFTGTQNKMSKRGSPHLRRAIWLAANVAAFHDPVLSVFYQKKRAEGKHHYTAIGAVARKLTLIIYAVLRDNKPYVPNC

SEQ ID NO: 229488 - protein, 350 aa, unidentified
MIIIGCDYHPGVQQIAFVDTETGEFQETRLQHREQAEQYYRELALRGVQVRLGMEASGQARWFERLLAELQMELWIGDAAEIRARRVRKKKTDREDARHILRLLMEDRFPRIWVPSWENRDVRQLLWHRHRMVQMRTRVMNQLQAVALNEGMRCKKRLGGERGRQQLESFPLAMWGSRRRRDLLELLDQLNPTIAELTQAIEAEVANYPAAQRLMTHPGVGALTALAFVLIIGETERFQCGKQIAAYLGLVPEENSSGESRRLGHISKQGSGFMRFLLVEAAQVTVRSDGQWRSRYFHLAMRRGRKIANVAMARRLAVRLYWMWRKQWDYEQWKEFGPHAGQPGMSDGVK

SEQ ID NO: 229489 - protein, 347 aa, unidentified
MLADTADAVIGVDTHTDTHTACLLDRLGRQLAVITIPADDRGCRMLLAWAQQNAPGPRLAWSVEGTRSHGLGLTRYLHAHGQLVAEAGRPARASRRPGGKSDPADAARAARDALSAQRLAQPRSDGSREALRILLTARAQATTARTAAVNTLKALILGAPDDLRRQLRGLSTPRQASRCRSLRVHASQPIAERVLRAELRRLATHIGGWDKELRANKAQLRQLVAQAMPVLLEQPGVGPMSAAQLLVSWSHKGRCRSEAAFAALAGVSPLEASSGRITRHRLNRFGDRQLNRALHVIINWRMLHHTKTQDYTTQRRAGQKTDPEIRRCLKRYAARQLFRLMETAATT

SEQ ID NO: 229490 - protein, 429 aa, unidentified
MKIIYPRVCGIDVHKKFIVAVICISESVEPVYLKKRFSTFHNDLIRFREWLIQNDCQNVCMESTGKYYIPVYNVLESHISNIVVANPKWVCAVKGEKDDDKDAKWIADLFKLGIVRSSFIPQKDFRILRELTRYKYKLVNMRSSEKNRFQNALTSGNCKLDMVFADVFGKSASNIIDLILSDNPYTDEDILSKVHKNCKASPDLILDSINGTDLTPVQKSRIELVNDHIKQLSSNIQKLDKLIDLMIEPYEDYISFLCQIPGVSRNSAIIILSEIGVDMNQFTSTRRLTSWAGLTPSSNQSAGKKKSVRISRAGVYLKPCLVEVAHAAVKDTNHPYYANKFNKISKRRGKKRAYIAIARKILVAAYHMLLTGEIWNPADLAEVETPVEQRIKYVKNNLKSDIKQLLDIGLTVEELTLMIQQNANIIATQ

SEQ ID NO: 229491 - protein, 355 aa, unidentified
MDSKKYIGMDVHKESISIAVMNGAGKIVIECVIETKASMILQFFDGLRGDLQVTFEEGTSAAWLYDLLKPHVTKLLVCDPRKNKSMREGNQSDKIDARRLAELLRLDHLTPVYHGEHGLRTLKELVRTYLTVTKDLTRVMSRVKAIYRSWAIPCTGKQVYARRHRAEWLGKINEPGVHRRAEFYFQQLDALRVVRQEVRRDLLAESKKQKAWKRLCEIPSIGPIRAAVLLGILQTPHRFRTKRPLWNYGGLAIEMHSSADHRRVNGQLQRSRKNVLVRGLNRNCNHDLKNLFKGAAAVASSKPGPFQEFYTALVAKGMRPEMARLTLARKIATIVLIVWKRGVCFDAQHLKPQTA

SEQ ID NO: 229492 - protein, 415 aa, unidentified
MAARHVRGSPSLVDEDEALGFEIDLAVEPFPALFQDVWPVLLYCMPSLYGMARPFSPASDMMPVFEKERSGPMSIVILGVDLGKNACSVVGVDAAGAVVVRRSMRRQTLIDYVAKLPACVVAMEACCGAHHLGRLFAAHGHEIRLMSPEYVRPYVKAQKNDDRDAEGIAEAASRPTMRFVELKSQEQLDIQTLHRVRSRLVAERRSLINQLRAILLERGTIFPVGRRKLELGIDALLADKDTTLSPRLRQLVGELRDEWRDLDARIEALNGEFIELARNDPAARRLTSIPGVGVLNATALIAAVGNASSFAKARDLGAWLGLVPRQHTTGGKPRLLGISKRGNTYLRTLLIHGARAALPSLARSETPMGRWLTGMIERGVHRNAVVVALANKLARIAWAALRKDATFERGYPVAA

SEQ ID NO: 229493 - protein, 318 aa, unidentified
MSHGYDKFVGIDVSKDGLDVHGLPDGSPSRFDNTAAGRAKLLSLLPQAGACLSVVEATGGYERDLVAEAVTAGHHIAVVNPRQVRDFAKALGLLAKTDRIDASVIARFAETTRPVPKGYDERQEQLRELIVRRRQLLDHRTAEKNRSEMAHSSLVRKSVLKLIETLNKDIQRIEKAILQLVESNDDWRERFEKLKGVPGVGGQTAATLMAELPELGQLNRQQVAALVGVAPFNRDSGQFRGRRAIWGGRQSVRNALYMAALSAKKHNPVIREFAARLMAKGKPPKLVLTACMRKLLIILNAMLQSGDSWSPRVATLTP

SEQ ID NO: 229494 - protein, 421 aa, unidentified
MGRSIGLDVHRDFCEVAISDGGKARSAGRIATSEKQLRLFAGSLAATDRVVLEATGNALAIARILEPQVAEVVIAHPKQLRAISHAKIKTDKFDARLLAELLAADLIPRVWIGDERTRMRRRLVSRRRGLVKRRTQVKNEIAAVLHRNLKGRPGASDLFSRPGRAWLAGVGLPLDERLTVDGALRQLDFLGQELATVDRAIAQDALGDEDVRRLMTIPGVDVTTAATLVAVIGDVARFPTARHLVGYLGLHPRVRQSGNAGPRHGRTSKEGPAAARHVLVEAAWAAAKAPGPLRAFGQRTAARRGRQIATLAVARKLAMLAWHLLTRGEDYAFQRPSLVRRKLRRLELTAGAPSAKRGPKSGPRVWGTAEQERAERELAEQVEATYRRFVADWRTAPKRGAGATPGRASSKPPSRQAARQT

SEQ ID NO: 229495 - protein, 422 aa, unidentified
MLEETHDTEEIIQRVAALDIGKAELVCCVRVPDSSKSGKRLQEVATYQTMTRSLLAMADRLRELGVTRVVMEATSDYWKAPFYLLEAQGLEAWLVNAKDVKHLPGRPKTDRLDAVWLCKVAERQMLRPSFVPPPAIRRLRDVARYRVDLVAVRTAEKQRAEKLLEDAQIKLSVVASDIFGVSGRQMLAALIAGERNPKLLAQLARGRMRAKLSVLEEAFTGHFTDHHGFLLAKMLARVDALDADIAELDRKLEELIVPFAAAVDRLDEIAGVGRTAAQVILAEVGTDMGRFPTAGHLASWAKFTPGVKESAGKKKGKSSTGHGNRYLARILGEAAVAAGRTDTFLGERYRRIARRRGTKRAIVAVGRSILIIVWHLLSDPNARFHDLGPGFYDTRVNAERSKRNHVRQLEALGYTVTLQPAA

SEQ ID NO: 229496 - protein, 315 aa, unidentified
MSQIVAYVGIDVCKDWLDVFVRPLAERRRFANAAADIEELARWLRGLDLAIARIGLEATGGYEQDAARALSAAGFPVCVLDPMRVRRFAQAGAVKAKNDALDARVIAAFVATFEAALVAFDAERDRLGELCQARSILLETRTRFGNTAAHLRDSLTRRIVARRIRSIDADIASLEKAIAALLRGIERLGTVERLLRSVTGVGAVTAATLIAFLPELGKISAKRIAALVGVAPFDHDSGAWRGQRHIAGGRATVRRVLYMAALSGIRHNDWLAAFYRRLVARGKPAKVALTACMRKLVCLLNDIVARGYGWQPARA

SEQ ID NO: 229497 - protein, 292 aa, unidentified
MNIVFLGIDLAKNVFQLCGLNLAGKPVYTKRTGRKELLQTLANIPACLIGVEASTGAFYWQREFEKLGHKVKVISPQYVKPFVRGQKNDGNDAQAIAVALMQPTMQFVPPKSPEQQDIQALHRARQRIVNRRTATVCQIRGLLLDRGIPIGSAVSRARRAIPLILEDAENGLSSRMRRTIAELYELFNDLGRRIHFFDKEIGTVFRQSEACQRIAKVKGIGPKTATAIIAAIGKGTEFKNGRHFAAWLGLVPRQHSSGDRQVLMNMTKKGDKHLRTLFIHGARAVEIGRAHV

SEQ ID NO: 229498 - protein, 346 aa, unidentified
MHQNTVIGIDLAKTSFAVIELGRGGDVKRRKTFRRDGLKRFLAKHEPTTVALEACGSSHYWGRWLEALGHKAVLLPPQHVKGYLRGQKNDYNDAQAIAEACLHGAIRPVAVKGIEQQDDQAFHAIRRSLKVESTRLVNQMRGLLAEYGLTVPKSVSAFCRRVPELLEDAENGLSTRFRMLLNRQWHRLKALLEEQVWYDEQLRQQAKEDNACRRLTGIPGVGPVVASALKSWMGDGQQFRRGRDASAALGLVPKQHSTGGKQSLYGITKRGDAYLRSLVVHGARAVVRTAKSKQDALSQWALALEARRGHNRAVVAVANKIIRMAWVVVARHEHYRPAENQMAAMA

SEQ ID NO: 229499 - protein, 475 aa, unidentified
MTNQVVLTQAEKRALRRRVYSNDPGLSVVHPDAAGIDIGCNEHYVAVTPGRDSEPVKSFGCFTADLEQMADWLHSCGVKSIVMQSTGFYWIPVYDLLEKHGFEVWLVNARETRNPPGRKSDVQESQWLLKLHTYGLLRPSFRPSEQIREVRTYWRTRGNYVRQATTAIQHMQKALTEMNLRLTTVLSDISGVTGMRIIRAIVAGERDPHRLAAFRDKAVKASVEQIVRSLEGTWKSDQLDILELAVGDLDHIEAQLGKLDKKMAQAMAAAPSAPVQPLAPGGKKKKRNRKKASTYEPAFGLEAELKRLAGVDLTAIDGVHVMTVQTVFAETGFDMSPWANEHRFVSWLGLAPCNDVSGGKVLRKRTKKVVSRLATALRIAATTLLRSNTYLGAQYRRLRARLGPPKGITAMAAKLARLIYRMLKYGHHYVDKGMEHYEQNYKAQQLRRLNATAKANGFALVPLHSTLNPLQNSTT

SEQ ID NO: 229500 - protein, 341 aa, unidentified
MNAIGIDTHKATLAACVVDDLGGAVAERTFANDPPGHAALLGWIRTIAPGARIGLEGSACFGAAAARSLLEAGETVCEVPPQLSHRERLRTRRAGKSDPGDALAIARVAAREPDLPPVRTADATREIQLLVEAREDLVTEATRVRNRLHADLVVLLPGYAVSVANLVALRNRRSVGARLRALRGIQAELARGRLARLGRLMAEAKTLETRLDGLVGDHPLRTLPGVGVLTAARIIGEVGDVGRFRSADAFAMLAGVAPIPASSGQTSRMRLNRGGNRQLNRALHSIALSQAWHHPPAKAFIARKRAEGKTWREALRALKRHLARVVFRLLVDPPIVAQLAA

SEQ ID NO: 229501 - protein, 433 aa, unidentified
MKVLHERVAGIDVHKDMIKVAIRSPGEKPWTRNTEILEYRTFYGVLQATARELRRRGVTHVVLEASGVYTEPVYYALCEQDFTQVAVINPAHAKALRGHKTDAKDCARLAELFECGLLHGSYIPAPELKEVRDLTRYRMKTVQARTSEIQRLGKALESAGIKLGSVASSITGVSATAMIEALIDGERRGAVLADLARGRMRDAGKLADLSMALTGRFTEHHALLCRLHQDRIAGFDAAVAGLDDRIAGKAARWQREAGLLTSVPGFGDVVAQAWLAEIGPAPHRHFATHEKLACWVTLCPGNNISARKRKHGRTGDAGTYIKPMLVQAAWNAIRVRGRLQARYNRLVRRFGGDKNPGAKKKAIIAIAHTLLKIAYQVLKSGTPYTDLGADFYTRRESPEHKQAWLERQLQKLHPGCTITITIGPPEAALPPGG

SEQ ID NO: 229502 - protein, 335 aa, unidentified
MEQVIRIGLDTSKHVFQVHGVDGSERVVLRRQLSRGQVEKFFAGLPPTVLGLEACGASHHWARVLGALGHQVRLVPPQYVKAYVKRGKNDRIDAEAICEAMSRPGMRFVPVKSEAEQAAAMLLGVRDLLVKQRTMLVNAIRGHAAEFGVIGAKGVARVSDVLTRARESVPALAWDLLAVLAGQLEVLEIQLTRIDKQLRTWHRENERSRRLATIPGFGPVGAMTMVLRVPDPTVFRSGRHFASWIGLTPREHSTAGRQRLGKISRQGDEALRRLLVVGATSVIKQAQRGRGPAWLLALLKRRPAKVVAVALANKMARIAWAMMVSGQAYRARQAG

SEQ ID NO: 229503 - protein, 325 aa, unidentified
MEAKKLCCGIDVSHTKLDVCYQNNLGEMFYLQVGNNNHGFAKIMEHTGTDYHFVMEATGVYYIRLAFYLHSRGCVLSVVNAMAIKRYIQMHLERNKTDKKDAGWICRYAIEQRPAYWQMPDSAYFECKQLYNTIREYTEQIKRFNNQLHSLRLLPVPSKDTKKSLGKVIVHLEKEIGQLEQKLQLLLEQWQPDQLKNVSSVKGIGKRAAAMLIVFTQGFKHTRNHRQLISFAGLAPTQYSSGSSIQGKPRIYKRGGKNLRDVLYMCSMNAMKTNTACKALYDRLRANGKTGKQALVAVMNKLLKQVFAVVKNNSLYQPNYCSTKP

SEQ ID NO: 229504 - protein, 382 aa, unidentified
MTGTEPHAWGTGLMDDITFVGLDVHKATVCIAVAEGGRGGEVRQLGVFENRSEILSKVASRLSKGGRRLSFCYEAGPCGYGLHRLLTGYGHECVVVAPSLIPMKAGDRVKTDRRDALMLAKLHRAGELTAIWIPDAAHEAMRDLVRARATSVRVLAKARQHLQGFLLRHERIYCGARAWTLAYRRWLTTVRFEHPAQQIVLQDYIHAIQEAETRRDRLTQQIEELLPNWSMAPVVAALQSMRGVALVVAVTVVAEVGDFRRFANPRQLMAYLGLVPSEHSSGSSVRRGGITKAGNALARRVLIEGAWTYRMSARVSRKLHDRLEGLPAAVRDIAWKAQLRLCARYRRLAATGRPKVVVTTAIAREMVGFIWAIARLAQPAPV

SEQ ID NO: 229505 - protein, 344 aa, unidentified
MSQTLNAAFAVVGIDIGKNSFHIVGHDERGAIVLRQKWSRGQVEARLANMPPCLIGMEACVGAHHLSRKLRALGHDARLMPAKYVRPYSKGQKNDFRDAEAIAEAVQRPTMKFVATKTADQLDLQALHRVRERLVSQRTGIINQIRAFLLERGIAVRQGQRFLRAELPRILATPPDVLSPRMARVIEDLAGDWRRLDARIEGLSAEIGVLARADSGCERLMSVPGVGPIISSAMVAAIGAGDAFTKGRDFAAWLGLVPRQMSTGDRTILGKISKRGNRYLRALFVQAAWVVLIKPKSWERYGLKPWIEAAKRRLHHNVLAIALANKLARIAWAFWLVAAASRQG

SEQ ID NO: 229506 - protein, 388 aa, unidentified
MDVLYQSCAGIDVHQANIVVCILHGPLTSTRPKREMATFDTTTKGLRACHDFLSQFHVEAVGMESTGVYWRPVWHALCDDFELILAQPAHMKAIPGQKTDKKDAHWIAKLTRIGLLPRSFVPDETIQELRELTRQRKHYVESRNRETNRIHKILQSGGIKLTTYIEDIMGLSGRNLLQLLVDGTPITPRIVHQSVYTSLKKKVPQLLEALDGYFSDHHRFMLKQSLEIYDFYQKQIELLEERMNVYLSQYENHVETLDSIPGIDVITASVIISEVGVDMSQFPTFGHLASWAGLCPGNNESAGKKRSTKIRHGNSYLKKCLCQAAFAVKRQKGSPLAERYYQIQSRRGSQKATIALAHQLLKIAYILLKEQMTYPEFLAQKKRLLGTS

SEQ ID NO: 229507 - protein, 412 aa, unidentified
METVVERPAALDVHKEQVTGCVRVPAESGGREQHIAEFSTTVRGLLALHDWLAAHRVTQVTMEATGVYWKPVWAILEDDFECVLVNARHVKNVPGRKTDVSDSAWICQLAEAGLLRASFVPPKPIRRLRNLTRYRKTQIQERQREANRLHKALEDTGIKLDCVATNILGVSGRAMLAALCEGTTDPEVLAELARGKLRKKIPALREVLEGRFDRHHAVWIGAILNHIDFLDEQIDALSELIEEEIRPFAPAVELLCSHVGIQARSAQCILAEIGLDMSVFPSEKHLASWAGQCPGNDQSAGKRRSGKTRKGSKWLDWTLEEAALAAVRANNNYLAAQYQRLRPRRGHKKALGAVKHTILTNLWHMLNTGQLYNDLGVEYFRQRDPERATKRLVAQLESLGHKVTLEEVPQAA

SEQ ID NO: 229508 - protein, 304 aa, unidentified
MTELTIGVDISKRRLDAACYTSGRQERFANDAAGLKALRRWIGPGRLVARLVYEATGRYHAGLEAAFAGWPLVKVNPLRARRFAEACGTRAKTDAVDARMLARMGAQLALPPDPPASPGARELQALQTARAGLVGDRIALIQRADQARLPLLRRLAARWIRALSAAIAARIAADSALARRQEILLSIPCVGQHLSATLVVEMPELGAASAKEIAALAGVAPLTRQSGQWTGKARISGGRGDLRRALYMPALNAIRYHPDMRRLYERLTAAGKPAKVAIVAVMRKLLVLANALVAQDRLWEPRPA

SEQ ID NO: 229509 - protein, 331 aa, unidentified
MNYSHFVGLDVGKKTFDASLMSADEKELSHKSFDNTPTGIQSLLDWIAGYHLSLSKLLFCAENMGSYVTELSVSSVSMGFSLALVCPLTIKKSIGLQRGKNDRIDAKRIANYAVLHYRKLELYKLPDKDLVRLRGWIIIRDNLVKQKVSSIKLLETFSRMAKLADVTESISFLEEQLKSIKERILEVEEDMEQLIAASTSLYTNYLLLRSIKGIGIINAIVLLCTTDNFQRFDNPRKFACYCGVAPFEHTSGISIWGKTQTSSLANKEVKVYLTRAAITAISWDPQMKAYYKRKIAEGKHKAAVINAVRAKIIARSFAVIRRQTPFVTLAV

SEQ ID NO: 229510 - protein, 420 aa, unidentified
MNKEVRAWIGIDWADEKHDVSLYEVATGRQERLEVKQSPEALAEWIGQLRTRYGNAGQVAVVLEQGRGALLNVLMGCEFLVLYVINPKSLSCYREAFYGSGAKSDPVDAELMREMVRQNPERFRAWHPDDVLTRSLRLMTEGRRDLVNQATAVTNQLTALLKGYYPQALRWIGALDTHWACDFLDQWPTLQALQSSSRRQILRFYEKHPRHHLDLEQQIQQFHQTLPLTGDEAVLQYSILMVQALIPQLRALLDSIDEFDRKIAEVFRKHPDRPIFESFPGAGAALAPRLTAAFGADRDRYAAASEMQQFSGIAPVTEKSGKQHWVHWRMACPKFIRQTFHEFADHSRRWSAWAKAYYQLQIERGKKHNAAIRALAYKWIRILFRCWKQHVPYNEQVYLASLLKHQSALLVKSAPAVEKL

SEQ ID NO: 229511 - protein, 340 aa, unidentified
MTPIRIGLDIAKNVFQVHGVDDKGTVVIRKRLRRSDILGFFASLPPCLIGIEACSASHHWARELVRLGHQVRLMPARYVKPYVQRGKSDALDAEAICEAVSRPTMRFATIKTAEQQAVLTLNRAREILVKQETMLANLIRGCLGEFGIVAPLGIRRVSELIAVINDDADPRILPEARIAMRAVADQLCDLQKRIKEIEQAIRAWHRGNEASRRLATIPGVGSITASAIVATAANATEFKSARHFAAFLGLTPKQYSTGGRQRLGRISKQGDVYIRRLLILGGTSLVRYARGVGGSIWAKQLLARRPTRIVTVALANKAARVIWALLTRGGVYRAPQPQAA

SEQ ID NO: 229512 - protein, 347 aa, unidentified
MGKSITDLSSVTTVGLDLAKHVFQVHGVDASGRVIVAKAFRRKDVLAFFAQLPECLVGMEACGSAHHWARELIKLGHDARMMPPAYVKPYVRRQKNDAADAAGICEAVTRPSMRFVGVRTLENQAALMHHKAREMLVAQRTQLINALRGHLAEMGVITAQGLKNARELTRVILAEGDETIPACVRTALAPLVRQLHGLDQEIACSDRTIAAMARGDEMARRLMTIRGLGPVTASPIAASVQDVSAFSCPREFAAFLGLTPRQNSSGGKEQLGRISKMGNRYLRKLLVVGAHAVLYHRKPHEDALRSFAKKLMQTKPFKLVAVALANKMARIAFAIMRGRTTYSAAPV

SEQ ID NO: 229513 - protein, 545 aa, unidentified
MTSLKHSGNVWLGLDVHKDSIAAGVLGTQESSPRIELIGPGPDAVRRLIKKVSGSPERVRACYEAGPTGYELHRLLTGLGVRCEVIAPSLIPKAAGDRVKTDRRDAGRLARLLRAGELTAIRVPTPTEEAVRDLCRARADVVEDQRRARQRLGKFLLRHGVVYPGGRAWTVSYYQWLDQVRFAERALIETFRHYRAILAERDAALTAIDADLRPWCARDPFAAQVRRLACYRGVAELAGLTFATEVCDWRRFPSAPSFMAFTGLIPSEYSSGGSQHRGHITHAGNEHLRTQLVESAWTYRYCAQIGRGLARRQAGNPPQTLARSWAAQRRLCARYRRLAAQTRPHRRGHRDRPRAGRVPLGRNDRGRLTMTTHPAGTPAGSGHHPRHPQHVTRRGTAVAGKIPVSIYARPLHPRAIQVRGHVLRNTDLPGPIREHQSGGLPIHNAPARHHPLSRPPPETQHTPASSRRRSSTAARQRQRPTSSPARTLTGSGRSTLTPPTRRHEPRSHEEASQVQPPKPRSVDKGRSHQIELCQGVDAGHCSPAS

SEQ ID NO: 229514 - protein, 378 aa, unidentified
MYRILKIGMDVHTTNYTLCALESKLGGDHTLAIIKVGPDYKNVLDFIRKIKEKMDPKGQDNIEVECGYEAGCLGYSLYQQLTACNVKCKILAPTTMRTERGPRIKTDKRDAKLIADCLSNGGFKAVYIPTAQDNAVKEYIRMRDDHKQALKKIKQQINALCTRFGFSYDGTYWSGRHLKWLEGLKMSELIRETLNEYLLTYNELTAKIERYDERIREISDQSEYQEKARKLECFLGIKTHTAMALIVETGDFKRFRKGNIYAAYLGLAPGEHSSAESGGKLGITKAGNSHLRRLLIEAAGGICKGAIGKKSKDLAARQKENLTEVIAYADKANIRLRSKYYRMIRHGKKRNVAVAAVARELACFIWGMVTDNIRGNAA

SEQ ID NO: 229515 - protein, 311 aa, unidentified
MDAIYVGIDISKDRLDVHVRPAMQVFNVPRTDTGIEALTARLLELKPTYVALEATGGLERIVVASLATAGLPVVLINPAQVRDFAKSLGKRAKTDSIDAAVIAHFVEATKPELRPSPDEATRNLADLVTRRRQIVDLIGMESQREKGAHGRAKESIARVIASLKKELREIDSDIDGSVKGSPIWLADQKLLVSVPGIGNTTARILLAHLPELGKIGGRKIASLAGLAPFTKQSGAWRGKSTIAGGRTVIRCAMFVVALTAMRRNPVLSKAYNALVEKGKPKMVALIAIARRLLVMLNAIMRDKKLWQPQNA

SEQ ID NO: 229516 - protein, 335 aa, unidentified
MNSVGKVVMECVIETKASTILQFIDGLRGDVRVTLEEGTWTAWLYELLKPRVTEIVVCNPRKAALLKDGSKGDRIDAHKLAELLYMNKIKSVYHGEHGLRTMKELARSYLTISKDLTRVMNRLKSLYRSWGIPCADKEVYAPRYRAEWLGKIREAGVRRRAEHYYQQLDVMRLLRQEARRDLLVEAKKHKAWKLLRDIPGIGPIRAAVLIAVMQTPHRFRTKRQLWAYSGLALETHDSAQYHAVKGELRRSKRSATVRGLNKDHNHDLKDIFKGAAMRASTAAGPLHDFYENLLAKGRKPTMARLTLARKIAAIILIVWKKEVRFDANYLKPQAA

SEQ ID NO: 229517 - protein, 377 aa, unidentified
MTQFPVSTSNEQSIYAALELSKNSWLLAIQVPGRDNPSLYPIGGGNAEGLMAKLDAARNRLAKVSGQTPKVTLCYEAGYDGFWLTRFLDQRGIECLVMEPASLQVNRRARRVKTDRIDVENILHTLIAWCRGERHVCSMVVIPSVEEEDLRRTHRERNRLVRERTAHINRIKGLLFAQGIRGINVMKDYKSLAPAELITGHGRSLPKRLGREITREIERLALVQEQLVEIEHERDQAPTPCAATERKRHDLLRLSGIGPTISAILAREVYYRRFANRRQVASYIGLAPSPYDSGDGRRSQGISKAGNSLARYSLIQAAWLWLRHQPNSALTQWFHHRTEGQSKRVRCIMIVALARKLAIAFWRYLETGLIPEGAVVK

SEQ ID NO: 229518 - protein, 307 aa, unidentified
MLRTNVIGIDLAKNVLQVCHISRQGELLSNKAVSRQKLKELLAKSKPSLVALEGCASCHYWGRYAESFGHEVRIINPKKVKAYVDGHKTDANDALAIANAALQIGIKYSKPKSMEQQTLMSLEANRQFLSKTIVSLGLHIRGIINEYGIVKAKGTKGLAALVTSTLYESDVLPASLVTTLSMLWHQYLNLKDELSKLQKSMNSTTRQIEPCKRLMALEGVGETTASMLYATLGNGTQFTNGRQASAFVGLTPKQYSSGGKVTMLGIDKFGGVKDLRSMLYLGAMAYIYRLPESPKNPETGMAYQVSR

SEQ ID NO: 229519 - protein, 433 aa, unidentified
MKVLHERVAGIDVHKDMIKVAIRSPGEKPWTRTTEILEFRTFYGVLQEMARQLRRRDVTHVVMEASGVYTEPVYYALCEQDFSEVAVISPAHAKALKGHKTDAKDCARLAELFECGLLRGSYIPPAELKEVRDLTRYRMKTVQARTSEIQRLAKALESAGIKLGSVASDITGVSATAMIDSLIDGERRGTVLADLAKGRMRAAGKLADLSMALTGRFTGHHALLCRLHRDRITGFNAAVADLDERIAGKAARWEREAGLLKSLPGFGDVVAWAWLGEIGPAPHLHFSSHEKLASWVSLCPGNHISARKRKHGRTGDAGTYIKPMLIQAAWAAIRVRGRLQARYGRLVRRFGGDKNPGAKKKAITAIAHTLLKIAYQVLKTGTPYQEPGADFYTRRESPAQRQAYLERQLQRLHPGCTVTITISPPEAALPPGA

SEQ ID NO: 229520 - protein, 492 aa, unidentified
MVLTNRSRVDETGVASPADVDSSWYGVQSDPQIDAGSGPGGYFGLLPSSASLRILIFLLDPRVTCPGRSETDWKGTVVEIVYARAAAIDVGKREVAVTVRVPGDVAGARCQQTRKFRTFYPVLRQMVSWLVEQGVTHVAMEATGVYWKPVFHALCEADSLEVVLVNARHVKNVPGRKTDVKDSEWLAQLLECGLLRGSFIPPKDIAAIRELTRYRKKTIQARTRELQRLSKVLEDAGIKIDSVASSITTLSARDMIEALIAGERDPRVLADLARGRMRTKIPDLTMACAGRFADHHALLARMHLDHIDHLTFMIDGLDDRIEQVLGPFAQQLRLLRTIPGIGDRAAQVLISELGIDMSRFPTAAHLASWAGLCPGNNESAGRHMSGRTRKGNAEVRDILTECAWSAGKTGSYVGAQFHRMHRRFGKKGGGKDAIAVAHTLIVIVWHVLHEASEYRELGHDYFTRRDNPEAAKRRLIHNLEALGYQVQLTATA

SEQ ID NO: 229521 - protein, 592 aa, unidentified
MAQEVCVVVGSEDRARLAAVVSDRSRPLKHVQRCRIILFSADRLPVIEVARRAGVSRPAVWRWQRRYAEAGVEGLLRDKSRPPGKAPVAPATVAGVLALTCAEPPGETTHWTGRAMAKTIGLSLRTIQRIWEKHRLQPHRLRTFKRSTDPAFAEKVEDIVGLYMHPPAHAVVLSIDEKSQIQRCYGRVARAWHHRRCEQTRRGFPMPQVNDLSRCLAALDQDSTLIAVIEMSQSSWLVAGIVPGIERHPAKKLEPDQTALLRLLHRWRAEAERAGRAINRIAVAFEAGRDGVWLARWLRAREVDAQVIHPNSIAVAREHRRAKTDRLDVALLKRSFLGWLRGEPDHCQMIAIPTLEEEDARRPGREREGLVGERTRIINRIKSTLAWLGIRGFKPHLRNAAARLEMLRTPEGMPLPANTLAELHREMTRLQLIGRQIREIETARLERLRRQPHAGAHPMIRLLTQVRGVGVETADLLANEAFARPLRDQRAVARYGGLTGAPDESGSRRREKGLARAGNARIRRGMIQLAWRFLMFQKDSHLAQWYWRRTVDARGATRKTMIVALARKLLVSLWRLATTGEVPEGVVLRPAL

SEQ ID NO: 229522 - protein, 339 aa, unidentified
MHATTVGLDLAKNVFQVHGVIGCGEVLFNRALRRGQVLPFFERLDPCLIGIEACSTGHHWARELIKLGHTVKLIPPVYVKPYVKRGKSDAADAAAICEAITRPTMRFVEVKTPDQQAILAVHRTRDLVVRQRTQTINMLRGQLAEFGIVFPQGVGHAIQFAKGVLDGGCPELPDVAGTVVRELCDQLLFLHGKIAGYTREMTRVAQGEERVALLQSIPGVGPITASAIVATVGTGRQFSNGREFAAWLGLTPLNRSSGGKERLGRISKMGDQYIRRLLVVGMMSRMRQIIQNPERYDPWFADILARKPGKVAAVAMANKTARMVWAVLTRNEPYRVRTI

SEQ ID NO: 229523 - protein, 401 aa, unidentified
MGGVIIGMDPHKASATIEVPGGRERVLGGGRYATDRDGYRAMRDAVARWPERVWAVEGSAGIGRHLAQRLIADGEAVVDVPAKLSARVRVFSTGQGRKTDVTDAHSIALVAARTPDLAAVAEDGAVAALRLLADRHDELAAHRVQTVTRLHRLLLELVPGGAPVFLSALQAKALLATARPRDVAGRTRRAMAAELLADLAAADRRLKASEKRLREAVTATGSQLMGLYGLGPAGSARLLDDIGDIARFPTRARFASWNGTAPIDASSGQQVRHRLSRAGNRRINRVLHIMAIVQIRHDTEGRAYYRRKLAAGKTPMEALRCLKRRLSDVVYRQLAADMLQAGHPLPGSQHEADPGGHVGAALQSSAAGLNPIAGTSDQSLPGPASSHATPARRPRRTPSLT

SEQ ID NO: 229524 - protein, 419 aa, unidentified
MKSSKPEKVRNINEKTLICSLDIGKGAHQAYFKAPNGRDIKPFGVHNFRKSFGKFWMRLSQFKREHKLEEVVIGFESTGPYAEPLFHYLRKKPVKLVQINPMHSKRLKELTGNSPNKTDRKDPRVIADVISLGHALTLVVPEGPAADLRRLTQARERAIKRRTAALNQLQDLIFVIFPEFLSIMKGISTKTAFHLIKKYPTPQSIVALGVESLTMLVRKVSRGRFGQQRAEELFNGAKSSIGIQEGKRSILLEIEYLVSQIGADNRFIANLEEQMENHLKKIPYSHSILSIKGIGIITVAGLIGEVGDFKKFHTIPEIMKLAGLDLYEVSSGKHRGQRRISKRGRPLMRKLLFFAAINVVKSNGIMHERYQQMLQRGMPKVKALIAISRKVLKLIFAIARDNTVYIENYGNKQHLKLAA

SEQ ID NO: 229525 - protein, 393 aa, unidentified
MSDATFAGLDVAKADLDLAERPSGPHTRHPNDAAGIAAICTRLQARPPTLVVLEATGGIAVPLAAALPAAGLPVAVANPRPVRDFAKAAGQLAKTDALDAHLLARFAAVVRPEPRPLPDADAQTLSAVLARRQQVIAMLVAEQQRPPTTPPALRPRVEAHIAWLRQERDDLDRELRRQIRASPAWREDDDLLQSVPGIGPVLATTLIAELPELGRLNRKQIAALVGVAPRIARAGSCASGASSGVAAPACAPRSGWAPSSRFSATPPSATSISDSSPLADRRRSRSRRRCISSCSSSTSCSDGAPPGTTPFSPPDPLTAKTITLSPARWRCPRSPATSRSDPPRRGGRGAADAVGATPSPRPSRAAAASTSSRCRSPAPAAAIPGESRPAARS

SEQ ID NO: 229526 - protein, 338 aa, unidentified
MTQEASAILGIDVAKAKVDVVLKSHDGESYETFPNDPSGFKKLSQWLKKRKVKTGKVGLEATSIYHEALALYLHERGWVVYVLNPSRLHAYAKSQLSRNKTDKGDAFLIAQFVATQELDVWTPPSPAWRELQALVRHIQDLKDEKQVAQVRLQTARTALVQASLEKLIAFLEEQIDELVHQIKNHLDQHPDLKSQHDLLTSIPGIGDWSAAQILSELPTVEQFDNAKEVVAYAGLNPAHHQSGSSVKGYTAISKIGNARLRRALYMPALVGNRHNPILKSFYHHLLAQGKLKAVALTASMRKLLHLIFGILKSQKPFDPHFLNQKALLLRRYLSITER

SEQ ID NO: 229527 - protein, 353 aa, unidentified
MPAIKPPIVPLKYVVGIDIAKDSFVACLGYLEVGQQLHFGKEATFDNTASGFADLLQWVAKHQAADSPRWFVVEATGVYYEELAYFLVDNQQLLSVLLPNKVKHFARSTEQKSKTDQLDARLLCRLGLERALPAWQPPTPALRQLRGLARERQVLTRQGAQLKTRAHAYAHSYQPDSRTLARLAAQQQFVVQQLKALDQDLADLLTAEPELARKLAHLTSIPGIGLTTAIVVVAETSGFVLVENERQLTCYAGLDVVQRQSGLSTPATRISRRGNVRLRTALYLPAVSSLRYNPQQMAFYARLRARQPSGKPGVIAVMRKLLVLCYSLWKNDCPYDPHYRPAHVAEKEVAPTT

SEQ ID NO: 229528 - protein, 399 aa, unidentified
MIGIGIDVSKSKSTIAAMVDTGEIIMKPKEFKHTQNEISKLIEWIKTQEGTVFVVMESTGHYHYPVLKKLYEEGIYVSVVNAYLMKKYGDIEIRKAKTDKKDAIRIAKYAIEKRFNLKRYESEDEKYNDLKFLSRQYNQTVSIRVKVKIQLNNLLDEIMPGINMILTRTTNNSSKILYDFVEKFEHFEKIRCKSEQRFIKEYSAWSKKKGYRNGAIKALKIYELAQNSITTRSDNSSTQIALKNCIKILRETEESSNSILTQMQTIAYTLPEYKIVRALKGVGDKLAPRLIAEIGDVRKFTSAKALNAYAGNDAPPYQSGQFEGSRRHISKRGSASLRKVGYEVMMALKITKPSEDNAVYEFMIKKESEGKAKNVAKMAALNKFLRIYYTRVINLYKNL

SEQ ID NO: 229529 - protein, 343 aa, unidentified
MTTTAPVAYTSFVGVDIAAETATAVWKGPDGTISHSMTFDQTPSGMKLFLAKLATDHVVPAETLVVMEATGTYWMRLAVTLHETGYAVAVINPAQAHAFAKALLKRIKTDPVDADILRRLAETLQPARWNPPPAVYHDLIQRLAQRDDLMLVCQQLVNQLHALDHMPVVVASVRTRLETLIATLTKEVKTLEEEIAPILEQDAQWAAAADRLQSIPGVGVLTAAWMMVLTLNFTLCPSADAAASYAGLTPNAYRSGTSVQRRATIGHGGNRRLRTALYLATLSGAQHNPILAEMYTRLRAEGKPKKVARCAVARKLIRIAWAVVTKKQRFDPAQHVTQTARAS

SEQ ID NO: 229530 - protein, 355 aa, unidentified
MSSEKYIGLDVHQATISVAVMDSQGKVVMESILETKASTLLEFFGGLRGSLFVTFEEGTWAAWLYDLLKPHVTEVLVCNPRKIPLLKQGNKSDKIDARKLAERLRLHDLKPVYHGEAGIRMLRELARSYLTVVKDLSRVMNRLKALYRSWAIPCAGRDVYYTRHRSQWLEKIPEAGTRRRAEQLYQQLDLLQHLRQQARRELLAESRKHAITAKLRKIPSLGPIRSALAVALIQTPHRFRSKRQLWTYSGLGLETRDSGEYHYVNGQVRRRKKQATIRGLNKDYNHDLKGLFKGAATRASVQPGPLQEFYQRSLAKGIKPTMVRLTLARKIAAITLTLWKKGEDFDINKLNSQAA

SEQ ID NO: 229531 - protein, 422 aa, unidentified
MRCIGLDVHRDFCEVAIAEGGRVRHAGRIETSTAALELFAGSLAPDDQVVLEATGPAFAIARILGPHVARVVVANAQEVRAISHARVKSDRFDAATLARLLSAGMLAAVWVCDERIGALRRRLARRAALVRQRTRAKNEVHAVLSRCLLGRPPASDLFGKAGRVWLTGHDLAEEEQETVDGCLRQIDFLDAEIALVDRKVAQFVLGSADAQRLMTIPGIDITTAAALVAAIGDIRRFASPRQLVAYLGLDPKVRQSGSEPARHGRISKRGDARARFVLVEAAWTATRTTGPLRAFGERIRARRGAQIAAVAVARKIATIAWHMLTKHEDYAFARPSLTRAKLRRLERLAGAQPGTLTQARHQRRHSEQERELQRQAERSYRRLVSDWQATGKGAGATQGRASQRPSKGTAARQTSKPQAAAL

SEQ ID NO: 229532 - protein, 395 aa, unidentified
MGWLVLGSRPAGDRGVRSDSKEVWKQDPKSECPSRANGRGSTETEVPALMKVLIGVDPHKASVAGAVVDEAGGELVERASFPQNRAGLRSLERWAKRFPERRWAVENASGLGRHLAGRLAAAGESVVDVPPKLSARVRVLSTGNARKNDGLDALATALAASRNERLAAVDPEIGSEVLRLLSERREDLVAERTRALNRLHGLLRDLVPGGVAGTLSAPRAARILRGIRPQSTSARLRRRLASEVLRDVRTLDRKIADLNGLIEAEVEASGTTLTEIFGIGPILAARIIGTVGDVVRFPTKAHFASYCGTAPVEASSGEVVRHRLSLAGNRKLNYALHMVAVCQARSDVRGGTYYRKKIAEGKSRKEALRCLKRRVCDAVFRSLVADSRAHSRSAA

SEQ ID NO: 229533 - protein, 341 aa, unidentified
MSIVGAFDVHRRQLTFDYLDTVTGEVKRGRVVPADREHLRAWLGRVPGCDDVHFALEGCTGWRYVVEELAAAGITPHLAEPADTAALRGRKRHAKTDKTDSRHLRVHLAAGDLPECWIPPAHVLEARAVVRLYKDLLDERGAWHQRIAATLFHQGVPVTASMSTAAGRAAVTEMDLSAAGRQAVGTGLRQPGRLTAELDPIRRQLDMISRRQPGCRALRATQFGVGAVTSVAIWAELGDVRRFPSSSDVVRHTGLDITVYSSDGKRSAGHLSRQGPQLLRWALYESAKCAARPAAPDYGYYTATRDRRTGGLATLPVARKLARRCYHTLRELGEEAIAPAA

SEQ ID NO: 229534 - protein, 336 aa, unidentified
MRYVGMDVHWRQTTICILDENGRRVKLMTVRGPWEKVLSKLRRIEGRWQACFEASCGYGWLYERLKTMAEKVTVAHPGQLRLIFRSKRKNDRVDAEKLAKLLYLDEVPAVYVPSAPVRSWRAMIEHRQRLIRERVRIKNQLRALLRTHGIVAAKGLWARRGKQWLGRLHFAMELDALQRDILTERLDAVEAMIRRVEQALARIGERHPAICMLREIPGVGIRTAEAVVAYVDDPHRFGRIREAGSYFGLVPCQDQSAGTNRLGHITRQGPATVRKLLTEAAWQAIRRSPRVRAYFERIRQDNPERRKIAVVATAHYLLRVMLAMWRTGEVWRDEAA

SEQ ID NO: 229535 - protein, 347 aa, unidentified
MNKIKLIGIDLAKRCYQVCAVDECGKVIYNRKYTLKKFAEAMHQIEPTTVAMEACAAAHYWGRRLQALGHRVLLVPPQHAKAFRRVHKSDEHDALSIVEAAQRPNLHFVPVKTILQQDLQMLGGLREQCVAQRTALINQARGFAREYGVNFPVSRPAFMRELPLALEAVDNDLTPIARENLATLFDEIKHASERIDELQRRMTELAQSDPAHERLKTIPGVGQVLAPTVLAKLGHAQQFDSGRDCAAWVGLVPKQNSTGGKTQLGGISKNGDRTLRTLLIHGARTVIRWADKHDHAQSRWIKQLVARVGKNKAAVALANKMMRMIWAVLTKGTTFDMSKAYRAQPAR

SEQ ID NO: 229536 - protein, 482 aa, unidentified
MKRRNIYQNQSQELLHLFEEAGSSERVMCVPMDYAKNDHLVMFLNGHGDILRKPFSVKNTPEGIGYIDEQVSRCCRRRGIDKKHVFFGGEDANSFAKNFVSTLRCKGYVVANVNAHEAKKQRVNLQASTDRIDLMGIATMLLNCRANCCPAQSGIYRNLRTLVRHRRRLVQMLTEVKNRVHGIVDELFPGFLNEKNTGIIPFTQSSLYLMQDRFSPKQIHRRRRQKLIEILKRLGTSNAEETAAKLQQYAAKVLHAPVEYVDTLQLSLTQHVKHIRCLKESVAQMEKEIALNLAQTQGAFLTSVRGIGLVLAAGVTAEIGDVNQQKPLNNLASYAGIIPRVKQTGGLNGKTYTGPVAKRCNRILKDYLVKSSYHLGLHGPADLMADYKRRNACGQHADFGIGRRYLRMAISLMRTSQVYLPPTLRKANCTPQQRAGYYLTSWPYLRQKWEKVGALEAAFTNSRPLGLWRQIVQELYDIKLKL

SEQ ID NO: 229537 - protein, 322 aa, unidentified
MQGKTLPGRSAGKEVYVGVDVCKEWLDVYLHPIGLKMRVANTPAGIKRLKRWLADHSVVLIVMEATAKYHRLAQRMLYAAGFRVAVVNPLRSRLFSEALGQLAKTDPIDARMLAVLGQSLSPQAAPPVPELVEELHEIVRTRQEATDELAAFKNRLGASTVPFVKREIARMIKNLESHIERLEIEIARRIESDPALAHRYRILVSIPGIGPATASVLLVGMTELGAMTGKAAALLAGLAPIAWDSGEKDGKRHIKGGRGYVRNALYMAARSAARCIPHLKAFYERLAAAKPEKVAITAVMRKLIVLANTLIKEDRLWQAARP

SEQ ID NO: 229538 - protein, 384 aa, unidentified
MQKSSTLYVGLDVHKESIDIAVADAPRDAEVRHVGTVAGGVEAVTKALRKWVSRGYRLHIVYEAGPCGFVLQRHFSAFGWHCDVVAPSSVPRPPGERVKTDRRDAIKLARLARSNDLAVVRVPGPADEAVRDLVRAREDAVRECRNARHRLKALLLRNGITYAGKTAWTAAHLRWLASLKMEHCAQQIGFQEYLHSITESTQRIARLEQALRDALSEWSLKPLVQALQTMRGVQLIAAMTLVAELQDFLRFENPRKLMAYVGLVPGEHSSGPKRRQGSITKAGNSAARRMLVEIAWHYQHSARVSPIIATRQDQCPKAVTDIAWAAQLRLHSKFKRLLARRVLKNKAVVAVARELAGFVWAIGCEVQTSGWQGIKDESSIGPTH

SEQ ID NO: 229539 - protein, 415 aa, unidentified
MEATVERCAGLDIHQASVVACVLVGPPGCKPRKETRPFGTATRELEALRAWLEELGVTHVGMESTGVYWKPVHAILEGRFELIVGNAHHIKAVPGRKTDVKDAEWLADLVRHGLIRPSFVPPPPIRELRDLVRLRRSLTEARSTERNRTLKLLETANIKLASVASEVFGVSGMAMLRALVEGEAAPAEMAELARGKLRSKRERLTLALEGRLTEHHRYVLAFHLRRLAAIEEDLRALDARIEAEAEPFQAQRRLLQQIPGVDALVAVTIIAEAGVDMSVFGNAKRLAAWAGVCPGNHQSAGRRRSGATRRGNVHLKTALVTAAVSGSRRKGSYYRDKYHRLRARRGRLRAAVAIAHKILVAAYYMLAGGVPFRELGEAFLDQQARQRNVRHLLRRLNHLGYDVMLQPRAVEAAGP

SEQ ID NO: 229540 - protein, 318 aa, unidentified
MSSIVGIDVAKAKLAIVLLLPSGKTQQKSCPNTAAGHADLIRWLARHASSPVQVGLEATGGYQEGVALALHDAGHHVCVLNPSAVAAYSQSQLRRAKTDPTDAALIADYVRTQEPARWLPPPPEARQLQALVRRLDALLEMQTQETNRLELAAAIVRPSIEATLAHLHDEIDVIKRHIAAHIDQFPTLRAQRDLIVSIPGIGETTAAIVLGELLDIARFTSARHVAAFAGLVPQIRQSGTSLRGRGPLSKLGTARLRKALYWPAITAMRHNAPLQRFAARLREAGKPKMVVVAAVMRKLVHQIYGVLRSGRVFDPARA

SEQ ID NO: 229541 - protein, 529 aa, unidentified
MKNILVIGSINVDLVIHTPRLPQIGETILGEENFRPFPAESGGQPGHRLRPAGGQRPDAGLCGGETLYGQMSRQALERSRSGCLPPHRAGQPPTGVAVITVCQGTTVSRQTVYVEQGYKSKVHCGCSITYLSLGVFVMVVSVGIDVSKDKHDCFIVSSEGEVLADAFIIPNTMDGFHYLLQRIRHCTAPQDKIKVGLEATGHYSYNLLGFLLDNGLTTYVLNPLRTNLYRKSLSLRKTKTDRVDARTIASMLLSDAGLKPYTDTAYHNEELKSLTRYRFDKVKERAKLKSSIARLVCILFPELEKLVPSLHIASVYALLEEFPGAKQVANTHLTRLKALLETASNGHYKRDMALEIRNAAKNSIGSQMPAKSLELQHTIRLIRELDREIDEIEEQIQSIMDELHSPITTIPGLGFRMAAMILAEVGDFTRFDSPDKLLAYAGMSPSTYQSGQLKNCYPHMEKRGSRYLRYALYNATKYVCHWDPAFADYLAKKRAEGKHYNIAISHAAKKLVRLIFAMEKSRQPYCSAA

SEQ ID NO: 229542 - protein, 370 aa, unidentified
MPKPTPVFVGLDVHKETISVAYAAGGTTDPPQFVGQIGTRESDIDKLVRRLRTRSSQLVFAYEAGPCGYVLHRYLSGKGLACCVVAPSLIPKRPGDRVKNDRRDAVELARLLRSGDLTSVYVPSVEDEAIRDVCRARDATRVTLKAAKLRLKSYLLRLGFNYVGRADWNDAHRRYLAQVVCPTPAQQIVFQESLRAVDEQVERLARLEQQLLDLAPSWRLFPVVEALQALRGVQWLVALTVVAELGDLTRFDNPRQLAAFVGLTPSEHTSGENRRQGGITKTGNGRARRVLIEGAWAYRYPAKISAHIQRRIEKLPKIAQDIGWKAQVRLCKRYRRLIARGKHANIVTTAIARELLAFMWAIAKEVKITA

SEQ ID NO: 229543 - protein, 341 aa, unidentified
MNNYIGIDVAKATLQIYIPKSDLDIEIKNNDNGLKSLYSKLKKQYKKEIDNIVFIYESTGAYSTILEHFAEEKKIKCFKVGAYQSASFSKVIKNRNKTDIVDARMLSQMSILAKEKDIKVPVRDEKAHQIRSYIKYYQSLIKEEIRAKNYLEASTFNLEDKFVLKQVEKKIKNIQKEQIDIIDKTMEIINTNVEYKKAYENITSIKGLGEKSGIILLYLFLRYPNASRQHITALCGLDPIQRSSGTSVQHKERISKQGLSLVRAILFMPTLVTIQHNKEMKFIYDRLVNRGKPKSLAQIAVMRKIILLAHSLYKNKELYDENKYLKFNQNQEVKVWNNILF

SEQ ID NO: 229544 - protein, 344 aa, unidentified
MKDTNILAIDLAKNVFQVCKRDPKGKVLFNRELSRAKLKEMLVKQPRSLVAMEACGSAQYWARLARALGHEVKVISARTVKPFQTKQKTDRNDALAIAIAASQEHIHGVRVQSAEEQALQSLERARHLAKTHQIAQSNQIRGLLGEFGIIVPPSLSQLRKHIPFILEDAENSLPQSFRETLNYLWQHLLQQIEHVAILERQLEGAVKYDTTCQKLMKLEGVGPIGALGLAVRLGQGENFTNGREASANIGLTPKQHSSGGKERIGHISKRHADKRLRSTLFQGALSVITQVSKRPARTSKERWLQALVERRGKKIAAVAFANKTVRTAYAILKNDTEYQPISLA

SEQ ID NO: 229545 - protein, 353 aa, unidentified
MTYTGIDYHKRYSVACTLDEKGRRLLERRIEHNAPEAFAAYFAELGAPSEVVIEACWNWGTLYDLLEQVPGVTRVVLSHPAKNRIIADAQIKNDRVDAHALATLLRGDFVARVHVPNREVRQRRNTVRQRLWAAKVRTMVRNRIHTVLDRHPGLDRPVYKDVFCQRGVSWMRTAELPAPDRELLTEDLALHTLLERQMAGLERRIEADSATSDDARRLRTLPGVGKVLGPVIALEIDGIRRFRTSDRLCAYAGLVPTTRSSGGKTSHGRMLPFSNHWLKWAFIEAAWVAVGCSDYFGGFYRQHRARGKCANEAITITARRLAKIAWQMLTAQRDYRRVPTKPDPLSPAALATD

SEQ ID NO: 229546 - protein, 333 aa, unidentified
MTAMIGIDTSKNKLDYALVHRDTLAPEWQRTIANQPAGFAQLLRDTPPETPWVIEPTGRYSLSVVQFAREAGQKVFLAPPNKAKAFLLSLQSRAKTDKIDCKGLAMFGLSRPLFEYTLKEPVVDQADQLLSARKCLSGAISRLNLQQQQLPLAREALQATMRGVKLQMKELDKRIAVLTKNSPKLASAARLEAVPGIGKVTAAAVASRLSGKCFSHPDKFVAYIGLDTRVTDSGKHKGRRRISHEGDAELRLLLYVCAQATLRSKESPFKEQYERERKKGLSSTAALCAVARKMARLCWSMHKHGTTYDPARVGVQPPPATMADRSSPAAQQE

SEQ ID NO: 229547 - protein, 401 aa, unidentified
MQDTQQHGAVDVFVGVDVGKGQHHAVALDRNGKRLYNKALPNDEVKLRALIAELKTHGRLLFVVDQPSTIGALPVAVARAEGVLVAYLPGLAMRRIADLHAGEAKTDARDAAIIAEAARSMPHTLRSLRLADEQLAELTMLCGFDDDLAAQVTQTSNRIRGLLTQIHPALERVLGPRLDHPAVLDLLERYPSPAALASTSEKTLANRLTKLAPRMGKGLAAEIVQALNEQAVTVPGTQAATIVMPRLAQQLAALRKQRDEVAAEVERLVLAHPLWPVLTSMPGVGVRTAARLMTEVAHKAFASAAHLAAYAGLAPVTRRSGSSIRGEHPSRRGNKVLKRALFLSAFAALRDPVSRAYYARKIQQGKRHNQALIALARRRCDVLFAMLRDGTIYQPKSAPNA

SEQ ID NO: 229548 - protein, 446 aa, unidentified
MPAKKKRSPSPPPRVVRPNAAGIDVGSEAHVVAVPADRDAEPVRTFGVFTADLRALADWLKQCGVTSVVLESTGVYWMSLCDFLEAQGFEVLIVDPRTLARNLKKKTDVSDAAWLQELHAFGMLKSCFRPDQEVRGLRTLWRHRDHLVTEAAKLLQMMQKVLVQMNVYLHLAVADIAGVTGMRILRAIAQGQHDPQTLAAMRDANCKKTRAEIAKALEGTWDSAHLFELKQLLKAWDFYQGQLHRCDKEYDKAAGKMPDQTQGQALPEPEKRPNKHRNAPTAFASDALIFKMTGVRITEVDGLGANTVLTVLSETGPNLAAKFATEKHFAAWTTLAPRKHQSGKRTKFPAQTASRVAKAFRLAARALLNCKSVLGNFLRRLRARLGIGTALRATACKLAKLFYRLITKGEAYRRESTAVEEAKQRERQLKNLEAKARELGMRVFPA

SEQ ID NO: 229549 - protein, 349 aa, unidentified
MLADELDYVIGVDTHRDQHALAVVAASTGAVLAQTVVAASAHGYAAARLFADKHAGGGRVWAVEGAGHYGAGLTRYLSEHGDTVVEVRRQPRGERRLRGKDDTLDAIRAARAGVAAETLARPRAGERQEAMRVLLLARRSAVDVHRVALVQLRSLIVTAPEPLREELRRLPPGRLLRRCSRFRRSDSRPAGQQAIVLTLRSLARRIEAATTEADELEREMLQHVRALAPDLLDEPGVGPIVAAQLIVTWSHPGRVRSEACFARLAGVAPLPASSGQTIRHRLSRGGDRQLNRALHTVILHRRQHDPATRDYIARRIAEGKSARDATRILKRYLARHLYRVMQNAEPAMT

SEQ ID NO: 229550 - protein, 369 aa, unidentified
MTIIPDAGKQPQSRALVFAGVDTHKEIHVAAVVDETGTVLGTHSFSTTRAGYRALLAWVRSHGVLVRIGIEGTGSYGAGLTRHLAKNDVTVLEVDRPDRSDRRRKGKDDDLDAINAARAALHERRTTIPKSKDGAVEALRILRVARAQAVRERRNTLQLLRMSIVAAPDEVRDQIRNLTRMQLIRHLAAWRPDVSNATDPVVAYRVALKSFGRRYLELTDEIVDLDDLINPIVQALAPQLLERVGIGIEVAGQLLVTAGDNPERMKSEAAFAMLCGVSPLPASSGMTQRHRLNRGGDRQANRALHLAVISRLRLDPRTKAYAAKKTAEGHSKMEIIRCLKRYLAREVYFLLNPGIEHITPNTKPRRIAA

SEQ ID NO: 229551 - protein, 338 aa, unidentified
MDKFKNFLGIDVSKEFFDAVLIVNNDNKNTLHCQFVNDTKGVKELVNWLKTNKSTCENTLICLEHTGMYGKVIIQYLLSKTFSIWVEMSVKIIKSIGLQRGKNDKIDAERIAYYAMKNKEEAQLYEAPRPVVEKIRKLISLREHLVTTRAKLLKNTNELKGFEPEMSKLTKKFSKFTIKGIENDLKMIEDELDKIISSDETLSNLFKKATSVTGVGKVTALFLICFTNEFKMYQTPKQLACYCGVVPFEHTSGKSVRGKSRVHFMANKKLKKQLHMCAVSSLTAKGELKDYFDRKVAEGKNKMLVINNIRNKIIHRICACIRNNKLYEKVNYEANKKV

SEQ ID NO: 229552 - protein, 314 aa, unidentified
MRIVGIDVSKHKVDAAIVSASAHMSFENNEQDRQELLAWLERHEVGKAVMEATGGYERSWAKMLQGAGIDVRIVDPRRVRSYAHAAGQHAKTDRLDAEMIALFGEAFAEATGQPHDAESAAMDQLVSGRRRLKLLGQQLENWQEHDLPPEIQHIYQELGELLESRLKDLDTAIAQRIETDERLAKRAEIIESMPGLGPGSAAGLIAWLPELGLVDNKAIAALVGVAPYANQSGSHDGPRSIRGGRGKLRNLLYLPVVGAATRNNPVLKAHYDQLIARGKEPKVALIACMRKLIVILNTMIARGEKWQPEKHQQP

SEQ ID NO: 229553 - protein, 413 aa, unidentified
MAEEIFAWFVGVDWGSERHQACILDAQGSIMGEREFPHSGAGLAELGDWLLSIAGEASAVAVAIEVPHGPVVDSLIDRGFVVNAINPKQLDRLRDRFSVAGAKSDRRDAYVLGDGVRTDRRLFRRLHVADPRLIELRAWSRLADELKEERVRLSNRMQQQLWRYYPQMQKLADDLATAWLLELWSIAPTPAKARQLRTSTVERLLKQHRIRRLDAETVLRILREPAIKVADGVAEAASIHLRSLVARLRVVNRELRHAEGQLDKLCTAIGETEAGSGECLQGQDIVILKSMPGIGRTNLAALLCEGSGPLSSRDYQALRTLCGAAPVTRRSGKSHIVIMRYAAHGRLRNTVYHWARVATQHDPKCHARYAALRKRGHSHGRALRGVADRLLDLACVLLRRQTVFDPHFGQPAT

SEQ ID NO: 229554 - protein, 400 aa, unidentified
MFVGWDWASTTHDVTVIDDAANIVDRWAPEHTELGLDATMARLTHHGPPEQLPVAIERPSGLVVDRLLAAGHPVIPIHPNAFHAARPRWGAAAAKSDPGDSFKLADYLRTDGHRLRRLRPLDAATRELQALSRLRDDHVAAKTAASNQLGALLDAHWPGAKQVFSRIGSQIALAFLDAYPTPQSAARLGEARLAGFCRRHSDRGGRSPAELLGRLRSAPAAPVGLAPEVLAELVGAQVRLLRTLLATIAELDRALGAGLLGHAKAGLLAPLPRIGEVSLAQVVAEVGPILDRASTVEHATAECGAAPVTKASGKSNAVTFRWAANTKARNALATFAGNSRHSSPWAAKVYADARRRGNHHPHAVRILARAWLRVMWACWHNDTIYDPARHGAERRLAART

SEQ ID NO: 229555 - protein, 599 aa, unidentified
MRGRQGSPPQNFAWPVIGPGDFNFAQPGKTDRSQKITKPAKEANNSHVGDPIRVNLQLARHSPAAAGRRLVHFTPENVPPKADISFAVIHKRAERPALARRSKIVNNSAAIQNDGGKRPALARSRSPECYRKTVSERPPAEPEALAPTSNRKLPQEGQNISSMDGRAKRRQDRKQRKQTMNGSEQWQQHRAFGALDWASEKHFVVVVNKGGKIVEEFEIEHSALGWKKFREKLQPYGSIPFAIETSQGVAVEQLLEASMTVYPINPKSAQAYRQRKAPSGVKDDRLDAWSFADALRVDGHGWKALRPEEPLIKELRLLCRDEVALIEQRTAFIEQLRHALAAYYPAALEAFEDWTSVSAWMFVERFPTPAALAKAGKRKWQNFLHSRRLWGSTEGPRRMEVFAKAGQFAGTPPTTKAKSLLALSLVQMLFVIEKQLKVYRQRIEELFAHHPDHDLFGSLPGAGPKLAPRLLAEIGDDRQRFDGDPQNLQCLAGSAPVTKRSGKRRKYWHVHTRWACDKHLRHAMHLFAEQSLSRCVWAELYYQHHRQKNQSHANALRRLANRWLKIIYKMWVDRTPYNAEFHHRNQLQHGSWIFQLKSI

SEQ ID NO: 229556 - protein, 453 aa, unidentified
MRKPQVVPDEDHEVVYERVAAVDVAKASGVVCVRTPDTKRPGRFVNRIWDNVPATRARIAELGRELARCQVQMVTLESTSDYWRIWFYVLESVGLAVQLVSASQAKNLKGRPKTDKLDAMWLARLTQWGMLRPSFVPPAAIRAVRDFTRARQDLIRERTRCLQRLEKLLEDAMVKITSVVSDGMKAKSSVAMVQALIAGERDPRKIADLAKGPLRGKRDQLAEALDGMFDSHHGVIAQMLLDQVAFLDQRITAMEDQAIAALAQVQESWGVDATGETGPGCGTGPDSQVLAAAHRLAEIPGISLMLAIVIIAEIGLNMAAFPTPAHLVSWMGLCRSASQSGTRHGKGKQKKGNSYARAAAGQAAIGAAGTATFLGERYARIARRRGKAIAQVAVARSIMIIVWHLLNDPAARYRDLGPDWHASHITRDKKIRTHLRGLQALGLTITITADEAA

SEQ ID NO: 229557 - protein, 387 aa, unidentified
MESVTSSTAVATAVRANDITLFASLELSKSKWVVTINSPGSEKFSKHIVEGGDGAGLLDLLCRWRAKAEQRYRVPVKAVVIQEAGLDGFWIHRLLLAEGIESHVVDAASIAAPRRHRRVKTDAIDGETLLRTLMAWARGERRVCSMVRAPSPEDEDRRRLTRERGTLLKERIQHTNRIKGLLGGQGIRDYNPLRRDRFERLEALRTGDGRELPAMLKAEIRRELDRIVLVTAQLDAVERARDALIRTDAEERINPAALLLKLKGLGPEFASLLWLESLFRSFGNRRQVAAYAGLAPSPWQSGGVKRDQGISKSGNRRLRKTMIELAWFWLRHQPDSALSRWFRARVGAAKGRVRRIAIVALARKLLIALWRYVTQGVVPEGVVFKAA

SEQ ID NO: 229558 - protein, 455 aa, unidentified
MPARGKQPRSGAGSPAHTIDPNAAGVDIGATEIYIAVPTDRDPHPVRKFSTFTEDLLAAADWLKQCGIKTVAMESTGVYWIPLFQILEAGGMKVCLVNARHVKNVPGRKSDVCDCQWLQHLHSAGLLRASFRPEQQICAVRSLVRYRDSLVQLSAMHLQHMQKALDQMNLQLHHVISDLGGKTGMAIVEAIVAGERDPHQLATLRDPRTRASKETIAKSLVGDYRREHLFTLRQSLTGFRQNGQLIADCDVEIESLLKEFSSGDGPGAEAVPEPQAELKRKPRRNEMSFDLRTQLHRIFAVDLTEIPGIDTLTAHTLFTEVGRDLSKFANVAAFTSWMGLCPDNRVSGGKILHAQTRRVNNRVAKALRMAAQALSRSHGWMGQYYRRMRAKLGGPKAITATAHKLARIIYHLLTTGQHYDETVFLEEDRKQAQRYEKRLRNRAKELGFQLVPIPG

SEQ ID NO: 229559 - protein, 316 aa, unidentified
MTTTPVFVGIDVSKDRLDVALRPTSDRWALAHDAPGVATLVARLQGLAPTLIVLEATGGLAVPLTGALAAAGLPVVVVNPRQVRDFAKATGKLAKTDALDAAVLAQFAEAVRPALRPLPDAATQALSALLARRRQLIEMLTAEKNRLGSALPPVHKGIRAHISWLDRRLADLDADLAQAIRESPVWREKDDLLQSVPGVGPVLATTLLASLPELGTLTRQQIAALVGVAPLNRDSGAWRGKRRVWGGRAPVRAALYMSALVATRYNPVLRAFYQRLCAAGKAKKVALTACMRKLLTILNAMLKYRTPWENNFAHAS

SEQ ID NO: 229560 - protein, 461 aa, unidentified
MKNSTAKKRKQVPAGYLVVGVDPHKKKHAAVFVTQDFMTHSKLKFHNSREGFEAVLERARTEMLKTECRGVIFAIETGAHHWRNLAYFLDEKGIPLRLINQFTLKRRREGKDLNHRKNDYRDSEVAAQLLCTGEFNAARLSQGVYADLRAAYGSYRRLVKEKTRTVNLVKSLLDGLFPEFTQVFKNPCGQTAASVLCTCAVPQAIAGMTESEFVGAIKAAHQGRVMKGKLQILHHVAMTSIGIGAGAQSVSSEIAFLIEKLRLIKQQLRQINEALTRLVHETMEGKYLLSIIGLSYVSVAGIIAELGSFSSYQNAKQLIKMAGSNPTESESGGKRHSHTPISKQGRPVLRHCAWTAVIPMLRFNPDFRDWAKKLRERPAGANPLSGREVMVAAVNKLLRLAFALVKNQTFYKIPESQPVEITIEEVSNTSGGQGNTAGSFGSSYEPTRQKTWCPALLAKPV

SEQ ID NO: 229561 - protein, 411 aa, unidentified
MRRVIGIDVHRTFGEVVFWENGRLRHAGRIDMTRTALEGFAKTLLASDEVVVEATANSMAVSRILAPFAARVIIANPLQVKAIAQAHVKTDKIDAGTLASLQAAGYLPQIWTPDAETERKRRLVARRYQVVRHRTRLKNEVHSILHAHLIPKCPHADLFNARGRAWLAAQSLPDDERAAIARHVRELDRLAEDLALLDREIAQDAIDDPAVNRLMTITGVNLAVAAGIVAAIGDISRFNSPQKLVSYFGLNPRVRQSGLGAAHHGRISKIGRSHARAMLVEAAWTAAKAPGPLHAFFVRIRARRGHQIAAVAVARKLTVLCWHLLTKGEDYQWARPALVANKTRAMQLQAGHPQQKGSRRGPAYAYNIKALRDREMLIAAQAERSYERFVSQWKPRRPKNGARVPQLGRTK

SEQ ID NO: 229562 - protein, 421 aa, unidentified
MNTDQKRAYAATFPVHVGVDTAKVFHKLVVRGPDGQRTKAYKVLVSRAGFEAADAHLRDSYPGIAPQQVLVGLEFAGHHGFTFAHFLAQRGYVVVNVLAAHTKASKEIEDNNPRKDDAKDAAQVCKLVGDGIFVRFPFLTHPYLELRLLTVHRHRLTVEATRYKNRLQGLLDLAWPEFLGQFSTLHKATPRAILERWPLPQDLLAASIRTVRKEIHAASRGHVSREQIDALVASARTSIALTQAAPERRLEIQSLLVRWALVRKQLAVLERRITALVDQCPEAKILTTVPEVSAVCAATLVAELGTPKDYAHYRQVLKLAGMNLASRSSGQTEGRKWQSKRGRPMLRRQLFLLAGRWCLTRGLYHADYLALKARNGGAGTKAVCTLARKLVPLLLKVMQSGEAFEKERWLANRRVQEVVVT

SEQ ID NO: 229563 - protein, 333 aa, unidentified
MNQFINAIGIDVSKKTLDAYDQLHQIGTELPNSSAGFKDLLRWINKHNNGEISNVLICFEHTGMYSLPLAIYLTEQKHLYAMVPGLQIKRSLGIRRGKNDRADAIAIARYAYQRRDEIKIYQLPSSKILEVKSLLSLRQKMVIQRAGYKGTKREMKAFLKLVKMSSTVFDVQDKLIKELNNQIARVEKQIKNVINEDEYLRKTFDLVDSVKGVGLILGATMLVYTNCFTAFTAWREFACYCGIVPFRYQSGTSIRGKTKISRLANKKIKALLSNAACSSIQFNPEMKLYYLRRLAEGKDKMSTQNIIRNKIVARVFAAVQRGTPYVDTFQFAA

SEQ ID NO: 229564 - protein, 397 aa, unidentified
MYIVGIDIAKRKHEAAVIDGDGAVIIKPFSFTNNCSGYNRLLAMLAKAKLPLDAVSFAMEATGHYWLALFTRLQKEGFRVQVINPVQTNSIRSFYIRQAKTDPRDALLIAEVIRFGHFSESTLHPENIYELRELCRGRHAIVSMQADVKRKVVALLDQVFPEYETAFTNMFSDTSMAILQTCPTPKELSEMPLEELCHLIEVSSRKRFRMSKARELQALARNSFGFAMAGDVFSTMIRLYAKHLDFLKQQVKEMDRKITEIMDTLDTPITTITGIGPTLGAYILSEIGDISRFSSAAKLAAYAGIDPTMRQSGEYNGVRNRMSKRGSPYLRHAIWLAASSAVLHHSALKLYFQKKRDEGKPYMASVGHACRKMVSIIYAVMRDNKAYTPYIPNEISA

SEQ ID NO: 229565 - protein, 344 aa, unidentified
MKKIFIGIDFSKEKFDVTLIHAEGVKECAPSAHEVFDNKLSGFRRLLRWVKSQAGEEADTWLFCGENTGGYSIALSNFIYACGHDMWLECAYKIKHSSGIQRVKSDRADSRVIAEYAMRNYDKMVLYKPLSPSLSDLRELFLYRHSLVKHKVALTVRREEKRLTQEKSKPRALMSKTSKHLIAEVNKFIAVIEKEIKETIDADEELREIFEIITSMPGIGTQNAVCLMVYTDNFRRFDLNSRKIACYYGIAPFGRQSGSSIHSRPQVSPFANRMIKSLLSQAALAAIKSDASFRSYYQRLIARGKQPLLAQNNIKNKMLHIIVAMIRNKVKYNPDYVYPTKEIA

SEQ ID NO: 229566 - protein, 419 aa, unidentified
MFKILRKNCCGLDVHKTWIFACIGITDPHGITHYKQARFSSFTKGLRELVDWLALYSCKEVCMESAGKYWIPVFNILEKSCLVTLAHPKYTKPQKGNKTDRKDARWICDLFMCDMIKPSFIPPPDIRHLRDLARYRVKLTNCLASEKNRAQNCLTVSNLKLDDVFADVFGKSARSITEHILAHPGEHFDVTPFVDGRCKHPIEEIQAAVDGAVSMEQAVKLRECLNHIDELQNHRLRIEEEMIALSAPHAATLKLLRTLPGFDSNPLTAIAVLGEIGGDMSVFPTAKNLCSWAGCCPRNDQSGGKIKSTRISRAGTFLKPLLVQIANALIRSKKHPEFAQRYRRIKTRRGHKKAIIAICRMLLTAIWNMLSKLLPYSSDGFLEPIQTNHNKTLTVSQALHLLRSKGFCIQDDAPALTSG

SEQ ID NO: 229567 - protein, 363 aa, unidentified
MSESTTVTIGLDVHASSVRVAAIRGDELLDERTLPYDLEAVERVLRRWPSVRCCYEAGPTGFGLYRYLVERGIACEVVAPGLVPQRPGDRVKTDSRDARKLARLLAGGLLEPIHVPAPELEAARDLVRAREDARLDRMRDRHRLSKFCLRQGRRLPGLSWGVVRRKWLSEQRFEFAAQQQTFDAYVHTVDLVDRRIEAFERAVGETAEQGPWRELVARLRCLRGIDTLTALGIVTEIGDFGRFKTAEEFMSFVGLVPSEHSSGEQRRQGSITKAGNSHARRLLVESAWHARRRPKVGYELARRQRGQDPVVVERAWRCQQRLHSRWQRMAGRGKPQQKIVVACARELAGFVWAIATDQPLRKT

SEQ ID NO: 229568 - protein, 345 aa, unidentified
MKITTVGIDLAKNVFQVHGVDERGKAVLKKQLKRHQVLVFFSNIPPCLIGMEACGGAHFWARRLQAQGHTVRLMAPQFVKPYVKSNKNDAADAEAICEAVGRPNMRFVPIKNIEQQAALSLHRVRQGFIRERTALANRIRGLLAEFGLIIPQGIHHIARRMPEILEDADNELSDAMRALLARLLEHLQELNRQAQELEAQIIAWHRNNELSRKLEAVPGIGPLTASALVATVGDAKNFKNGRQMAAWLGLVPKQQSSGGKTVLLGISKRGDVYLRTLLIHGARSVLCAAQRRKATVDRWVQGLLERRNANVAAVAMANKTARIVWALLAKARQYDPQHVSRPVTA

SEQ ID NO: 229569 - protein, 348 aa, unidentified
MEHYAGIDVSLEYSSVCVVDASGRIVREGKVASEPEALVAWFASLGFELTRVGLEAGPLSQWLYAAMREAGLAVELLETRHVRDAFKAMPVKSDRNDARGIAQLMRLGWFRPVHCKSMGAQETRAVLTARKLIQSKLRDVENSLRGILRGFGLKVGKTTARSFAARIRDLVAGHSSLETIAEALLAVHAVLLREFNALEKRVRTMARSSPQAKLLMTTPAVGPIVALTYASAIDDPGRFKSSKAAGPHFGLTPRKYQSGQTDITGRISKIGDASVREALYQAAHVMLTKPVKGCSELKSWAMRIARRAGMRKAKVALARKLAVILHRMLADGKPFNSAAATKTMATAA

SEQ ID NO: 229570 - protein, 400 aa, unidentified
MRAIYVGMDISKDDLKVAVKDDRNNPVMPVRTYRHDRGSFEALVNDIEDLERQFGCKAIFGMEATGIYHVPLYRYLLERQKHAKVFNGLEIKRFKGRIRKTKTDKLDAMAISEALILLVEPIYKPPTDFETIHLRELTRIRGRLIKKVAICKNQGTRNLDLLCRGYTDRFKDTFSPSSVAIIKAVFRLTHFFGLTAEQMATILVEFMPEKAAREKAAELSDLFGRAVVPSNERDSCIMELHLVIQQLELINEQMERVERRIEEAVKKTKTKLTSITGFGELTVGILIGELGNLKRFRSADQATAFAGLDVVVRQSGKYEHMGHISKRGSPNLREALYRAALPASQYNPVCKQLYQRLRAKGKHHKVAMVAVARKLLHIAYSVETKNREFYVPNHIATDKA

SEQ ID NO: 229571 - protein, 342 aa, unidentified
MKEITTVGLDLAKNLFQVHAVDENGAVLVRRQVRRAQVLLFFSRLHPCLIGIEACAGAHHWARELAKLGHDVRLIPPACVKPFVKRQKNDAADAEAICEAALRPTMRFVPVKSEETQGAAMVFRVRELLIRQRTQAINALRGHLAEFGQIVPQGAANAARLIAIVENQDSDLPADAIATLKVLVAALAHLESEIGQLDAEIARRAKENEVARRLMTVPGIGPLIATALAVLAPPPGTFRKSRDFAAWLGLTPRQHSTGGKQRLGATTKMGERSLRRLLILGANSVIIKRHVHATARPGTWLAGMLMRKPPLLVRVALANKMARIVWALMARGGVYQSPAMAA

SEQ ID NO: 229572 - protein, 359 aa, unidentified
MSLASWLVAGLLPGVNREPLKKIAPDPEVLLRLLYRWRDEAIRAGKEITRITVAYETGRDSFWLARWLQDRGIDAHVIHATSVAISREHRRAKTDRIDTAMLKRAFLGWVRGERGHCSMAVIPTIAEEDAKRPHREREALVKERTRVINRMKAILTQFGVRNFKPALRKAAEKIAEVRTPEEVPLPPNAAAALRRHIEHFRLINGQIKVIEKARLQRLRQNPTDKFNAMVFLLVRIVGLGVETAEQLVHEILSRKLRDRKAVARYAGMTGSPDESGARRREKGLSRSGNERVRKILIQLSWRMLRFQPNSGLVLWFKGRTANSRRSRKPMIVAFARKLIIALWRYVNAGLVPEGFQLAK

SEQ ID NO: 229573 - protein, 339 aa, unidentified
METTYIGCDLHKRTSNLCIKTKEGRTLEETKIKTTKEEFTRICSQYPGAHLVFEPVSQSWWLGDVLEELGLVVYLANAREVKAIAHARVKNDKIDAAVLCDLLRGDLLPESYRSSKQAREWKELVRFRTSLIGMRTQLKNKVHALLGRNGIIPPLGMIFGTRGRIWLEDLELSVIHRTHLNQYLSLLDMYESEIDFATKRVEACTSVCEDTELLMSIPGISYVSALTIMSELDTIGRFRSGKQVASYAGLTPSVYASGASVRYGRLTKRGSKSLRTILIEVAHGQGRLKKSVGLRPYFERVKERKGARTATVATARKLCVIIYHVLVSKTAFDDTRLVA

SEQ ID NO: 229574 - protein, 358 aa, unidentified
MLILAIDLGKSKSMACWYQTDDTSQEFRTVLTRPSDFHTLLTDRSIDRVVIEICDAAGWIVDLCQTLSIPVQVANTNQEAWRWRNVKNKCDRGDGLKLARLSAMNQLSLVHVPSKSVREWRSLILYRHKLIDRRTSVRNAIHSILVAQGQPMPGRRSVWSDDSMSKVTALARPLEDCPMEELWRGHLKMELEQLDDLCRRICELDQKLDALGQADERVRRLRTIPGVGPRLSELVVAMIDDARRFANARQVGAYVGMVPRRYQSGEMDRSGRINKAGCRKLRKLLVEIAWGMLQHNSHGREVFHRISKGQKTRRKQAAVALGRKVLCWCWAMLRDGSEWSTPTPRMKQSKPLLASASG

SEQ ID NO: 229575 - protein, 340 aa, unidentified
MNTMTLLGIDIGKHSFHLHGQDAKGHQVLRKKTNRGQLLSTLAQLPACTVVMESCGGAHWLARQIGALGHEVKLIAPQYVKPFVKGNKNDFIDAEAICEAASRPAMRFCSIKTAEQQTLSALHRVRDSLIGHRTVATNQIHGFLLEFGISLPIGATALHRVPALLDDAQHPVPLRLKGVVMRLHHQIQLLNDEIKDIESDLKQQLKEDDAGSRLQSIPGIGPITASAVLADVGDASNYRSGRDFAASLGLVPRQYSTGGKTVLLGISKRGDKHIRQLLVQGARSIMQHIDKREDALGPWVRELLTRRHSNVVACALANKLARIVWAVLAKGGQYDPHPSA

SEQ ID NO: 229576 - protein, 417 aa, unidentified
MKAWNEQTHFAALDWADDHHDLVVVDSQGQTVLELTFDHNAAGWRQAQEALACWPELPVAIETSAGPAVDQLLQRGFAVYPVMPKAAVRYRERKRPTGCKDDRHDAWSLADALRTDGQGWSLLSPLDPLTAELRALCRDEIALIEQRTALVNQLLAALKEYYPAALEAFDDWTAPYTWAFVLAFPTPAELVSGGKRKWEKFLHTHKLWRPQTSAARMEIFARATAFGGSAAITAAKSLLAQSLCRLLQTLEQQLAAYRQRIQVLFDQHPDRDLFGSLPGAGPKLAPRLLAELAGSDWTQINRVQARAGTAPVTYQSGKIRRVKIRRACVHYLRATLHLWADLSRQYSTWAAAYYQAHRDKGQSHACAVRCLGHRWLEIIGGMSRTHKPYDAETHLKEVQKHGSYVFKLIATPAAKTQ

SEQ ID NO: 229577 - protein, 386 aa, unidentified
MAHSTNIPQHSIDYDQTLILAIELSNKSWVLAAQVPGLSQTKAKRTIEPEKNHLLAAIEGYRIRAATAGRSVKRVITSYEAGWCGFWLARWLMAHGIEVHIVQPSSVPVDRRMRRGKSDGIDAELLLRTLLAWLRGEPRVCSMVPIPDEADEDARRCVRERSELVSERVGLVNRIGAILATLGADDYNPLLQSRRRRLTELRTGLGDPIPPNALAKITRLLTRLELVLAQIAELELERDAVARTDAPDQAAKMIQQLVSLRGIGVQSATVLVREAFVRRFANDKALGSYAGLTSTPYSSGSIDREQGIGKAGNRRLRTVMVELAWLWQRYQPGTSQVVWFRQRVGSTGRRVRKVMVVALARKLLIALWRFVIDGVIPEGAITKPSI

SEQ ID NO: 229578 - protein, 348 aa, unidentified
MQYDAGIDVSLEQSSVCVVDAAGKIVKEAKVATDPHVLVTFFKGLGFPVTRIGLEAGPLSQWLYAGLIQAGFDVVLLETRHVKAALSAMVVKTDRKDARGIAQLIRMGWFRAVHAKSASSQEIRALLTARRLLLDKLRDVELSLRGVLRGFGLKLGKVTQRAFETRVRELVANHPMLQQITRSMLLARATLQREHNVLHKALLKIVRRDKICRQFMTAPGVGPIVAITYKTAVDDPQRIKKSKGAGPLFGLTPKRYQSGETDVIGGISRIGDAMVRAMLYEAANSLLSRTMRFSALKRWGLAVAKRRGMKRAKVAVARKIAVILHRMWIDGTSFRWSNKEKVKAAAHA

SEQ ID NO: 229579 - protein, 323 aa, unidentified
MSQPNPLCVGIDVSKTTLDIATANNEFAQFTAGNDTDGFELIIAELRKHSVALVLMEATGGLEAAVACSLQAEGFDIAVINPRQARNFSRAMGYLAKTDRIDAKVLSQMAEVINRHPERERFIKAIPDAERQILAAMVVRRRQLITMLVAERNRLHPAHPQNRKSINTIIKALEDELSRIDEAMNNHIKTHFKELAARLSSIKGVGAMTVATLLSEVPELGSLSRREISALIGVAPVNRDSGTMRGRRTIFGGRAGVRTALYMAALVATRFNPVIKAFYTRLITAGKVRKVALVACMRKLLTILNAMIRKNKEWSDSYHKFSL

SEQ ID NO: 229580 - protein, 482 aa, unidentified
MKKKNIFQNRSQQLLALFEKAGNRLKMMCVPIDYAKKDHIVMFCNGYGDILRKPFSVKNTLEGVKYLIDQVMRSCRQRHIKKEYVFFGGEDVNSYAENFANALRAKGFLVANVNAHDAKKQRETLQASTDRIDLMGIATMLLNLRAKCSPAQNGIYRNLRTLVRHRKKLVKMKTEVKNRVHTQVDRLFPGFLNEKNSGINPFSESSLVLMQDRFSAQQIRRRQHRTLIKTLKRCATPDAENVAAKLRSYAAQVITTPDEYAATLQLSLQHHITHYRCLKENIDQLLSEIAFLLAQTQAAFLTSIKGVGIVLAAGVSSEIGNPFEQKPLNNLTSYSGIIPRVKQSGGIEGHTHTGRVSKRSNHILKDYVVQSAFQMGLRGPEPLLQDYKRREAAGQHAGFGMGRRFLRMGMCLMRSSQVYLPPKLRSPKAQMQERAGYYLTMWPLLRDKWKKAHAHQVAFAKDQPLGQWRQMVQELYDIKLKL

SEQ ID NO: 229581 - protein, 454 aa, unidentified
MNGDVMIAVDPHKASNTAAVLDPVTKTVIEAARFANSAEGYVRLTGFAGRWEQRRWAVEGCRGAGRSLAQRLVAGGELVLDVPAKLAARVRVYSQGHGRKTDRDDAISIGLAALDGAGITQVSCDDALVSLRLLCDRREELGRLRTQAVCRLHRLLAELTPGGMRGELCASRAEAVLARLRPADEVGQIRLQLARDHLAGITALDAKMKAAGAQIAAAVAATGTTLTSLFGIGPVIAGRLLAETGDVARFATKDHFASYNGTAPIDASSGEQARHRLSRAGNRRINHALHMMAVTQIRYPHTQGRRYYERKRTEGKTPKEALRCLKRRLSDLAYRQLVTDQRGRIGTCGSPTTPRPTPSTSISPASRSHRAAPPSRPAPRPASKPSSRSTGKVTASSASKSSTPAADCTQTSSTKPRSSANRAAAFPALPPAAAQDAGAQPASRPGRRPAAKLP

SEQ ID NO: 229582 - protein, 412 aa, unidentified
MQDILTCAMGLDIHRDVIVTGLAKGELGTDPEIEIRSFSTLIPEMRKLRDWVLEAECRYVAMESTGIYWQPIYEMLEPCFDGQISILVVNARHMKNVPGRKTDMRDAQWIATLLRAGLLKGSFIPDKTFRELRHLTRYRKSIVRDITAQKNRIDKFLQSSGFRFTAFLSDAFGASGRNIIRHLMEYGNISREALDRCLKTQTRKRIDEILIALNGSLSEHQRGFLRMIFGHLEALEQHRHTVEDAITKEITKHEEALSLLCSIPGIDVTAAAAIIAEIGTDMSAFPDSQHICSWAGLSPGNNESAGKRKSAHINKGNPYLKSMLCEVGWVISGKRSLYLSGWYWRIKQRKGAKRATIALARKLLALIYTMLKTGSPYNEECFEPRRKQSERKRASRMVNELQKLGYFVVPPD

SEQ ID NO: 229583 - protein, 326 aa, unidentified
MNPALSAFNHVVAFEVAKDSLVIHVLPAGKQSFSANKPKAIREALIAEMRRNAEASLGPLLVVCEATGGYERHVLEVCQELGIAAHKAHGSRVRYFARYLGLLAKTDPIDARVLALYGLKTTDLRLYVPPAPEALALRDLRTRRDQLQQMLFAESNRLEHARHLSVSRSLKAHIASLRKALAALEAEIAACLKASETLARKARLMQTLKGVGPATVAAILAYMPEIGAFTKAGAACMAGLAPINDDSGKLKGPRHIEAGRAAVRKALYMPALVAIQHNPVMRLFADKLKRNGKPAKVVIAAVMRKIIVTLNAIVRSGEPWSHAKTA

SEQ ID NO: 229584 - protein, 268 aa, unidentified
MRSTAAQSVGVDISKDALDVAIHPGGESFRITNNPEGHRALIKRLKRFDIARVVFEATGAYHRLFQQTMVEAGLPWVKVNPCQARRFAQATGKLAKTDRCDALMLARMGAVLDLETRAPVSKTVEALKELVNAHDALIKDRVAALNRQAIAVSPLIKRQLAQRLRQIDGQIEAIDRRLKTLRNADSDLCQRFDILTSIPGVGEVTANVLVVETPELGRLEHAQAASLVGLAPVPRDSGQTHGKRSIRGGRPRARQALYMPAQRHPIEP

SEQ ID NO: 229585 - protein, 429 aa, unidentified
MRTESTPGARGPVFCGVDTHADSHWLCVLDWRGRKVLSRQFPADAAGYEALAGAIAAAGEPACVAMEGTSSYGAGLTRHLASLGMPVREALSPARTQRRRPGQGKCDEADAERAARAAMSGSKLGTPKSQDGWVDGVRCMLAARSGAVKARTSAINTARSLLTTAPEGLRSRFRGMGGPRLMEELPSVRAEGALGAALGALADLWEAARDAALDMERAIEASLEENCPALLAMYGCGPVSAAKLAVAAGDNPGRLRSEASFAAICGACPIPASSGKTVRHRLNRGGDRQANSALHEIARQRVMRDPETAEYAERARGRGKSDREVMRCLKRYVAREAYRALMHPHEIRRPGDASELVAARRAAKVSQVRAASILGTSEKYISMLERGQRELKPIRRAYEAWVEAGLPLDWDRRAFEAERKMDSKKGLAI

SEQ ID NO: 229586 - protein, 415 aa, unidentified
MSSTLTKKLACVKPGTLYVGVDMGLERNVAVVLTDRAGRLGRFGFPNDRDGYDYFYGRLEALCEQQQASDMLVGMEPTNYFWKLLAADLEQHQICYRLVNPYTVKKHREGDQLDRSKDDNRDAFTIADLLRTGKFTQTQLLHGQYAELRQYIVLHDRLRQSWRRQKSLIHNLAGQLFPELPRVFKNLSGGTALALLRTQAAAVAVRQLTLEVFVAAVRAGFRGQKLQVTKLRQAYDLATTSVGLTDGVQALQLALRTHIEILETLQHQLETVQIAVADTFLALPEAPYLLSMPGLKINSSATILAEIGDPSRYSSARQLVKLAGIQPVPNTTGRKSRSRTPMSHKGRPRLRTALFFAVLRLIWLDEAFAQRYQQLQQRQKNPLSKMQAIGVLMNKLLRILWALMSQQSFYDPAAW

SEQ ID NO: 229587 - protein, 409 aa, unidentified
MDVHKTWIFACIGITDTSGRTEYQEARFSSFSKGLRDLALWIANFSCIEVCMESAGKYWIPVFNVLEKSCLITLAHPKYTKPQKGNKTDRKDAKWICDLFMCDMIKPSFIPPPDIRNLRDLMRYRMKLTNTLTGEKNRAQNCLTVSNLKLDDVFSDVFGKSARSITEYILAHPGETFDVAPFLDRRCKTPIEEIQAAVDGAISYEQSIKLRECLNHIDELQAHRTRIEKEILTLTQCFTIPLNLLRSVPGFSNNPMTAISTIAEIGADMSVFPSAKHLASWAGCCPRNDQSGGKVKSTRISRAGTYLKPLLVQISNAVIRSKEHPEFAERYRRIKAHRGHKKAIIAVCRMLLTAIWNILTKLVPYSADGFLCDKPVSPPSMVITRAQGMNILRLRGYSFKDDVASPAPA

SEQ ID NO: 229588 - protein, 352 aa, unidentified
MTVTIVETRPLARAITGGVDTHADVHVAAALDPVGGLLGVAEFPATAAGYARLLGWLGGFGPVCLVGIEGTGSYGAGLARHIAAAGIRVVEVDRSDRQDRRRAGKSDPLDAVSAARAALSGRAAGMPKGRDGQVEAIRALMVAKRSARSERIQTINQARALVITGPDDLRARFARHAPAELVAELAALRPRPGSMVRYHTLLSLRELGRRAQFLDGQLARLDEFIVPLVTARAPGLLGLYGVGPDTAAILLVAAGDHPERLRSEAAWAHLCATAPLSASSGKVTRYRLNPGGDRQANHALYRIVITRLSSHPPTRAYAGRRAKEGLSKKEIIRCLKRYVAREVYPHLRPPAG

SEQ ID NO: 229589 - protein, 456 aa, unidentified
MKNRIKPAEPIEIVHPNAAGLDIGAREIWVCVPPDRDEEAVRAFGTFTPDLHRLADWLVTCRIDSVAMESTGLYWLPIFEILEARGLKVCLVNARHIKNVPGRKSDVQDCQWIQKLHTLGLLTASFRPDAEMCVLRAYLRHRAQLIQHRSPHVMHMQKALTQMNIQLAQVVRDMMGETGQRILRAIVAGERDSLKLAQYRDPRCKSSEETLAKALTGDWKAEHLFALQQSLELYDFYTRQLAACDAEIMGQFSVMKPRWEIVPAVEAADAPTTVPKKYKNKNDLAFDGQTEIMHLTGIDLSAIPGIGVSLALNILSEIGTDMSRWPTVKHFASWLGLAPHNDISGGKVLRSRTLPTANRAGQAFRQAATVVSRTNSSLGAFYRRKRAQGGPQFAQVATAHKIARLVYYLLAHHIPYAELGAQAYEQKQRDRELANLRKKAAKLGVTLVVPEAASVA

SEQ ID NO: 229590 - protein, 418 aa, unidentified
MKIDPKSIPIERYIAMDIHKHYVVVGGMDPQKEWVLRPRKVRMSRFSEWVLKNLNSSDAVVIESTSNAWEIYDLIAPVVRKTVVANPLKVGQIAGAKVKTDRLDVERLLTLLIADIVPEVWVPPHHVRDLRSLISHRWCIQKQITMTKNRLQSFIHRFNLLPPEGKLFSEDNRSWWEEQEFSTMVRFQIEQDLLLMEHLTEHKKAIHQELACLSNRDPWAKDMVFLMQIPDLGIVLSMTVLSAIGDISRFDEAKNLVGYAGLGAGVHDSGLKHQGKGITKAGRKELRWAMVEAAWGAVRSDPYWKAQFQALKKRGKHANQSVVAIARKMLVAVWHVLSKSESRRHSTDEDLAYKMLIWAQRMDEAALQGLSRQQFIKYGLLRLGAGQDLTRIVRNGFPRRIASSEEVLALKPELNLLE

SEQ ID NO: 229591 - protein, 371 aa, unidentified
MKQYSTFVGMDVHKNFINIAIAQRGRNGEVRNYGKIDGTLEALDKVVRKLVSKGGPLHFVYEAGPCGYEIYRHLTAKGYDCAVVAPSRIPKKSGDRIKNDRRDACMLARLDRAGELTPVYVPFAEDEAIRDLTRAREDAKIDEKKSKQRLLAFLLRSGFRYTGKKTWSQAHMRWLSDIKMPHSSQQIVLQEYIDTITECSLRVHRLTEQIRQLLPQWRMFSVVKALQALRGVSLIVSATTIAEIGDLKRFKNPIELMSYLGLVPSEHSSGEKTRRGSITKSGNGHVRRVLVEAAWAYRLPARVSRVLLKRQEGLSKDVCEISWNAQVRLCTRYRRLWAKGKPKQVIVTAIARELCAFMWAIANEVQASSAI

SEQ ID NO: 229592 - protein, 438 aa, unidentified
MDQPACFFATDNHKNQSNHYTQNDYAAFIAIDWADKKHVFSLQVTGQTKKEAGTLEHKPEVIGPWVAKLRERFAGRPLAVAVEQSRGALIHALLTYDFLVIYPLHPTTVSKFREAFKSSGAKTDPLDADQILQILTKHLELLKPLTPDTEETRLLARLAEDRRKAVDLRTSHIQALTAALKEYFPQAIELVSGNLTSRLACDLLMKWPTFESFRQAKPSTIKRFYYGHNIRSSEVIQRVLDLAKAKSLTTDPAIVQSGSRLSQMYTQLIRALNPVIDDYDSSIEKAFEAHPEVNLFNRLPGAGPALAPRLLTFFGTDRSRYQSAQNVHSFSGIAPVTKSSGKTRAVYFRVACPKFDRQTFHEFARLSIAKSQWARNYVDYYTDKGKNFHTIIRALAFKWIRILWKCWQDRTPYCEEKYMQALKKRGSVFATLHLQNKS

SEQ ID NO: 229593 - protein, 403 aa, unidentified
MAAVVIGVDPHKGSHTAVVISAAEQPLGEIRVRASKTQADELVAWAAAWPERTWAVEGAAGLGRLLAQQLVAARERVLDVQPKLASRVRLLQAGDTNKNDPNDALSVAVAALRSTASREVIADDYPAVLKVWSRRHRDLARLRNQVACRLHAVLCDLIPGGHSKEISAAQAAKILEQVTPSGAAALARAELAADFLADLRHLDAQLRDTKKKLAAAVRASGTTLTQVFGVGPVIAGTVIGDVAEVSRFPGRDHFAACNGTAPVEVSSGNRKIHRLSLRGNRRINHAIHMAAITQIRHKHSDGRAYYDKKLAEGKTHKEALRCLKRQISDAIFTRLQADARKAAARAKGPGGQPGNDSASSAAGSHPARRLFGQATPGPGTTIRPATTAGTPSKPVSKKTQATT

SEQ ID NO: 229594 - protein, 338 aa, unidentified
MKITTVGVDLAKSVFSVHGVDEHGRPALRKTVRRGKLLELFAQLPACVVGMEACSGAQHWARELRKLGHEPRIMAAEFVEPYRRGGKNDTNDAAAICEAVSRPQMRFVPIKSVEQQAVLAVHRLRQGLVEERTALANRIRGLLTEYGLVIGVGLDRLRKALPSILEDADNAVPGIAREVFADATRQLIELDARIGDYDRRIAALARASEPAQRLMRIEGVGPVTASAIVASVGDANVFGNGRQFAAWLGLTPRQHSSGGKQRLGAMTKHGDVYLRTLLIYGARAVLRVTPMRHDAKSRWVENLRHRHCDNVAAVALAAKHARIIWALLAHRQDYEPAT

SEQ ID NO: 229595 - protein, 350 aa, unidentified
MVVVGADVHKRTHTFVAVDEVGRKLGEKVVKATTDGHRQAVQWVRSQFGVEVVWAIEDCRHLSARLERDLLTADQKVVRVPPKLMAYARASARTRGKSDPIDALAVARAYLREPDLPIASHDQTSRELKLLIDRREDLVGQRTSTINRLLWRVHELDPGHAPKSGSLDLAKHRKLLGDWLDTVPGLVAELARDELADITRLTEQIDALAKRIGERVRVIAPVLLAMPGCGELTAAKIVGETAGVTRFKSEAAFARHSGVAPIPVWSGNTAGRVRMTRTGNRQLNAALHRIAVTQIRLDGLGQAYYRHRLAQGDSSTEALRCLKRRLARVVFSHLRTDHQNQLTPCQTAAA

SEQ ID NO: 229596 - protein, 365 aa, unidentified
MLSVSHLGPIHLGLDVHKDTISVAILAPDRDGPDVERIPHDEASVRRLVGRLGDPRWLRACYEAGPTGYELARLLERMHVRCEVIAPSLIPKAPGDKVKTDRRDCRRLARLHRAGELVAIRIPTTQEEAVRDLCRARADMVEDRTRARHRLSKFLLRHGRPWRGGNAWTLTHERWLLSQRFYEPALAATYAHYRAVLQGRDAQLEAIEADLAAWYDLPPFVDAVHRLSAYRGVTRLGALTLASEVCDWRRFPRAAAFAGFCGLVPSEYSSGTSTWRGHITKTGNAHLRAQLVESAWAYQHRPAVGAELHQRQQGLDPPVVARAWAAQLRLCGRFRRLAARKDSKNVVATAIARELAGFLWAEMAA

SEQ ID NO: 229597 - protein, 300 aa, unidentified
MNKNSMYFVGLDLGDKYSYIAILDKEGELIEETRLPTTKTSFHQRFSMLPPCRVAMEVGTHSRWASHLLTELGHDVLVANARKLRAIYHNPRKDDRADAETLARLARLDPELLSPIYHRSPQAQADLAVLRSRDALIRSRTLLVNHARSIVKSSGDRLPSCSANCFASKAAPAVPETLRPALSPILETIASLSQQIREYDRHIEQLCQDQYPETKLLRNVSGVGPITALAYVLTLEDPKRFLKSRDVGPAIGLVPRRDQSGDHHCESPRLAMNSCVACSSPPPNTSSVPSDLTVTCDVGA

SEQ ID NO: 229598 - protein, 343 aa, unidentified
MEQVSTIGLDIAKSVFQVHGVDVAGEVIVSKQLRRRQVIPFFEKRPACLIGMEACATSHHWARELGALGHEVRIMPAGYVKPYVKRSKNDAADAAAICEAVTRPTMRFVAVKSRAQQSLLMVHRSRALLVRQRTMLVNAIRAHLAEFGIVAPVGLRGLKALLAVISDAQDARLPSLARSCLESLAAALMTVEQEAASAERQILVWHRSNEASRRLESIPGIGPIIATALIASVADPSIFKSGREMAAWIGLVPKQNSTGGKQRLGRISKQGDHYLRWLLVAGAMAVIRHGRKTNFAARPWLADLVERKPPKVAAVALANRTARTAWVLMAKGGTYRQPGMATP

SEQ ID NO: 229599 - protein, 345 aa, unidentified
MGPMYYIGLDVHKQKISYCVKESGGKIYAEGWIPATRHDLDCWMKNLPQPWSAALEATMFSGWIYDHLKPHAAAMKVAHPLMLRAIAAAKKKNDRIDANKICDCLRCDFLPECYMAPTTIRERRRTLRYRNLLVRQMVQMKIKISTLLMEAGISDNKQRLHKAGYFRELLATNPDIDESLSSLLRQCREMVVRLGKMETTLIRSLQQDRLLVERVERLMSIPAIGPITALTWALEIGEVQRFSSIKKAISYCGLCGDEQRSANSVQRTPISKQRNKHLQTTLIEAAKMAPRYSPTLAMLYDREKQKGNANRATLAVARKLIAYLMAVDRGQTHFLVVDREACTAA

SEQ ID NO: 229600 - protein, 348 aa, unidentified
MGVTIIGIDLAKNVFRLHGCDEQGRAVLGKQLPRGQLLAFVAQLPVCTVAMEACASAHYWAREIEQLGHRVRLISPRFVKPYVKANKNDARDAEAICEAASRPSMRFVPVKTAAQLEVQALHRVRQQLVKSRTALSNQVRGLLAEHGIVIPQGRAQLHRALALILEDADHRLSSIMREILGEIGERLKFIEERLRQYELRIERLFRQDQRCRRLAEVAGVGPLIATALVAAVGNATEFNSGRELAAYLGLVPRHRATGGRTIMLGISKRGDRYLRSLLIHGARAALSTIQRRRDQRSAWLGRLKLRRGVNVAAVALAHKNARVLWALLRRGQCYRAAPFSPGIAQAVS

SEQ ID NO: 229601 - protein, 350 aa, unidentified
MLIIGCDYHPGFQQIAFVDTETGECGERRLTNCAEAEQFYRQLQERSLRVRVGMEASGHARWFERLLSELQFELWIGDAAEIRTKRVRKQKTDRQDAQLLLRLMVEDRFPRIWVADTENRDMRQLLWHRHRLVQMRTRVMNQLHVVALNEGLRRKKALWRPEGRKQLQSLKLAPWASRRRQDLLDLLDQLTPKIQELTRALEAEVEKRPVTRRLMTHPGVGPLTALAFELVIVTAKRFDCGKQIASYVGLVPTEESSGDRRRLGHISKQGNTLLRFLLVEAAQVTVRSSPPWRSKFFHLALRRGRKIAKVAMARKLAVHLYWMWRQGWDYGQLEKLGSHAGEPGNPHGVQ

SEQ ID NO: 229602 - protein, 387 aa, unidentified
MPQPNDLSRSLAALNEDSTLIAVIEMSQSSWLVAGIVPGVERHPAKKLEPDEAELLRLLHRWRGEAEKADLNINRIAVAFEAGRDGFWLARWLRAHGIEAYVIHPNSIAVSREHRRAKTDRLDTALLKRAFLGWLRGEREHCSMAAIPTLEEEDAKRPSREREKLIDERTRIGNRIKGTLARLGIRGFKPTLRTAPERLERLRTPEGAPLPLNTMAELRREMARLRLLAEQIREIETGRLQRLDQEPNSGAHPMIRLLAQVRGLGIETADMLVQEVLSRNLRDRRAVARYGGLTGTPDESGARRREKGLARAGNARVRRGMLQLAWRFLMFQKDSALVQWYRARTADARGATRKTMIVALARKLLIALWRLVTTGEVPEGVVLRPAR

SEQ ID NO: 229603 - protein, 386 aa, unidentified
MDVLMECCCGLDVHKDMVEACIIQGWLEDPSIYREQFGTNRKELSRLVRWLMEHECYHIAMESTGIYWRSVYEVIEEQAPRWDCLLVVNARHMRNLPGRKSDVKDAEWIATLLRHGLLEHSYIPEKAIRDLREFSRLRRVLVQEKHRHINRLEKFLQTHGFRLSSVLSDMLCVSGRKLLNTLAQTGKLTPEDVLEAAGRRLKRPLEEVSEAVCGSLTHAQQSLLQLLLKRLAQDEEDLAYIDQEMALISAPYSREMELLDSVPGIDILAATTILAELGPAPQKSFASPQHLTSWAGLVPRNDESAGKVKSRRILPGNPYLKVILCQVAWIAVRVRGSRFHAWFWSHQGRLGRKKAIIAVARKILILIYRLLERDQLYDPNYSSAPA

SEQ ID NO: 229604 - protein, 407 aa, unidentified
MIVGIDVAKDSLVACAMDDQGEDVFPSYSVENNRPGCLKLINLIADNANLLKPDIIKVGMEATNVFWEHCYRLIKNHEKLNSNFKLQLYTVNPKVVSNFKKAYTDLPKNDNVDAWVIADRIRFGRVENSSSPEALYRALRQITRHKFKLAQHIKAEKARALNLVFLKFSDFTQKSPFGTFTKASMALLENYTLREIVNTDIHELAEFLHQNSNNRLGGSTPIEKITTALKKAARNSYRLKPEIDQAITQTLSMTFDNIRFYQSQNKRLKKVLKRQLKAIPQTLITVDGIGPVLTAGIISEIGDINRFDKETNLASYAGLTWSQYQSGSFTAEETHLTKKGNKYLRYYLVEAANSLRVHNDRYKSYYYKKYNEVPKHKHKRALVLTARKFVRLVFALLSKGEIYQPRR

SEQ ID NO: 229605 - protein, 332 aa, unidentified
MDNCIGIDVSKASINIHISKNAQDLKVDNSMKGFKSFHAKLKKLYKKEIENNVFIFEPTGSYSEALRKYCFEQKIKCFIINPKQFSNYAKALGVEVKNDIEDARVLSKALHLAKDGQVKIPVYDEDVERIKELMSYYKFTTKQTTQQKNHLESLESKNGDSFAIRELKKSIKASKIKEQGIINQVQMIIDANAKYKNDYENIISIMGIGQIGAISLLHLFLKYPEANQRQITSLTGLNPIYKQSGTSLQSGYRISKSGAKTYRGSLFMAAMSAIRYDKNFKAFYERLKSKGKHTTQAQIAVMRKLIITAHSLYKNNRKYDVNYNSQEVKTMG

SEQ ID NO: 229606 - protein, 317 aa, unidentified
MAGEAVSVGVDVAKSSLDVAVSNSTEVRRFANDEDGVSSAADYIAAMNPVSVIVEATGGLEMNLVAVLQSACLPVAIINPRQVRDFARATGMLAKTDAIDARILALFGIRMKPEIRSLPDKEAREMGRLLTRRRQLVEMLTAERNRLLQADDDIRPGIDTHITWLEEALSNIDEDVENRIKQSPSWREKANILKTVPGVGKVVSSTLLIELPELGRLNRRKIAALAGVAPLNRDSGTMRGKRTVWGGRARLRAVLYMAALVASRRNPVIAAFYQHLVAAGKTKKVALVACMRKLLTILNAMMRTMTAWRPGMALTEG

SEQ ID NO: 229607 - protein, 356 aa, unidentified
MSKNVISNPSISRQCVGIDISKDSFVACISHKTSSDEIVVKSTKKISNTPAGFKTLQEWVTKFTSSELPLIYVMEATGIYYESLAFDLLERNQSVSVQLAKNVKFFMQSHNIKSKTDDIDAQAIAQMGLERKLKLWQPGSTQMRLLKHLCRERMMLQAEQTTVKNQSHAWKHTYKPEESILKRLESRLIFIKAQIQEIEKEIQNIVEKDQDLAKRVSNVCSIKGVGLLSAIVIIAETNGFALFNNKAQLISYAGYDVVRKQSGNAESKTRISKKGNKNIRKALFFPATTASRFNTKMKSTYEKITERTAIKMKGNVAVQRKMLVLIYTIYKNNIPYDENYQYDKERNETQKIRRSQ

SEQ ID NO: 229608 - protein, 355 aa, unidentified
MNQEKYIGMDVHAATISAAVMNAEGKVLMECVLETKAATILEFIEGLRGTLALTFEEGIMATWLHDLLKPHVSRLVVCDPRKNALMRDGNQNDRVDARNLAELLRTHHVHGVYHEKHGTRALKELGRSYLTLTKDSTRVMNRIKSVYRSWAIPCAGTSVYSRRHRAEWLAKLVEPGVRMRAEHLYEQLDSLQPVRQAARRELLRESRKHAAVKLLRQIPAIGPIRSAMLVAILQTPHRFRTKRQLWAYSGFAVQTYDSGEYRFVRGKLQRNRERITVRGLNHNHNHDLKNLLKGAAITAIERPGPLQDFYAALVDKGIRPSMARLTLARKIAAITLTIWKKGVSFDPKQLQRQAA

SEQ ID NO: 229609 - protein, 296 aa, unidentified
MQNVTLIGIDLGKHSFHVHAQDKNGNALLRKKFSRNPLTAFLSTCPASTVVMESCAGAHFMARHISQFGHQVKLISPQFVRPFVKSNKNDFIDAGAICEAASRPSMRFVTPRTEDQQAMSALHRVRDAIVRDRVKTTNQMHAFLLEFGISMPRGIAVIRRLAAVLEEHELPPYLARLLMRLHQHYAYLTEQIEELEQELKTHMADDDTAQRLLTIPGVGLITASLLATKPGDGKSYASSRDFAASTGLVPRQYSTGGKSTLMGISKRGDKNLRRLLVQCARAFMQRPEHNQGRLAD

SEQ ID NO: 229610 - protein, 343 aa, unidentified
MDYFAGLDVSVKETSVCIVDDAGKIVREARVASEPEALLQVQTNTSYRFKRIGLEAGPLSQWLYSVLAEAGLPVICVETRHMRAVLKAQINKTDRNDARGIAQMMRVGLYRPVHVKTLRSQKLRVLLTHRKLLQSKAIAIENDLRATLRNFGLKVGMIGTIKFETRIRELVENLPDLAALVEPLLIVRRIIREQLGILHRRLLAIVRDDDVCRRLMTIPGVGPVVALTYRATVDVPARFRNSKAVGAVFGLTPAKYQSGENDRTGAISRCGDEMMRMMLYEAAQSMLVRSTKWSWLKAWAMKIARHRGMKKAIVALARRLAVIMHRMWVDGTAFRWTREVAVA

SEQ ID NO: 229611 - protein, 412 aa, unidentified
MELVVERCSGLDVGKDEVVACVRVPAPHKRGRRQEVRTFATFTAGLEALADWLAAEGVTQVVMEATGQYWKPVWYVLEERGLELLLVNAHHVKILPGRKTDVGDAAWLAELLEHGLLRGSFVPPPAIRELRDLTRYRKRLIQAHSAEVQRIQKTLEDAGIKLDSVAADIVGVSGRAMLKALVAGERDPGVLAELARGRLRAKLPQLRQALRGRFGDHHGLLVGLALDHLEHLERAIATLDGRVDQVIAPFTAARDHLDTIVGVGKRAAECIIAEIGVDMGVFPTAGHLASWAGRCPGNNVTGGKRRSGRPTKGNRWLAEILTECAWAAAHSRDTYLAAQFWRLARRIGKKKAAGAVGHSILVIAWHLLTYDCDYHELGGDFLVQRDSDRARQRAVAQLQALGYQVTLQPTAA

SEQ ID NO: 229612 - protein, 309 aa, unidentified
MEHFVGIDVAKDRLDIHVRPGGESFAVARDGDALAVLVKRLQTLAPALIAIEATGGYETVVASALAAAQLPLAVVNPRQIRDFARATGNLAKTDRLDAAAIAHFAEAIRPPARPIADAQAQALGELVARRRQVIEMMVAERNRRRMASQRRVIRAIERHLALLQAELSELEGDIDDAIRNSPAWQADADLLQSVPGVGPATLRTLIAELPELGHITRRKIAALVGVAPINRDSGMLRGRRSIAGGRPAVRTALYMAALVASRKNPIIAAHYQKLRAAGKTGKQALTACMRKLIVTLNAILRDRKPWQSA

SEQ ID NO: 229613 - protein, 345 aa, unidentified
MMNIASVGIDLGKNTFHLVALGEHSKVLLRKKFSRTQLLAYSANLPSCLIGLEAGAGSHCLGSILREQGHQVRLIPAQFVKPYRKSNKNDFLDAEAIAEAVTKQNMRFVPIKTEEQLDVQAMHRVRDRLVQRRTALINEIRGFLLERGITFAARPIHLRKNLLTVIEDPEQNLSSHLRWLLERLWQEWKQLEADIKAITDEIERISNENPHCQRLQQIPGFGPLVSTATMAAIGNGAAFRRGRDFAAWVGVVPRQYSTGGKQKLLGISKRGNIYLRRMLIHGARAVLFRIKYDTGDLGQWVHRLMQRAPRNKVVVAIANKLARMAWAVLSSGKEYRHQRLQPVAA

SEQ ID NO: 229614 - protein, 395 aa, unidentified
MFIVGIDIAKRSHEAIIIAEDGQVVRKAFSFRNNCTGYNLLLEQVRRLTLVKSQIVFAMESTAHYWLALYARLLKDGYTVLVLNPIQSHSLRELYIRKTKTDARDSLIIADLVRFGRCKASNVPQDKILALRELCRSRAYLVDMAADLKRKLIALLDRIFPEYESLFDSVFSKASIAVLSKYSTPQKVKNANLRKLTDLLMESSNGHFGEWKAHQLKEAACSSFGIDDSGGVYSMLLGMFLEQILSLTAQADSLEKQISVFFQEFNNPLTSIPGVGTVLAATILSEIGDITRFSSADKLLAYAGLDPSVKQSGEFKSNQNRMSKRGSPYLRRAIWLASTVAVHRDPMFQTYYEKKISEGLHYMNVIGHVSRKMTAVIFAVLRDGQPYQPILQSAG

SEQ ID NO: 229615 - protein, 462 aa, unidentified
MPRPTKLQLDGLPTIHPNAAGIDIGATELVVAVPPDRDARPVRAFGTCTPDLQALVTWLIACRIDTVALESTGVYWIPIYELLEQHGITPYLVNAQHVKMVPGRKSDWNDAQWLQTLHALGLLRASFRPDAEIVALRTLVRYRAELIQHRAPHILHMQKALQQMNLQLERVLSDIMGTTGQLIVRAIVAGERDPVVLARYRNPSCKSTEETIAKALTGTWKEELLFVLQQSLVLYDVYTAQIAVCNAEIERYLEAMDSRTGDPDTPLPDLPPAKADSKTKNAPPPQTRAQYARIIGVDLVAVMGLSASSVQTILSEIGTDMSRFPNVKHFCAWLGLVPRNDISGGKVLRSRTRKVVNRATQAFRQAAQSVSRSDSSLGAYYRAMRARKGPQQATVATAHKIARIVYHLLTHGEAFDLESAADYDRKRQERELRALHRRAQKLGYTLAPVSEASGAVVPKASG

SEQ ID NO: 229616 - protein, 325 aa, unidentified
MTRPTLGIDIAKLKFDVCLMNTAGKLKHKVFPNTASGFSQLATWLTRQGVTQELHACMEATGTYGEALAYQLHRDGYTVSVVNPAAVKAFAGSRLSRTKTDKVDAELIARFCLAQEPLPWTPPAPEVRELQALVRRLASLIEMRVAEENRLEAGSVVAAVKSSVEAHVVYLAAEIKRTEDLIRNHIDKHPMLKQQSELLDSIPGVGKTTAALLLAEIVDVTQYRSARQVAAYAGLVPRERRSGSSVRGRPRLSKIGNARLRKALYFPAITALRCSAFFQSWAEGLRQRGKCKMSVIAAAMRKLIHLAYGVLKTGKPFDPEWGKIA

SEQ ID NO: 229617 - protein, 349 aa, unidentified
MTEQRISYAGERVYVGVDVHKETYTVTCVCHTQIVKTATVPAEPASLAASLLRWFPGATLTSAYEAGFSAFVLHRALTQVGITNIVVNPASIAVAANDKVKTDRRDSKRLAIDLADGRLRGIYVPTEAEELARLLPRTRAQIVEHRATLARQIKAKLHQFGLIAPSSRRVISNRYLREIATWPLPPELGVSLTLLAEQWRFAPRQLIEMRRLLRDQAKAQQETEKVYRSVPGIGAVVARTLATELGDMTRFANERALFSYTGLTPSEYSSGSSVRRGHISRQGSSRVRHLLVETAWRALPRDEVLQEIFDRIAATRGKKRAIVAIARRLTGRIRACFRQGTTYAVGTYA

SEQ ID NO: 229618 - protein, 362 aa, unidentified
MPMLAELIDAVVGVDTHRDTHEVELALPTGTAIGIRKISNDNSGFAELLAWILNHSPGPRVVVSIEGTRSFGVGLARAVAAAGLTVIECEQPNRKARRGKGKSDPIDAHLAVLAALRLDADRLPVPRADGDREALRILLGTRHELTVVTTAQTNRLRALLLGGKDSERDLARATLTDPVLLAMVRRREPPQASREQAVRHGEIRRLAHAIRAGRHALAANRAQLQAIVDQIAPELTERRGIGAVTAAQAIVSFSHPGRCRSDAAFAALSGTSPLQASSGKTVRHRLNRGGDRALNSAIHTIAITRIRCCPTTKNYVARRTAEGKSSREIQRCLKRYIARELYRALNASTTLTTQTSAAPTPA

SEQ ID NO: 229619 - protein, 389 aa, unidentified
MKIYVGIDIAKLNHFAAAISSDGEIILEPFKFTNDADGFQLLVSKLESFDKNSIIIGLESTAHYGDNLVRYLVAEFYQVCVLNPIKTCQMRKNNIRKTKTDKVDTFVIAKTLMMQDDLRFVSFYDLDMMDLKALGRFRQKTIKQRTRLKIQLTTYVDQVFPEIQYFFKSGLHQHAVYALLKEAPSPKEIASMHMTHLANLLKVNSHGHFTKELAKELRVLAQKSVGANDSAISIQITQTIQQIELLDSQLEKIEAEMTDIMKFNDSVIMTIPGIGYINGGMILGEIGDIHRFSNPNKLLAFAGLDPSVYQSGNFQAKTTRMSKRGSRVLRYALVNAAWNVVRNNATFKAYYDAKRAEGRSHYNALGHCAGKLVRVIWKMLTDEVEFNLE

SEQ ID NO: 229620 - protein, 444 aa, unidentified
MLVHKTLPMPKGIPYLSVGFDVGADFSWMSIMLPNATLIGKPSKILHTDSSSRELAVAKIKEAQEMYSLESKCFLESTGIYHIPLLYFLRDKGFDCSVINPIITKNSTNLNIRKLHNDKFDSKKAAKIGLDPSLKTSIVPDDDIIDLRNLARDYYYFKDLQSAVVLKLHAELRVSFPGYLHVFSKVTTLTSLKLLDEYPLASDMLAAPKEKIIEMIKSTARFGEAYALSKYDAICAAARDASVFGRALPSNALRIKLYIQTYLEYQKHLDSLLEELHKAMDKLKGKPAYDRFCLLQSLRGVGFLSAVVLIAEMGDFDLFSSPRKLYAYFGLDPAVKQSGKFHGDNVHMSKRGSSLARRVLHMVAVNNLKIDKGKKSPVNPVIYDYYIRKCVGKKKKVAVGAVMHKICNIIFAMLRDNKPYEIITPQEHRSRYTAEHPASMKGAA

SEQ ID NO: 229621 - protein, 390 aa, unidentified
MIYVGIDVAKDKHDCCILDDEGRKLYPVFTISNDMVGFDELFSRIEEVTSDKTEIKVGLEATGHYSSNLLASLVDKGFPTVVINPLHTNLYRKGLSLRKTKTDKVDASSIAMMLMTDRTLKPYSKISYHNEELKSLTRYRFDKVHERSKLKASLARLVNILFPELEKLVPTLHLNSVYTLLEELPGAYYIAGCHLTHLKKILEDSSRGHYSRDKAIEIRNAAIDSIGTPMDAKSMELRHTIHLIWILSEEIEEIEASIKSIMDETQSPIMTIPGISYRMGAMILAEVGDFERFDNADKILAYAGLSPSTYQSGQLDSSHSHMEKRGSRYLRYALFNATKFVCKWDESFGIYLGRKISEGKHYNVAVSHAAKKLIRTIYRMELTRQAYSPS

SEQ ID NO: 229622 - protein, 398 aa, unidentified
MDLPVYYELETNNGNRDYRIQIGGHYMNYNTVYVGMDVHKESFTLCSCKYEDEKASHYQRTPASYKNVLRYLAFLRTIYGEYTRFVCGYEAGCLGYSLYHQLENFNVECVILAPTTMLEQRSKRRIKTDKRDAEIIARSLAQHNYSPVHIPTETDNQTKEFIRMRDDHKAELKKIKQQILSFCLRQGYQYDGSGNWTAKHVKWLRSLKPAGLYKEILDEYLLTYTILIDKLNRLDQRIEELAFKEEYKESVSKLTCFLGIKTHTALSVIVEVGDFQRFVSARKFAGYLGLVPGQHSSGDDRNGLGITKAGNTHVRRLLVESAQSYTRGKIGYKSRVLRSRQAGNSPQVINYADRANERLRRRYYKMVLKDGKKYNIAKTAIARELACFIWGMMTDNIY

SEQ ID NO: 229623 - protein, 312 aa, unidentified
MIHDLSFVGIDVSKHHFDVHIHPAGESLRCGTSSDAIAQLVRRIAGLGPVAVGLEASGGYESRLADSLHAAGVEAHVVAPARVRSFARGIGQLAKTDRIDAAMIARYLVAVRADLTPYAPDRDRCRLSAISAHRRRLLAEKSGLISQLDTIDEPLVRSMIEKRLATIAQDIATLDAAITDLLAKVARLRQCHARLRKVTGVGPVLATALLADMPELGKVSAKVAAALVGVAPYARQSGASNRNGRCTGGRKHLRDIAYMAVLSAVKVKDPVLAGFYQGLRARGKPFKLAMVATMRKLITILNAIARSDPAFA

SEQ ID NO: 229624 - protein, 325 aa, unidentified
MSNKVNLPVLGIDISKDYFHVELGLNDKKRNRKFTNRAEGFAELSVWLGKQKVPQAHVCLEATGPYSEALALYLHQQGHQVSVVNPARIKKFGQSELLRNKDDRPDAGLIRRFCEQQRPSLWTPPPAELRQLQALTRHLDGLIETRQQQLNRLESARSKEVIKSLRKLVAYLDKEIAHAEKQIKAHIDQHPDLKQQYDLLDSIQGLGERTISILLGEINFKQYRSARQVAAHVGVTPRNDRSGTLQHKTRMSKIGNARVRKALFMPALVAKRHNPLVQTFCQRLAANGKTKMAIVGAAMRKLIHIAFGVLKSGRPFDPNHELKIA

SEQ ID NO: 229625 - protein, 385 aa, unidentified
MQWMIEGQSHFQPFGLSYWGFANLNKGVGSMTASYDYHIGVDYHKSYSHLVVQDSAGKTLRSGRVKNDRQSLGGFLERYRENSHAVVEATRNWMVMYDWLDDICDDVVLAHPLKVKAIADAKIKTDKIDATVLAHLLRADLVPEAWAPSERSRDLRVALRERMFYVRLRTMTKNRIVTVFDRYPEQTAQLKKLGDLFGKAGRVQLAQVNVSEIDRIQIDRGLDFVGDLDVRIKQSEATIRAMTKANANVKLLKTIPGIGEFFARLIDAEIDDIARFRNPKKLAAYAGLVPSTYSSGGKTFHGKIIKQGNKWLRWAFVEAVTPAIASDAQLRAQYEHLKFRGTNKARVAIARKLLTIAFQILRDQRAYEPRDTSIREGASTTSRLS

SEQ ID NO: 229626 - protein, 503 aa, unidentified
MTTGKRQAVHALQQPLTTVHRAARIPEQVREQAEACAKLASLPVQHEHAAGIDVGDASHWACVEATPDGSDRVREFPAHTPGLRQLVAWLRHCGVTTIALEATGVYGHVLYLTLLEAGFQVITIPPQFARQIKGRPKTDKRDCQWIQRLHKHGLLPSIFQPDEATHTLRDYVRQRANLVRLSGQHIQRMQKALELMNLKLTKVLGDVTGVTGLKIIRAILAGQRDPHELAKLRDRRCKHTETEIAEALDGRYRPEHLTELRLCLALWAKYQEAIAELDTVIAAQLRSMRRQTELPPLPPKPRVRGRKPHDPRFDVRTALYYLTGVDLTAIEGIDEIHALTLISELGSDLTKWPTVKHFTCWLGLCPNWQKTGGKVKSSRVRRGKNRAALALRLAAWSLMRNPSYLGAYLRRQRSRLGAPKAITATAHKLARIVYHLMRYGLAYVRQTEAAYAVQVRDRLEQQLHRRAKELGYELKKIEPKLETLMVNGEQLTVKDDGEIVAAK

SEQ ID NO: 229627 - protein, 318 aa, unidentified
MGKPRIYVGIDVSGETLDVATHPGQRASSFRNTATGISELVTYLKKLAPVLVVMEATGGLELNVAAALVASGIPVAVVNPRQIRDYAKSMGKLAKTDTIDAQVMADFAAANQPEPRPLPDSQTLALKDLLTRRSQLNEMITAEKNRLCRARIPVSDHIKAHIAFLEQEMGGTDSNIQAFIQQTPVWREKENLLRSVPGIGPVLSSTLLAELPELGALNRKKIAALVGVAPFNRDSGKLRGKRTVWGGRAKVRSALYMSTLVATRRNSVIQCFYKRLLAAGKAKKSAITACMRKMLTIINAMIKHGTPWQRSLNQAVIS

SEQ ID NO: 229628 - protein, 353 aa, unidentified
MGEVVIGVDAHKRSHTLVAVDEVGRRLAERTVAATSEGHLQALGWASRWPLVRFALEDCRHVTRRLERDLLTAGARVVRVPTQLMAADRRAGRARGKSDPIDALAVARAALREPDLPAAHLDGRAREIKLLSDHRHNLVTERTILVNRLRWHLHELDPELQIPSRGLRRYCVLDALAIQLATFEGVVARIAAEMVTRCRELTVQINALERELRDLVRILAPALLAVPGCGVLGAATIVGETAGAARFRSKDAFARFTGTAPIPIWSGSTAGKVRLNRGGNRRMNCALHMIAITQARGIGPGKDYLDKTLARGKTRTEALRLLRRRLSDTIYTALLADQQPAAPHTSEALPQAA

SEQ ID NO: 229629 - protein, 410 aa, unidentified
MYGKAGPMIYAGIDIAKNDHVVGATDERGREAAKPMKFANSASGFDRCAAYLDGLSESKSDLLVGMEATGHYWLPLFCRLQDEGYAVVVINPMRTDAMRRFKGSSRVKTDMIDCALIAETLRCGGFQPSRLGDEAMIELRQLTRLHQALKESVADLKRQVIVALDQVFPEYDSVFSDTFGESSKAFLKRCPTPEECLAVRADSLARTLERASRGKLGRAKADEIKGIAKASCGIGLATSAFSFQIKLLIDQIDFIEGQVSEVEARIRAGIEEVEPLILTIPGIGYALGAQIVSEIGDVRRFRNASSIVKYAGINPSVSQSGKFSSEESHITKQGSPYLRRALYLAAMAQLKLKSPFYDYYAKKRADGKSHREALVAVARKLVHVIYAVLSKQEPYDPNVTKNPELASRSE

SEQ ID NO: 229630 - protein, 417 aa, unidentified
MDEEVYYERCAGIDVHKKLLVVCLRIGRKSEVREFGTLTHEIREIVAWLKENGCQMVAMESTGSYWKPLYNIFEQEGLPAMVCNAYHIKNVPGRKTDVNDAQWIARCLSQGLLNPSFVPDREQRELRDMTRFRKAQIEERSRNINRLQKFLEGANVKLGSWLSDIEGKSATALLELVIGKPDFTVEEVSVRMHRNMKSNAQELFLSLEGSITPIQREFFAHVMAVIREQTAQIEKTDALIQCSLSANYKAAVEALDAIPGIGKISAEQILAEISPDMSRFKNQHSLSKWAGVCPGNNDSAGKRKSGKTPPGNKTLKSTLTQCAQAAKKNKTSFFSAQYSRLVSHRGKNRATMAVAHSLLIAVYFVLRGAQFKDLGADYYTQFNREKKINSHVKQLSKLGVTIPDHILSASFQRPPDG

SEQ ID NO: 229631 - protein, 345 aa, unidentified
MNYIGIDLHKTSSQICILTEGGELIERRIKTDRDSFDSLLGGQAPAKILVESSTESEWVARHLEALGHEVVVADPNFAPMYATRDKRIKTDKRDARTLCEACRLGAYRPAHRTSDAQRDIRSHLAVRETLVRTRAKYISLISALARQEGCRISRGTSANFAARVAQAQLPAHVLTQVEPLLVMLAVLNEQIRKADERLAEVVRGDEVVKRLCSVPGVGPVIATTFAATLDGAARFQGAKHVRSYLGLVPREYSSGEKQRRGRISKAGNRRARALLVEAAWSLLRWKTERTRALHEWWLRIAQRRGKAIAAVALARKLAGILFAIWRDGTEFDVRLLRSPDAAAAP

SEQ ID NO: 229632 - protein, 374 aa, unidentified
MRDHIEAFVAFDTSKLRNAVAIAEAGRTGEIRFLGEIDNDGAATGKLVRKLAARYERLTFCYEAGPTGYGLYRQIEGLGYDCMVVAPSLIPKKPGARVKTNRRDALSLAKQLRAGELTAVWVPDRRHEAMRDLTRGREAAVEDLRSKRQQVSSFLLRQGLHFTGKKTWTKAHMSWLASQKLEYAEQRIAFEEMLLAIRQAQERIERLEQAVRAAVPDWSLAEVVTGLMAMRGIDLIAATAFLAEIGDLSRFQTPRELMAYLGLVPSEDSTGDTVRRGPITKAGNRRARRILVECSWSYRHPPRVGKKKQEKVAAAPRAVREIAWKAQCRLSARYRALTRKGKLATVAVTALARELAGFIWAINREIAAPRPVAM

SEQ ID NO: 229633 - protein, 459 aa, unidentified
MRRKSKRTKGIEQAHPFDGMSKVNPHAAGVDIGAEEIVACVAANETTQLVRGFGNYTVDLHAIADWLAEHKIKTVAMESTGVYWIPLFEVLEQRGFECLLISSRSLRRVAGRKSDITDAQWIQTLHNYGLLENSFRPQADLVALRSLLRHRRSLVDHRSPHILHMQKALLQMNIQLSQAVSDVTGVTGQAIIRAILSGVRDPQMLASLREPGCKKSEEEIGRALTGTWRDEHLFVLKQAVALYDFYTQQIQECDEEIERKYSETRPDWDGGEVKPLPARKRNSHSKNKFHETERIRQHLKRISGVDISLVDGLGVSLAQTVILECGTDMSKFPTEKHFCSWLGVAPKHDISGNKVLKNSTLKTKSHAGQAFRMAAQSVKQAECAFGVLYRRLRARLGPAQATVATAHAIARVVYRMLKYQVEYDPLSVNEYQKQYEEQQIKYMKKRAAKLGYELVPVPA

SEQ ID NO: 229634 - protein, 349 aa, unidentified
MNKNLFVGIDFSKETFDAAILKVSEESSIDLKIIGNEQFKNDVPGCKRFVKWLNKTCALSGDYSSVLVGGEDTGNYSTTLPKQLYVLGIDCSVQNAYSIKCGSGKIVRDKTDKMDAEKIAYYFYRFRDQIRLYKPLSKDMESLERLYSYRYGQVRESARLQCQIKEYEHILKSEPNDETLKFMIQRLEEQERFLKEEIKTIEAKMVEMIEADEELNEIHECLLSIPGVGKITSLLLIVVTRGFTRFDNPKQLACFLGVSPHPNQSGTSVQNGNHRSWFADPYFASLLHMTALTASIHNPKFKAYDERLKSKGKPKLLIMNNIKNKLLTVAFTIATRRTKFYSDYDAKRA

SEQ ID NO: 229635 - protein, 427 aa, unidentified
MSYRVAGVDVHKKMIAVVVADVAGEGEYQFERRRFAATPSELHLLAEWLTKLDVQEAVMESTAQYWKPVWGALERYWKPDCRKREGAGPMSGTLYLAQAKSNRGPRGRKNDFADAQRLVKRLVAQELILSFVPDTEQRLWRTVTRKKHQLTRQVTRVKNQLEAQLEEAHIKLSSLISDLLGVSGRRMLQGVADGETDPAKLASLADHRLRAPAEQLRDSLGAVTDLKPVYRRLVKMALDELGLLEYQIEELDKESASLLSQYQSAVERVAEVPGLGVDSSQQIIAEMGPEAATFPTAKNFSSWVGTCPGQEESAGESKSSRSPKGNRNLRRILNQAAQSAVKVKGSIFELKFRQIVPRLGYKAAIWAVAHRLGRLIWKILHDGVHYEERGPAVSAKSKKARAARMIKELRALGYQVAPLNLQPVSAR

SEQ ID NO: 229636 - protein, 381 aa, unidentified
MSIVALDIASKSATFCVLGTQGVQSQGSLTFDHDGFSFFIASSPVSDASLFVMESTGGYHLPLYHFLLNHGRKARIINPLLVKHFHDGQTLRKTKTDALDAVTIARYAQANLSALQEDRMQLDSESKMLARRRARNAEDLAKAKTILKSDLSVAFPELLRFNVFTKTLLEFLSIYGCAKDVLGATDGQLQQALDVQKGRKSEEITVQNIKDLAQTSIGVSYRAAMVRDSAKAVLACQQRDEDLTKALVELETALHKRQMEILTSIPGIGEVTASHFLSEIPDISQFATYQKLIAFAGTDPGIYESGETSKNLRISKRGNAVLRKYLYLMADSCKRHNIVFNAYYHKKREAGFPHRKAMVATMNKLVRTLHALLTKDEMYSI

SEQ ID NO: 229637 - protein, 278 aa, unidentified
MSDSVTVGIDVSKLTLDVHVSPAQLHQTVSNNESGFAELKTLLSMQQVSLVLLESTGGYEDAVVCFLQSLGYDVSVINPRQARDFARSMGRLAKTDRIDAELLAQLASVIHARPDRERFVKKITDDRRRKLACMVARRRQVVNMISTEQQRKSAASNYSTDSINKVLSFLRSELKSIDADISLHVRSHFADISGLLASFKGIGPATIGVLLGEVPELGRLNRRQISALIGLAPFNRDSGFMRGRRTVWAVVQWSGMRFICRHFLPCVLTRLSGCFICD

SEQ ID NO: 229638 - protein, 386 aa, unidentified
MQKLNDLSRSPSPLDPDGTLIAVIELSLSSWLVAGIVPGVERQPLKKLAVDKSALLKLLHRWREEAAKAGHRIKRIAVAFEAGRDGFWLARWLSARGIEVHVIHASSVAVPREHRRAKTDRLDTSLLKRSFLGWLRGERDHCKMVAIPTTMDEDAKRPNREHESLVGEQSRIVNRMKATLIRLGIGGFNPKLKKAAERLDGLRTPEGEPIPPNTLAELRRDMARRRLVSDQIRQIEEARLECLKQAPSDGPHAMVRLLPRVIGVGVETADILVQEVLSRSMRDRRAVARYAGLTGSPDESGRKRREKGLTRSGNARVRRGMIQLAWRFLMFQKDSTLAQWFRGRTESARGTRKTMIVALARKLLIALWRLVREGVVPDGIILRPAS

SEQ ID NO: 229639 - protein, 370 aa, unidentified
MPDVSSTAPADVRLWVSLDVHKLSIVAATLPPSGGQPELHRIETTERAIRRFVDRLGGPAGLAVCYEAGPGGFDLLRLLERIGVACDVVAPSLIPVRAGDRVKTDRRDAKKLVRLYRAGELVFVQPPTPETEGLRDLMRCRDDLRRARTAARHRVAKQLLRHGRVYREGVTSWTKMHRAWVARQRLDDSLGQRALDQMLLHLDGIDRQLDQLDRDLEQIAQQERWAAQVRILTCFHGISTRTALALIAEIGDFHRFSHPRELASWLGITPSEHSSGDQQHRGHITKAGNEHARRLLIETAWHYRHRPRPRAHQPADPRAWHAQTRLHRRYRHLTDHGKRSTVATVAVARELTGFLWAAMTDQPLRQETTA

SEQ ID NO: 229640 - protein, 345 aa, unidentified
MNNISLLAIDIAKNIFQLHGNDRNGKCVYKKRIKRETLVPTISNIPQCTIVMESCGGSNYWHREFTKIGHTVKLISPQYVKPFVKTNKNDANDAEAIAEAASRPSMRYVDVKSVEQQDIQSLHKIRSRLVKNRTQLANQIRGLLLEYGITINKSIYNLNRDLPDILADLENDLTIITRDFISDLYEEFLYLGKKIETYNNKVKHLAKSNESCQRLLGIEGIGDLSATAILAIIGDPKNFKNGRHFAAYLGLVPRQHSSGQKTKLLGISKRGNTYLRTLLIHGARAVVANAKNKTDKKSLWIQEKLLRSGYCKTLIALANKSARTAWSILAKNTKYDINYDLKQVA

SEQ ID NO: 229641 - protein, 343 aa, unidentified
MEIHAIGIDLGKTLFHLVGVDACGTVVVRKRCSRSQLLAYTANVRVQRIGMEACSGSHFLGRALREQGHDVRLMPAQYVKPYVKTNKSDYIDAEAIAEAVQRPNMRFVPIKTEEQLDLQTVHRVRERWVMRRTAVVNQIRGLLLERGLTLPKGRSYVNQALPGILADAMLRLSDSFRVLLAQLGLEMDQLTARIEQMDAVIHQTATENEACRRLTSIPGVGPVTATALVAAIGNGSGFRRGRDLAAWMGMVPREYSTGGKQKLLGISQRGNVYPRRFVVQGARTVMQHRSKQAAGLRCWLDQLMARTHQNVAIVALANKLVRMAWAVLCKNETYRAPVLVAST

SEQ ID NO: 229642 - protein, 411 aa, unidentified
MQRRENYLYVGMDLHKESHTAVLVNCWNEKLDVIVIENKPSEFIKLEKRVNKKASQLSLSPIYGLENAYGYGRALAVWLIEKGYVVKDINPALAYDQRKSNPTFQKNDEYDAFAVATVLINQLHNLPDAKPEDNHWTLSQLVNRRDILVKDGIRLKNGLHEQVSIAYPSYHKFFCEIDTKTALYFWKTYPSPTCLQNKTVDDLYSEFREIATQTSKSKAELILDCIRNDGDTLRDYQESRDFITQSLARCLEQQKDEIALVEAEIKRMLQFFDYKLTTIPGVNIATASKLIAEIGDIRRFPNADKLARFAGAAPIKFSSAGKGKEQSSKQGNRQLHGLFYFLAVSMVTVPKSGKPNQPIFYSYYQRKISEGKTKSQALVCIMRRLVNIIYGMMKNKTEYRPFVVEEQATEE

SEQ ID NO: 229643 - protein, 391 aa, unidentified
MLNDAPLPAQAAIRTDLGAIFVSMELSRRTWLITSLSPGAGEKMSKHSVPASDVPGLLHRFAELKRKAAARSGRDFPIIVIQEAGLDGFWIHRVLQSEGIESHVVDPASILTSRRARRAKTDRIDGETLVRTLMAFKRGEPRVCSMARAPTPQEEDRRRVCRERRILVGERVRHVNRIKGLLFAQGIFGYEPLRKCRRERLEDLRTGDGRPLPVHLKAQIIRELDRLELVLAQLKAVAAERDTLLKTASDEMPAPPAMLVQLKGIGPEIAAVLWSEGLFRRFDNRRQVAAYAGLAPTPWQSGSIDHEQGVSKAGNPRLRTTMVELAWLWLRNQPTSALSLWFHERVQSLSGRMRKTIIVALARKLLVALWRYMTAGVVIEGAVMKPASATI

SEQ ID NO: 229644 - protein, 359 aa, unidentified
MRETMTYVGLDVHARSTHAAAIDVVSGELHRARFGGGSDEVIGWLQALPQPLKGCYEAGPTGFSLYRAADAAGLRLEVVAPSKTPRAPGDRVKSDRKDAELLARLLLAGQLKAVTVPSPPFEAARHLARAREQVRGDLMRCRHRVSKLLLLHGRVYDGSAWTKTHRRWLAGQRFDQPATELAYLDCLAAVDGLIARKHALDERLSRLAVEGEWAQTVARLRCFRGIDTLTAFVLALEIGDFNRFPRPAKLTGWLGLVPSLDQSGESRRQGAITKTGSGYARRLLVEAAWHYLPRPSEGPTIAARRAGQPDHVIQIALRAERRLHRLYQRLRARGKPGNVTTVAVARELACFLWAAAVAD

SEQ ID NO: 229645 - protein, 395 aa, unidentified
MFIVGIDVAKRSHEVCMITSDGQTVQRPFSIRNNCTGYNLMLEKIRKHTNIKSQIVFAMESTAHYWLALFTRLRKDGYHVILLNPIQTSAMRDMFIRKIKTDAKDSFIIAELIRFGRYAESNVAQDRLLALKELCRNRFYLVDMAGDLKRKLIALIDRVFPEYEAQFDTIFCKSSVALLKKYPTPQRLSNAHLDKLTELLWNSSNGHFGEWKARELKDLARNSFGVEDCDGAYSTLILLMLDQIQSLSGKADALEKEISRLFQSFDTTVTTIPGVGPIIGAVILSEVGDISRFSSADKLAAYIGVDPSVNQSGEFQAAHAHMSKRGSPYLRRCIWMASQVAVQRDPMFRAYYEKKAAEGLKYMTIIGHVTRKMTAVVFSILRDHKVYEPVLPTAA

SEQ ID NO: 229646 - protein, 367 aa, unidentified
MKKVSTAAVKATKNFSQAKLTIGLDLGDRSSWYCLLDEVGEVLREQKVSTTPKAMKEAFGAMPRCRIALETGMHSPWGSRLLNELGHEVIVAHARNVRLIGESRKKDDRLDAQTLARLARIDPQLLCPVKHRSAKAQADLTVIRARAGLVRARTALVNTARGLAKSYGERLRGCNVRNMNPEKAEDLSPELRRALEPLLAGIESLSERIRECNDRIENLAQESYPQVALLKQIKGVGTLIALTFLLTLEDAHRFRKSRDVGCYLGLQPGRRNSGQSEPQMHISKEGDPYLRTLLVQGAQHILGPFGVDCDLRRWGLKLAERGGKSGKKRAIIATARKLAVLLHRLWVSGEVYEPLRNSNQRAMPAAA

SEQ ID NO: 229647 - protein, 359 aa, unidentified
MSMEKDAARHVVGGVDTHKDLHVAAVVDERDRILATASFATTRQGYRQMLAWMRSFGTVQRVGIESTGSYGAGLLRFMQQAGIEVLEVTTPDAHDRRRRGKNDDLDAESAAHAAFAGTRTVTPRSRDGMIEALRVLSACRKTAVAARRVALQMIQNTIVCAPDALREVLRRMTRMQLVRTLAAWRPDLTGYRNVEAAYRIGLKSLARRYLELHDEIADLDTMIGAIVGELAPELVACNSIGQNGAAQLLLTAGDNPERLRSEAGFAALCGVSPVPASSGKTVRHRLNRGGDRAANSALHIIAIGRLRTDARTKDYVARRIAEGHSKLEAIRCLKRYIAREVFTLITQRQRAINQTQIAA

SEQ ID NO: 229648 - protein, 375 aa, unidentified
MSASPISRPVVHLALELSVTSWVVAYRLPWSDKVRLQKVSAGDNAALLALVSGLREKVAARVGPDVTLASCFEAGRDGFWLHRLLTDNGVVNHVVEPTSILVTRGARRAKTDRLDAQGLLRVLAAAFAGDREICRMVRPPSVAEEDDKRPHREREYLVQERVRIENRIAALLATQGVRKRPSLRTWAADLDALRTGDGRPLPPCLKAELDRLRRRLVMTLEMIREVEVAREQAMEAHDNPANQTAKVLCKLRGLGGNFSAVLAKEVFYRTFDNRRQIAAYLGLAPTPFQSGGMDRDRRINRAGNSRARKTMVQLAWLWLRYQPESGLARWFRERVGELQGRTRRIAIIAMARKLLIAIWRFVTAGVVPEGAILAA

SEQ ID NO: 229649 - protein, 370 aa, unidentified
MVGKTIYVGLDVHKVSISVSVAEAGRDGPVRFLGPIPNTPPDVAKLVHRLAKGDCRLEFCYEAGPCGYGLYRQLVGLGHHCAVVAPSLIPKMPGDRIKTDRRDSQRLAILHRAGDLTSVWVPDEIHEAMRDLTRARIDAVMQLMRARQQLLSFLLRHGRTYTTGKNWTQRHRSWLGGQVFAQPAHQIVFQDYIEAVFTAQDRRDELASRIEKMLPSWSLGSLVEALRGLRGIDLISAVTFIAAVGDLNRFETPRQLMAYLGLVPSEQSSGDHVVRGGITKTGNREARRMLVEAAWSYRYPARMAKEKAEILVRLPKPVRDIAWKAQLRLCKRYQRLTAVRKKPTVVVTAIARELSGFVWAIGREVQPAPS

SEQ ID NO: 229650 - protein, 341 aa, unidentified
MKYVGVDLHKQSITVCVMVKEGEQRRVERRRTLQCSDTAAIRQFFEPLGIFRVVVEATSNYEWFLSLIEDLAERCVLAHPKKLRIIAESKHKSDKIDAQVLAEFLLLDMIPEAHRPSPRLRQYRVLVRHRDAITKRIASVKCKLHHKLAFYNADSPKLFTKRSTAQASRAVMSDADRFEYQALCQQLEFFRGQLTEAEKELREFAKKATQVEREAREVLATVPQVGEITIDVVLSEVGEARRFRSAKRIVAYAGLDPGYRKSAGKSRELPITKEGSRLLRWVLIETAWRLVNKSARWRTLFEQLCRTTGHKKKAIVGVARRLLCVLYALLRDGKPYRLAAA

SEQ ID NO: 229651 - protein, 411 aa, unidentified
MKQQKATDMTILPQLDKACGLDIHKDKIVGFIACKDGSGQELKEFGTFTCELQKVKEWLQANQVEHCLMESTGIYWMSLYSILTDCGISVIVANPTHIKQIPKRKTDRKDARWLCMLLMHGLVRASFMPTAEQRVLRDYCRSRLFYSRQQNKIQNRLWKILESNNIKLRSVISSINTKTAMSIIRLLSQGVTDKQQLAECSLGRARKNKDNMLLALEGTLAAHHLTQLQMLLQDFDHIQQQVKTLNSLIDESITKHYSIAFECLDTITGIAQRSAEIILSEAGNDMSRFPTADHFTAWCGLAPGNNESAGRQGNTSIKKGNTYLKTAIVSAAWAAVRVKNSYWHALFERMRKRMKAQKAIVAIARRMMKVVYNTIETLSPYKEKGIVYYQEMQEKAAAFRQAGKLWPSPNA

SEQ ID NO: 229652 - protein, 347 aa, unidentified
MRFYTKTHKHYCGIDLHARTMYVCILDQEGQVLLHRNLPCDPERFLRTIAPYRDDLVVAVECIFTWYWLADLCAQEGIAFVLGHALYMKAIHGAKAKNDKIDSKKTAALLRGGLIPQAYVYPPEMRATRDLLRRRLHFVRHRGQLLAHIQNTHHQYNLPAPGKRIAYRSNREGICEGFEDGSVMKSLEADVALIDHYDLVIRDLELTVLRRARGHDLDSFERLKTIPGIGKVLALTILYEIHDISRFPRVQEFASYSRLVKCQANSAGKVLGTSGAKIGNAHLKWAFSEAAVLLLGKCPEGKKVLARLERKHSKGKALSILAHRIGRAAYFMLARKRAFDLERFVRS

SEQ ID NO: 229653 - protein, 310 aa, unidentified
MTLHPFYIGIDISKAYLDIFEESTSKHLQIENTSEAISAWLSALPDMPSLNIIFEATGRYDRKLTHALHTLKIRFSRVNPARARDFARALGQMAKTDQIDARMLADMGKCLKPDATTQRAPERDQLAALHKRRDELVDTRKKERQRLAQALSEEHASIARHISWLNEEIKFIEQKRDTLLKETAEFTHDNKLLRSIPGVGPVAATTLLALMPELGHASPKAIAALAGLAPFNVDSGQFRGHRAIKGGRKRVRNALYMAAVTAARSNSHFASFAQALIKRGKPFKAAMIALARKILITANALLRDSVPFNA

SEQ ID NO: 229654 - protein, 400 aa, unidentified
MDDPNDLLIDVFVGVDVGKAEHHAVALDRAGAVLLDRSLPQDEAKLVELIEELKSRGRVLFVVDQPATIGALPLAVARSLGVEVGYLPGLAMRRIADVHAGEAKTDARDAAIIAQAARTMPHALRALRRDDEVTAELTMLSGFDEDLARQINQVANRLRGLLTQIHPALERVLGPMLGHPAVLDLLQRYPSPQEMRSLGRARLAARLRKLAPRIGERVAEEVWAALAEQTVIVAGTDAAAKVLPRLAEQLIVLRRQRDEIAEQVKQLVESHPLSEVLTSMPGTGVRTAARILVEVSGRDFATAGHLAAYAGLAPVTRRSGSSIRGERRPQRGNRRLKRALYLSAFASLKDPRSRAYYDRKRAENKSHQHALMALARRRCDVLYAMMRDGSLYDAEHTRAA

SEQ ID NO: 229655 - protein, 348 aa, unidentified
MVVIGVDSHKRTHTVVAVDEAGRKLAERTAATTADGHLELLIWSRTWPERTWALEDCRNLTRRLEADLLRGGEAVRRVPTKLMAGARRSAREPGKSDPIDALSVARAALREPNLPVARLDGVERELRLLVDYRDVLISDRTGHQSRLRWFLVELGIPEPPSRKLAGPVVLAGVDLGLVGRTEPCARIARDLVTRISEMTRAINDLAREIGELTETLAPNLMGLFGCGSLTAAKLVAETAGIGRFRSRAAYASHTGTAPIPVWSGNVVRHRLSRGGNRQLNAALHRIAITQLRCPSLGQAYVAKRTAAGDTKTEAIRALRRRLSDEVYRRLQADEVARTTTENAVREAA

SEQ ID NO: 229656 - protein, 423 aa, unidentified
MKVFEPGDFAALIGIDWADQKHDICEQPAGNRPQSLNVIASRPEAIHAWATELKQRYPQQRVAVGCELQKGPLVFALSQYDHIVLFPINPATVARYRKAFTHSGAKDDPGDARIQTDILREHMDKLRSITPESPAVRILAQLTQSRRKLVQDRVDLTNRLTATLKNYYPQVLDWFQEKDTHIFADFLLKWPTLDAAKRARKHTLMQFFQSHNARYGQVNEKRIQAIKQAIPLTGDPGVIVPNQILVEVLAGQLKGLLDVIDRINVEIKQRYRTLKDRKIFDSLPGAGPVMAPRLLAAFGSNRNRYQCASEIQKYAGIAPVIERSGNKSWTHWRYNCPKFLRQTFIEWAGESIRYSFWANAYYEQQKAKGKPHQTIIRSLAFKWIRIVFACWKSNTPYDESKYLASLKKRNSPLLKFAVEENIG

SEQ ID NO: 229657 - protein, 348 aa, unidentified
MSKGNQYVGLDVSLKQTSICVIDDADKIVWRGQVDTTPEAIVSAVTQYAPHAVRIGLESGQLSNWLFHGLKQAGLPVICVDARHAKAALSLKVNKTDANDALGLAQIMRVGWYREVTVKGLDCQAVRALLVARAQIVSRITTLKNCERGILKTFGRVLPKGLRSQFPARVRAAIEGHPVLGAIIEPTLQVLEAARAQLLVYDRAVIQRARSDDTARQLMSAPGVGTVVALAYMTGVEDPARFKRSSSVAAYFGMTPRRYQSGEVDHAGRISKCGDGMVRGLLFEAAKVLLGRSSRPNALKTWGEALGKRIGLKKATMAVARKLAVILHRMWTTGATFQWNAGTTSSVA

SEQ ID NO: 229658 - protein, 391 aa, unidentified
MIYVGIDVAKDKHDCFITNSDGEVLFKPFTITNNLDGFNELYQKIESVTEDATKVKVGLEATGHYSYNLLGYLIDKGLAAYVINPLHTNLYRKSLSLRQTKTDKVDARTIASMLMSDVNLKSYSDISYHNEELKSLTRYRFDKVKERAKLKSSVSRLVCILFPELEKLVPTLHMASVYSMLSEFPGAKHVASAHLTRLTNLLSEASKGRYSKDTAITFREAARASIGSNMPAKSLELKHTIKLIQELDSEIDEIENEIKVIMDEINSPILSIPGINYRMGAMIIAEIGDFSRFDSPDKILAYAGFSPSTYQSGQLDGAYAHMEKRGSRYLRYALYNAAKYVCHWDPTFAVYLAKKRAEGKHYNVAISHAVKKLVRVIYHLEKTKQQYIKVA

SEQ ID NO: 229659 - protein, 353 aa, unidentified
METAYDGRQVVGMDLHRRRSVLVRMTEGGRRLGVARITNSPAELRREIAKAGKSPRVVLEGTYGWYWAADTLAAAGAEVHLAHPLGVKAFTYRRVKNDERDAADLADLLRMGRLPEAWIAPAQVRELRELTRYRCRLVSLRTSCRNQVHGVLGKLGIPVTCSDVFGVAGSAWLDQLHLPQPYAGKVTSLQQLAGEFTTEITMLSEVIADLLAGHRGYQVIQQLPGIGPVLAAVIVAEIGEVTRFSTAAQLCSWAGLTPRHRESDTKITRGHITKQGSRLLRWALIEAIQHAPAGSLPGAVKQRIIARRGKQAKHIAKVAAARRLLTLVYYGMRDGQIRCLSQPPASPPPAQAA

SEQ ID NO: 229660 - protein, 326 aa, unidentified
MATIGIDVSKKKLDLCWLRDAQAGKVKTRVFPNAHDHYPALLAWLLKQTNEEAGDLQVYLEATGIYHEPLAYWLHQAGVTVYVLNPARVRYYARSLGDQGKSDKKDSKRIAHFAQANPELTPWQPEPEEVRTLKQLAKRLETVQKDIQREQNRLEKAQFNRDTQAEHSITHVLALLRREAKRLIKEVDDHIDRHDGLKRDRRLLESIPGIGEVLSVHLLVTLRSRRFKSGRQVAAFMGLVPVEWTSGSSVRHAPRLSKNGDPALRQKLYMGAVVAMQHNPSIRRQYQRLCAAGKRKMSALGAAMRKLVHIAYGVLAHQKEYEPQPM

SEQ ID NO: 229661 - protein, 420 aa, unidentified
MKEWKEITHYAGFDWARDHHVVVIVNGQGQIVADFQFDHSLEGWNQFRQNTAAFAHLAVAIETSQGIAVDQLLQGGYTVYPVNPAAAQSYRQRKAPSGTKTDHVDGWSLGDALRVDGHGWKALRPMDELTCELRLLARDEVALIEQRTLLVNQLQQALVEYYPAALEAFEDWTHPSTWDFVVEFATPQALVKAGQRRWEKFLHTHRLWRPETVEKRLAIFARADQFKASAPITKAKSQLALSLCKLLRTLQQQLDEYRKQIEALFARHPDHDLFGSLPGAKKVLVPRLLAAVGSDPSRYGSHQVLQCFAGTAPVSFQSGRIDKAKIRWACDKFLRYTVHLWADCFRKASAWGQAYYHKKRQDGMTHACALRCLGQRLLKIVFQMISDKKPYDAELHARNQQKHGSWVLALVEKPVPQTSE

SEQ ID NO: 229662 - protein, 362 aa, unidentified
MTVYIGVDFHPYEQSVAFASDEDGEIGYRRFLHSDKQSIKAFYRKFGEEAVIGVEATGCLWWFEKMLSESGQKLEIGDPRMIRRAALSRHKNDFRDAETILDLLMRGAFPSIVPRCEESREVLDLLHYRQTLVQKRTSMANQLQAFARGKGLAKFRMPAVKGRRKLIDAPVTDVESLLVNSRLQLFDHLTAAIKGVEERLAPLAEADERARLLMTHPGVGLINALALVHTLGDVRRFRRKEEVVAFVGLDPLEKSSGEKKRMGQISKHGSRLVRHLIGQAAQSCRDPRIRKFYLEVSRRRGRPKAKVAAARKLLINCYIMLRDGIGYEEFQRRGEVGLCEGSGERSGNTAVSGGLMARPAIS

SEQ ID NO: 229663 - protein, 320 aa, unidentified
MERGGFVGIDVSGDRLDVAFRPGGERLQVSNDARGITRLTRMLERSQPELIVLEASGGYEVALLERLFAKKLPVALLNPRHVREFARASGRLAKTDAIDAEVLAHFAQVMKPEPRQMADPETRKLRALVTRRRQLIQMVTAELNRRRHSLEVVREGFVATIRCCKRQIAAIDKQLATLIQQTPKFRQKAKLLRSAPGIGGIASATLLARLPELGTLDRKKIAALVGVAPYNRDSGKIKGKRAIWGGRGDVRAVLYMSTLVAVRLNPSLREFHQRLRRAGKSPKMALTACMRKLIVILNALLKNELPFDGNLTSIVGAVSS

SEQ ID NO: 229664 - protein, 385 aa, unidentified
MAPPRMPEAVIGLDVGKLSHWACVATRDGEILLSAPVANREGDLDSLFGRFPDALVVVDQSRNIGALALARAKAAGMSAAYLPGLAAHGAARLFAGDAKTDERDAMVIAKTALGIPDALLPVGDPGPTVAAARALAAQRNFLTCENTRSKNRLRSILLESCPAFEALVDLSDGPQLRLMASLGGAWSVADAGPRRAAALTRGAARGKIEALVRSTASSTRPDAAAIAAEDRAVRLLARRISENSAEIDVITAEISALLEGDDTYRCLLTVPGIGPKTASELAISIDIEDFPSHDRLASYCGLAPRNRQSGTSISSVTASRQGNKRLKNLLIFSCNCLTRTEGRWGDYYARCRGRGMPHGKALKALARKRLKVIYAIMRDRVPYAA

SEQ ID NO: 229665 - protein, 316 aa, unidentified
MTTQTETFIGIDISKATLDVAIWQSEQYRKFSNDAKGMQILIEWLSVLTPTLIVLEATGGYERLAVADLVFAGFPVAVVNPKRVRDFARSTGLLAKTDKLDSHVLAHFAAAVRPTVRPLHSKEEERLAALVSRRRQLIEMLTMEKNRLSNSHSTMRTHIQTHINWLIDEQRTLEAEIDQFIQGSPLWKEKDELLRSVPGVGNATSITILAELPELGTINRQEIAALVGVAPINKDSGIKSGKRRVFGGRGSVRSVLYMAALSATRFNSTIKIFFNRLIKAGKPFKVAITACMRKLLTILNAIIRQHQPWKEPLKVV

SEQ ID NO: 229666 - protein, 429 aa, unidentified
MFKVAIRFPGEKGTRKTEVLEFRTFWGVLQEVARELRRRGVTHVAMEASGVYTEPVYHALCEQDFTEVLVINPKHVKALKGHKTDARDCRRIAELLECGLLRGSYVPSAEQKEMRDLTRYRKKLVQARTSEIQRMQKALESAGIKLGSVLTDITGVSATAMIDALIDGERRPQVMADLARGTLRAAGKQADLKMALAGRFTAHHATLLRMHRDQVKLNNHAIAGLDEQIAAAAGRWQREMDLLMTIPGFGPVAAATWIAEIGPGPHKYFDSHDKLGSFVTLAPGNYVSARKRRHGRTGDAGTYIKPALIEAAWGAIRVRGRLQARYNRLVRRFGGDKNPGAKKKAITAIAHTLLKIAYQVLRSGEPYAEPGADFYTRRNSPASQQAWLLRKLEQLNPGATITITLPGAAPPDGGAGPADPPGAALVLPR

SEQ ID NO: 229667 - protein, 311 aa, unidentified
MDGTDVFMGVDVSKNTLDVAVRPTGEEMSFANTEDGVSAMRDFIQSFSPRLIVLEATGGWEAVGVSVLAAKGLPVVVVNPRQVRNFAKAMGLLAKTDKIDARTIARFAEAVKPEVRPLKGEEAQRLEAFLARRRQLLQMSTAEKNRLVLASRWTKKGIQAHIEWLDKELDKVNRELQKLIRKSPLWRERDEILQSVKGVGPALSVTLLSDLPELGTLNRKKIAALVGIAPLNRDSGKYRGRRAIWGGRSQVRIVLYMAARAAIRFNPVIRAFAERLKKAGKPYKVVVTACMRKLLTILNAMVKNGTRWQAA

SEQ ID NO: 229668 - protein, 349 aa, unidentified
MHATTVAIDLAKDVFELAYANDDHRIVARKRLSRRAFARALDNQGPLRVVMEACGSAHYWARRFVSQGHTLRLLPARDVRPYVRRNKTDRTDAAGLLEADRCAQIDAVPIKSPEQQGVQALHRIREQWKAQRTATINLMRGVLREFGVVIPLGAAKVRPAVFAALEDGENELPMALRHTLGEMLDRLAELTGAMNAIEQQLQACAHADPVCQRYQQAPGIGVLTATALRASAGPLERFRSGRHFAAWMGLAPREYSSGNQRRLGRIQKTRRWLSAHAADSRSARDAARSACSRAAPAITQPVANLGADAAATCRSQQGCCRAGQQTRAAAVGDGTSPRRLRRQSRQRAA

SEQ ID NO: 229669 - protein, 347 aa, unidentified
MELGAHAGISLDPPEQLLELTLAVIRLGKRGSSRPFQTIRSPVMNGIGIDVSKRQLDVGTTDGKTLQVSNSRSGFAELDLWLQGHPAVQIVLEATGGYEQPVLDFLHNAGHPVVRANALRARKLAQGLGHMAKTDRLDAYALAKMAALVKLRSYQPLEPWQREMRDFVRARRQAMHALTVARQQQEMVGNRELRRLLQANITCLQRTVERLGKRISEQVSKQPQLAVLKSMKGVGPGLQAVLASYLPELGKISGKAVASLVGVAPMSHDSGTLRGKRSIHGGRAEIRQVLYMASMSAMRHEPRLRDFYQSLRARGKEGKVAIVAVMRKMLVILNARMRDAQGGSIPA

SEQ ID NO: 229670 - protein, 446 aa, unidentified
MSFIVRYVGLDVHKRVVEVCILDATGKVLHRERFELNRDTLLDFAKTKLTPHDHVALEATTNCWVVARLLRPFVAEVVVSNPLVTKAIAEAKVKTDKVDALVLAQLLRCDFLPRVWQPDEATSLLRELTSRRTALVQDRTAVRNRIHSLLAVRLIVVPFDALFGSSGRAWLEALDEKQLDSQGRLLLDADLRQHDALEREIDGLEDELARRGYSDARVKLLMTLPGVNLTVATTLLAALGDVSRFRDGDHAASYLGLVPRTRQSADRSYHGPITKAGNSHGRWCMIQAAHCVTRHPGPLGYFFKKLAKRKNYNVAVVATARKLVVIAWHMLTHNEPYRYAVPRSTEAKLSTLRVRATGAKRKSGPNRGEKSVAKLPGGGRTVKSLPRVCREEGLPDPQPLRPGERRMITDAGLDEFIAGLASDHVIPRRKTARKTTPTGEAPTPTS

SEQ ID NO: 229671 - protein, 416 aa, unidentified
MGYHTEAFIGVDTAKLRNAVAVAESGLNGQVYFYGEIDNTEAAMRKLIRKLESKYKRLTFCYEAGPTGYGLFRLIKELGHNCSVVAPSLVPRKPGDRVKTNRRDALNLAKLLRAEQLIAVWVPDERHEAMRDLVRAREAAHIDYTRNRQQVSSFLLRLGRYYPGKKTWGKAHLKWLAAQKLDNYEQRIAFEELLLAVRQSRERIERLEQAIRDSLPEWSLAPVVEALQALRGIDLISAVVFMSEIGELSRFASPRQLMAFLGLVPSERSTGESVIRGCITKAGNRRARRIRVEAAWSYRHPPRVGKEKQKKVEAVPRTVREIAWKAQTRLCGRFRKLTRKGKLSTTVTTAVARELSAFIWAINRELATKACSELKSQPRPHQACRRAQLSQGQALYGWPPNGRPALSDPARAGMEN

SEQ ID NO: 229672 - protein, 388 aa, unidentified
MNVRADKSEPLTAIHTDLGAIFVSLELSRSSWLITSLSPGGGEKMSKHSVPGGDFAGLMERFAQLQEKARLRTGQSFRIIVIQEAGLDGFWIHRALQNEGIESHVVDAASIATSRRRRRAKTDKIDGETLVRALLAYKRGEPRVCAMVKAPTPGEEDRRHLCRERKALTAERVRHVNRIKGLLFSQGISGYQPLRRDRRQRLEELQTGDGRAFPQHLKALVNRELDRLELLLKQIKTVEAARDALLAVGQTAKPAPAAMLLDIRGIGPEFAAILWSEGLFRHFENRRQIAAYAGLAPTPWQSGAVDREQGVSKAGNPRLRTTLIQLAWLWLRNQPRSALSLWFHERVSRNGGRLRKTTIVALARKLLVALWKYVTAGVVIEGVTMKVA

SEQ ID NO: 229673 - protein, 366 aa, unidentified
MAITHVALDDSKRVIVAGILRADATQPELREIPNDPRQVRRLFERLLREAPVRACYEAGVSGYDLYRQLTALGVDCAVIAPALTPRKPGERVKTDRRDAAKLVRLFRAGELTAIHVPTEAQEGVRDLTRCRDDVRADIVRWRHRVLKLLARHGRVYQAAKNWSQAHWTWIRAQRFDDVPLARTLEASLEALEQALRRRADLDRAIDGLASEPRYRDAVGPLRCFRGINTLSAMILVAEIVDFERFRRPRALMAYLGLVPSEYSSGDRHRRGALTKAGNTHARRVLVEAAWHYRHRPALGPRLARHTADQAPAVVAEAWRAQHRLHRRYRHLVGHGKRPTVAVAAVARELAGFIWAAMTQAPRVRAA

SEQ ID NO: 229674 - protein, 594 aa, unidentified
MTAYHKHVLVKATKEDSHAAFFGSYGKERTMAQRIGIGIDTARYGHRVAFLDENKNPAAPSLTVMESRHGYEQLQGRLKQLHAKHPDASLHVHIDAAGKYATNLETFLHQVDLPLNVSVGQPKKNKDYQQVHFPKRKSDDTESQAMARFAVVECPNETSAVSPEFLMLREVVSRLHSQTRQTTRLVNQLHNLLSRTFPELATIIKNIASVGILKLLAKYPTPHRIAAARTNSLEKIPYVTNETAKSVQQAAGQTIASLRGDLAETLVKELVQQVSEAQKAEKRMEKLVEQAFDDLPDETVKIILTIPGIGKRTAAILAAKIISIDRFSSPEKLVSYFGFFPEESSSGVDRLGRPLAPGSSRMSAKGNDLARGYLWMATKSAIVHNPAVRPLYARLRANGKRGDVSLGHCARKLLHLVFAIWKTNRPFDPNHYPWAGLEVPSTEEPQPRKETAAGHKQEQAQANKEVTAATKKIESNRDCVNCSAPNQSVDYAFLREQISIERVLSHLGHWEHFRSNGKEMRGSCPFHSELGSKSRSFSVNPEKNVYHCFRNDCNRSGNVLDFWASYHKLTLHQAALHLAETFNLPIKRTEMRSP

SEQ ID NO: 229675 - protein, 378 aa, unidentified
MTAQTVDTLPPVTADHDPVRCLLAIELSKKSWIVAINTPLSDKISRYTLEACDWKGLLELMERVRTRVAREVGRPVEMISCYEAGYDGFWLHRLLEGQGVCSHVIDPASVQVDRRARRAKTDHIDAARLLRSLMAYLRGEPKVWSVLRVPSVAEEDDRRLHRERDRLIAERGQHVNRIKGLCAIHGIYDYEPMRRDRMRRLEQLRTGDGRELRRLELILGMLKEIEVERDAIASAENVSVHTNAKKIQNLVKLKAIGAEIATVLTGEVFYRPFNNRHQVASYVGLTPSPFQSGPKCRDQGISKAGNPKARSTMIELAWLWLRHQPDSPLSLWFRERVGTLKGRIRRITIVAVARKLLIALWRYLETGVVPTGAILKSS

SEQ ID NO: 229676 - protein, 340 aa, unidentified
MFIVGIDIAKRSHEAIIIAEDGQVVRKAFSFRNNCTGYNLLLEQVRRLTLVKSQIVFAMESTAHYWLALYARLLKDGYAVMVLNPIQSHSLRELYIRKAKTDARDSLIIADLVRFGRCKASNVPQDKILALRELCRSRAYLVDMAADLKRKLIALLDRIFPEYESLFDSVFSKASIAVLSKYSTPQKVKNANLRKLTDPLMESSNGHFGEWKAHQLKEAACSSFGIDDSGGVYSTLLGMFLEQIRSLTAQADSLEKQISVFFQEFNNPLTSIPGVGTVLAATILSEIGDITRFSSADKLLAYAGLDPSVKSSPANLRATRIVCPSGDLLIYVMPFGWRPR

SEQ ID NO: 229677 - protein, 358 aa, unidentified
MREGTREASESKRFVVTSKDSVFVGLDVHKRSVHAAVRLNGREVDTFVMPGDVATVVGSLDRFKAALKQIVYEAGPTGYGLARALRKAGLPTKVVAPGKTPRPANPDGKSDRLDCRKLAEFAEKGLLKEVALPTEEEEADRQVLRLRDQLTKKRRRVKQQIKALLLAYDIPEPVGLKYWTLASVAALLEMELRPQLRLVLSCLVEELKQLIKRLEQARAEMRRLSRQARFRDNQRRLRTHPGIGETTAMAYLVEVYQPERFGGAKALTKYVGLAPRVSQSGERRLEGPLMKTGHGTLRTLLVEASWMWIAKDEQARKVFERLVRNTGSKQKAIIAMARRMAVNLWCMLLRQEDYRQAA

SEQ ID NO: 229678 - protein, 409 aa, unidentified
MPTTFEPPTGCVAGIDTHTDTHTVAVMSDTGRHIATDTFLATSPGYVAIANFMATYGVITVGVEGTSSYGAGLTRHLLTQKYSVVEVLRPTRSIRRRDGKSDPVDAVAAARQVLTGEALSIPKDTSGPVESLRGLQITRRQIVMTAAKLMTTIKSLLVTAPDEIRRRYSAMSTLVMVEALSRCRPSADLADPKNGVLLALKTLATTYRDLHKQGTQLEEHISILVELINPHVTSIFGCGAVVAADLIVSVGDNPGRIHSQAALAHLCGVAPIPASSGRTHRHRLNRGGDRRANSALHRIALVRMHHDQRTRDYVAKRTKEGLSKREILRCLKRAIVREVYRVVCLGQSVTPTSQVGADELKARRVERQLSQAQVADKLGCAPARISDIETGKRPLPELRLAYEELLKSA

SEQ ID NO: 229679 - protein, 428 aa, unidentified
MNFEVKHLICAGLDVHKKTVVAAVCITDPVTLEAAYKVKSFSTSNSQIAAMRDWLLSYNCQDVCMESTGKYWIPVFNILEPHMHVILTHPKYAKAIKGKKTDKRDAKWIANLFRFDIVKASFIPPADIRALRELSRYRLKLSYMRSAEKNRYQNRMTISRIRIDCVLTDPFGKTASSIMNYLLSDVPFDEKECAKLIHGGVKVSNEEIFDSIRGFEILSEQHFKMSHAKQHIELLSSYIDEIETELFRLSRPYDEVIKRISRIGGFTERSALFVISEIGADMSVFESDKHLCSWAGLTPANNESANKKKSTRCSKAGQYLKPLLIQCTLAAVKSKKNPYYAIKYHRLAKRRGRKKAIIAIARMMLTSIYHMILNNEKWKPDDYEAIIHPSKPVKVALTLNNVIQFLGEQGADPETLKLLQQQCAASSG

SEQ ID NO: 229680 - protein, 417 aa, unidentified
MNEPQQWQQYRVFGAVDWASETHTIIVVDQTGKVIEDFQIEHSASGWKKFAQKLQAYGSIPFAIETNQGAVVERLLEAGMIVYPLNPKSAQAYRQRKAPSGVKDDQLDAWSFADALRVDGQGWKALSPQGALIKELRLLCRDEVTLIEQRTAFVQQLRQALAEYYPAALEAFEDWTSMSAWMFLQRFPTPEVLTQAGKRQWQKFLHSRRLWGSDQGPRRMEVFAHASDFAGSAPTMKAKSLLALSLIQMLFAIEKQLAVYRQRIEELFARHPDHDLFGSLPGAGPKIAPRLLSEIGDDRQRFDGDAQALQCLGGTAPVTNRSGKYRRVHQRWACDKHLRHALHLFAEQSLSRCVWAELYYQHHRKQDRSHADALRRLAHRWLKIIHKMWIDRTPYNPELHHRNQLRHGSWIFQLQSS

SEQ ID NO: 229681 - protein, 326 aa, unidentified
MTSYLGVDVSKKKLDVALLNEDGKYKSKVFDNNPAGHAALSAWLHAHSPGGCAAVHVCMEATGSYHEPLACHLHDEGVLVSVANPLRVKRFIEVEGKRNKTDSADAKSLARFCEVTKPEAWEAPPKAVRTLQALVARLDTLTEMRQSELNRLEVANDAVRDSLEAVISALTRSIEEVKAQIRQTIDDDPDLHRRSELLQTIPGLGERTVPQLLAFIGRPERFRSIKALTAFASLSPVIRQSGTSLNKHRGTHAQGHKEIKRVLYFPAIVAIQHNPLVKRFSDRLKAQNKPSMVVIVACMHKLLAIAFGVLKSGKPFDPSRNAAAST

SEQ ID NO: 229682 - protein, 415 aa, unidentified
MERIFEVSAGIDVHRDKVLVSVRRVCNTKEEVKTKTFETFHDGLTAMAEWLLAEQVQVVGMESTGVYWHPVVRAVERALPKAVIWVVNPAHVKKVPGRKTDVTDSQWLAKLVMYGLVSPSFLAPPELQELRKLTRHRTKLTADQTRYKNRILKEVESSGIKIASVCADVFGKTGRALLNAVIDGKVLGESQIAGLARGTLRNKVPQLARAVQGSLTPSTVFVMRQLLRRFDDLTNDIAALESEIRQRAQPMNAEVRRLSKIPGLDEVAVAGVLAETGPDMSVFASAKRIYSWSGLSPGSDESAGKSKKAPTRKGNKYLRTILVQAAMCAKQTKGTFWQRKFRRLARLGPKKAAVALARSLLGVIFHMLADGSDYREPDTVPPPPHRLRARVANLTNQLKALGFNVALSQATSSVS

SEQ ID NO: 229683 - protein, 414 aa, unidentified
MEVVHERCAGMDVSKRDAKVCVRVAGRGRRKTVETVRTWASTTNAILQLREVLIEQRVSLVVMEATGDYWKPFYYLLEDAGFEVMLVNARQVRNLPGRKSDVSDAVWLAQLGAHGLVRGSSVPPAPIRQLRDLTRARTLMTRERGREVQRLEKLLEDAGIKLSSVASDITGVSGRLMLQALIDGQRDPGRIADLAKRRLRVKIPELTEALTGRFGEHHAFLARMYLEVIDQRTRQIEELNTRIEVVMEPFQSFSALIRTIPGIGQRCAEVIVAETGADMNVFSTAAHLASWAGTCPGSNESAGRVKSTATRPGNAYLKAALGTSALSIANSHGTYLSAKYRRIAARRGPKKALVAIEHAILTAIWTMAHTGALYDDPAADYHTRRDPEHLKARALSQLQRLGYQVTLDPIAESA

SEQ ID NO: 229684 - protein, 402 aa, unidentified
MNCVGIDVSKGKSMIAVMRPFGEVVVSPFEVRHTANELSELAGLLKSLDGETRVVMESTGNYHAPVAWLLHDAGLYVSVVNAMLVHDYGNNSLRRAKTDKKDAVKLANYGLDHWLTLPRYIPEEDTRLMLKICYRQYQQYSKVQTMLKNNLISLLDTTFPDANRLFTSPPRADGSEKWVDFVATFWHCECVCGRSEKAFTTQYQKWCRKHGYNFSEDKALDIYASACGHFGVMPKTDTAKLLVEQAISQLQATSAALAALKQEMQSLAASLPEYPVVMGMFGVGPTLGPQLLAEIGDVRRFHSKKALVAFAGIDAPPYQSGQIDVRSRSISKRGSASLRRTLFLVMSVILQCAPIDEPVYQFLDKKRAEGKPYRVYMMASANKFLRIYYASVKAYLESLEHD

SEQ ID NO: 229685 - protein, 331 aa, unidentified
MFPVGIDVSKNTLDLCMLYDGIKGRIKTRNIQNNRHSVENILRWLRLQHCGPEDVHVVMEATGVYHERLATELHDAGFYVSLANPHRSREFARGMGIMTKTDKVDAYMLACYAFLKNPHRWEPPAPEIRYLGALLRRRDVLLGDALREENRLEKYLSTDTPADIISSCMHMAQLLREEVSNIERQIKAHIKASPALRRDYTLLTSIKSVGPQLGMHMLVVLRSHNFVSAEQAAAFLGVVPIEKRSGTSVRRRPRMSKIGPPQLRAKLYMSALCGKIYNKRMRNIYDEMCLRGKPKMVAIGALMRKLVHWCYGVLKTGIVFNDEGLKQVLST

SEQ ID NO: 229686 - protein, 343 aa, unidentified
MQVTTVGLDLAKRIFQVHGVDAAGKVVIRRRLQRSEIAAFFADLPACLVGIEACATAHHWARLIGASGHQVRLIPPSYVKPYVRRSKTDAADAEAICEAVGRPSMRFVPVKSAHQQAALLHHRARDLLVRQRTMLINAIRGHLGEFGIIAPAGRHRVADLVNLLQGADDAEVPALAREAVQSLFAELSALEIRIKVVEAVIMREHRSNAVSRRLTTIPGIGPITASALAGTIADPLAFKSGRELAAWIGLVPRQHSSGGKQKMGRVSKQGDRYLRRLLTVGATAVMRRLPGKTDGLSLWVRALLDRRPFRLVSLALANKMARIAWAIMVRPETYKASAMTAAA

SEQ ID NO: 229687 - protein, 369 aa, unidentified
MNDITYVGLDVHKATVCVAIAESGRGGEVREVGVFENRPDVLRKMIARIGKHRRRLNFCYEAGPCGYGLHRLLTGLGHDCVVVAPSLIPMKAGDRVKTDRRDALMLAKLHRAGELTPIWIPDAAHEAMRDLVRARATAVRALSKARQHLQGFLLRHDRIHHGARPWTLAYRRWLTTVRFDHPAQQIVLQDYIHAVEDAESRRDRLTRQIEELMPSWSMAPVAAALHAMRGVALVAAVTVVAEVGDFRRFTNPRQLMAYLGLVPSEHSSGSTVRRAGITKAGNALARRVLIEGAWTYRMSARVSRKLHDRLEPLSAAIRDIAWKAQVRLCARYRRLVAIGKPKVVVTTAIAREMVGFIWAIARVAQPELI

SEQ ID NO: 229688 - protein, 412 aa, unidentified
MLFVGDDWAEGHHDIEIVDDQGMVQVRRRLPEGLEGVTRLHSLIASQLPEDWADRDPSEVAALVKVGIETDRGSWVAALVAAGYEVFAINPLSVARYRERHSTSGAKSDAADAHLLAEIVRLDRAHHRPVAQDTDQGEAIKLTARTHQSLIWDRSRHVARLRSTLREYFPAALQAFEDLDAPDALELLGRAPDPDQAARLSTAVITAALKRARRRRVDDRAQRLQNILRAPELRQPAVLQSAYSAVVSSEVAIITALNTQIDRLGAVVGEYFGRHRDAEIYLSLPGLGVILASRTLGEFGDDPDRYANAKARKNYAGTSPITRASGTKKVVLARYARNRRLGDALQQWAFCSLRGSPGATAYYHQLRDRKIGHEAALRQLANRLVGILHGCLKTRTAYDETTAWAHIMAATA

SEQ ID NO: 229689 - protein, 449 aa, unidentified
MNNGNGVSRGDRNRNARLARLRELVPVANAIVGIDLADKKQMVVVTDHDSKVLARRTFRCRAWDLGVALDWAAERAAAKGWAAVTVSCEPTGHRWRVLGQLAAQRSMPFVCVQPMMTSWARRSEDLTFDKTDEKDAVLIARLTAQLRCYVPEPVDETWGRLRHLGTRRSQLITEASSQIQQMRDLIECVWPAALDTAQRPFRSRTWVASMSVVLGRDGGDFARTRRLGVARFEHAVRREITRRGGQKPCLRILRNLFTALADPAGVMAHRAGALERVQLLLEDWEVNIQRLVETEARMLSVLDELELTELVTSITGLSAVGAAAILAETGDPRRFTTARALVKHAGLAPREKLSGNFTGRTKLTGQGRPELRLAAWRAVWGAQRANAVYQARYRHLTTREDNKLTATQAQTAIAAAILRHLYAVITTGKAWDPDIATHGTRRPEVPLAA

SEQ ID NO: 229690 - protein, 313 aa, unidentified
MDNRTYIGIDVAKDTLDVHILPEGQCVHCTARAKDVQRLIGRIERLSPELIVLEATGGYGTTLAAQLQDAGLNVTMVNPRQVRDFARAMGRLAKTDRIDAQVLALFAQRVEPPKRSVGDAESRRIKALVARRRQLVDMRTAERNRMHRAASPEVAESISQVLACIEQQIDDTEGQIRKAIEASEVWVEKVEIIKSVKGIGDVTAGVLVAELPELGQLNRREIAALVGVAPMNRDSGLMRGHRMITGGRVFVRNALYMATLVATRHNKKIKAFYERLVREGKTKMVALVAAMRKLLTIINSMIRDMKPWKEKIA

SEQ ID NO: 229691 - protein, 321 aa, unidentified
MQFIGIDAAKATFDIAVPLSGSKYRTKAKLPNTPKGFDELLAWRAKHAPNAAVGMEATGIYHEALARALVEAGVVVHVANPARVKAFGQAEGIRTKTDRSDAKLIARFFEAQRPEKLHPYVPPTPSEVKLRALVRRRDDLQEMLQMEHNRLDVADISVQQGIKDVIRTLEEQIKQVQKAIEDHIDNDPDLRRRHQLLTSIPGIGNTSSAQLLAMLGDLSKYSDVRQVVAHAGLNPAQRQSGNYEGKSRISRVGDAVFRKKLYMPALTGKTHNPTLKSFADRLSAKGKPFKVVMCAVMRKLIHLVWGVLRSGRPFEPDVALA

SEQ ID NO: 229692 - protein, 421 aa, unidentified
MLKIYSFNCAGLDVHKNLIVATIGITDKKTRVTEYIQKDFSSLNFDLYNLKNWLIEHECFDVCMESTGKYWIPVFNVLETEIKMNIVLVHPKYLKAIKGKKTDKKDSKWICNLFKHDLLKSSFIPPKDIRELRDLSRYCFKLICMRTSERNRYQNSMTVSNITLASVVSDPFGKTAKAIMNEVLSTEVIDEPKITKLIHGSCRNKDKIIESLKNSKIEPDQRFKMTEIQSHMNELDKHIEAVEVEIIKRASRYFDDFIHITEIDGIQLISAILIISEIGVDMTQFETDKQLCSWAGVSPSNNESAGKKKSVRISKAGQYLKPVLIQCALAAIKNKNSYFSQKYMRIKKRRGHKKAIIAIARMMLISIYHMILTGEKFNPSDYESFKNPKQRKEKNNYTVETALDFLKSQGFDVSSIQEIPK

SEQ ID NO: 229693 - protein, 426 aa, unidentified
MKYNTQNSKIASITEKTLIVGIDVGSQVHYARAFDWRNYEYSRKPFAFSNDEEGFMAFKNWMNDIAEKHDKEVVLPGMEPTGHYWFGLGMFLQDMGMHPVHVNPHHVKKSKELDDNNPNKNDRKDPKTIAALVNEGRFSYPYIPTGIYAEIRNLSNLRFQTQEQITRIKNRIARWFSIYFPEYREVYGNLDALSGMMILKMAPLPMDIVKLGVDGVNKIWRDAKLRAVGLKRAKTLVNKAEHSIGSQEAPEAARVELQILLSDYEMYNQRMDDLMQTIEEKLYEIPYIDKLLEIKGIGMITICGFIAEVGDIRRFDNPKQLQKLAGYAIVSNDSGKHNGESHISYRGRKRLRYVLYEAAISLIGKNTEFKEIHHYYRTRERNPLKKMQSVIAVACKVIRIFYAILTKGIAYDGAKMTYTPVDRHAE

SEQ ID NO: 229694 - protein, 320 aa, unidentified
MVVGIDVSKLKLDVTVLLERNKEKHKVFSNNKDGFGEITKWFDQLGIQKAHVCLEATGSYGESVSLYLYQQGHTVSIVNPARIKAYGKSEGSRAKTDKVDSGVIARFCKAQSPLAWIPPSAQEQALKDLYRCRQSLVEDYGRVFNRMENLDKGKASFKIWQGSLKDLEKKIKDVEAQIQSLLETDKTLGNQVELLKTIPGISDKTAVAILAEFPPMSTFKTAREAAAFAGLTPCVRQSGTSVRSRGSLSKSGNAQLRKALYMPAIVAKKHNPLVEVFCNRLMGKGKPIMVVIGAAMRKLLHIVFGVLKHQKSFDFVQQRA

SEQ ID NO: 229695 - protein, 338 aa, unidentified
MKLYGAIDLHSTNNVTVLIDEQDEVVYQKRLPNDLPLILQQLSPYTSSIQGIVVESTYNWYWLVDGLMEKDHVVHLANTAAIQQYEGLKYTDDHSDARWLAHMLRLGVLPVGYIYPKEERAVRDLLRKRGQLVRQRTANLLSIQNLITRNTGSSISANRIKRLSAEAVEGILTGADVALAAKANLSVMRSLEAEIATLEKVIKERVQLRAAFRYLLTVSGIGPILALTIMLETGDIRRFSTVGNFASNCRCVGSEKISNGKRKGSGNTKNGNKHLAWAFVEAANFAVRYEPQIRSFYQRKKAKAHRVVAIKAVAHKLARACYHVMRDEVPFEVSRAFA

SEQ ID NO: 229696 - protein, 412 aa, unidentified
MEDETVIAGVDTHKDVHVLCLLDGLGRKIWSGSFGADPEGYDRLAEAIGDPGSCMVVGVEGTASYGAGLTRRLVELGYNVVEVLRPKRDKVRPGEGKSDPLDAERAARKAASGKGCSVPKSQDGWVEAVRQLYVARRLAVATSTSCVACAKSMLTTAPSALRERFRGRERPKDLMPLLARGRKAGDALEESVLASLRSVAAVWKEARSQVESLDERIRALLEANAPALLGVEGCGTTTAAALVVAAGDNPGRLKGEAAFSMMCGASPIPASSGKTDRHRLNRGGNRQANWALYEIAIKRMAYDERTRRYVARRTSEGKSRREAVRCLKRYIAREVYHVLMDPNPDGAAPEGPELAKMRKAMRVTQKKAAAELGLSAATLGHLERGKRRSTKLERRYYELLCELERALPQTAS

SEQ ID NO: 229697 - protein, 343 aa, unidentified
MQTITTIGLDIAKSVFQVHGVDAGGQVIVRRQLKRRYVLTFFQKLSPCVVGIEACASAHHWSRELQALGHTVRLMPPAYVKPYVKRQKNDATDAEAICEAVTRANMRFVPTKTPGQQSGLLLHRARHLFIRQQTSVINAIRAHLAEFGIVAPVGRHGVEELLNVVADPNDKRVPEIARACLSAFGAQLRRIKEQVLEFDRLIRAWHRSNELSMRLDEVPGVGPVLATALVAAVADPKSFRSGRNFSAWIGLVPKQHSSGGKNRLGNISKQGDRYLRGLFVAGALAVIRYAKIHGTTHRPWLTALLARRPTKVAAIALANKIARMVWAMMARGERYKEPFALAR

SEQ ID NO: 229698 - protein, 405 aa, unidentified
MNAVGIDVSKGKSTVTIRRPGDMVLMPPCDVPHTQSAINALIEQIKSLEGETKVCMEHTGRYYEPVANWLSDAGIFVSAVNPILIRDFGDDSLRTPKTDKADSKKIARYALDRWAKLKQYGSMDKTRNQLKTMNRQFGFYMDQKTAMKNNLISLLDQTYPGANEFFDSPARSDGSQKWVDFVYTYWHVDCVRSKSLQAFTEHYRKWCKRNGYNFSASKAEKIYQSSSDLIAVFPKDDSTKTLIRQAVTMLNTASQTVEALRLKMDQTAATLPEYPVVMAINGVGPSLGPQLMAEIGDVTRFTHREALTAFAGVDPGKNDSGKHNQKSVRTSKKGSPSLRKTLFQIMDGLIKRSPMDDPVYAFMDKKRSEGKPYYVYMTAGANKFLRIYYGRVREYLASLEESKES

SEQ ID NO: 229699 - protein, 320 aa, unidentified
MQTPTGVLNIGADVAKEEIVVACALGSFPARKLANQRGALLAFLKGLPAGSRIGMESTGVYHELLAEVAHKLGFVVFVLNPKDARHYAKAVGLRGKTDRVDAELIARMIAHEHAKLYPWIPPTPQQREMARLISRRAKLSSLRQALAMSLKGLEGFATELKALRARFDQLLERIDQRLKALIEASPERKQQATHLRTIDGVGPVVSAALVNTLERVPLKSADAFVAFTGLDPRPDDSGQHRGKRRLSKRGPAELRRLLYVAAMSAKKKPAWKPLFDRYRAKGLSSTAALVILARRIARTAWSIFTYKTDFDPARLTKALT

SEQ ID NO: 229700 - protein, 409 aa, unidentified
MRLFVGLDVSSFDIKTCVLNGEGEKLDSFSVNNDLPGAIALKERLLQRIANQKVEIFKIGLESTSVYSFHPSMFLHYDKELESFGAKVFLMNPKQITNFKKSYSDMDKTDEIDAFVIADYLRFGRNQMSIVKESQYVALQQLTRSRYQLVRMLTKEKQHFLQHLSYKCNTFSQEVDSSIFGNAMMELFLEKFSLEELADMPLNELAEFLQAKGKNRFGDPKCVASTIQKAVRSSYRLDKVVEDSIDVLLGTSIAVIRTYQQQIKEIEKSIKQIMAGLPQTLESIPGVGPVFAAGIIAEIGQIERFGDETKIAKYAGLYWRKHQSGRFTAENTSLSRNGNHYLRYYLVEAANSVRKYVSDYQEYYIKKYNEVPKHQHKRALVLTARKFVRLVDALLRNHQLFTPERCVKV

SEQ ID NO: 229701 - protein, 359 aa, unidentified
MEQDGEKDRRIIGGVDTHKDLHVAAVVDEHDRPLASRCFPTTRHGYKQMLAWMRSFGSLQRVGVEATGTYGAGLLRYLQHAGVEVLEVTTPDPHDRRKRGKTDDLDAQNAAHAAFAGRRTVTPKSRDGMIESLRVLKACRKTAVAARRVALQMIHNTIICAPDELREALRKLTRMQLVRTLAAWRPDLTDYRNVVSAYRITLKSLARRYLELHDEIADLDTMITAIVEELAPALVARNSVGHGSAGQLLLTAGDNPERLRSEAGFAALCGVSPVPASSGKTTRHRLNRGGDRAANSALHIIAIGRLRTDPRTKAYVAKRIAEGHSKLEAIRCLKRYIARELFALIRQRGREINQGAIAA

SEQ ID NO: 229702 - protein, 398 aa, unidentified
MTESSDYESVQVFIGVDVGKDTHHAVAINRSGKRLFDKALPNDENKLRSLISDLKQHGQILLVVDQPATIGALPVAVARSEGVLVGYLPGLAMRRIADLHAGEAKTDARDAAIIAEAARTLPHALRTLKLADEQIAELSMLCGFDDDLAAQTTQASNRIRGLLTQIHPAPERVLGPRLEHPAVLDLLQRYPSPEKLASLGEKKLAAQLCKLAPRLGKRLAADIAQALAEQTVVVPGTNAAAVVLPRLALQLITLRKQRDEVALEVEQRVLAHPLYPVLTSMPGVGVRTAARLLTEVACRAFASAAHLAAYAGLAPVTRRSGSSIRGEHPSRRGNKALKRALFLSAFAALRDPLSRAYYTRKMSQGKRHNQALIALARRRCDVLFAMMRDRTFYTPQGS

SEQ ID NO: 229703 - protein, 345 aa, unidentified
MGQITRVGVDIAKSVFHVHAVDRFGERQWKGKYSRTKWLDAIVDKVPRGAEVGMEACGSSHYWGRELQKRGYKVKILHAQFVKPYVKSNKNDAIDAEAICEAMGRPNMRFVSLKSKEQQDIQSIHRIRDKLMVQKASKANQIRGLVSEYGLVAPVGINKLRESVPLWLEDAENGLSALFRSLLSDLYDDLCQLQERVDKIDKLIQQEVKKDPVARSLLELRGVGVLCASALSCAIGDAKGYRKGRDFAASIGLTPRQHSTGGKPRLLGISKRGDGYLRKLLVHGARSVIRHSHRHDDNLSKWIAKLCAYKHVNTVVVALANKTARAAWAMVNKNEGYHPELIAHA

SEQ ID NO: 229704 - protein, 319 aa, unidentified
MLVGIDVAKAELVVATRPGGERWTVENAERGVRTLVERLRRDGAQLIVLEATGGYELLCVAALVAASLPVVVENPRQVRDFAKATGQLAKTDRIDADLLALFAERVRPELRPLPDEEAKELEALLARRRQLLEMLQAERNRLGQVFGRGKAPVKKSLKAHIAFLERELRMADTDLGDMIRASPAWREREDLLRSVPGVGPVLSLTLLANLPELGRLSRRAIAKLVGVAPLSRDSGTLRGRRFVHGGRASVRGVLYMGALVATKRNAVIRAFYARLLAAGKPKKLALVACMRKLLTILNTMIRTGQRWCAEHTDRAVIHA

SEQ ID NO: 229705 - protein, 307 aa, unidentified
MTAVGIDVGKTSLDVAVGDRPGVTRYANSRTGVGKLVKWLLRLESPRIVLEATGGYDEPVLEACCDAGLWVARVNPRQARNFAKATGELAKTDAIDARLLALMARLLADRLRPHVPPLPWQRELRDWLRRRSQVVIAVQAHKQQAAMAPAAVRALTSRTIAALQREQVAIERAIQALIEQHATPALRFSKGLGPVFQASMLAMLPELGELDRRQIAKLVGVAPMNRDSGQGQGKRRIHGGRAPVRVALYMATLSAVRWDPTMKAHYQQLRARGKLGKVALVACMRKLLGIVNARRREELRAEGLIMA

SEQ ID NO: 229706 - protein, 340 aa, unidentified
MQLYAGIDLHASNNYLAVVDENGKRMFKQKLPNETEVILLKLERFQEEMVGVVVESTFNWYWLVDLLHEAGYRVHLANPAAIQKYSGLKHSDDKHDAFWLAEMLRLGILPEGYIYPKEKRPIRDLLRKRGQLVRLRTSLILSLQNIIVRNLSVRISANDIKKLKENAVVPLLESNDDLAIAGIISKETIDFLTGKIRAVESMVEQKARLKDQYRHLLTIPGIGKILALTVMLETGPVSRFPRVGDYVSYCRKVNTKWTSNDKAKGKGNKKNGNKYLAWAFSEAAEMARRYDAQCRNWYNRKMQKTNFMVAHQALAHKLARAAYCIMKEDVAFMPEKLFAI

SEQ ID NO: 229707 - protein, 337 aa, unidentified
MQKEDCDCVGVDVSKRTLDVALYRGEVDWKNGHIKVENNKTGYKDLKRWFRSNGIKKQKLRICMEYTGLYAHDFRIWLESEGLVYYMVDPNRMHYFEPPLSIKGIRQTKTDKADAFRIAIYCSLFYKSMSPSHLPSSTYFILKRLLAERLLYVKQAAKYKQQRRDVSLYDTVDSRIRKEEELKKLNSYIWRTEKDIRSVIQSDSLIKRNYDLLTSIVGIGMVIAVTTIVLTENFTAFTDPRKYASYIAIAPFPHESGTSVKGAVRVSKQGFKQAKADLSISVLPAISLDPGIRSYWLRKKAEGKHSGIIMNAIKFKLVLRMFAVVKRGKPYVIIDKF

SEQ ID NO: 229708 - protein, 402 aa, unidentified
MIFVGDDWAEEHHDVFLMDEAGRRLGSRRLPEGLAGIGQLHELIAGHAEESDQVVIGIETDRGLWVGALVAAGYQVYAINPLAVARYRDRHHVSGAKSDASDAKLLADLVRTDRHNHRPVAGDSADAEAIKVLARAHQSLIWTRTRHTNVLRNALREYYPAALVAFDDLAHGDALGVLDRAPSPAQGAHLPVSAIQSALKRGGRQRNIAARAREIQAALRTEQLAAPAPVATAFAATTRATVGIIAELNRQIGELEATLAQHFEKHPDADIYRSLPGLGVVLGARVLGEFGDDPNRYTDAKSRRNYAGTSPLTVASGKKRAVLARHVRNRRLYDAIDQWAFCAISTSPGARAFYDQHRAAGDTHHQALRALGNRLVSILHGCLRHHSTYNEHTGWAHRMAAA

SEQ ID NO: 229709 - protein, 447 aa, unidentified
MKTEPEEIPDADHELIIERVAAIDVAKASGKVCLRLPRPGRPGHRVSRVWDVEATTAAVCELADHLVAGQIERVTVESTSDYWRIWYYLLEAAGLSVQLVNARDVKNVPGRPKSDKLDSVWLAKLTEKGLLRPSFVPPAPIRQLRDYTRLRVDLTRERSRYWQRLEKLLEDALIKVSAVASTLDTLSVRDMLEALIAGERDPRGLADLARGRMKTKRAALIEALTGRFDDHHGELARMLLDQIDALSGQINTLTIRIDQLLATIANEVPGHDDGDSGAGGQPSADLTVVQRLTEIPGIGPTGAQVILAEIGLDMSRFPTAAHLVSWAKLCPRTIQSGAIQRSGKSGKGNPYLKGALGEAAAAAAKTNTFLGERYRRIVKRRGKLKALVAVARSILVIIWNLLSDNHARFRDLGPDYHATRINTERKLRNHIAQLAALGYHVAVEPAA

SEQ ID NO: 229710 - protein, 344 aa, unidentified
MNYVGCDLHKSSTYVYVINSKGKCIINKSIPNNTVDLHNFFKSVPKPFELAVEATYNWYFFIDIVAEYTDKYYLTNPLYLKAFAKRNKKTDKIDAKLIANILRVGYLPTVHIADKNIRIQREVLRKRMKTVQDRCRIIFRLKALLDKLGEDSIGNFATIKRLKEIEISHMPEEYHYIIEDYRKQIVEFLQSEHRIDSLIKKLVYDDPEAKLLTTIDGVGEFSALLIKSEIATISRFKNFDALCSYAGLAPRVYQSGNKCIIGAISKNRRKHLQWILLEISHFFIQQNERYKNKFERIKEQKGYNKAKVVLARDLLKIVYRVLKTKKPYYKENIRTMVPYAVCGV

SEQ ID NO: 229711 - protein, 432 aa, unidentified
MISVSQPVAPEDSVFAAFVGLDWADQKHDLVLYDPRGGPPQPRQLPHTPEAIDEWACDLRQRFGGRPVAVCFEQTRGAIAYALLKYDFLVLFPLAPARLTSYRESFSNSGAKDDPTDAALLVDYLLRHRDQLRVWQPDSPATRELLLLAEARRNAVDQRTRLSNQLTAVLKQYFPQALVLVGHDVDTPLACDFLSKWSTLAAVQAAAPVTLRKFYYGHSCRNEERIVERLNLAKAAIPLTTDVVLIQVGTLQVQCLVAQLRVLHKAVAIYEARLVELMDQHPDAALFRALPGAGPALAPRLLAAFGTDRERFQSASELQTFSGVAPVTKRSGKRCSVQRRWACPRFLLQTFHEFAFCSCKRSTWAKAFYLQQRAARKGHHAALRALAFKWIRILFRCWKTRTPYSEERYLASLRRRNAPLLTFLPAAATARA

SEQ ID NO: 229712 - protein, 335 aa, unidentified
MTVSNQAERVIGVDVSMSRLDIADSQGKIHKTISNTAAAIKKAIVQKLDDGDSVFVVCEATGGYEKDLVKTLQDAGIPVAIANPRQVRQFASAMGRLEKSDPIDAEVICQFGQTAELPAAPVKTAEQEARDAIVRRREQVLEMIGQENNRLQQESDPKMKKTIEQVLKTLKNLQKKLDAEISRFLAEEAKTNASVEVLMSVPGVGAVTTATLLSELPELGQLNRSEVAKLAGVAPIVHESGQSRGRRSVSGGRRPVRRVLYMASLVGIRRNPVLMEFHRRLVSRGKPQKVAIVACMRKLLTILNSMVRTKTRWRTKGEEKVVADQGPATTRAHGD

SEQ ID NO: 229713 - protein, 320 aa, unidentified
MQNCNVLGIDVAKKSLVIFNQSNNQTIAIPNEKSALVESLEAYSWKPSENIIALESTGDYSFLPMQFFTEKGFTVKLINPIVTKKLIKATIRSKKTDKSDAQIIAEVAFYGEGQIITENDLNTAKKTLLRLENKITKIKSDFKRIKKSLEIKDKNGIELTEAINQVDQLIAASETAAEKIWQLSRKEKSDRQEEIISSHPGCGEKLSAIISEEAGNIKRFPTAKQFKAYAGIDPKVYQSGEKDVHGKMTKRGNPFLRQALFLAAFVASIHDPELKEYYQKKRAEGKPHILSVCAVSRKLCERIYSTVTQDRFYERRYPQG

SEQ ID NO: 229714 - protein, 355 aa, unidentified
MDNLRYIGLDVHRDTVSAAVLNREGQLIMQSVVPTRAPAILDLLDGIRGTLHVTFEEGIHSAWLYDLLQRRVARVLVCDPRKTSLLKSGNKGDLIDARKLAELLRNDALSPVYHGELSSLEVQRRTRSYTMLREDTTRIMSRVKAVFRGLAIPYHGKSIYRPDRRESYLAQLPTEGLRQRAELLYQELDAVHRLRLRAKREMLAECRKHPAMKWLQSVPFLGKVRTAVLIGRVQTPHRFRTKRQFWSYCGLALETHDSAQYHVLHGQVERKPRFVQVRGLNWNHNHDLKHVFKSAATMAAFREGVFRDYYCGLLAKGIRPEMARLTLARKIAAITLKIWKEGGTFNAEQVKPQAA

SEQ ID NO: 229715 - protein, 361 aa, unidentified
METSVVYVGMDVHKESITMAMITDGSSAVITEKIENRDEKIRRFLKKASKYGEIKACYEASSCGYVLWRKLNKWGYSCDVIAPSMVPKSPADKIKTDKRDATALVKLLKANMLCCVAVPTTEREIDRTLVRLHDQKSQDVKRNKHRILKFLQTRGFAYEGRNFSPPFRSWLKSLPLAKQDRFVLDEYLASFEYEESRLDEVDRQIIGLSNKDIYSEKTDRLKTLKGIDTLSAMVLLTEIGDFTRFESPRQLMAYAGLVTSENSSGEKRRQGKTGHGGNRHIRFILIEAAWHYRHRPSIGKNLMKRQEGQPAEVISYSMKAQQRLYKKYWKISSVKSNQKAVVAVARELTDFIWGIATGNTN

SEQ ID NO: 229716 - protein, 473 aa, unidentified
MARAARRQGESQHHKRRSSRGRSAPFEQMNLNAAGIDVGATEHWVAVPEDRDEEPVRRFGAFTADLYVLAEWLRQCQIETVVMESTGVYWIALFEVLEERGFDVKLVDAHYARQVPGRKTDVKDCQWLQELHTYGLLRGAFRPEDQICVLRSYLRQRSMLVAMASRAVQHMQKALEQMNLKLTEVVSDINGKTGMEILRAILAGERDSQRLASHRDRRCKHDQATIAKALEGHWRAEHLFALQQAVEQYEFLQQQLQACEQQIEACLQTFVTQVDVDTPPPAPARKRRARQRHAPDFDVHGYLVAMTGVDLTQIDGIDALTALKVISEIGLDITRWPTGKHFASWLGLCPGNKVSGGKRSRMRSKPTANRAASALRLAAQGLVNSHSALGAYYRRMRARLGAPKAITATAHKLARLVYSMLRYGTAYVDAGQQAYEQKYRDRVLTNLQRKARVFGYQLVHVADPGSAQAAATL

SEQ ID NO: 229717 - protein, 314 aa, unidentified
MEKEKVYIGIDIAQDNLDMAAYPTGQIRKYNNNSSGIPKTVVKLKRLSPKLIVMEATGGLEKPLAQALDQAGLAVAIVNPRKIRDFGRSMGILAKTDKLDAKVMVYFAVKIEPTPHPPQDQASQKLENLLTRRRRLSDMRTAEKNRIHQNTDKAIQIHIQDHINWLESELKGLDKELSDKIQQNPKFMEKIQLYKSMPGVGNILSYTLLANLSELGRLNQREIASLVGVSPLNRDSGKLRGIRKIWGGRATVRKALYVPAVVVIRCNPVIIDLYQRLLAKGKLKKMALVACMHKMLTILNSMTKNTWHYATAKS

SEQ ID NO: 229718 - protein, 342 aa, unidentified
MENVSIIGLDLAKNVFQAHGARADGSTVFRKKISRAKLLSFFASVPVCVVAMEACASAHYWARQIGALGHQVRLIAPIYVKPFVKRNKNDAADAEAIAEAACRPTMRFVAMKSVEKQASGMAFKTRDLLVRQRTQTINALRGHMAEYGVVAPQGPVHVERLAEALRDPSGGLPAPVISLCQLLLANIAALAEQISLLEQELRERARRDQTAKRLMTIPGVGVICAVAMEALAPPLEGFAKGRDFAAWLGLTPRQNSSGGKTRLGGTSKMGQRDLRRLLVSGAMTVVRWASRKGAPEGSWLGRMLKKKPRLVVAVALANRTARIAWALMTKGGVYQAPDAVRA

SEQ ID NO: 229719 - protein, 346 aa, unidentified
MEYIALDVHKKYTWARVENTEGEKLYESRLQHAHGSIKNFINRWERQSPVAVERVGNWYWIVDEIEEGGGKPQLVNARLAKLMMGSVNKSDKLDAKGMNRLQRTGTLPTVWIPPSSVRDARELPRTRMVFSRQRTQLKNRVHATLAKYGFVVEEASDAFGKKGRAIVEGILVKLPPYTEQAVRRVLGQLDHVNENLKVIEAQMMEAFAPCAETNLLKSLPGVGDILAVVIWTEIGTMERFARAEQFASYCGLVAREHSSGGKFHYGAVRRDVNVYLKWAFVEAANSSILNRERCGYDHISRLYQRIKSRRGHGKAKVAVARHLSEASFWMLKKGESYREPVSSTQR

SEQ ID NO: 229720 - protein, 321 aa, unidentified
MANFSPVVGIDLSGSWWDVAISSGTSEQGEAARFANSPEGRQACLAWVTAHCHPGAVVACEASGGLERDAVALFHGAGFTARVLDPAQVQHFGRAQGRKAKTDAIDAAMIARYAATFPGRPAVPDPARKALTDMIGARDLLVGQVTASRNQATHFTDRSVRRSVELCIAAMLRQIAALDRLIARLIDATPAFAERNRIIRSMPGVGPATASRLLASLPELGTGSAKQMACLVGVAPIANDSGNRRGARHISGGRHDVRKVVYMAALVATKHNPALRAFYERLCGAGKPKKLALIAVIRKLIGILNVMLQRNQMWHPTTLKA

SEQ ID NO: 229721 - protein, 354 aa, unidentified
MTIIGVDFHPEFQQIASVDTDTGEFQEKRLAHCEEAEKFYRALAASGQKVRVGMEASGHARWFERLLAELQIELWIGDAAEIRAKRVRKQKTDRQDAQLILRLLLEDRFPQIWVPSWENRDLRQLLWHRHRMVQARTRIMNQLQAVALNEGLRCKKRLWRERGRQQLESFRLAPWASRRRRDLLELLDRLNPTIAELSQAIEQEVEKCPPAQRLMTHPGVGPLTALAFVLIIGEADRFQCGKQVASYLGLVPLEDSSGNRRRLGHITKQGSSMLRFLLVEAAQVTARSLPEWRSKYLHLMMRRGRKTAKVAMARRLAVRLYWMMRQQWGYEQWVKFGSHAGQPGNRDGVQSDTE

SEQ ID NO: 229722 - protein, 339 aa, unidentified
MELCCGMDLHSSNTVIGIIDEKRRHLIDRKLPNDPELIRNFLKPYKTDLKGIVVESTYNWYWLADLLQEEAYQVHLSHPVANEQYNGLKHSNDKHEAFWLAELLSLGILKEGYIYPRQVRSVRDVLRKRAHLVRVRTALIVSLQHMISRNCAVKVKTGDIKRLTADVISPCLEKEEALLLAGKTSKEVIDCLTRQIDKIEGWALKRLRREEVFNRLVTLPGVGDILGMTILLETGPISRFRAVGNYASYCRKVSSPWTSNDKVKGRGNIRNGNRYLAWSFSEAAAHARQTNEACRRFYDRKLRQTNTKVAHNALAHKLTRAAYYIIRDHVSYQEEKMFS

SEQ ID NO: 229723 - protein, 392 aa, unidentified
MDAEIARVVIGMDPHKRSVRVEVMTADESIVGGGRFSTDAEGYTRLLAYARSWPDREWAVEGCAGIGKHIADRLVADGESVVDVPAKMSARVRVFATGQGRNTDATDAHSIALVGVRMSGLRPVVADEQLEVLRMCVDRRASLGREHTRKVSQLHRLLLELIPGGAKRSLSAAQAKELLRKVGPTTAAGKVRKAHAAELVADLATIYARSKAADKELQALVKASGTTLLDLHGIGPSGAARLLVEVADITRFPDRNHFASWNGTAPIDASSGEHTRHRLSRKGTRQINRVLHIMAVVQLRNATEGRAYYDRKKAAGKTSTEAMRCLKRRLSDLVYKAMLDDLAGHTTTGPGGHSGDDSDSSATGSQPATGSSDKPLPGPASNQPTTTLPAAS

SEQ ID NO: 229724 - protein, 318 aa, unidentified
MQSINYVGIDISKMEFDVAMPLGEKYKHFKFSNDLAGFKKLLADLPENTQVVMEASGPYYLQLACFLFDQGIEVSVINPLVIRRFCQMRLSRTKTDKKDAVMIAEYGKAEKPSGWVPDKDYVMELRQLQATRDLFDKHRTSLIRQQEAFSCVPVISVEVRKAIKQAIKNIEKQIAVLEAKMQLLIKQYHGTMYQQLQTIPGLGKKTSLLLIVLSGGFSRFSNARQLSSYIGICPRIFESGTSVKGRSRITKMGMSRIRAMLYLCAWSAKKCNQKCKDIYDRLVANGKPKRLALIAVANKLLKQAFAIATKQTTYYPNY

SEQ ID NO: 229725 - protein, 438 aa, unidentified
MSNNVIFNLNELFISVGIDVGADFSWMSIALPNQQFVGKPYKILHSSIDSLTTAVSKIKEAEELYSLESRIFLESTGIYHYPLFCYLRDKGFNCSVINPIITKNSTNINIRKVHNDRFDSKKAALVGLKPDLKVSLMPSDLALNCRNLCREYYDLMDNRSAYVNKLQGELRMAFPQYLGIFSKVTTNTSLTLLDKYTSPNAFLEADMQEIIDTIKSTARFGLTYAHNKYNAIIQAAHDANEFGHIIDSNIKRIRLYISFIRKYDEEIESILDAMHELVDTNEDTDFVKQIHLIESFKGAGFLSAVSLMGEIGDFSAFSKPKQLFAYFGLDPAVKQSGKFEGTKIQMSKRGSSIARRVIHTLTLQSISVSRTGEAKNPVLRDYYLEKCKSKPKLVAMGAVSHKVCNIIFAILRDNKPFEIITPQEHIKQYNAAKCDMAA

SEQ ID NO: 229726 - protein, 381 aa, unidentified
MTEMIVGVDPHKTSNTIAVLARDETLQLRCRFDNTAEGMVAMLDAVAEFPDRAWAVEGANGIGRSVAQRLVAAGEKVIDVPAKLATRVRVYSTGHGAKTDQADAVAIAKAAVHSRHLRMVHPDDESVALKLLSDRRHQLIASRTQSVCRLHRLIRELVPGGTPRALTAERAETLINSLDLSDIAGLMRIDLALDHIDDIKRFDRRIDQVTLKIHAAVKDSDTTLTRIYGVGIINAGLILGEAGDVSRFPTRNHFASYSGTAPIAVSSGDINRHRLSRSGNRQLNHAIHIAAIAQIRYDTPGRAYYRRKLGEGKSRREALRCLKRRISDAIYRQLQLDRQLNQQQDQTWPRWPSSRGDYPSYRSPDTLRRNGRPMEPRPAAV

SEQ ID NO: 229727 - protein, 368 aa, unidentified
MRDCTYIGLDVHKDSIHVAIGETSPTYEVRHYGTIGGDLASLDRVVRRLRSKKTELKFVYEAGPCGYGIWRHLHQQGLACIVVAPSKTPKKPGERVKTDRRDAITLARLHRAGELEAIYVPLPEDEAMRDLTRAREDAKIAEKKAKQRLNAFLLRHGRSYSGSSKWSLAHRRWLSDQSFPHPAQQIAFQEYIDSIEQCEARVKRLTEQIETLSPEWRLYPVVEAFQAMRGVSLLNAVTLVAELGDIRRFDNPRELMGYLGLVPSEHSSGLSTRRGGITKAGNGHARRALVQGAWTYRHPAKVGRRLRDRRARLPEAVSQIGWNAQLRLCQRYRRMRARGKPSQVVITAIAREMAGFLWDIARQVPMAA

SEQ ID NO: 229728 - protein, 337 aa, unidentified
MNVTLIGIDLAKTVFQVCGVNRSGNPAFNHQVRRNRLIEKLLQYPEATIAMEACSGSNYWGRELKKLGFEVLLIPPQHVKPFVKGNKNDRNDAFAITEAARRPRMRFVEPRSLEQTDILVLHKLINRKVQARTALINQIRGFLNEYGVIVAPGKERLLKELPELLEDAENPLTCAAREALQSLLEEWREANRQIQMHEAKLKQTAKQLEPARRLMGVKGVAEKTATAVVAYAGDGKAFKSGRHFAANLGLVPNEHSSGGKQKLGSITRRGNNYLRRLLVQGAWSVIRYTDKATDRLSRWAAGVIERRGKHKAVIAVANKLARILWAMLYHQTEYRAA

SEQ ID NO: 229729 - protein, 411 aa, unidentified
MQVMIERGCGLDVHQATVVACLLTQLPNGKCKKQIRTFSTTTRELMGLRAWLQAEGCTHVGMESTGVYWKPVYAILEGGFELVIANAQHIKRVPGRKTDVKDAEWIADLLVHGLVQASFVPPPAIRELRDLTRYRRKLVESRSAERNRLLKVLETANIKLASVASDVFGVSGQLMVAALVAGEATPAAMAALAKGRLREKLPHLELALEGKVEEHHRYLLRLQLKRLQAVEDDLAQLEAHLQEKLEPYREQEERLRKIPGVDSTLAAIIIAELGVDMSVFPTASKIAAWAGVSPGNHESAGKRRSGRVTKGNVYLKTALVEAAFAAARKKGSYLREKFYRLKARRGHKRAAVAIAHKILTAVYHMLAHQLPYHELGDLYLDQLNQQNITRSLVRRLERLGYNVTLDPTVAA

SEQ ID NO: 229730 - protein, 410 aa, unidentified
MQVLYPHCAGLDVHKDTVVACVRHMAGGTVKRQVRTFKTTTTELLALSEWLAAEKCTHIAMEATGVYWKPVWHILSDGDFSLVLANAAHVKNVPGRKTDVNDATWLADLLAHGLIRGSFVPDQQTQEMRDLLRTRKQLTRERSRHVQRLQKTLEDANIKLDSEISDIIGLSGRKMIEALIAGESDPEQLARLAHRRIKAPPEALCEALRGRVTRHHRFLLRLHLHQIDAIDKMIADIDREVDALVEPFRTTVLLLTTIPGVDELSAGVILAEIGRDMSRFPTAGHLISWAGLCPKNDESAGKRRPTRMRKGAAWLKTTLVQCAAAAARKKASYLQAQFHRLRARRGARKAIGALAASILTIAYHMLISGELYHDLGPDHFDRRTKTAQTRRLVMRLQHLGYAVQITPVAA

SEQ ID NO: 229731 - protein, 413 aa, unidentified
MKSASNILPFQPRDGVTVGIDWARDDHAISVVDPHGREIDRRVVAHTDAGIRELLKLLDRHDADEVAIERGDGPLVDALLEHGTTVVVISPNQVKNLRGRYGSAGNKDDRFDAFVLADTLRTDRARLRPLEPDSEATQPLRRACRARKDLVAHRIAVTNQLRAHLQRVFPGAVGLFADLDSAISLAFLARFTTQDQADWLSPKRLAAWLKSIGYCGRVSAATLHTRLAAAPRGATGETGTIEAHVTRAYLAVLHTLTEQIKALAIQVDEQLALHPDQHIFTSLPRAGRVRAARLLAEIGDARGRFPTPDALACLAGVAPSTRQSGKTRHVGFRWSCDKQLRDAVCDFAADSRRANPWAADLYQRARNRGHDHPHATRILARAWLYVIWHCWQQNTPSDPAQHGAIPRFIHPAA

SEQ ID NO: 229732 - protein, 479 aa, unidentified
MKSKKIPSSSSKAIRPAANIPVIHPHAAGIDVGSVEHFVCVPQDAVPEGESAVRSFGGFSGELDKLVEWLQSCGVKTAAMESTGVFWIPLAQKLEEAGIEVVLVNARHLRQVPGRKTDVKDCQWLQQLHSYGLLQGSFRPGQDICYVRSLMRHRQNLTQSCGREVLHMQKALQQMNVHLHHVVSDLDGETGLRILDAILAGERDPGKLVQLRDPQCRKSTPEQMVAALQGDWRAEHLFVLRQALETYRHLLEQLRVCDLEVQEALTKVILPEAAEPMETAPPNPPASGKPRKKKRFHHRKGGTGLRQDLSGELARICGVDLTQLTGLNVLGVLIILSEIGLDMSRWRSSKAFSSWLGLCPGNKISGGKVLSSHTAHVVNRVAILLRTVAPAVGRTDTWLGSFHRRMRSRLGPPGANTATAHKLATLIYHLLKYKEEYIDVDRVLYEEKMRGKRLARLRKQAEELGFELVQKTQTASQAA

SEQ ID NO: 229733 - protein, 344 aa, unidentified
MDHFGGLDVSVKETSICIVDDTGRIVREVKVRSEPEALLEVLGNLAYRFKRIGLEAGPLSQWLFSTLAEAGLPVVCVETRHMRAVLKAQINKTDRNDARGIAQMMRVGLYRPVHVKTLRSQKLRMLLTHRKLLQSKAIAIDNDLRGTLRNFGLKVGMVGTARFEARIRELVENLPDLVALIEPLLIVRRTLREQIVILHRRLLAIVRDDEVCRRLMTIPGVGPVVSLTYRATVDVPARFRKSKSVGAVFGLTSARYQSGEVDWSGEISRCGDEMMRTMLYEAAQSMMHSKKWSWLKAWAIQIARRRGMKKAIVALARRLAVIMHRIWVDGTEFRWTREQAAAAA

SEQ ID NO: 229734 - protein, 346 aa, unidentified
MNIKRIGIDLAKQVFQLHGVDSHEQIVLRKRLKREQMHRFFKELPPCLIGMEACGGSHYWARVLMGYGHTVKLMACQFVKPYVKGGKNDANDAEAICEAVSRPGMRFVTIKTEEQQAMQADHRIRSRLVKVRTALGNEIRGLLAEFGIVLPAGIRQVRQAMPILLEDEEQKLPASIKSLLAELAHELRQTDDRVEQHDKRIQAAVKEDERIQRLLEIEGIGPITASALVAAVGDATQFANGRNMAAWLGLVPSQHSSGGKERLGHISKRGDTYLRTLLIHGARAALNTSAGKEDRRSRWAQALATRRNRNIATVALANKNARIAWAVLNRQEMYRSAIINDGTVRQ

SEQ ID NO: 229735 - protein, 360 aa, unidentified
MLIIGCDLHTRLQDIAMLDTTTGEMVTRTLQHQEGEAEKFYRELNEKAVVGIEATGYTQWFERLLGRVGHELWVGDPAEIRARVVRRQKTDRRDAEHILELMITGRFPRLWIPSPEERDVRQLLKHRDKLVQMQTSVKNQLHYLAMSQGVCRKRQLWSEGGLAELQGLRLDPWASRRREELLELLERLGPGIQELDQAVEAEVAKRPEAVLLRRQKGVGPITALAFVLTLGPVERFANSRKLVSYLGLNPSEDSSGGRQRLGHISKQGNEMLRWLLVEAGQSAARFDPELRRQYQRLKFRRGRNVAKVALARRMAVRLYWRLREARTKAAPEAGATPSQEARILVPPLATAAGAAGPHVR

SEQ ID NO: 229736 - protein, 350 aa, unidentified
MIIIGVDFHPEFEQIASVDTDTGEFQEKRLVHCEDAEKFYRALAAANQQVRVGMEASGHARWFERLLAELQFELWIGDAAEIRSKRVRKQKTDRQDAQLILRLLLEDRFPRIWVPSWENRDLRQLLWHRHRMVQARTRIMNQLQAVALNEGLRCKKRLWRERGRQQLESFRLAPWASRRRCDLLELMDRLSPTIAELTQAIEQEVEKCPEAQRLMTHPGVGALTALAFVLIIGKAERFRCGKQMASYLGLVPLEESSGNRRRLGHITKQGSSMLRFLLVEAAQVSVRSLPEWRSKYVHLMMRRGRKTAKVAMARRLAVRLYWMMRQGWDYQQWNKFGSHAGQPGHRDGVQ

SEQ ID NO: 229737 - protein, 341 aa, unidentified
MGQVNTIGLDIAKRVFQAHGADASGGVVFRKRLVRAKVLAFFAAQPPCTVAMEACAGAHHWARELGKLGHTVRLIPPAYVKPYVKRQKNDMADAEAICEAAQRPSMRFVPVETEEQQANGVVFRTRDLLVRQRTQCINALRGHLSEYGYVFPQGITHADAVIAHVEDPASSVPESARAVLKVLIGTFRALEAQIQALDAAITQRAKADPVARRLMTIPGIGPIAATAITALVPAPEGFRAGRDFAAWLGLTPLEKSTGGKQKLGAISKMGERTIRRLLILGASAVVRWAGQRGTPAGSWLARMLARKPKMLVTVALANKTARIVWALLVKGGVYRAPAPAA

SEQ ID NO: 229738 - protein, 310 aa, unidentified
MNTLPEKTQTVYAGLDIAKATLQLHLQGRQHVLPNTAAGHAKLVKLLRPIAGVHLVCEATGGYEREVVAALQAADCPVSIINPARVRHFAQAQGRRAKNDPIDAATLTAFGQALQPKPTPVPEPVLAELRDLVRWRQHLKGQLIATTNRSEHAPTKFVSRQQVKLCRQLTAQIAAVEAELAAALQRSPHWLAQIRKLTELAGIGTLTAVATLSEMPELGRLGRREAAALAGLAPWTRQSGPWEGQRHIGGGRAEVRRGLYMAAVAVARMKHTGLGQFYHRLREAGKPAKVALTAVMRKLLLQMNHTLKTA

SEQ ID NO: 229739 - protein, 327 aa, unidentified
MRQHKSLTEKAKTTVAFDVCKAVLDVHIRVDAKAFQVPNTDEGFDQIAVMLADYDVSLILMESTGGYEDVAACYFQSVGFDVAVINPRHARNFAKAMGKFAKTDRLDAAILADFAAVIDSRPDRARFIKPPTDEERKFLSKMVARRRQVVDLLATEKQRLSHADDYAIQSINKMIDYIESQLKEISGDISVYVKKNYADLSKMLSKVPGIGELSVGLLIGDVPELGNIGNRQLSAVIGVAPFNHDSGKRRGKRCISGGRQNVRNVLFMGIMAATRFNPVIKAFYERLINKGKPKRVAYIACVHKLLRIINAMVRDGTSFNPELHTVI

SEQ ID NO: 229740 - protein, 364 aa, unidentified
MKGKKRKTEARYVGIDLGKRTYEVAIVRKGVVKRSNGRTSVEGRQALYKKLRPSDTVALEVCSLAFVMAKEIAAVVGCRVFVLNPYQLALIYGSMKKTDKEDSLKLAHIVEDIPEERLPLVPVPSDEEMGRRRLLACHRRAQQSRNRDINRLHGIFLGQGITTMKKKDLSTGEARQAAVRVLNGSGRQEAEYYLRCLESHEAQIAAVGRQMEESAKGDEVIERLQGVPGVGPMVAFAFASHVAAERFANGGQVSNYLGLVPRVYMSGDTVRYGQITKRGNGYIRALLVQGAWSLTRCKKGGRLKELFEYMTVEKSKSKKKAIVAIARRMAELLYVLMRDGSEYEERRFNREKKVEELARLAMSA

SEQ ID NO: 229741 - protein, 312 aa, unidentified
MTRIICGVDVGLDTLDARIGRDGPWQPFPNSPDGRAALAAFCREHDVALVAMEATGGYERPVFGALWAEGVPAAIVNPRAVRRFAEGMGVLEKTDRIDCGIIAWYAQTKGIGPTPPAAATQARLTALVVRLRQLTALKVGQANQARLVTEPEVIATVTPVLAVIAAQIRVLETTITQAIAEDPAWAALDRGFRTIKGVADRTVAHLMAEMPEIGTLSNKAVTKLAGLAPIANDSGRRAGKRPVRGGRAGVRAVLFVVAEIVRRHEPDFAAFHRRLNQAGKPKKVVRVALAHKLLVRLNAKARDIRRDLATAA

SEQ ID NO: 229742 - protein, 351 aa, unidentified
MDTEVFPKLFIGIDVHKRQWSVSIFTANCHHKTFSQAPDPKALKSYLDKFFPKYQIICCYEACKFGFWIYRALSSFGYECLVINPADLPTTNKESSEKTDPVDSRKMAKALRAGLLRGIHVPTQETEGDRQLFRYRKRLWADLVRVKNRIKDKLLQNGIETPAKYDNPYWTKDFLDWLAVIDLPSESSRLVMDLLLDQFEFTYRHFLKVSIAVRSLQRKAKYKANSKLLRGIPGIGPLTTVQLLTEIEDIDRFRNFKHFNSYIGLKPMVHSSGETDRKGYMTYRHHQGLRSSLIECAWTTVQRDPVMLTRYEELLQRHTGKRAIVIIARKLLSRIYHVLKTKEPYQVGYSA

SEQ ID NO: 229743 - protein, 380 aa, unidentified
MSTIRFLGLDVHADTIAVAVAEPEGEVRSLGTIPNRMESIRKLVAKLGPAKQLRACYEAGPCGYALYWQLTALGVACQVVAPTLVPVKPGDRVKTDRRDAAKLARCFRAGDLTAVWVPDADHEALRDLVRAREDARQDQLRARQRLSKFLLRHGRRPPEEVRKSWTLKHMSWIKTQVHFEQPALEATLLDYVHEVEHMTERIQRLDQAIREAIQKAPPAMRAVVEALQALRGVAQLTAVTVVAELGSLSRFDSPRKLMSYSGLVSREYSSGNRIQRGAITKTGNAHLRRVIIESAWAYQHRPWVGGNLLKRQQGLDPEVKAIAWKAQHRLHSRYKKLAARGKNKPQIVTAVGRELLGFLWAIAVQTEAKFQAKPKAAMRN

SEQ ID NO: 229744 - protein, 402 aa, unidentified
MAYDCVIGMDVGKYFHHACVLDPQGRQVLSKRINQHEGSLRKLFGTYLADNASVLVVVDQPNNIGRLTVAVAQAMGADVRYLPGLAMRQLSRIHVGNSKTDVRDAYVIAHAGLNLPDALRSVDRVEEVFLQLKVLNGIDEDLARAYTRLINQMRSALVGTYPAFEHVLHGQMIHRKWILHLLAKYGGPTKIRRVGKARLAAFARGHRARNPEPVIDAMLAAIEGQSVTIAGAEYAELGVAMSAKDALAKLEHRKEIEAQVLELIQDIPQTEILLSMPGIGPRSAAQILMTVGDMSDFPDAAHLASYAGLSPRTNQSGTSIMSNSPNRAGNKKLKNALWQSSCASIRFHERSRQFYERKRKEGKRHNAAVVALARRRLNVLFAMMRSGELYRDISTVQEAAAA

SEQ ID NO: 229745 - protein, 454 aa, unidentified
MSKQPRVLRDQRRIIGQFDIVNRSAAGIDAGSEGHLVSVPEDRSDEPVRTFGAFTKDLRALADWLVECGITTVAVEATGVYWIPLYEILEERNLKPKLIDSRSVGRRNKKTDVLDCQWIRQLHTYGLLEAAFRPPGEMLALRALMRQRRMLIEHSAQHIQHLQKALDLMNVKLHLVLSDVVGVTGLRIIRAILDGKRSPSELAALREPSCRGTEQMFVDALTGNYRLEHLFALKQAVALFDFHQELIAECDVEIEAGLTKFEKRNAAVTGQAGKKRSRRKNQLHFDGRTLLHQLAGVDLSAIDGLENATVLTILSETGTDMSPWNSAKQWAAWLTLAPNNRITGGKPIRKKGLVIRPNRAAQAFRLAAQTLERAQCALGAFFRRIRSRYGRQSAIKATAHKLALVFYSMLRNQTEYRDPGVNYYEQRYRETLLKSLNRNAATLGFALVPIEEVH

SEQ ID NO: 229746 - protein, 346 aa, unidentified
MNNHNKECTIKVLGIDLAKQSFQLHGVDEQGKVVLRKNLSRNKLTSFVANLPPCLIGLEACGGAHHWVRVFKSLGHTVRMMAPQFVKPYVKSNKNDAVDAEAICEAVQRPNMRFVPEKSISQQDIQCIHRIRSQLIARRTAQANQIRGLLMEYGIIIPKGISYIRKVIPHILEDADNKLTSLLRELLNELYDEMVYLDERISSLENKLKIISHQNEDCQRLLTIPGIGLLTATALIAAIGNISVFRSGRELAAWLGLVPRQHSTGGMPTLMGISKRGDCYLRTLLIHGGRTVVRVAHLYTDKRNLWISELDKRRGKNISAVAVANKNARIAWALLSKKESYQVTAI

SEQ ID NO: 229747 - protein, 393 aa, unidentified
MVCVGIDVAKDKHDCFIISSEGEILADVFTIPNNAEGFDTLLQAIRRSTRPEDKIKVGLEATGHYSYNILGFLLDKGLPTYVINPLHTNLYRKSLSLRKTKTDRVDARTIAAMLMSDVDLKSYTDTVYHNEELKSLTRYRFDKVRERAKLKQSVSRLVTILFPELEKLVSSLHSASVYALLSEFPGAKQISSTHMTHLKAVLKNASQGRYGQEMAENIRNAARSSVGSVMPAKSLELQHTIRLIRELDAEIEDIETAIQAIVDEMQSPITTIPGMGVRMGAVILAEIGDFSRFDSPDKILAYAGMSPSTYQSGQLSLSGAYSHMEKRGSRYLRYALYNATKHVCHWDPTFAAYLAKKRAEGKHYNVALSHAAKKLVRLIFAMEKSQRPYCAAA

SEQ ID NO: 229748 - protein, 355 aa, unidentified
MDSEKYIGLDVHQATIVVAVTDSTGRLIMESILETEAATILQFFAGLRGTLSVTFEEGTWSAWLYDLLNPHVDQLVVCNPRKNALLKDGNKSDRIDARKLAELLRGNQLKPVYPGETGVRMLRELSRSYLTIVKDLSRVMNGLKAVYRSWAIPCAGRDVYYSRNRAQWLAKIREAGVRRRAERLYEQMDMLQHLRQQARRELLAESRKHAITAKLRQIPYLGPIRSALAVALIQTPHRFRTKRQLWAYSGLALETRISAEYRLVEGQVRRSKKLLSIRGLNKDHNHDLKGLFKGAATMASVRPGPFQDFYQAALAKGMKPTMARLTLARKIAAITLTLWKKGENFDAEKLKSQAA

SEQ ID NO: 229749 - protein, 415 aa, unidentified
MLAESHDEEQIIARVAALDIAKAELVCCVRVPSPAGGKRRLQEVATYSTMTQALTELANRLVEMRVQRVVMEATSSYWKPVFYLLEAHGLDPWLVNARDVKHLPGRPKTDVLDAVWLCKVAERQMLRPSFVPPWPIRRLRDLTRYRTDLVAARTAEKNRVEKLLEDACIKLSVVASDIFGVSGRAMLAALVAGERDPKVLAQLARARMRGKIDRLEQAFDGHFDDHHRFLLSRMLARIEGLDADIAAVDAQIDVQLAPFAEAAARLDEIPGIGPVAAAAIIAEIGVDMSRFPTAGHLCSWAKFAPGINSSAGKSKGSASSGHGNPYLARILGEAAVGTTKTNTFLAARYRRIARRRGQPRAVVAIGRSILVIIWHLLHDPDTRYRDLGVDPTAKKRSHIRQLEALGYTVTLTPAA

SEQ ID NO: 229750 - protein, 339 aa, unidentified
MSKGSIQVQETMYCGIDVSAKSLTVVTQRVHQSVEQRSFPNNSIGHSALIVWLRKSKSPVRVSMEATGIYSLDLAFALDAAEGIEVAVLNPEVANRFAQTIRRSKTDAADAKVLAEYTRRMPFTAWVAPSPSSMRLRSIIRHVESLSVQSAQNQNRLHAAHGSTSTPGCIVQDLKHSVASLELRIRRLRREAMTLVRQDDLLRKRYELLVSIPGIAQVSAMQLLAELSTLPSDLTVREWVAHSGIDPAHEISGSSLRKASRISRAGNRHLRRALYMPALVASRCDPHAKAFFKSLLPRKKARLQALIAVARKLLHAMYGIFWSGLNYDGTKLFPRTTLS

SEQ ID NO: 229751 - protein, 378 aa, unidentified
MPKVRFVGLDVHAETIAVAVAEAGGSEVRSWGTIPNRPESVRKLIRKIGDGGKLKCCYEAGPTGYVLYWQLTQLGVECEVIAPSLIPTKAGDRVKTDRRDAERLARCYRAGELTPVWVPDADHEALRDLVRAREAAKQDQLSHRHQLGKFLLRHGKRPLEAGPAWSAKYLNWIKVHVRFEQPALEATLADYLHEVEHAAERIVRLEQSIEEAVSQAAPQVRAVIEALQALRGVAHITAATVVAEVGSLTRFENPRQLMSYTGVVPREYSSGNRRQRGAITKTGNAHLRRVLVEAVWAYRHRPAVNGRLLKRQRCLPLSDAAKQIAWRAQQRLYKRYTALMARGKHKNQVVAALARELLGFIWAIAVQTEAQCKMQKAA

SEQ ID NO: 229752 - protein, 320 aa, unidentified
MMAQNDLVVVGIDVAKDKVDGCIRSRSLRRTFPSSAEGRRKLIAWLRKHKVGQAAMEASGGYERDWAKALREAGIEVRIVDPKRVRSFARSAGRLAKNDAIDAEMIAWFAETFGEAKGQAYDAAREKLVQIVNARQALLDLQTSLQNRGEHAGPQVVQKMHARLLRKIALEVATLEAAIAAMIKATAHFAELAEIIESVPGLGEITSAGLIAAMPELGQVSNKIAAALLGTAPYDDDSGRRRGERHIKGGRRRVRNLFYMASLGAATRHNPVLKAFYRRLIANGKEPKVALVACMRKLIVILNTMIARGEKWDATRYVLG

SEQ ID NO: 229753 - protein, 400 aa, unidentified
MAVMIGTGPHKGSHTAVAVGAAGEPLGKLRVRACPDQAGKLAAWAQAWPERTWAVEGARGLGRLLARQLVAAGERVLDVQPKLAARVRLLEAGDTNKTDPDDARPVAVAALRSKGRQEVTADGHAVVLKVRAKRHRDLSRTRNQVVCRLHAVLCELIPGGVPDEITAGQAARILEQAAPAGAVAQARCELAAELLAGIRHLDAQRREVKKKLAAAVTASGTSLTEVFGVGPVIAATVIGDVITVARFPSRDHFAACNGTAPAGVSSGQRKIYRLSLRGNRRLNHAVHMAAITQIRHKHSDGRAYYQRKLAEGKTHKEALRCLKRRISDAIYARLRADARKAGPGGQPGNDTGSSVTGSHPEHRLFGQATSGPEPSLRAPATFTQATPAPEPSAKKIQRAT

SEQ ID NO: 229754 - protein, 341 aa, unidentified
MKNLFIGVDFSKEKVDVAIIFADGLTETAPRVFNEFKTTVSGYKQLVKWVEQNSYGIDSSLWLFCGENTGDYSKGLCNFLYGKGYDMWLENAKSIKDASGLRRLKSDRADASMIAEYAMRNYDKAIMYEPLSESLAQLRELFLYRQMVVRHRCSFQVRRGEKRLTMEKSPVKTMISQSGRHIVSELNKEVEKIDKRIAELIKSDEELTEVFTIVTSVPGIGTQNAVCLMVYTDNFRRFNYDSRKISCYYGIAPFGKDSGTSVHSDPHVHYMANRQIKAMLTQAALAAVNFNPVMARYYMRLVERGKKKQVALNNVKNKLVHLVTAMVRNRQTFTPEYKISA

SEQ ID NO: 229755 - protein, 344 aa, unidentified
MDNHTQYSGFAGVDLAKKVMQIHFVTGDGEITDKQVKRAEFLDFFRNRTKCLIGMEACGASQDWARKLEAMGHEVHLMSPKAVKPFVSGQKNDYNDAIGIYKAMFNGVRRVPVKSTEIRDLQTLRRIRSQVTKDKVKEINHVRGLLAEYGIVMGKSITAFNKGISSALESLKERGDVSPLVAEELQTTVESIKTKIERQKRLDREIEQLARGCKNYENFLKTPGVGPFTAAMLCVLLCDPAIFANGRQLAAYIGLAPRSRGSGGKNFIIGIPSKFNCDSESRAVFVECAQALARYKNKSPWVDGILRRKPKKVAVIAIANKLARQVWAMANKGESFKQMTILTA

SEQ ID NO: 229756 - protein, 349 aa, unidentified
MEIVIGVDPHKATNVVAAIDEQGELVGQETFPANRKGLRTLQRWAKRFPKRRWAVEGAGGIGRPLAQKLLAAGESVVDVPPKLSSRVRVLSSGNARKNDALDATFTALAALQNDRLSSVQPEDGPEGHTEILRLLSERREDLVCERTRALNRLHVLLRDLLSDPLRKQLSTDGAAKLLRRARPRHPAGRVRRRLAAEVVGDLRTLDRRIAELDKRIEVEVEASGTTLTEIFGVGPILAAKIVGIVGDVSRFPSKAHFASYAGVAPIEASSGEVVRHRLSLAGNRRLNQVMHMIAVCQARSDPRGGAYHRKKLAEGKSRREAMRCLKRRISDAVYGTLVADSGRVSLASA

SEQ ID NO: 229757 - protein, 354 aa, unidentified
MIIIGADYHPGFQQIAFVDTDTGEFQERRLQHREEVEKFYRDLAAQGMRVRVGMEASGHARWFERLLSELHFELWMGDAAEIRTKRVRKQKTDRQDAQLILRLLLEDRFRQIWVPSWENRDLRQLLWHRHRMVQARTRIMNQLQAVALNEGLRCKKGLWREAGRKQLESFPLAPWASRRRRDLLELLDRLNPTIAELTQAIEQEVEKCAEAQRLMTHPGVGPLTALAFVLIIGRTERFQCGKQIASYLGLVPLEESSGERRRLGHITKQGNSLLRFLLVEAAQVTVRSDPEWRSKYFHLAMRRGRKIAKVAMARRLAVRLYWMWRKRWDYEQLKKFGSHAGQPGHRHGVQSITE

SEQ ID NO: 229758 - protein, 317 aa, unidentified
MTQASRFVGIDISSRRLDVASYPDGAVREVAYSEAGLTELLAWLHEAAPIEAVACEATGGLERRLVGRLVQAGLPTRTVNAQRVRALARAGNLAKTDRLDAAMIARFAAIFSGPLVTLDATRTALAELLRLRELQVGQLTALGNAVRRLVEPAARQLMAQQLAHLRAGRAALEAAIAERIAADPTLRRRQEVLCSMPGIGAVTSAALLAWLPELGVAGDRQIAALVGVAPYADDSGTRHGQRHIRGGRQGLRNVLYMAALVAVRHNPVLAAWAQRLRASGKAAKVVLVAVMHKMLRILGAMLRQDRMWAPGSAAAAA

SEQ ID NO: 229759 - protein, 402 aa, unidentified
MNAVGIDVSKGKSMVAIMRPFGEIVSAPFEIKHTASDINSLVELINSVEGESRIVMEHTGRYYEVLAHQLSEANLFVSAINPKLIKDFDNDSLRKVKSDKADAVKIARYALDKWQNLKQYSVMDELRNQLKTMNRQFSFYMKHKTAMKNNLIGILDQTYPGVNTYFDSLARSDGSQKWVDFASTYWHVDCVRKMSLNAFIDHYQNWCKRKKYNFSQSKAEEIYGKAKELVPVLPKDNITKLIIKQAVNQLNIASATVESLRTLMNETASQLPEYPVVMAMKGVGTSLGPQLMAEIGDVSRFTHKGAITAFAGVDPGVNESGSYEQKNVPTSKRGSSNLRKTLFQVMDALIKTHPQDDPVYQFIDKKRAQGKPYYVYMTAGANKFLRIYYGRVKEYLSSLPES

SEQ ID NO: 229760 - protein, 364 aa, unidentified
MLIIGCDYHPGFQQIACVDTDGGELSERRLAHREQAEQFYRELKQQNLSARVGMESSGHSRWFERLLNELGFELWIGDPAQIRSKRVRKQKTDRQDAQLILQLMLENRFPRIWVPDAENRDMRQLLWHRHRLVQMRTRVMNQLHVVPLNEGLRRKKALWRPAGRKELESIALAPWASRRRQDLLDLLDQLTPKIQELTRALEEEVEKRPVTRLLMTHPGVGPLTALAYELVIGTPERFHCGKQLASYIGLVPTEESSGDRRRQGHISKQGNVLLRFLLVEAAQVTVRSQQEWRNKFFHLAMRRGRKIAKVAMARKLAVHLYWMWRQGCDYGQTQKFGSHAGEPGHPDGEQSSTDVMIGHPAPSK

SEQ ID NO: 229761 - protein, 362 aa, unidentified
MQNKALDHSTAHSAPHTPAIAWLGLDAHAQNCVLAQLDDDGTQRRFWRLPTQADKLVAQVQAIAASDKRLALEESNLARWLWQLLRPHVTQLVVCDARHNKLISSHPNKKDERDAFNLARLFRLNELKPVWQVPTDGRALFKSAAQSYEEAVLRQTQLKQQIKSTFQHWGLFPTGTRLYSERGRGAWMKKLPHADLRAQVELLYVSMEQAVQTQRDTRQLMVRLGKPFPEVKLLSTAPGLGVVGAHVFAAYICDPARFDSASGLIRYCRLGIRDRSSDDKPLGYEQLDRTGHGVLKAISYRAWLQAMKRQRGAVHQFFQWSKQNTGSATHARLNTQRKLLRAWWTLWREGKEWDDAKFFSPR

SEQ ID NO: 229762 - protein, 352 aa, unidentified
MSQTLKAMIAVVGIDIGKNSFHVVGLDQRGAIVLRQKWSRGQVEARFANMPPCLIGMEACVGAHHLSRRLKALGHDARLMPARYVRPYSKGQKNDFRDAEAIAEAVQRPTMKFVATKTADQLDLQALHRVRERLVSQRTGIINQIRAFLLERGVAVRQGLRFLRAELPRILATPPDVLSPRMVRVIEGLAGDWRRLDERVESLSSEIEAVARQDTGCERLMSVPGIGPIISSAMVAAIGTGDVFSKGRDFAAWLGLVPRQISTGDRTILGKISKRGNRYLRVLFVQAAWVVLIKPKTWERHGLKPWIEAARKRLHRNVLALANKLARIAWSVLARGCDFEVRKVDEAAAQPA

SEQ ID NO: 229763 - protein, 333 aa, unidentified
MQDLSSKQHFIGCDVSKNTLDIALYQRKTDYRNFEHIRVSNDVTGYATFLKWLRSKKIMISEAVVGMEHTGFYSVAFSEWLFKKKITFCLLHPIDVKNACARGRNKTDMVDSQFIADYLYTMREKLSPSDPEPKVIKTLRELRNERALAVKMRTAYINQMKTGSDSTTIKRMKKMIEMITKQIHQIEAEIKSVIQSDESINTNFKLLMSIHGIGLVNAITVIVATGNFTRFKTARQYAKFCSVSPLSNQSGTSVRGGNHVSKAGHNELKSVLSEAARSAIMYDSQLADYYARKRAEGKTHGCVMNAVKFKLVCRMFAVISRQAPYVDIEKYKS

SEQ ID NO: 229764 - protein, 482 aa, unidentified
MKKRNIYQNQSQELLHLFEGAGSSEKVMCVPMDYAKKDHLVMFCNGHGDILRKPFSVKNTPEGIAYIADQVTRSCRRRGIQKKHVFFGGEDANSFAKNFVSTLRSKGFLVANVNAHDAKKQRGNVQASTDRIDLMGIATMLLNCRANCGPAQSGIYRNLRTLVRHRRKLVQMLTEVKNRVHGIVDELFPGFLNEKNSGIIPFTQSSLYLMEDRFSPKQIRRRRRQKLIEILKRFGTSKAEKTAAKLQQYAAKVLHAPVEYVDTMQLSLAQHVKHIRCLKESVAQMDKEIALNLAQTQGAFLTSVRGIGLVLAAGVTAEIGDLNEQKPLNNLASYSGIIPRVKQTGGSDGKTYTGPVAKRCNRILKDYVVKSAYHLGLHGPQDLMTDYKRRDASGQHANFGMGRRYLRMAINLMRTSQVYLPPNLRKDDYTLEERAGYYLMSWPYLKEKWKKVGALEAAFAKDRPLGLWRQIVQELYDIKLKL

SEQ ID NO: 229765 - protein, 402 aa, unidentified
MIYAGIDIAKNEHVVGATDERGRDAAKPMPFANSTEGFGRCVAYLEGLAESKGDLLVGMEATGHYWLPLFCRLQDEGYAVAVVNPIRTDAMRRFKGSSRVKTDMIDCVLVAETLRCGDFEPSKLGDEAMIELRQLTRLHQELKESVADLKRQVVVALDQVFPEYGSIFSDTFGESSKAFLKRCPTPEECLGVRADSLAKTLERASRGNLGRDKADEIKGIARTSCGISVAASVFSFQIKLLIEQIDSIEGQIAEVGARVRSGIEAVEPLILTIPGIGHVLGARIVSEIGDIRRFRSAPAVVKYAGINPSVSQSGKFSSNENHITKQGSPYLRRALYLAAMAQLKLKTPFYDYYAEKRSEGKAHREALIAVSRKLVHVIYAVLSRQEPYDPEVARNPLASRSE

SEQ ID NO: 229766 - protein, 350 aa, unidentified
MTIVGCDYHPGFQQIAYIDSETGELQERRLQHPEEAEKFYRDLGSRGTQVRVGMEASGHAHWFERLLAELNFELWIGDATKIRAKRVRKQKTDRQDAQHILRLLLKDDFPLLWVPSWENRDLRQLLWHRHRMVQTRTRIMNQLQAMALNEGLRCKKRLWRESGREQLQSLRLARWGSRRRQDLLEVLDRINPTIAELTQAIEQEAEKCPEAQRLKTHPGVGSLTALAFVLIIGEASRFDCGKQIASYLGLVPAEDSSGERRRLGHISKQGNSLLRFLLVEAAQVTVRNDARWRNQFFHLAMRRGRKIAKVAMARRLAVRLYWMWRRGWDYEQLEQFGSHAGQPGTGHGVQ

SEQ ID NO: 229767 - protein, 343 aa, unidentified
MQIRSVGIDLGKTTFHLVALGDNGKVLLKKKFTQKQLIAFTANMQTCLIGMEACSGSHFLGRALRAQGHDVKLIPAQFVKPFVKSNKNDFIDAEAIAEAVDRENMRFVPIKTDDQLDLQALHRVRDRLMTRRTALINQIRAFLLERGIVFAKSPIRLREALPEVLENVNENLTPRMRNLVAMLWSEWKDLELQIVQMNDEVERIASSDEACRRLRQIPGIGPLVATAIVASIGNGAAFRKGREFAAWLGLLPNQHSTGGKVRLYGISKRGNCYLRKILIHGARAVVLRSKRDRIAMGAWMTSLETRAPRNVLIVATAHKLARIAWAVLSTGQDYRAVPEALTV

SEQ ID NO: 229768 - protein, 406 aa, unidentified
MIFVGIDWSEAHHDACVLDEQGTVLAKGRVSDDVSGVGRLHAMLADHAEDPAEVVVGIETDRGLLVASLVEAGYHVYAINPLAASRYRDRHAVSRAKSDPGDAKVLADLVRTDRRNHREVAGDSELAAAVKVLARAHQNLIWSRQRQVNALRNTLREFYPGALRAFTTAQLATTEACSVLAMAPTPTWAREKLTLARVRRSLAASGRKRNLDRRAEQILNALQAPELSAPRLVEQAYGDVVGSLVVVIDGLTHQIAKLEADLAERFEGLPDAEIITSLPGLSFVLGARVLAEFGDHPTRYDDARARRRYAGTAPITRASGTRRVVLARVARNRRLSDACYLWAFSSISASAGARRYYDAHRARGKTHHQALRALANRWVGILHGCVAGRELYREEVAWVAPVLEAA

SEQ ID NO: 229769 - protein, 352 aa, unidentified
MKYALEQESILGVDTHLDVHVAAVINQSGQLLGTQSVSTNTAGYLQLFQWASAFGALKRAGVEGTGTYGAGLCRFLCDKGIMVLEVNRPNRASRRLNGKSDSLDAENAARSVLSGVSKAIPKQQSGACEAMRIVSVARRSAVKAKTQSINQLRAMLVSAPQSVREELWKAKASDCAKACAMIASLGDTVVLKALSKTLKSLAKRWLALSEELKDYDQQLETLTQEHAQQLRSRFGVGPQTAAILLTVAGDNPNRLKNEAALASLCGVNPLPASSGKTTRHRLNRGGSRTANNALWTIAMVRMRSDPRTKIYVERRTHEGLSTKEIHRCLKRYIVRELFPLIMGDLGALAGVP

SEQ ID NO: 229770 - protein, 392 aa, unidentified
MVISVGIDVSKDKHDCFIVSSEGEVLADVFTIPNNMDGFHRLLQRIQTCATPQDKIKVGLEATGHYSYNLLGFLLDNGLPTYVLNPLRTNLYRKSLSLRKTKTDRVDARTIASMLLSDAGLKPYTDTAYHNEELKSLTRYRFDKVKDRAKLKSSISRLVCILFPELEKLVPSLHIASVYALLAEFPGAKQIAAAHLTRLKALLETASKGHYKRDMALEIRDAARNSIGSWMPAKSLELQHTIRLIRELDDEIVEIEEQIQAIMDELHSPITTIPGLGFRMAAMIFAEVGDFTRFDSPDKLLAYAGMSPSTYQSGQLKNCYPHMEKRGSRYLRYALYNATKYVCHWDPTFAAYLAKKRAEGKHYNVALSHAAKKLVRLIFAMEKSRRPYCLAA

SEQ ID NO: 229771 - protein, 367 aa, unidentified
MSAGRPLQVEMKGTKVMIVLGADMHKSSHTIAAVGATSGELLGDKSIAVGDRGFAAALDWARGLEDERVWALEDCRHVSGAFERFLVVHGERVVRVATRLMAGERRGGRDRGKSDLIDAMAVARAALREGVDRLPVAELAGVELDIRLLVDHCERLVRMRTALYNDLLWHLHDLWPEQTFPGCALLSKKWTTRIARRLGRAEQTARVRIARDELRHLRELSMTVDALEAEIADLVAEVAPQLLAEPGFGPLTAGKLIGEIAGAQRFSSDAKLARAGGIAPIPVSSGKTNRHRLDRGGNRQINTAIHRVAITRARCHPETKAYIERKRAEGKTNRDAIRCLKRHLARRTWHLLQPPPPDLTTPPTSIS

SEQ ID NO: 229772 - protein, 370 aa, unidentified
MSSITYIGLDVHTTNYTICSYNGYDGNYFGEVTVKPEYQQIEKYVRRLQKQYEPGHRFLCGYEAGYLGYSLFHELASVGIECVILAPSTMCDTKTNRQIKTDPRDARNIANCLAYGLYSAVHVPTEQDDAVKEYMRMRDSAAAEFKAIKQQILAFCVRHGKRFEGKSTWTQKHLDWLDKLDFGNPILQNAFWEYLRRYYHAQEMQDIYDTQIAEYAQMEEYRQKVSELRCLIGIETHTALALITEVSDFRRFGKADQFAAYLGLIPGEHSSAEKTNRLGITKTGNKHLRRLLVEAAQHYGRGAVGRKSVSLKKKQEGNRREVIEYADRCNTRLRRKFYRIASHSPRNVAKTAAARELACFVWGIMTEHIT

SEQ ID NO: 229773 - protein, 347 aa, unidentified
MERVTRIGMDTSKHLFQLHGVDSAEQPVLRKKLRRKEMIEFFKKLPATVIAIEACGSSHYWARLLGSFGHEVKLIAPQHAKPYVKRGKNDAADAEALCEAMSRPTMRFVPEKTAEQQAALMLVGMRDRLVRNKTQLANAIRGYAAEFGLTAAKGMCKIKPLLERIAVDETVPVLARELFASHADEYARVEKELEEVGTKLMVWHRNNECSRRLARIPGVGPIGAALLVMKAPSPELFTSGRRFAAWIGLTPKDHSTAGKVRLGVITRAGDEALRSTLVVGATSLLQHVRAGRGNNASPWLLELLKRKPPKLVAVALANKIARIAWKMMITGEIYKGNAARPGLACAA

SEQ ID NO: 229774 - protein, 349 aa, unidentified
MKILALDLGKYKTVGCAYEGENGRHRFKATCTTPAGLERLVKEVQPERVVIEVCNIAGWVCDLLRGQGIAVQVANTSDDAWRWRKVKRKNDRCDALKAAQLSAVNQLREVHIPRIEVRQWRALIAFRQQLVQRRSRIKNHIRDLLLTEGQILPRGASCWTQLGVARLEGLAKPFSEVGVHELWRGQLDIELRQLRAVQQEIAAAEAQLDAIAGADARVALLRTIPGVGPRLSEAIVALLDQPARFHNAREVSAYVGMVPKELDSGETQRRGRITKHGSRLVRSLLVEVAWAGMRYNPWVRQTYQRISGDKKSRKKIAIVAVGRRLLVRCWAMLRDGTRWRPPAIQAARQ

SEQ ID NO: 229775 - protein, 373 aa, unidentified
MSVAVGIDIGSESHAVAVCREGAQEAERKGLKITANRGGFDDLDAWLRRQPEPVARVVMESSGHYWFNLASHLRRQGYPVAVVNPLEAKYFGKRRLQRSKSDPADARTLATFAMVDQPPTREPLVGAELREASRFAMRLVREQGQVCQRILRLVDIGFPELAEVWDDPTCMSALAVLRRAPTARTVARMRVETLAQLRRPGSGARAIGPAKAAELKRRATTSVAAPELEVQVGFEMRLLIGQYDLLEQQIEAADRRVAALLDGEVAQRLLSIPGVGPSIAGTLMAEIGDIWRFTDVDQLLAYAGVHPQERSSGKKGANPETSWVMAKTGNAFLREAAYRMAIVGIQHNPVIRAHYARKRAAGKSRMNAVGHCM

SEQ ID NO: 229776 - protein, 269 aa, unidentified
MEQYVALDVSLKEISVCIVDSNGDVVFEGKTAAEPAILVELIRSKAPQVKRVGLETGATSPWLFHALAAAGLPVVCMDARHAHAALSMRPTKSDRSDARGLADMLRMGWYREVHAKSVTSHERRTILGARHQLVTMRSELDAQIRGILKTFGLILGTGNKDTLIQRAEKLAAGHPVLSSLVTKLAEVRRHVTSQIAAIDRDIRHLVHTEPTLKRFMSVPGVGPITALAFLSSVDEPSRFKHARDVGPYLGLTPTRHQSGETDRQGRISK

SEQ ID NO: 229777 - protein, 376 aa, unidentified
MEGALMMNVTTFAGLDVHARSIKAVALDVVTGEVRSATFGYDACAVAEWIRSIDPGARCVYESGVTGFDLQKKLSSLGVDCVIGAVSKMIKPAADRRRKNDRNDAEFLARMLSVGNIVEVWVPDDECEAARDLARALDDAREDLRRQKQRLSKFLLRHGLVFDERTPSGQRKGNWTGAYWSWISSISFAEKADNDAFAFYVDAVRQAEEDKRRLEKLVADEASRPRWKKRVDSLRCLKGIDVMTAADIVFEAGEFARFRNARSFAAWLGLTPSEHSSGEKVAQGGITKAGNKHLRRVMVEAAWHYLNASPHSKGPAPGQAPDPAARRHASKGVRRLVGRRAALLERGVHKNKANVATARELACWCWAVGSMAEGAR

SEQ ID NO: 229778 - protein, 408 aa, unidentified
MELLYEKCAGLDVHKDSVFSGVRIVEDGNVTEHTRSFLTTTKGLLELSEFLASHGVTHVVMEATGVYWRPVWHILEESFELILANAAHVKNVPGRKSDVMDCQWLARLLAHGLIRGSFVPPQPIEELRQLTRTRKQLIREIGRHSLRIQKALEDMNIKLGSVVTDVLGVTGRAILHKLANGVTDPETLADEARRSLKKKRGALIEALRGHVTDHHRFILKLHLDTIEMLERQVDEIDKRLGGALEPFRGAVEQLTTIPGVGELMAQILVAEIGTDMSRFPTAAHLVSWAGLCPRSDESAGKKRSTRIRRASPWLRTSLVQAAWGAARSKGTYLQAQYFRIKARRGTKKAAVAVAASIVTAAWHMLSNGTFYNDLGPSYFVSRDRDKAAKKLTKRLEDLGYEVSIREAA

SEQ ID NO: 229779 - protein, 318 aa, unidentified
MNTKMNQSINVGVDTGKFQLDIYIRPLDIYFTVTNDDKGINEAIKEIKKHKPERIVIEATGRLEMPFIIACAKANLPFVIANPVHIKRFAGAIGQRAKTDKLDAQLIAHYGEAIKPKLSTLKPDIMQSMSDLVARRNQLLVMQTMEKNRMQILPQHLAMTIKPVLTVFKNQIEKIENKIVSLIESCPDYQAKNIILQSMKGIGKIASASIISNLPELGYISSKQASALVGVAPMNRESGRYKGHRKIQGGRHQVRTVLYMAMMSAIQSNPVFKETYQRLVAAGKPKKVAIIACIRKMVVILNSMLRDGVMWEAPQAIN

SEQ ID NO: 229780 - protein, 347 aa, unidentified
METAYDGRQVVGMDLHRRRSVLVRMTEDGRRLGTARITNSPAELRAAIAEAGAAPRVVLEATYGWYWAADVLAAAGSEVHLAHPLGVKAFSYRRVKNDERDAADLADLLRMGRLPEAWIAPREIRELRELTRYRHKLVGLRTSCKEQVHAVLAKLGIPVTASDIFGAGGELWLDGLALPQPYKGKVASLRMLAGELNREIALLDTVIASLLERHDGYHAIQALPGIGPVLGAVIVAEIGDVRRFATAGRLCSWAGLTPRHRESDVKVARGHITKQGSPILRWAMVEAIQRLPADTPIRARRDAIIARRGKEARNIAKTAAARQLLACVFYALRDGHVRSLDRQRQAA

SEQ ID NO: 229781 - protein, 339 aa, unidentified
MSKLLKNFIGIDISKLYFDTALIKADAPGSSQHKQFAQSESGFKKMIQWLKQQGVLVDSETLFCMEYTGLYNSGLVSFLTSQKAQLWVEMPLRIKKSTGFERGSNDKTSAVKIAGYAYRYQDKKQLWRPLDSAIERIKNLIAQRDRIITAIMQLTVPVKELCQCGCVQEAKELEKLQRKPLKALQKSKEDIERLIVKMVKQDEQIDKRTQQVQSIKGIGPVTAVAILAYTKGFTSFENAKQLACYSGVVPFSKTSGSSIRYKPSVSQHANKKLKKLLHLCALSAIKNDKEIRAYFERKVGEGKNKMCVINAVRNKLIHRIFAVLRDDRFFEENYVRKCA

SEQ ID NO: 229782 - protein, 347 aa, unidentified
MNYIGVDCHISSLDFAVVNERGTTTKKAKVNTGVKEFIGFVKSVPKPRRIFIEEGELAGWLLETSLKFGERLIITDPKINKWIGKAGQKNDTIDAEKLAQLARGKYIKAIYHSVDKRRRFKQLVFAYHDTVRNQTRIKNKIKASFRKNGIRCSGVTVYSDKYRDKWREQLSENKITRLIVEELWVQLDQLRVSKERLKRNIRIQSKRYPEIKQFMEMPGIGLVHAVTISAIIETPHRFANKKKLWMYAGVGLMERSSGEKVYSRKLTREYNRPLKNAIRQAVEAAIHAQDNQFRRQYLRLTLEKGIASHKAKLTVARSMLAALYGMWKKGEAYDPEIDIKRNCQYKK

SEQ ID NO: 229783 - protein, 453 aa, unidentified
MGRQSSAFDGDAGMPLVNLNAAGLDIGASEIWACVPAGRDAQTVRPFGTFTPDLHDLAEWLVGCSVDTVAMESTGVYWIPAYEILEARGLRVYLVNARHIKNVTGRKSDVQDCQWIQRLHSCGLLSASFRPESEICTLRAYLRHRASLIEHRAAHIQHMQKALQQMNLQLTQVLSDITGSSGMAILRAIVAGERNPLKLAELRDRRCAKSQAQIAKALTGNYRPEHVFALKQAVALYDAYNGQIRECDAEIERQFSVIKPTHDDDLPPLHSGDKMNTHSKNGPSYDARTLLYRMLGVDLVAVTGLNASTVQTVISEIGTDMTRWPSVKHFSSWLQLAPHNDISGGKVLRSRILKGHNRAGQALRLAAQSLARSPSALGAYFRHVRARSGAKQAVVATAHKLARIIYTMLKHRTPFHDIAADEYELRLHQRQIARLHKTAKSLGFILQPIQVSE

SEQ ID NO: 229784 - protein, 368 aa, unidentified
MSASIIAYERSTLVDREKYIGLDVHQATISVAVMDETGRVVMECILETKAATILEFFAGLRGTVSVTFEEGTCAAWLYDLLKPHVASLLVCNPRKHALLKVGNKSDRIDARKLAELLRGNQLRAVYHGETGVRMLRELCRSYLTIVKDLSRVMNRLKALYRSWAIPCAGRDVYYSRHRAEWLEKIREAGVRRRAEHLYQQLDMLQHMRQPARRELLAESRKHPVTAQLRQIPYLGPIRSALAVALIQTPHRFRSKRQLWAYSGLALETRISAEYEYDRGQLRRSKKIVSIRGLNKDHNHDLKGLFKGTATMASVRPGPFRDFYERALAKGMKPTMARLTLARKIAAITLTIWKKGEPFNADKLKLQAA

SEQ ID NO: 229785 - protein, 332 aa, unidentified
MFNCIGLDISKKLIAVHIPINKANIEIDNSLKGIKGLYSKLKKLYKKEFQDLVFIFEPTGNYSFILTKYCNERNIKCFLINPKQFSNFSKALGQRNKTDLIDAQVLSKAISLAKEDEIKVPFIDTIVEELKELISYYKFTTKSTSKLINQLEAVTIKDGNKYMINDLKKSLKLSKNKEIEILNKIKDIINSDENLLKGYNNIKSLYGIGEVGAIVLLHLFIKYPKANQRQIVSLSGLDPIEKTSGTSVYKKSKISKAGSRVYRGSLFMGVLTAIRYDDNFKVFFERLKAKGKHTTAAQIAVMRKMIIIAHSLYKNNKQYDAEFYKKSCGVQE

SEQ ID NO: 229786 - protein, 381 aa, unidentified
MTVYNTYFGIDSHLRTTTICALTVADGEVKARTFRGNPYAEMAEWMASFPQPSYGAYESGCTGFVPARMLTCGDVLVEPVASSKLPSSADSRSKKNDRRDAERLARLALAGELSPVWVPPEQVEGLRELAQAMDDLASAREAARQRVNAILCRHGVSWDERTPAGRPKKRWGRDFWAWLRSIELGDPGSQAAYLAALAAAESAETACDGLRARAGEVAAASELGPVVDALMCLKGVGFSTALAFAAEVGDFSRFASGRKVTAYFGLAPSESSSADSRRLGRISKNGCALVRRLLVECAWTAARGNPACRKKGGASVPPAVREHARACSARLVERRRSLVARGLMPCKANTATAAEMARMLLYIGRGAQEAAASPAGPAAAA

SEQ ID NO: 229787 - protein, 467 aa, unidentified
MEVPVIYPSCCGIDVHKKMLVACVIVVRGRDTSREVRTFGTTWPELCRLVQWLQEVDCAQVAMESTGVYWHPVFNALEAYFPVMIVNAQHLKNVPGRKTDIKDAQWIAQCLQLGLLRPSFIPDRPQRELRELTRGRKSLIEDQARTTNRIEKVLEGTNSKITSVISDIMGTSGRKMLGALVRGEQDLRKIAQMALGQLRKKEEQLIEALAGNFTEHHRFLLRQLLQQWEEQEAHIRAYDQEIDRRLGDPPEASRHEKSAEAAPEVDPPTSKAPSSQAKARKRSSDAKPLPVNPPKEPEPGYEGFASLVELLDGVTGINLRAAQVIVAECGIDMERFATDKHFASWLGVCPNNQVSAGKRLRAKSGKGNRHARAILVQAAQGVAKSKGTYLRALYERYKGRMGRKQAIMAIAHHLAIIIYHMIKKREAYREAGPERVDERFQEMRKRRALQQLANLGYDVSLQPAQSA

SEQ ID NO: 229788 - protein, 342 aa, unidentified
MRIVMLGIDLGKNLCSLAGLDETGAVVLRRRMKRASVLPFTAQLEICTVAMEACCGAHHLGRQLVAQGHVVRLMSPAYVQPYVKAQKNDERDAEAIAEAATRPTMRYVEIKSEAQLEVQSLHRVRGRLVAERTALINQLRALMLERGIAVPQGRCKLARYLPEILADERNGLGPRLRQLIEDIREEWRSIDQRIKGYDDELAEQVRNEDTAKRLISIPGIGVLTATALVAAVGNAQTFSCGRDLAAWLGLVPRQATTGGKPRLLHISKRGNGYLRMLLIHGARTALPGLAKKDTPLGRWVKALLARAHRNVVTAALTNKLARIAWTVLARDRRYVAVQTAAS

SEQ ID NO: 229789 - protein, 394 aa, unidentified
MPKLFVGIDVAKDTSSAQGIDSTGNGKFSLTFTMDSEGFMELWKTIAAHSKDLTEVMAAVESTACYHINLYSFLTAKGVSTVVINPLLIANFSKLSLRKTKTDKKDAMSIAQFLLVHRDTITQLSLSQDLQDFRDIARERESVGNMLTAHKVEIKRLLQSTFPELERIANLSSRVMLEFIAEFPSARLVKMAKPKAIQKALQRKGVESRLTYTAEDLIQAAKQSVATISPAKELILQGKVRTLQHLQQRHEQLTKILTEYCKASMLEDFEIVTSIDGISKGTATTFLAEIGCIGNYGSHKKLIAFAGIDPTVYQSGKFEGASRISKRGNRHLRRVIWLMTVNVIQHNTIFRTYFMRKRNEGQPFKKAIFATAHKLLRMIFAMLSQRTMFKEACA

SEQ ID NO: 229790 - protein, 341 aa, unidentified
MGTDIIIGVDLAKSVFQVHGANRTGAVLFRKKLSRPQFLKFMTSQPACLVAMEACSTSYYWARTLSDAGHDVRLIPPIYVKPFVKRHKNDAADAEAIVEAALRPNMSFVEHKSAEKQALSMLMRTRDQLIDHRTATVNALRGHMAEFGLVVPVGIKNIERLQGLVDADNTLPVLATEMATIHFEQIVELTRQIDILTEKIKVYGTSSPKLKRLRTMPGIGPIGAMIIETFAPDMATFKTGRDFAAWLGLIPLQNSTGGKSRLGKITKMGQKDIRRALVIGAMSRIAGYARQKTRAEPWLQDKLDRKPKMVAAIALANKMVRQIWAMITKGETYKPQEVVAT

SEQ ID NO: 229791 - protein, 432 aa, unidentified
MPHIATRMGLPRFNASANAPEKEFDMITVGIDIGKESHAVAAVTATGEILMQPRIFAQTTEGFDGLLDQLKRLGKTGDIRIGMEATGRYWLPLRHALAGKGYRVESVNPLITSAEISKDVRGRKTDKADALAIAAALLRNRHNPAPAEDAATDALKSLTRHRTFLVRQKSNVKRCVHAALDVTFPEATTAIGPLFSATALAVLEAFPSARLLSGANLKTLAAIVTKASRGRLTADYARSVRDAARKSVSAGIVNEGDEAALVSLVEQLRFSEGQIEKAEEKIRGMPAPRTADLLASVKGLGNLLPRVIASEIGDMERFRNPPSGKPPRDMDKRILAFAGCEPRLRESGKWKGRTKISKRGSPALRTALWQASAMCRLHNPLFARVYERQTARGKPHNVAIFYVARKLVEVLCGMYKTGMPFSLQTAGGAMCQ

SEQ ID NO: 229792 - protein, 342 aa, unidentified
MNVIIGIDPHKASHHAVAVDDHEQELAQISVRATRTQTDRLLAWAAPFDRRTWAIEGAGGLGYLLSQQLVAVGETVVDVPATLAARTRVLGAGRSNKTDPNDARSVALTALRHGNLRAVSAVGHGEVLRLLAKRNTDIGDHRTRLVARMHALLVELVPGGIAKEINASDVDAFLERLSPATPVEQVRYDLAVELLDDIRRLDAQLKASHQRIRVEVAASGTTLTDLFGIGPVIAAMLIGYTGDIDRFANRDRYAAYNGTAPVEFSSGGRTVHRASQRGNRQLNHALHMAAICQLRHPGSAGRVYVDRKLAEGKTKREAIRALKRHLSNAVYRQLVIDARRTC

SEQ ID NO: 229793 - protein, 400 aa, unidentified
MSGLRGSFDGFVGIDVSKDKFDVCGITGDETKLFQFSATMDRKGFEKLKGHLAAVSISSVLIGMESTASYHVNLFSYLVSEGYRVLLINPLLISNYVKMQLRKTKTDKKDAVVIAQFLLANGDTLVQRATPSLISDLRDLARQRESLVDEMTSLKIKIKQLLNITFPELEHMAGIFTKSILKLLQQYPSAFTLRDADLGQLSQMLIADSYGHKREAFAAGLIKAAHSSIGSKSPAKDMILKQKIALLLHLEDALQEITGMLIEMSRKLMNEEINLMTSLKGIGEKAAANFLIEMGGDINQYECSGKIIAMAGLDPAVYQSGKHEGKGRITKRGNRHLRRIIWLMTTKVIQYTDIFNVYYLKRRKEGLPYKMAVLATAHKLIRVIYAMLTQRTTFCPQVNS

SEQ ID NO: 229794 - protein, 373 aa, unidentified
MENSITYVAMDTHKKEHTVAFHDPGQAEIMTLTVKNTPREIAKMVRGIVKKTPGEVRFCYEAGVCGFDLKRRIEALGCRCAVIAPSLTPAKPGERIKTDRRDAVKLLALFKAGLLTEIHAPQPQQEAARELTRLRQTAQENLVRIHHQLLKFLTRHGYIYTEGQHWTAKHFRWLRSLEFEEPLLREVFDDYVAELQHGMRRLASLNKRLEQLAQTEPYKALVGLLRCFHGIETLSAIVLLTELFDFGRFSSPRALMSYLGLTPSESSSGDKRNKGPITKTGNKRVRRLLIEIAWHYRHPQAIGKALRQRRMHQPPWVINVADHAAHRLGKRYRYLIHRGKMPCKATTAVARELVGFIWSVFRECQVRSTPKVA

SEQ ID NO: 229795 - protein, 357 aa, unidentified
MYSIGVDFHKAYSHMTVMDAQGQVVKVGKVSNTFEAVHAFVAPYRDDAQAVLEATRNWTVMYDMLERELRAVYLAHPLKVRAIAEARIKTDRIDSKILAHLLRCDLLPTAYVRPREQRVSQQILRQRMFMVRVRTMVKNRIHVLIDRQLDVREVAMQFSDLFGGAGLAWLRTVGLADIERRLLNAELALFEAVQERIAESDSLVRNLAAGDPRVRWVRTIPGFGRFFAVLVVHEIGTIRRFSTPEKLSAYAGLVPSVHASGGKVFHGRLTKQGNKWLRWAVVEAVRPAVTTDPDLRRYYERLRQRKGPNPAKVATARRLLLLAHRVLSQERPYRKPESVTMRPRPRTALMNPLPAAG

SEQ ID NO: 229796 - protein, 427 aa, unidentified
MSYRIAGIDVHKRMIVVVVADVDVAGDYEFERRQYGSSPAQLRLLAAWLVEQGVEEVVMESTAQYWKPVWASLERYWKPICEKREGAGPMSGSLHLAQAQSNRGARGRKNDFADAERLVRRLVAEELTLSFVPDAEQRLWRTVMRTRYQLRCNQVQLQNRLEALLEEAHLKLSSLVSDLLGLSGRRMLQAMAEGETDPAVVAARADNRLRATPEQLCDALGACRELHPVYRRLLKAALEEWERIEAQIAQLGQEMASLIGPQQEQVQRLAEVPGLGVDSGQQILAEVGASAATFPSGRALASWVGACPGEEETAGVNRNRRSPKGNRHLRRILNQAAHAAVKLKGSIFALLYRRYVVRLGHNQTIAVIAHRLCRLIWKILHEGVRYDERGPAVSQRAQQRRTARMIRQLRSLGYSVELLHAAAGVPA

SEQ ID NO: 229797 - protein, 352 aa, unidentified
MAATAQSAIAVIGIDIGKNSFHVVGLDGRGAIVLRQKWSRGQVETRFANMSACLVGMEACVGAHHLSRKLKALGHDARLMPARYVRPYSKGQKNDFRDAEAIAEAVQRPTMKFVVTKTADQLDLQALHRVRERLVSQRTGIINQIRAFLLERGIAVRQGQRFLRVELPRILATPPDVLSPRMVRVIEGLASDWHRLDERIEVLSSEIEELAKRDAGCERLMSIPGIGPIISSAMVAAIGTGDSFSKGRDFAAWLGLVPRQISTGDRTILGKISKRGNRYLRVLFVQAAWVVLVKVKPTRWEGHGLRPWIEAAKKRLHHNVLAIALANKLARIAWSVLAHGRAFETNKLQAAA

SEQ ID NO: 229798 - protein, 387 aa, unidentified
MERSKPRVVGLDVHPDSFAGAILEGNDPWSAQVVRTSTRVALTELEAWAGRQTEPGDVLILEASGNAFAVAERLRAIKRKAVILDSHRAGKVGQAYCATDRVDAIKIARIYLSALSPVVWQPDPQTRERREVFSAYQGVVKETVRLKQQLKSMLNEHCVRLEKGFRLSHPTALGRLRKRREWSQAQAMLLGQLHAGLVGACQRRQQLRHYMAQEILAETELLRLTRLCGISLITLYGLISSIGQITRFANAGKLSAYFGLNPSVCQSGNYEGATALKRHGRGAMRALLVQSAKKLLQVENPLRKWGLAVAARRGRNKAAVAVARKLCVAVWHVLQGHSIGALERLDTLHTKLHRFATELGVPTIKAMGYETKEAFVQKKLYLLKSYL

SEQ ID NO: 229799 - protein, 317 aa, unidentified
MTLVGIDVSKLVLDVAVVSEAGEIQHRRFENCTTGHAELSAFLAGFEGCRIALEATGTYHRQLVQALEATQQHVSVVNPAQVSFFVKSQNRRNKTDKADALMLAMYARERQPAAGAPLNAALQSLAREVNAVQRDINRLKNRLEAARHGLAHGQVIASLERRLKALEDERAVLERELERETKASNSAELALLTSIPGVGTKSACYFIAEVGDIRRFSSASKLVAYAGLSPMQFQSGSSVNKKSRLSRLGSSELRRLAYMPGLVGIRHNPILKEFYQRLVAHGKGKKSALLACVAKLLRIMYGVLIHRQPFNPNYLRP

SEQ ID NO: 229800 - protein, 356 aa, unidentified
MKRQCIGVDIANKDFKVSLANKGADDSLSCTTSQRFANTKSGFNQLVRWATSEMDKDVPVAFLMEATGVYHEELAHHLHRIGKQVHVVLPNKFKHFAASLNVKSKTDAMDAKLLARFGVEREHRLWSPAESTMRQMRHLSRYRVQLQEQRTAISNILHSKDHSHAVPADITKSTKKIIAVLDKEIEKLSKEIENVAKSDPEIASKVNKLCTIPGCAITTVASIVAETNGFKEFDSAKQLTSYAGYDIVHNESGTSVLSKTRMSKKGNRYIRHAMYMPAMCASMHVAEFKALKERIKDRTKIPMKAQVAIQRKLLILMYTLWKNDSEYEKDHHPKKIARTEAQATQNSALEQLPLEV

SEQ ID NO: 229801 - protein, 424 aa, unidentified
MKYSQNEKIAQVTEKTLIVGVDVASMTHFARAFDFRGIELGKIIRISNDVQGFRLFKLWVNELKGKYNRDTVMVGMEPTGHYWFNFAQFLKDSGIRIVLVNPFHVKRSKELDDNNPTKNDRKDPKTIAMLVKDGRYQVPYVPEGLYSELRTAMETRWHIVQGLNAIGNRVKRWLSIYFPEFSKVFSAWEGKGALIVLKEFPTPEKVLQKGVDGIAARWRKDKLRPLGLKRAMRLVEAAKNSVGVREGLRAAETSLRMLLAEYEMKKQQLEEIMVLVEELIYQIPGIKEVLKIKGIGLVTAAGLMAEVGDLSRFDHPKQIQKLAGLNIRENSSGKHKGKTTISKRGRRRLRALLFQGIMPVVAKNPEFRRLHQYYTTRAQNPLKKKQSLILLCCKLIRIIFALMKKQVAYDPQKMMNDIQRPVAA

SEQ ID NO: 229802 - protein, 482 aa, unidentified
MKKHNIYQNQSQQLLGLFEQAANNAKVMCVPIDYAKKDHVVMFCNGYGDILRKPFSVKNSPEGVDYLTDQVMRSCRQRAISEKHVFFGGEQVGSFADNFVSTLRNQGWLVAGVNAHEAKIQRENLQASTDRLDLLGIAKSLLNRRADCSPAQSGIYLNMRTVVRHRRKLVGITTEVRNRIHTVVDRLFPGFLNESKSGITPFSKSSLWLMKERFSASQIRRRRRSTLIEALRRLGTKKPEETADMLQQYASQVLKPPQDYVHMLQLSLAQHVKHFCCLQESIGQLETEIALNLAQTQGAFLTSVRGIGIVLAAGVSAEIGNPFEQKPLNNLVSYCGIIPRIKQTGGPQGNTKTGKVAKRCNRILKDYVVKSASHLGLHGPADLKSDYQRRDAAGQHADFGMARRYLRMAMCLMRTSQIYLPNRLRKSDSQIQDRADYYVMSWPLLRDKWQKSGALETAFNADQPLGQWRKIVQQFYGIKLTL

SEQ ID NO: 229803 - protein, 343 aa, unidentified
MQVITTIGLDIAKSVFQVHGVDAGGQVVMRRQLKRRYVLTFFQKLPPCLVGIEACASSHHWSRELQTLGHKVRLMPPAYVKPYVKRQKNDATDAEAICEAVSRPNMRFVETKTPEQQSCLVLHRTRHLFIRQQTAVINAIRAHLAEFGIIAPVGRNGVEQLLGVVADASDKRLPEVARACVAALGAQLQMLKAQILEFDRMIRAWHRSSEASRRLDDCPGIGPALATALVATVADPKVFRSGRNFSAWIGLVPKQHSSGGKDRLGSISKQGDRYLRGLFVAGALAVIRYAKIHGTKHRPWLTALLARRPTKVAAIALANKIARMAWAMMAKDERYKEPVALAA

SEQ ID NO: 229804 - protein, 386 aa, unidentified
MSRSSNILLPAISYDHTLVLAIELSNKSWVLAAQVPGLPQTKAQRTIEPNKNALLAAIDGYRARAAAVGYTVDRVITTYEAGWSGFWLARWLMAQGVEVHVVQPSSVPVDRRMRRAKSDGIDAELLLRTLLAWLRGEPRVCSMVPVPDEADEDARRCVRERTELLSDRIGLTNRIGAVLATLGVSDYNPLLQSRRRRLAELRTGLGEPIPPNALAKIERLLTRLELVLAQIAELERERDEVAAADAPDRAGKMIQQLASLRGIGVQSATVLVREAFVRHFSNGKALGSYAGLTSTPYSSGGIDREQGIGKAGNRRLRTVMVELAWLWQRYQPGAAQVAWFRNRVGSTGRRIRKVMVVALARKLLIALWRFVIDGVMPEGAVMKPSI

SEQ ID NO: 229805 - protein, 408 aa, unidentified
MQVLYTRCAGLDVHKDTIVACVRCVSPPMHQEVRSFGTTTAQLLELADWLAEHDCTHVAMEATGVYWKPVWHVLEGEFELVLANAAHIRNVPGRKTDVNDAMWIADLLAHGLIRSSFVPPQAIQQLRDLTRTRKQLVREVSQHSLRIQKVLEDANLKLGSVLSDVLGKSGRAMLDAIVAGETDPARLAALAQGTARNKAAELREALRGRITEHHRTMLRLHLQVVDALQRTLAELDAAVGKALAPIRQRARLLTTMPGVSDLTASVVVAEIGVDMSRFPSAGHLISWAGLCPRSDESAGKRRSTRVRKSGTWIKTTLVTAAWAAVRVKTSYLRAQFLRIKARRGAKKAILAVAASMLTAAFHMLRDGTEYNDLGSEHFDRQDKSKTIRRLLKRLQDLGCDVPELAHAT

SEQ ID NO: 229806 - protein, 403 aa, unidentified
MERYAGIDLASEEHRLSIVDGEGGQLEQRRIGHDEQGIAALCRRLRALSVGRVALERPDGLVVERLLDAGLTVVAVHPNQLAAARDRYRVAGGKSDGFDSYVLAELCRTDMHRLRALEPDGDETKALRALTRTREDLVQARVALANQLRAQLEAFWPGARRVFSELDSPIALAFLERYPSPVDARGLGEKRLQGFLARQGYCGRKSAAELLARLRAAPEGRAGELELEARRAAVLGLVAALKPLVEQIKLLTSQIAGALRDHDDGAIFLSLFRDPKSVVTAAELLAEIGDCRNRYPSAEALAADAGMAPVAVESGKRKVACFRWACDKRLRNAVACLADSSRHRHPWAHSVYQSALARGHDHPHAIRVLGRAWLRVIWRIWQDQSPYDPARHGNLQRLLAAGG

SEQ ID NO: 229807 - protein, 341 aa, unidentified
MEKYVGLDVSMEETSVCVLDGSGNIVFEGKTSSQPDALSKLLRAKASDAARIVLETGSLASWLWHELRGRNFPVICLDARHVRAALSMRVNKTDRNDARGLAELARMGWYREANVKSTESRYTHSLLAARAKLVDLRRDVENQMRGLLKGLGLPPGKAGIKALLEKIVVIMREAPHLRMLFNPMMLAHSALVTQVEFYDVQILKLAKGDETTRRLMTVPGVGPATALAFRSTIDDPNRFKSSSDVGAYLGLTPRRYQSGELDRTGRISKRGDRLTRLYLFEAASVLLSVVKRWSVLKAWGVRLAKRVGIKKAKTAVARKLAVVLHCIWVDGTEFQWGKEKA

SEQ ID NO: 229808 - protein, 367 aa, unidentified
MKNLRFVGLDVHKDTVTMAVAEPGTSAPEVLAVVAHELGAIARQLRKVGKASELRCCYEAGPTGTKLCRALRAKGYDCIIVAPSMVPQRPGDRVKTDRRDAIKLARFLRSGDLTDVYVLDAETEALRDLVRARDQAKRAENVARLQVRSFLLRQGRVWSGPGAWHDRHIAWVRGQQFEHEAHNRVIVALVLNLENARERVKQLTEDLEQLAMASSQASLIKALQAMRGIQLVTAAIIATEIGNFDRFPSAPAFGAFVGLVPSESSSGSTRRQGAITHAGNTFVRRALVEAAWAYRHRPAVTKRVRMRQEGVHSDVKRIAWKAQLRLTSRYRSMSGRGKNKQLVITAVARELSGFVWAIARQQQSIAV

SEQ ID NO: 229809 - protein, 407 aa, unidentified
MPRDYIGVDWADTEHAVWVEDERGTQVAALTVPHTAEGLSEFGRWLYERQAQGIECWAAIERPEGRVVDFLLDHGVVVYPVNPKALDRARDRFRMSGTKSDPFDARVLAAFLRTDHPHLRPLRPSSELAQELKLLTRDAQRLIRQQTRLLNQLTATLKEYYPRPLEVLGELTTPLARAFLTAYPSPDALAALSRAQWRRFARTHRLSEARTMALWTALQPPQLPVPAHVVRAKARLVRVLVDELSATVRAVEEYRQAVDDFFATLPAAEWARSLPGGKSGTTVPTLWAELGDAPDRWQSFAHVQAQAGAVPVTARSGKSHHVRFRFACNTHLRAATHTLAFLSLRQSEWARGYYKQYRARGHRHHEALRALGAKWLKIIFVMWMHHTPYDEQYHLANMARQHLRQAA

SEQ ID NO: 229810 - protein, 338 aa, unidentified
MHHTVIGMDIAKQVFQLHRVDPQSQQAERIKLKRSAVLPYFAQHPPALVAMEGCGGAHYWARELRKLGHTVRLLPAQAVRPFVLRNKTDAADARAIWVAAQQPDIKTVAVKTEYQQSVLALHRVRSQLMKVRIMHTNAVRGLLMEFGQTLPEGYGALQKVVPTCLAHLDGQLPDMLLQTLRDQWARVQGLDREIAVIELRLKQVLSESAACKAIAEIPGIGLLSATAAVATMGDPGSFRSGREFAAWLGLVPRQTGTGGRIRQLGISKRGDGYLRTLLIHGARAVVARRQQSPWITALLARRPYGVVVAAVANKLARILWSVLATGRRYEPAALSAVA

SEQ ID NO: 229811 - protein, 433 aa, unidentified
MTTTHPHDLVIGLDRSDRKADLHFIDTRSGKQWSQTIDTQPESLHQWLADLRQQYPQAKVALCVEQPAVALLAFLEAYGWITLYAINPATLFNYRLSFVTSRAKDDTMDAYYLADLLLTHHHKLPVWTPEDSQTRALQLLVLHRRNVVDERTALTNCLQGLLKQYFPQALALCSEDLWRPLATDFLLKWPTLQKVQKARTSSLIQFYHLHGSRSQSLLDKRLDLIGKAVALTDEPALLETYSLRVELLCRQLQQVVRTIKKFDQQIAEAFAEHPDQSIYAHLPGAGPTFAPRLLAALGTNRDRFPKAKNLQCYSGVAPVTKQSGKKNHVHRRYLCTKFLRQTFHEYAKESILHSRWAAAFYLQQRIKGASHNIAVRALAYKWQRIIWKCWQDHQPYRDEQYEQVLKKRKSPIVSLFHEIQVGKSPWKNRENKT

SEQ ID NO: 229812 - protein, 351 aa, unidentified
MSIIGCDVHTRYQVVAWMEESTGEIKVRRLEHAGEEVRSFYAQWPQGTVVGIEATFPALWFERVLAELGHELWVGDAARIRASEVRQQKTDARDAELLLDLLRTGRFPRIWVPSVEERDLRQLLVHRMKQVRARTQVKNQLHALAISQGVCRKGKLWSVKGRKELEGLTLLPWAARRRKELLEWLDRLDDQVRELDRAVEEAGRERPEVALLRTHPGVGMVVGLAFVLTVGPVERFPNRRKLVSYLGLNPRENSSGGRQRLGSISKQGNTMMRWLLVEAAQTAARLDPQLRRAYQRLKSRRNSGVAKVAIARRLAIRLYWMLRTGHNYAQLVHMSGSPSSAVVPPQAGSKL

SEQ ID NO: 229813 - protein, 404 aa, unidentified
MIFVGIDWSERHHDVCVLDADGSQLTGVRVPEGIEGLAKLHGTVADHAEEPQEVIVGIETDRGLLVSALVVAGYQVFAINPLSVDRYRDRHRTSGAKSDPGDAKVLADIVRTDLHNHRPVAGDSELAEGVKLLARTHQSFIWERQRHANRLRSALREFYPQALEAFGTDLASTDAVAVLQLAPTPELGRLLSRSKIAAALRRAGRQRNVEARAAQIQAALRTEQLRVSGSLERTYGVIVSSLVGLIAGLNTQVARLEQDLHGAFEQHPDAGIILSQPGLGSTLGARVLGEFGDDPTRYVDARARRNYAGTSPITKASGTHRVVLARFARNERLYDACHLWAFASLTKSSGARRYYDALRERGKTHNQALRALANRLVGILHGCLTRREPYREDVAWPAPEAAAA

SEQ ID NO: 229814 - protein, 394 aa, unidentified
MFYLGVDIAKTNHVASLLDSEGNVVIKAIKFTNSKEGFNKLLSSLDSIITDYSKVLVSMEATGIYWLALFSAFIDKDFNISVFNPYQIKSYRGAYNNRKQKNDVIDSIIIADYLRVFGSNDTSLPKDDILSLRNLTRFRSNIVDDISGLKVKVINLLDRVFPEYNSLFSDVFGTTSKQILLTCPTPESILKINTIKLSNLLSKSSRGRKTKTDAKILKELAKNSFGIKLTANATSFEIKQIVNQIIFLEEQADEVQERILDIYSKLDSHLLSIPGIGRALAPIILAEIGDINNFATPSKLTAFAGIDPSENQSGNKNSSNETTSKRGSPYLRHAIYTAAFVAISNDQVLRDYYDKKKAEGKHHFIALAGVQRKLLHIIFYVLKEQRDYRKAEIK

SEQ ID NO: 229815 - protein, 384 aa, unidentified
MKKTQRTLRAKNSTKVHVLQLAFELSLNKWKLAFGHNGKMRMVSIDARDLDQIQQAIEKAKKRFKLDGEVKILSCYEAGRDGFWLHRYLLSCGINNLVVDSSSIEVNRRKRRAKTDRIDAKKLLAMLIRYHGGERGMWSVVNVPGMEAEEGRHLHRELDVLKKERKMHRSRIKSLLFQHGIVVKNPSSRRFLIELETFRNWEGKTLPLDFKARLIREHARLRMVEEQIYGLKKEQEQRLERCDSSSLKKVAQLMELRGIGVASSWKFVMEFFGWREFKNDKQIGALAGLTPTPYDSGGYQREQGIGKDGNKRVRTLAVEMAWVWIRFQPQSKLAQWYRQRFEGGGSRTRRIGIVAVARRLLIDLWRFLEFGVIPEGASLKPMVR

SEQ ID NO: 229816 - protein, 351 aa, unidentified
MTLVADLTRHAIGVDTHRDFHVAAIITSPTGAVTAETRITADSAGYQQLLDHANSHTTTGERVWAIEGCGSYGAGLTTFLLDHQEWVVEVERPARPKRLSAAKTDERDAIRAGRETLGCDIVDTASPRNSSDRDALAVLLMGRSGAVDAATQAVNQFHAAVLVAPARLRERFSGLSTTRKLAAARRLRPDSYKDLVEADAATVLRSIAVRHQAETGEARLLAKRIVERVKAWKPELLEMAGVGPISAAAILVAWSHRGRCRNEGAFAMLAGAAPIPTGSGLSGNRVRLNPGGDRRLNAALYVIVMTRMRCDPETIAYAERRCSEGKTVRETRRCLKTYVARRMFKLLENGG

SEQ ID NO: 229817 - protein, 460 aa, unidentified
MIFAGCDWSDQWIDVAVVDRSGAVVGETRIVYAETPDPVACYREFLAPLARRWRATVTGIEDVNILFARALAASGLEVVHVDPTRAARHRTAQGIPKTDRADARLIASMTLAGQARPVVASSPEAEALRIVAHAHRAAVARRTEALHALRAGLMRIWPTAVTAWPSSVGGLRSAQARAVLAAAPTPRAAARLDRTALGELLSAAGRKRSVQNEAERLRMIFHRPAMLLDPRVEDAEGLRISHLVAVLDHAVRRADDLERDLERHYAAHRFHPLVKGVPGIGTVLGAYLLAEIGDRPVERFGSGRSLAAYAGVAPVTWASGQTVRVAFRRASSRTLRSTLHTTAFSLVGHSPGAHAYYTMRRSSGDAHATALRKLGRKIVLSLYHCMATGLPYDDGAAFGYDPAADDAPSLPRQLPLDEEQIMIARDMLAAPGTTVTATARTFGVSTQTIYRHVLGRHRTR

SEQ ID NO: 229818 - protein, 348 aa, unidentified
MSGDGFWAGIDAGANKSAICVKDGRGDIIDEVEVPSNAEAVSSYLSSLALSGRLVVGIEAGDTAVHVTRGLREQGFVVRVLETRFANGLLQVTQNKTDRNDARGLADVVRLMGRARSVLVKSAEAQTLQSELVLRHQLVGQRVAIENAIKGVFRLNGVQIPRLSSAKNLDLVVKAELKKLKQTGIDLSAAIGPALKIAYSLRKTIELGERRLDRVAKADHVCRRLMTVPGVGTLCALAFYASVDDPYRFEDNRDVAPYLGLVPRISQSGAKVRRGRISKRGSVLTRTHLVTSAKSMLGQSKVDCAAKRWALALRERAGPKKAQVALAKKLAIIMLAIWKSGTDFEPAR

SEQ ID NO: 229819 - protein, 387 aa, unidentified
MQKPHDNSKASPAAFMQDNTLIAVIELSLSNWLVAGLIPGVSREPLKKLEPNPEDLLKLLHGWRDEAIKAGRPITRIAVAYETGRDSFWLARWLRERGIDAHVIHATSVAVSREHRRAKTDRLDTAMLKRGFLGWLRGERGHCTVAIVPTMEEEDAKRPHREREGLVHEQTRVVNRMKSALIQFGVRNFNPKLRKARAKLETVRTPEGKSLPPNTIAALRRDMERLKIIKEQIKAIEQTRLQQFEQKPEALANRMVYLLVRIYGLGWETADLLVHELLSRTLRDRKAVARYAGLTGSPDESGSKRREKGLSRSGNARVRKIMIQLAWRMVKFQPDSALVQWFKQRTENAKGSRKPMIVALARKLIIALWRYANDGVIPEGFRLHSAA

SEQ ID NO: 229820 - protein, 385 aa, unidentified
MSGYPTQYERAPLSSRFDRSHQRLQKGAPSLDSVKYIGMDVHKEAISIAVLNSSGKLVMECVIETKASTILQFLQGLRGSLHVTFEEGTSAAWLYDLLKPQVTKIVVCNPRRNALLKEGSKSDRIDARKLAELLRSNLLRPVYHGEHGVRTLKELARSYLTISKDLGRVMSRLKAIYRSWGIPCAGKQVYAPRYRSEWLGKIQEAGVRRRAEFYYQQLDALRPLRQQVRQELLAEAKKHSAWKLLRGIPSIGPIRAALIIAILQTPHRFRTKRQLWTYSGFGIETHSSADHRCVNGELERAKKQISIRGLNRNHHHDLKNLFKSAATIAAVKAGPFQEFYDALVAKGIKPEMARLTLARKIAAITLVVWKKGVRFDAEHLKPQTA

SEQ ID NO: 229821 - protein, 344 aa, unidentified
MPIQQAICIGVDPHVDTISVAGVNRAGTVVVEATVPNRTDAINKLILRLAAHGNARWAIEGSGSLGRLLTDRLLASNAEVYEVPTRLTARLRLRNGYAKTDRIDAAAIARFSLSEQLPRVDHHPVVEALRVLWGQRETLVIAQVQAVNRLRARLRELDPDKAASLSRLRSRHHFETLSQHQTKDPNPHQRALNLAIRLDAQEALGRIDRISQLETEITAVMPPAGHKLMEIQGIGMIGAAAIIGHTGNITRFPTEGHYARYTGTAPLDASSGRQQRHRLNRWGNRNLNKVIHIAIVTQLQRKGDAHHYTNRRTTDGKTKQEAIRAAKRHLARRIYRTLKAHPLT

SEQ ID NO: 229822 - protein, 353 aa, unidentified
MITIGVDAHKGVHVALAVDEAGQEVGQWQGLNNAAGWQAISEWGASLGSPRRWGIEGAWGYGRNLAQHLVAAGETVYEVNPRWTAMGRLRARKPGKTDRLDARAVALLVRQEASALPRVHAEDDTVVLDLLTREREAAIAESIRLRNQIHALLLQTDPEYRAYLPTLKSQAALDALESYTAAGSNPLQAQRAAAIQRLAQRLRLALSQAEELAQQISDLARGRYSPLTDICGINLITAGTLAGILGPGDRFATDAQLAAYAGVAPLETSSAGLVRHRLNRGGNRRLNAVLYRIVLTQAHYLPAAKAYIERRLSEGKTRREAHRALRRFVIRAIWRLWQECRPAEATISLERAA

SEQ ID NO: 229823 - protein, 415 aa, unidentified
MLKIVYPVCSGIDVHKTFVVATIASTDRKNITTYQTKRFSTFTRDLRSLAQWLSDNQCVDVCMESTGKYWIPVYNILEPSCRINLAHPKYVKAIRGKKTDKKDSIWIADLHKHGLVPGSFIPPADIREIRDLLRYRSKLVSFASSEKNRVQNSLTVSNIMLSSVVSNTFGKSASAILQHLLKHPGDQDFDFRPLLHGSMLKKQDEIALAIDGAINEIQAGKITLCLRHMNGIEGYIAQIEATALHLAAPYSGALRIIESTPGISWLAALVILSEIGADMSMFHSAKHLCSWAGLAPSNDQSAGKKKSVRISRAGAYIKPILVQCANAAVKDKSFPHYRVRYEAIKLRRGHKRALIAIARMMLTAIYCMLSTGELFNPAIYEQAKCKPGFVASSEEHAVKLLQRLGYSVAKLPESA

SEQ ID NO: 229824 - protein, 380 aa, unidentified
MTTRHARIWVGIDVGKGHHWAVAIDGDGETVFSTKVINDESQILALIETARERADDVRWAVDISGRASTLLLALLFAHSQQVVYVPGRTVNRMSGAYKGEGKTDAKDARVIADQARMRRDFAPLDTPPELVTTLRVLTHHRADLIADRVRLINRLRDLLVGICPALERAFDYSSAKGPVVMLTEYQTPAALRRIGVKRLTTWLERRKVRGAGDVAGKAVEAAQSQQIAPPGEKSAAKLVCDLAHQLLTLDERIKDNDREIREVFRADDRAEIIESMPGMGPILGAEFVAIVGDLSGYLDAGRLASHAGLAPVPRDSGRRTGNHHRPKRYNRRLRWLFYMSAQTAMMRPGPSRDYYLKKRGEGLLHTQALLALARRRVDVL

SEQ ID NO: 229825 - protein, 427 aa, unidentified
MHYTQNDKIRQATEGAIVLGVDIGSEKNYARAFKGNGIEITRKAFFFPNTLEGFKSFEEMVTKLTVPLAEKKIIVGVEPTGHYWFNFADYCQEKQMTVVTVAPQHVKHSKEMDDNTQRKDDQKDPRVIAKLVIEGRYCIPYRPKGVYAELRVAYNRRCEIVEAETRAKNRIRCWFDLYFPEYRTVYGSVAAITGMTILKQAPLPQDIVSLGVDGILQIWRANKLRAAGLKRAKTLFEAAQRSICPPDAGRAVRMQLWQLLEEYEYIKKQLNEADIMIGIVTADIPEVNELMKIPGIGLITAAGMISEIGDIRRFDDPRQIQKLAGLAIVVNESGKHKGQSEISRRGRKRLRKILFQAALVLVRSNKEFKSIHDYFTTREKNPLKKKQSLMAVAAKLIRVCFGMVKNGTPYDPTKVLKDIRRAESKAA

SEQ ID NO: 229826 - protein, 327 aa, unidentified
MMFIGIDISKEKIDLSWLRDQLTNKIKTKVFKNKHQDFLAIEKWLLNTTKSAANELVITLEPTGVYHEALMYFLHEQGFKIILANPGKAKKYADALNIIHKTDKSDATMLAHYGCAKHAVVNYWQPEALAIRELKALIRRLDALESNRQREANRLEASEFSSVSARVCQSIKVTIAFLDDEIKQLKSDIDNHIDNEPDLKRNRKLLESIPGIGPVLSRELTYLFAAKKFNKAKEAAAYCGLIPRHNESGKLKGRTSISKLGPARIRCKLYMAAIVAGQWNKTIKRHKLTLINNGKTPMQAVCANMRKLIHICFGVIKNQEAFKLQES

SEQ ID NO: 229827 - protein, 438 aa, unidentified
MSNKVFFNLDDLFISVGIDVGADFSWMSIALPNQQFVGKPYKILHNSIDSLTTAVSKIKEAEELYSLESRIFLESTGIYHYPLFCYLRDKGFNCSVINPIITKNSTNINIRKVHNDRFDSKKAALVGLKPDLKVSLMPSDLALNCRNLCREYYDLMDNRSAYVNKLQGELRIAFPQYLGIFSKVTINTSLTLLETYTSPSAFLKADKQEIIDIIKSTARFGLTYAQNKYNAIIQAATDANQFGYIIDSNIKRIRLYISFIRKYDEEINSILESLHELVDANEDSDFVKQIHLIETFKGAGFLSAVSIMGEIGDFSAFSKPKQLFAYFGLDPAVKQSGKFESTKVQMSKRGSAIARRVIHTLTLQSISISRNREAKNPVLREYYLKKCDSKPKLVAMGAVSHKVCNMIFAILRDNKPFKIIAPQEHIKQYNAAKCDIAA

SEQ ID NO: 229828 - protein, 375 aa, unidentified
MKEKLRFLGMDVHAETIAAAIAEPDGEVRSLGTIPNRMESVRKLIKKLGPVEKLRVCYEAGPTGYVPYWQLAELGVHCEVIAPSLVPVKAGDRVKTDRRDAEKLARSYRSGDLTAVWVPDEGSEALRDLVRAREAAKQDELRARHRLGKFLLRSGHRPPTGVRAWTHLHLIWVSQIRFTQVAQESTRLDYLHEVEHMRERVLRLEQAIVEAVKLASPALQEVITDLQALRGIAHISAVTIAAELGQVSRFAGARELMGYCGAVPSENSSGKRTRRGSITKTGNAHLRRIVVEAAWSYQRPPAIWAGLRKRQQSASEAANEIAWKAQHRLHKRYVRLAAAGKDKRKIVTAVGRELLGFIWAIGTKAEATVTQRIAA

SEQ ID NO: 229829 - protein, 411 aa, unidentified
MEVVVACCAGLDVHQASVVACVNNSGRGGRSHKEVHTFGTMRDDLIALHDWLTAAGVTLVAMESTGVYWKPVYEALEDTFETIVVNAQHIKNVPGRKTDVKDCEWISDLLRHGLIRPGFVPPRPIRALRELNRYRRKVAQVQASERNRLIKVLETAGIKLAGVASDVFGVSGRAMIRALIEGEDTAEAIASLARGKLRRKRTDLARALDVPLQPHQRFMLRTQLTRIEQAQADLERIDTTLREMLVPYDHYIGLLTSIPGVEWINAVTIIAEIGVDMSVFASPAHLASWAGLCPGNNESAGKKRSGKSRKGNVFLKTALVTAAITGSRRRGGTYLAEKYRRLAARRGKMRAAVAVAHKILVAVWHMLSDGTFYHDLGTGFLDRQDRTRTAKHLVRRLANMGFDVQLQEKAA

SEQ ID NO: 229830 - protein, 361 aa, unidentified
MRVQRTSVGLDVHALSVVACGIDEDTGEVFRRRLSPDYGEVLAWLRTLPSPVKVVYEAGPTGFGLCRALTAAAVECVVVAPSKLQRPAGDRIKTDARDALHLARLLRLGEIVEVSVPSVEQEAARDLVRAREDARGDLMRCRHRLSKLLLRQGLVYSGGAAWTAAHDVWLRGQSFDQPALQAAFDSDYEAMILTLARRDRLDAAIADMAEDSPYTPMVRRLGCLRGVSTLTAFGLAVEIGDWQRFTGNTIGAYVGLVPSEYSSGTSRSQGSITKTGNGHARRLLVEAAWHHRKTYRNPGQVMHRRWEKASPAARARGHAGNHRLHHKWEQFTARKKRPVVANVAVARELAGWCWSLATIDD

SEQ ID NO: 229831 - protein, 416 aa, unidentified
MSRKFMRTNTCGKLSQLLIIFERWFLHMYSYFVGIDIAKNTHWASCLSSDGEIILEPFSFSNDNSGFQKFISKLESLDKTKILIGLESTAHYGENIISYLFNLDYNIGLINPIQTANLRRSNIRKTKNDKVDTKIIIKALTLGNYSLITSRDINNLKLKGLCRSRRNLVTMRSKAKIQLVSYLDQIFPELAQFFKGNLHLNVSYQLLKEYSSPKQISSLHLTKLSNILHDNSHGRYNKQDAICLRELAKNSVGIDNPSLSLQIKHAILQIELYNEQIAEVEALYKQILDEMNTPILSIPGMSYNQAAVIIGCIGDINRFEHSCQLLAYAGLDPSVIQSGNFQARSTRMSKRGSGMLRYSLVYSAHNVVKNNKTFKDYYELKRSQGKSHYCALGHVAHKLVRIIFKMLKDNVAFNLD

SEQ ID NO: 229832 - protein, 404 aa, unidentified
MAKYHVGVDVSKHKHKVYIRNLPQDSYSGVFSIDVNRQGFERFSTTLGKLSPNKEDFLIGIEATGNYGITLAYFLLAQGYKVVEINPYRANQFRKAQGKKAKSDRIDARSLATLLSLENHKSLSLPDPVLDNLRELTRFRADMVKDRTSLVNQLREALSTLFPELAAIFSQLDSPTCLSLLIAYPGPGYISRAGETKVAESLRIASRGRIGEALAKTLVEIAQDSVGVVQRQSALALRVSILGERIVALAGAIEKVEKEIADLFHKLPYKPEDFPVGNITSLAALISEIEDINHFPTLKQFLSHFGWCPQSLQSGSYRLEHPRMSHAGNKYVRRLIWMLSIVAVRTIPRYRTYFERRVAKGKSKMHILVAVGRKLLSVFYAILKKGVPYNPNWEVNHHFALARS

SEQ ID NO: 229833 - protein, 345 aa, unidentified
MELQVIGIDLGKTVFHLVGLNRCGEVVVRKKFSRKQLLHFTANLQVELIGMEACGGAHFLGRALQEQGHAVRLMPAQYVKPYVKTNKSDYIDAEAIAEAVTRPRMRFVPIKSDDQLDLQSLHRVRERWVMRRTAVVNQIRGLLLERGITIRKGRCHVDAALPGILEDASTKLSGALRLLLAQLRLELDHLQTRIDEADAVIQQTAGENEACRRLVAIPGVGPVTATAIIAAIGNGAAFRKGREFSAWLGMVPGEYTTGGKQKLLGISKRGNAYLRRLFVQGARAVLQQSAKQSSGLSAWLTQLTARTHPNVAAVALANKLARMAWAVLAKNEPYRPPVLADAATD

SEQ ID NO: 229834 - protein, 391 aa, unidentified
MVCVGIDVAKDKHDCCILDSDGMVRADCFTIPNNMDGFKQLLQTIRNCTKKSDKIKVGLEAPGHYSYNILGFLLDNGLPTYVINPLHTNLYRKSLSLRKTKTDRVDARTIATMLLSDVDLKSYTDIAYHNEELKSLTRYRFDKVQECAKLKQSVSRLATILFPELEGLVSSIHGTSIYALLSEYPGAKQISEVHLTKLTNLLTTASKGRYGKEKAIQIREAARASIGSVMPAKSLELKHTIKLIQELASEIDEIEDSIQKIIDELNPPILSIPGMGVNSAAVILAEIGDFSNFSSPDKILAYAGCSPSTYQSGKLTNCYAHMEKRGSRYLRHALYNATKYVCYWNPVFAEYLAKKRAEGKHYNVALSHAMKKLVRLIYALQKSGKTYLTAA

SEQ ID NO: 229835 - protein, 348 aa, unidentified
MKNKSFVGIDISKNVIDVSIFREDTNIKMFPHEVFNNTRKGFGDMCSWLKKSRVVLSQALFGMEFTGCYSLDLEKFLTSKNYSFCMLSTRIVKHHPMGTIDKRDKNDSAKIADFLYRYDGTECAKPYKLPSKAMQQLKQLVNERKFLVEQRTNFMNRMQMFETKEDSAMYESYIKKLNHDIEKIDQEECELMSNYYVFFYTFQNLLTIPGIGFVNATNIIVIILNFIDFDTARQYARYVGVAPCSHTSGTSVKWRARPSAHCNGQVKADLSMAALRAVEYDVEMQMFYNRKLGGRKDSDTKRKALNAVKFKLIRRMFAIGKQKRKCEVLNTSDDRKNLHIEKSKASEL

SEQ ID NO: 229836 - protein, 343 aa, unidentified
MKLHVLGIDLGKTVFHLVGMDCSGKVVIRKRCSRRQLLNFTANVQVQLIGMESCSGSHFLGRALREQGHQVRLMPAQYVKPYVQTNKSDYLDAEAIAEAVQRPRMRFVPIKTEEQLDLQALHRVRERWVMRRTAVVNQIRSLLLERGLTLPKGRSHVEKLLPRILEDADLKLSGSFRVLLSQLGVELGQLGERIAEMDAAIEQRAREDEACQRLTTIPGVGPVTATALTAAIGNGAAFRKGRDLAAWVGMVPRECSTGGKQKLLGISKRGNIYLRRLFVQGARSVLQHRHKQAPALSSWLEQLLARRHQNVVIVALANKLVRTAWAVLCTNQPYRAITLAISS

SEQ ID NO: 229837 - protein, 467 aa, unidentified
MKHNQRRERTGKKARGSISLLERIQPDAAGIDCGQNSHFVAVPPDRDPEPVREFRTFTAELYRLADWLVQCRVKTVAMESTGVYWIPLYEILEERGFEVLLVNARDVHNVRGRKSDVSDCEWLRELHSVGLLRASFRPAAAIMPLRSYLRQRATLVEEAATRIQRMQKALTEMNLKLHTVLTDLTGQTGLKIVRSILNGERDAERLAAHRDHRCHASHAEIVAALTGNYRAEHLFALRQNFAAYEFLLQQITECDAAIEKQLSELAAQQPPPSTALLAPRRKTSSKHQPHFDIRSPLQRLTGGADLSQIDSIGPQAALQIVAEIGTDMRRWPTEKHFASWLALAPNNKVSGGRLLSSRTPPSANRAAVILRRCAMSLGRTSTALGAFFRRLAARVGKAKAITATARKLAVLVYRVLSGDLVYNDPGATAYHQLNRARELKSLRKRAKLLGFELVNHSTGEVLLHPVS

SEQ ID NO: 229838 - protein, 401 aa, unidentified
MSSSFGVFLGLDVGKEAHHAVGLDPDGQRLHDGPLPNTEPKLKALFDKLAEHGPLLVVVDQPATIGALPVAVARAAGHQVAYLPGLAMRRIADLYPGRAKTDARDAFVIADAARSLPHTLRPVDVGDEALAELDVLVGFDDDLAGEATRISNRIRGLLTGIHPALEHAIGPRISHPAVLEILSRCGGPAGIAKAGRRKLTAIAKVHAPRVGDKLVETIMTALGEQTVTVPGTAAADTVLPRLADSLKTVLQQRKQVAEQVEGILDAHPLAGVLTSMPGIGVRTAARILLEVGDASHFASSGHLAAYAGIAPVTRASGTSIKGEHPARTGNRKLKRAFFLAAFAALSDPTSRSYYDKKRAEGKKHNAALICLARRRCDVLYAMLRNGTHYRHPEPATVPTAA

SEQ ID NO: 229839 - protein, 462 aa, unidentified
MNNFYLGIDVSKGYSDFVIVDKKKQPVEPNFQLDDTFEGHCKLYEILTAFFRIHTDCTLYAAVESTGSYENNWLNRLLDFATAYPVKVARLNPLGVSRNSQADLKRNKTDKISAQDVAEYLIAHPEKVDYQNQKPGDTIKEQFNYIRLLNKQKVQLLNLLEIDIYKANPELTIYCKNGISEWILHLLKQYPTANHLAKANAKELTEIPYISAKKAKLIIQRANTSVASAVDSMTADRIVDLVDDILKKINQIDNQKSRLKHNKNVLPEKVALLETVKGIGTYSAIGLLIHIECVERFATGKKIASFFGIHPVYKQSGDGVWGYHMSKKGNVIVRNILYMVTLSAIRCNPLIKEIYARNIAKGKKKKDAMGVCMHKMLRIVYGMLKNNSEFDPDIDRQNQNKQYNSSSKPSNNQSRRYQNHDSDAPISRRQTKKRKEQVQNGSIKNINNLKTFVPNLQKFEMN

SEQ ID NO: 229840 - protein, 418 aa, unidentified
MKSYKTKKVTKINDKTVIATLDIGKTVQHGYFRAPNGNDIEPFAFYNSKKSYNAFWAKLCRFKKQQGLEDIVIGFESTGPYAEPLFHFLRKKPVKLVQVNPVHTKRVKELTGNSPNKTDKKDPRVIADVICLGHALTLIVPQGAAAELRRLSQARERSITDRTAMINQLEHLMYVIFPEFLTVLKISTKTARHFIKHFTTPEKIFALSLDSITQIFKKVSRGKLGQDRAKQLHAAAGGSIGITEGKQSIVFEIEHLVSKIEAEDKFIDALQKQMSLYLQQIPYSQNILSIRGLGEVTVAGLIGEVADFNKFDTISELMKLAGLDLYEISSGKHQGQRRISKRGRPLMRKLLYFAAINAVKYKGIMHKKYHQMLDRGMLKMKALIAISRKLLAIIFAIVRDNSQYVENYSDNYHYKLAA

SEQ ID NO: 229841 - protein, 365 aa, unidentified
MDTIYIGVDFHARQQTICYLKTETGELVTCELKHQDKEKVRAFYAQFQGPVVVGLEASGYSPWFERLLEELGCEVWLGHATEIRRRARWRQKNDRRDAELILDLMLHHEFPRLHRPAVESREVLRMLRYRQKLIKLRTMSKNSLQAIALQSGLAKGSGLFTKTGQQELSTAEMTPVMQWQCEHWLQLLKPLNQQLLETMVWFKAQSKGDVCITRLRTHPGIGLLTSLCIQHTLQPVSRFRNTRKVAAYAGFDPVERSSAERKCFLGISKAGSRLLRYLLVEAAQTAVRKDEDLKRFYKRLAERRGRPKAKVAAARKLLIRAYIMLRDEIDYAEFRRRAVAARLARGGHRPNVPEVLIGQPASPAQ

SEQ ID NO: 229842 - protein, 371 aa, unidentified
MTEAVKYVGLDVHKETIAVAVADGERGGEVRFVGTVANDDDAIRKLVKRLIGPGVTLNVCYEAGPCGYGLHRLLTKLGQSSIVIAPSMMPRRPGDHVKTDRRDAMTLARLLRAGELTAIWVPDEAHEAVRDLIRARRSAQEDAIGAKQTVRSFLLRHDRRFGGKAAWTKMYWRWLSEQRFDFPHQQLAFQEMQKRVLEAQARVGRLEAALAEAVDAWCFAPLVRNLQVLRGIRLVSAATLVAEVGDLTRFDNPKQLMAYVGLVPSEHSSGARTKRGRITRAGNAQARTMLIEAGWSYRLPAREERRYRERVIDLPEDIQAIGWKAQVRLCQRYRRLAATGKPQPKVTTAIARELVGYAWDIARRVSPAVAG

SEQ ID NO: 229843 - protein, 340 aa, unidentified
MNLTTLGIDLAKTSFSLVGMDKHGKVILRKTLKRAQLLPFIAQCSPCLIGMEACSGAHYWGREFHKLGHMVGIMACKFIAPFRKGGKNDNNDAEAICEAVSRSTIWFVPVKTAEQQAQLCVHRVRQGLIAERTALINQLRGLLSEFGIVMPKGRYPAQREIPLILEDANNGLPMLARQMITNLWERIKIASEQILFYDRELRKQAHHNAVAKRLLTIPGVGEQVASGVVASVPDPSLFKNSRQFAAWLGLVPRQYTTGGKIRLGRITKQGDRYLRMCLVHGARAVIANLKDKQDKVSCWARELISRRGYLRAVVAMAARNARLIWTLMVKQEDYKAQPTN

SEQ ID NO: 229844 - protein, 352 aa, unidentified
MLGIAHPDRDRPSIHRVCGGNIMELVSRLRLAARNNRRILVCYEAGYDGFWLARALAKIGIECRVLDPASIQVNRRARRVKTDRIDVLALLRALIATDRGERHVCAIVRVPSVEEEDARRSHRERQRLVRERTGHINRIKGLLFAQGIRDIKPKLRRTRIDFAALETAEGHPLPDRLRRELEREYARLALIEAQLREVEKERDTADAQDPVVERKRQMLVAVRGVGGTSAAILAREVFARSFASRRQLGSYLGLTPSAYDSGSVTRSQGISKAGNSWARRILIEVAWLWRKYQPASPLSNWYIQKTTGQSSRIRRIMLIALARKLAISLWRYVETGLVPEGVVMARAESHPA

SEQ ID NO: 229845 - protein, 417 aa, unidentified
MMDEIEWFVGFDWASEKHRVCLLDRQGGVIGERDVPHGGAGLTELCDWLVQRAGAQPGRIAVAIEMPRGPVVEMLMERGFQVFAVNPKQLDRFRDRFTVAGAKDDSRDAHVLGDSLRTDRHAFRRLAVDDPVIIELREWSRMAEDLQQERTRLANRVREQLWRYYPQALQLTDDLAAEWFLALWHQAPTPAKAAKLRKTTIERVLHAHRIRRLGADEALRIVRQKPLTVAPGATEAATAHIRAVAARIRLVNEQLTAAHRKLDELCTKLEQAMESAPGQTSEQRDVAILRSLPGVGRINLATLLAEAREPLRHRDYHVMRALSGVAPVTRRSGKSCIVVRRLACNKRLERAVYHWARVATQHDPASRQRYAELRRRGHSHRRALRTVGDRLLSVACTLLRRQVLFDPDYKSESTAAA

SEQ ID NO: 229846 - protein, 370 aa, unidentified
MQFIGVDLHTNRFTCSYRTEHSPPDAKKGDRTETFDLTERGLAAFYRTLTGDTYVLVEATVTTFAFVRLIRPMVKEVIIANTYELKQISRARNNTDKIDANILGRNIKMQVLGGERAVSPVVVPPENIQELRGLFTTYRMYRKQTTQIKNRVHSLLKEKLYGFTREEIFDRKGREKIRGLESGTPLSFQVNELLDLLEYTEARIDPLKGRIMALAEPYMREIEILTSMKGVSVFTAVAVIADIISVDRFRNSKAFTSYLRSAPRVSNSNTSVCVRGTNKMGRKTAATLLTQSLHHVLDASPKLNRWYTRLTEYKKAGLVRTGLRRRVFAEIFQMLKKGEYHYARDEQNHEAKLLQYRRFLKKRKILLETA

SEQ ID NO: 229847 - protein, 404 aa, unidentified
MGLDVHRDIIVACLVKGAVDAEPEAETRTFSTLIPEMQKLRDWVIEAECRNVAMESTGIYWQPIYEMLESCFNSEISILVVNARHMKNVPGRKTDMKDAQWIATLLRAGLLKGSFIPDKAFRELRHLTRYRKSVVHDITAQKNRIDKFLQSSGFRFTAFLSDAFGASGRNIIRHLIEHGSIDRAVLDKCLKTKTRNRIDEILIALNGSLSVHQRKFLNMVFQHLEDLEAHKRTVEDEITEEVLKHTEALNLLCSIPGIDVTAAAAIIAEIGTDMSSFPDSQHICSWAGLSPGNNESAGKRKSVHINKGNPYLKSMLCEVAWIMASHRKLYLSGWYWKVKQRKGAKRATIALARKILSIIYTMLKTGTPYNEECFEQRRLRCERKRANRLVNELQRLGYVVTAPD

SEQ ID NO: 229848 - protein, 397 aa, unidentified
MPYRIAGIDVHKKKLAVVVADVEVEDEYQFERRWYGSNPEQLQLLAEWLIQQQVEEVVMESTAQYWKPVWGALEQYWKPSCEKREGAGRMSGTLHLAQALSNRGRRGRKKDFRDAERLLKRLVSQELTLSFVPHAEQRLWRTVTRTKYQLRRNKVRLHNQLEALLEEAHIKLSSLVSDLLGASARRMLQALAEGETDPELNPVYRRLVKMVLEELQWIEQQISQLDQEMASLLRQHQDAVQRLAEVPGLGVDSAQQIIAEVGAKAGTFASAKNLSSWVGACPGEEETAEVNYSARSPKGNRHMRRLLNQAANAAVKVKGSIFEIVYRRLVPRLGHNKTIGAIAHRICQLIWIILNKGVRYEERGPAVSENSRRARTSRMIRTLRKLGYRVELHANPA

SEQ ID NO: 229849 - protein, 456 aa, unidentified
MGRVRARKISAQLVEDEDYQLRYERVAGIDVAKAKADVCTRLPPARAAGRRGSRVEEVPATAREVLALAGRLLADRVELVVMEATSDYWRIWYYLLEDAGLRVQLVNSRHARQLAGRPKTDRKDAQWIARLAEMGLLRPSFVPPPEIRALRDLTRTRLMLVRDRTREWQRLEKLLEGALVKLSSVVHSMSRTKTARGILEAIAAGERDPDTLAALAHGGVKGGHAAVRQSLEGMRLGGHHPRLIRVHLDHITLLDRSVAAIEDEIEAALDAIGGAWGISADGVPSPAPGPDAAALAAVERLAEIPGVSSDLARAIIAETGLDMTRFPTPAHLAALAGLAPVARQSGPRNRKPSKGHGDAYLKGYCTQAALGASRTDTFLGERFRRLSRRIGGVRAQCAVGRSILVIIWHLLSDPGARFRDLGPGWHEHKADRDRKIRSHLRQLQALGLNVTIAPAA

SEQ ID NO: 229850 - protein, 338 aa, unidentified
MEWTVAIGVDTHKDVHVAVALDRFGAQLGSREVETTETGYRSLRSWALELGVPAFAVEGCGSYGAGLVRFLELAGAAVWECERPRRQERRRGKSDLIDAALAARRLLTGDGLYLPRGGGRREELRLLLLERRSAIQARTAAFNQLSALVVTAPDQLRRRLGTLSGERLARAAARLRPGADVRNAVLQRLGRRVERLSREVREVDRRLLDILTEIAPALLAECGVGPVCAAQLLVSSGDPKRMASEASFAALAGTSPLDASSGHQRRHRLNRGGDRQLNWALHVIALARIHHHAETAAYYQRLLATGKTAREARRCVKRALARHFYRRLREIPTPALTT

SEQ ID NO: 229851 - protein, 374 aa, unidentified
MKKSIKANAAQARTAAKVKQQKVDWKRVTTVGIDLGDRFSHFCALDADGTVIAEGRVATTPAAMELEFKPASPKRIAIEAGMHSPWLSRLLKRLGHEVLVANPRKLRLIYENQRKSDRVDAEYLARVARLDPKLLCALEHRSESGQCHLAIIRARDTLVRSRGRLIQHIRSAIKSIGERVPSGTAECFHKRAAACLPDGLREALLPLIEMVEQLTTRIREFDRKVQQLAEDRYPDTEALTQVCGVGSLTALAYILTLEDEGRFRHSRSVGAWLGLVPGQHDSGENQPQWHITKEGDPYLRRLLVGSAQYILGPFAKDCDLRRYGLAIAARGGANAKKRAVVAVARKLAVLLHCLWRTREVYEPFFNSREQHAAA

SEQ ID NO: 229852 - protein, 431 aa, unidentified
MLGGNQEKLMSQNQPEIQYAAFVSIDWADQKHVWSLQEANSRTREHGEVGHMPEAIEAWIAQMSQRFAGRPIAVAVEQSRGALVFMLSKYEQLHIFPVPPAMTANLRKAFYSSGAKTDPADTDLLQDVLQMHREKLRRLSPDTEATRLIQNLVEERRKLVDEKTAQSNRLEAHLKIYFPQIPQWFGDVDSPLVCALLERWSALEALQKARPDALRSFFRKHQCRKEELIESRIKAIGEAMPALKDRAVVEAQLAVVKVLVQVIQVLHQGIEDFNRQIQEAAEAHPDFFIFESLPGAGAVMAPRLLAAFGSQRERYQNAAEVQTLSGIAPVTESSGKSSWIHFRFACSKFVRQSFHEWAALSITQSQWARAYYELQCRRGKRHHAAVRALAFKWIRIIFRCWKERVAYDEKVYLAALAQHNSPLLAATKIAL

SEQ ID NO: 229853 - protein, 286 aa, unidentified
MEYFAGLDVSIEETAICVVGDDGKVVLETEVPTEPQLIADALERFAGRLRRVGHEAGSISPWLHAGLIELGLPAVCLETRHVRAALSAQRNKTDAADALGIAHIMRTGWFREAHIKTEDCYRIRLLLVQRRNLKRKFLDIENAIRHSLKVFGFKSAIDDPARFRRSRNVAAYFGLTSRRWQSGSSIDVKGRISKAGDPDVRRALYEAASAMLTRFKGRDTIKTWGLKLAKTKCHAKARVAVARKLAIVMHAMWRDDTFYVGDPDAEAHEIDTAYAAKMQRLSYARS

SEQ ID NO: 229854 - protein, 404 aa, unidentified
MKNDRSLFAGLDWASKTHAVCVVDDHGQIVVRFEIPNTGKTFAGLIKRLIKLNVLAVAIERCDGPLVEALLDSGMRVVVITPRQVKGLRSRYTGSGAKSDAGDAYLLADVLRTDGHRLAALARDSEATAVLRALSRTRKELVEARVALVNQLQAELERVFPAAIGLFSRLDSDVAIAFLRRYPTQHAAATLTRSRFAAFLRRISYCGRKPVEELFARVQDAPPAGLSPGEAQGRAACVLALLRTIDAVRHEEHELEADIIEHLDAHADAHIFTSLPRAGHGVRAAALLSEIGDVRSRFPDEQSLAALAGVAPVTRASGKMHTVGFRYACDKKLRNAIIDFADDSRHASPWAAKIYQDAIARGKRHPHAVRILARAWIRIIWRCWHDGVAYDPQLHRGAVMLAAA

SEQ ID NO: 229855 - protein, 413 aa, unidentified
METQKNIVCGADIHKKFIMATILSRDGTKSSGRFGMTLDEIVRFKEWVISNNCEAVAIESTGVYWIPIYTVLEGSVEVILANAYKIKHTPGKKTDKRDSKWLAELCLNGMIEPSRIFPKDDRDIRALTRAREKLVNNSTQMKNRIHKELESACIKISSVLSDIFGVSGMKIINGLLEGKNIDEILKMITSKTILKKEQELRQAVTNSLDPARIMLIRTYLELIEKIESQIEILNKEIMSRMQKHKEDLEIAMSMTGMGFTSASTILAEIGNYKDFEAAEHLASWCGLTPKVSQSADLLVTGSITKQGSKHVRRMLVQVAHAISKSKNSKLKRFFLRILAKKGKKKAIVALARKVLCILHHLLVNREKYQDSEMSKTKKVNLNWASSPVQMTEQDMINVLVDAGYTVQMMKEGV

SEQ ID NO: 229856 - protein, 341 aa, unidentified
MYYAGLDVASKGSYLYTVDRRGRKVEGREISTTKKSLREAFKKYKDQKTVVAIEAGGSTRWIHDELIKMGIEVYVVNPNKVKAIADSKRKTDKVDAKILSELLRLDALPERVYMAKGKNREMRDLMQARHNIIRSYTNLMNYLRGLLRQEGIRIPAREMLKDSYTNKLLKHKLPKHVREIIERYSQTIGYMLDEKKKLEEEIKSRNNRDIELVKSVPGMGEISAKTILAAIGEIKRFKKAKQLTSYCGLVPSVRSSGERTEYGHITREGRSEVRRVGVQSAHAVLISKSAETYPLKKWHASIAQRRGKKTALVALARKLVTIIFYVLRDKKPYDYTLLRVA

SEQ ID NO: 229857 - protein, 396 aa, unidentified
MESAVYLGVDIGKSGHYAVAVDASGKPIYQTAVPNDEAALRKLVIWAKEHQATVVVDQPGGAAAVLLKLCWASEVRIGYLHGLAMARARDFYAGESKTDPKDAFVLADVARAHASRVVWLEPSSEALAHLELLCGYDADLRSDANRLTNRLRALLVTHWPALERALGERLDTRGVLAVLQHYPSGPALKDAGVDQLVAALKAQRVHRAEAFAKHLHQAALAQTVTISGSATAAGLISELAVQLAAILARRVELEKEIEQGFFALPEAPILRSLPGIGPRLGARIAVELGSISRFRTPGHLAAYAGLGPTPWKSGTSINANRPSRCGNHRLKNALFLAAFASLRHEPSRSYYDRKRAQGKRHNQAVLCLARRRVDVLHAMLSRGVPYRSPVPLAAAA

SEQ ID NO: 229858 - protein, 350 aa, unidentified
MDYFAGLDVSLETVSICIVNAAGDILLEKKIEAEPAAIIGVLKDFGCPLKRIGLEAGPTSSWLYSELRNAGYPAICLECRHVKAGLSAMRNKTDRNDARGIAQLVRLGWFRQVHVKSEEAQRIRMLLVNRQQLLTKALDLENSVRGSLKVFGLRVGTVTRRTFEARVLELVAQDRILLAITEPMLRVRRTLIAEFEKLDRLCRQLARRDPVCHRLMTVPGVGTVVALTYRTGVDAPERFSRSRDVGAHFGLTPRRYSSGQTDYDGHISRCGDAMVRTALYQAANVLLHHGRWSSLRSWAMRIAKRGSVKAAKVALARRLAVVMHRMWVDGTDFRWSAVAAAAPTATAMAR

SEQ ID NO: 229859 - protein, 366 aa, unidentified
MQKLSTRRVMGNRILKGHQLTIGLDLGDRWSFYCVLNELGEVLREEKLPTTPEAMKRTFEELPASRIVLETGTHSPWISRLLTELKHEVIVAHAQKVQLITKSSRKDDRHDARTLARLARIDPQLLGPVRHRSAQAQIHLTVIRARAELVSARTALINAARGLAKSHGERLPKRGTQQVGRELATTLSIALREVLEPLLREVESLNERIREYDQRIEQIAKQVYPEVALLKQVKGVGTQIALTYRLTIDDPHRFTKSREVGCFLGLRPGRRNSGQSEPQKHITKEGDRYLRTMLVQGAHYILGPFGEDSDLRRWGLKLAERGGKNAKKRAVVAVARKLAVLLHRLWVGGEVYEPLRNTHRAMGAAA

SEQ ID NO: 229860 - protein, 329 aa, unidentified
MLNTKTALGLDVSKLTIDVCLLRPDGSKQTMKISNDVAGFQLLLHWLVDLDLDTVHACLEPTGTYSRPVSYYLADAGIKVSLVNSFAVQSHGRSKKIRSKSDRIDAFLLADYCLKENPETWTAPSKGQSELRELQHRLDSVKEEIQQERNRLEAGSDSKFVLNDIEENLGRLLVRAEKLQKELKQHVQRDERLAPDFKILSSIIGIGEASALKMLALIRFDQFTEGRKVACFAGLTPRRFESGTSIHKREHISRIGSSDLRRALYFPAMVAMQHNPHLREFADRLKAKGKPSKVVICAVMRKLLVLAAALIRTRKSYDPEYGRSTAAIR

SEQ ID NO: 229861 - protein, 357 aa, unidentified
MKSQEIKYVGIDCGKKTLEVIRIGDNSLHQRQQFSTTEIGISKLINWLNSNDVVGLEAGSQSFRIAKSILNKGIQVIVLNPGDLATIYQSLKKTDKEDSLKIARLIQRFPIEELPVVPIPNDEEEDNRRLCTEQENWTRQLTQSKNRLHSLFTQACLTHITKKHLRTKANREISVALLPSRYQKEAERILKVLDLVEQNLKLIEEEIKEALKKNKAYAQTIMSMPGVGMITSLAIMSYMGNCKRFSSAKQAAYYVGLVPRVDISGDSAYYGRIVNRGCHSIRRVIVQAAWSLVRCQYGGKIKEFYQRLYPKKGAKKSIIATSRKMIEILYTMIKTGELFDSMPENILNRKLTQYGLM

SEQ ID NO: 229862 - protein, 346 aa, unidentified
MLYAGLDLSRKRLDVHVLRDDGTTALVTAVSPDASALRTLVRRVAAEGEPVRAAIESMNGARFVHDSLEFAGWDVLIADAQRVRGLAPLAAKTDKIDARVLAELTRRALVPEIWLPTPEVRAERERARFRLHLVRHRTALKNRISATLMTFGHPCPMADLFGVAGRKLLDSLALPEPWQASLSESLALVDDLTARVDALEVELRDLGADDPSMQLLMTVPGVGWVLAYTIASEIGDITRFATPKKLAGYTGLCPLVRQSGPKDRRGPLAKNGPKYLRWALVEAATHAARDVRYLERYERTKQRLGRQRGAKVARVDLARQLAEAIWHVLTKNEPFHPAGPAIRLVA

SEQ ID NO: 229863 - protein, 343 aa, unidentified
MNSTYHYIGLDVHKRTVAFCEKRADGQTIASGSFSTRKASIGEWVAQRATPWIGGMEATLFSGYLYDVLMPHAVEIQVGHPARIKAISTAKHKNDAVDAETLANLLRADLFPKCYMASPRVRELRRVLRYRNFLVRQAVTLKNKTTGILMEVGIEYDADRIHRQGYFEELLGNLDEVPNSVRELLRTTRNGLEMFQAAQKKLLGALVTCEDLRERVGRLMTIKGVGEMTALTWALEIDDPKRFSNLKHVQSYCGLCSGQHESAGKSKYAPLSKQRNPHLQTMLIEAAKLAPRWNPQLKKVHAAALEQDKNRNRATCAVARKLVAYLMAVDKSGKPFEDRTPED

SEQ ID NO: 229864 - protein, 347 aa, unidentified
MKIMRVGVDLAKNVFQVHGVDQYDKPVWRRSLKRHHWLAELERQVSPDAEIGMEACSGSHHWGRKLQERGYRVKLMAPQFVKPYVKSNKTDRNDAEAICEAMSRPAMRFVALKSVAQQDIQAVHRVRSELVRQRTSKTNQIRGLVGEYGLVAPLRIAQLRAIVPDWLEDGENGLSMRFRRLLAGLWEDLRRLDARIGELDQEIKAIASESAVAQRLQQLRGVGPITATALVATLGDGKAFRKGRDFAVSLGLTPKQHSSGGNAHLQGISKRGDAYVRQLMVHGARAAVRTAKHHDDPLSLWIQRLSKRKHTNTVVVALANKTARMAWALLHHERDYEPQLAARLVND

SEQ ID NO: 229865 - protein, 334 aa, unidentified
MISIAHTRQVIVTRIICGVDISSDSLETRIGQEGAAASFPNHAEGIAELAVFCREHQVELVAMEATGGYEQLSFAQLSQAGLPVAILNPRSVRQFAESMGRLEKTDRIDAGMIAWYAKVKKSRPLCPASPTQQHLRALVTRLRQLTEVRTAQLNQQRLVTDRSVQASFAQLLAFVARQIRDLEQSIAALLDQDPAWRELNQAFRTIKGVADRTVARLMAEMPEIGTLSNKTVSKLAGVAPMARDSGKYQGKRAVRGGRAPVREILFIVASVVGRYEPDFIAFQQRLRAAGKPPKVVRIALAHKLLVRLNAKAREARQRIATPQPASPALLLETI

SEQ ID NO: 229866 - protein, 311 aa, unidentified
MIITPRCVGIDVSKHHLDIFDEGIGVSERVANTPHAITELVARWRCDALVVFEATGVYDLELRAALRAADIRFARINPARARDFARASGQLAKTDPIDARMLAAFARAMRPATEQVSTPARNALARLAKRRDQLVLMRAQEKNRRSEAGDRAMVERICRLIEVLDHEIAEIEADISALITAEPEIADDAQLMRSLPGVGPVACMQLIAQMPELGHVGPKQAAALAGLAPFNVDSGAYRGKRKIGGGRKRVRNALYMAALNAVRRADRFKAFYAKLRQAGKPAKLALMAVARKLLTILNAIMRDRKSYMPAQ

SEQ ID NO: 229867 - protein, 409 aa, unidentified
MEVLHQRCAGLDVHKETVVGCVRIGAGGELSRELKRFPTTTRGLLQLADWLRAAGCSAVAMEATGVYWKPVWHVLEGEFELVLANPAHIRNVPGRKSDMNDASWIADLLAHGLIRASFVPPPPILELRDLTRTRKQLVREMVQHQQRIQKVLEDANLKLASVVSNVVGASGRRMIRALIAGETDPHKLAALGDPRLSASRETLAEALLGKVTPHHRFLLRQHLQVLEHLEQTVAEFEAQIEAALTPFRAAAERLMTIPGVSAIAAQVIIAEIGVDMRRFKTVGHLRSWAGLCPQLNESAGKVRSRSLRNGAPWLKTVLVQCAWAATKSNRHNYLRAQFLRLRARRGPKKAVLAVAASILTAAYFLLRDQVPYRDLGPHHFLRLDQDRTAQRLARRIRELGYEVELRKAA

SEQ ID NO: 229868 - protein, 355 aa, unidentified
MNKDIVLVADYHSENIEFRWFNEATAEERRGRFATSRAGILRQVEQSTQELTPGGRVVWVMESTTGWARVKDLLSARARFVLANVLQMPLPPKARRRKTDKIDTGRMLREYLHGSLPQSFQPSAWWRRVRRLVDCRQDLVKRQTAIKNWIGSLLHHETWENRSNLWSSKGQARLRAMKLPAGDRMLVDLKIEQLELLSRQLEEVEARMQEVYDGWPEAQWLDQIRGIGMVTAVSVLAHIGPIERFKTAEDLISYAGLAPGMWESDGTCHHGRIGGGGTDGHLRYLLIETSMWLREIPRYRPTYERVLSKRGKKIARIVLARMLLRSIHKMLRDRLRFHPGRTVTAKTTATAGCSR

SEQ ID NO: 229869 - protein, 466 aa, unidentified
MPKRKPKEGQTESTRRKLSGSATLPQINPNTAGIDIGGASHFVAVPADRDEQPVREFAAFTGDLYRMADWLKSCGIESVAMESTGVYWIPVFQVLEERGFDVKLVDARQLKRVPGRKTDVSDCQWLQQLHSFGLLAGCFRPDNQVCVLRSYMRQRAMLVTYASQHVQHMQKALVQMNLQLQYVLDDITGATGKRIIHAILNGERDPHKLAALRDPNCKNSAATIAKALQGDWREEHLFALRQAVDLVETYEAKIAACDQQIHAHLQTFQDRSDGQTPPHGKPPRADRHDFSFDATAELFRMTGIDLTEVDGLQANTILTVLSETGLDPTKWPDSKHFASWLSLAPNNRVSGGKILSRKTPPNANRAAAALRLAARSLHHSKSALGAYLRRKAAQIGMPKAITATAHKLACIIYSMLTHGTAFVDFGPDYYERAYQQRVVSNLSRRARDLGYTLVKIPQAQLQPTLS

SEQ ID NO: 229870 - protein, 485 aa, unidentified
MAKRRMSTFERLKAGRMNRAQRRKLGRRVAASDPELAIIHTNAGGIDVGNESHFVAVPPDRDENPVREFGCWTRALNEMAEWLTSCRIDTVAVQATGVYWIALYDVLEQHGIRVVLVNAQHTKNVPGRKTDVQECQWLMKLHTYGLMRDSFRLQQDMEYVRTIWRVRDRHVKDAGREVQHMQKALTKMNVQLANVISDISGLSGQAIISAILRGERDPYALADLVNYRVKASREEVARSLEGNWRADVLFELQQAVDSYHFAHGQMQECDDRLTLYLASLPARTLEIPAPSITAETVVQKRKKARKPRDNEPRMDLRAELKRICGVDLTSIDGVNVMTAFTVISEVGTDMSRFEDEDHFASWMGLAPSKDISSGKVVGRGKKKVKNRVAVVLRTAATSLLESDTHLGARYRHLRRQLPTFKAAVKAMARYLAVLIHRLLTHGQAWIDQGAAQFERKRLNRELANLHSRAKAQGFALVPIAENPLH

SEQ ID NO: 229871 - protein, 343 aa, unidentified
MTFYVALDVGLRMVSLCIVDEAGGVKLEKSLPSEIEDIVACLRDFGEEIACVGLEAGTLTQWLTYGLRAAGFKPVVLEARHVQAALAAMRNKTDRNDARGIAQILRTGWYRPVHVKSIESHYTRTLLAARKALLRKCIDLENEVRGLLKVFGIKLMPGLRHGAFDRAVREPIEANGALRHALVPLLDVRLEIYKAFLEMDRRVKALAQADQICRLFMTAPGVGYIAALTFKSAVDDPSRFKRSKTVAAHFGLTPRRYQSGERDNPGHISKAGDTEVRSALYAAANIIMTRSTKPSTLKTWGSRLARSKGRKRALVAVARKLAVILHTMWIDGTEFCMQAQEAA

SEQ ID NO: 229872 - protein, 343 aa, unidentified
MDHFAGLDVSVKETSVCIVDDTGKIVREVKVASEPEALLAVLKNRAYHFKRIGLEAGPLSQWLFSALAEAELPVICVETRHMQAVLKAQINKTDRNDARGIAQMIRVGLYRPVHVKTLRSQKLRMLLTHRKLLQSKAIAIENDLRATLRNFGLKVGMVGTVKFEARIKELVENQPDLASLVEPLLIVRRALREQIVILHRRLLAIVRDDAVCRRLMTVPGVGPVVALTYRVTVDVPARFRNSKAVGAVFGLTPSKYQSGESERTGRISKCGDEMMRMMLYEAAQVMLTRTIKWSWLKAWGMKIARHRGTKRAIVAVARRMAVVMHRMWVDGTEFRWTREVAAV

SEQ ID NO: 229873 - protein, 327 aa, unidentified
MFFLGIDVSKAKLDCALLSAEGDKRKTKVVPNTAAGIQALMAWCAKQKAALEQLHVVLEPTGPYHEQAATALHDAGATVSMINPAQARDFARALAERTKTDGIDSYVLARYGQALRPPAWQPAPLHARPLRALLARREALAKDLQRELNRQEKSEFGRSPELVTGSIAKTVAFLREEIKRLERAIDDHIDRHPDLKEDRELLTSIPAVGPQTGNAILSIMHNRRIDSPQALAAYLGVVPVQRQSGSSLNGRPRLSKAGPARVRAALYMAAVVAVRHNPHIQALYARLLSAGKSKMAALGAAMRKLAHLCFGVLKSRTPYRSDYNLTA

SEQ ID NO: 229874 - protein, 462 aa, unidentified
MELFYILNIYDMGKKKMSLEVVNPNAAGIDVGSKSHWVAIGQDAEDIREFGVYSEDHRELCRWFSENEVTSIAMESTGTYWQTLFSALTAEGFEVILVNGRQTKNVKGKKTDIKDCQWIQKLHCLGLLSHSFLPDSTTEIIRTYSRHRQNLIRQTGQTVLKVQKYLRLMNMRLDVVVNDVVGLTGTKIITAFIAGETIGKNLAQYRHYNCRKPEEEIAKALQYNGRADYLFALKQEWETYLHIQKQIDEVDAQIKKLLEDIIDQDDNKKQHLANKKSYKRKNKNTIRGADMNQISYQYFEGIDLMEIEGVNDATIMAIISEIGLLGIKKFDSAKQFTAWLRLAPNNKISGGKVLSHHIPKGSSRLKIALRNAANAIGNLKEGHLADFFRRINYKKGRPTAINATARKLAIIIWNMLVKGQNYSPPTHYMFLDEKRRLGLVKRIQKQITKFEIKPEQLGFATN

SEQ ID NO: 229875 - protein, 349 aa, unidentified
MKIIGCDFHPSYQQIVMWDKATGEMLERALSHERKGEVRAFYAGLQGPVRVGIEASGQSQWFERLLSELGHEVWIGDAAKIRASCERKQKTDRRDAELLVKLLDEDRFPRIWVPTPAERDARQLLLHRHKLVRMRTQVKNQLQALALNQGVQRKWKLWSEAGRKQLEALPLLPWASRRRAELLVLLDQLEASIGELDGAAAEQANTRPAVRRLMTHPGVGPITALAFVLTMGPAQRFRRGKQVASYLGLIPTEHSSGGRGQRLGHISKQGNPFLRGLLVEAAQSAVRHEPEMRREYQRLAQRKCRALAKVAMARKLAVRLYWMLRADLDYARLIQGSHAGQPESFRGRV

SEQ ID NO: 229876 - protein, 353 aa, unidentified
MDTITRVGVDLAKNVIEIHAVDAAERVVARRAIARGRLLSWFANLKSCLIAMEACSAAHYWARKLGALGHEVRLIPPQFVVPYRKGGARVKNEARDAEAICEAASRPQMRFLPVKSPAQQSVLVLHRMRTGYVEERTALINRLRGLLAEFGVFFPQRINQLHKYVVDCVEDGSNELAGPAREALMRAWAQWQVLDQEIAWFDRQIAEHANQDTQAKRCMEICGVGPLTASATVATVVDARQFRNGRQLAAWIGMVPKQNSSGGKRRLGRITKQGNDYLRTLLVLGARSAIAAAPRRDDRLSRWIVQLQARVGYQKTLVAIANKHARILWAILAKGEKFDPSHAPARPRPTAGG

SEQ ID NO: 229877 - protein, 330 aa, unidentified
MTQEYIGVDLHKAFFCAYAMGPTGDRRWEGRFARTAEGVARFVARGIGPVQAVAVEASGPTWAFVDALQPTGARVCVVDPRKTKLKAGFAAKTDRLDARRLADALRRESVVSIYIPPPAIRDVREVCRGRHQLVRLRTRVAQMIRALLLRWDAGEPPGTRLYAPPARAWLAAAQLPPDADRTLRRLERLYHAIHEDAQVADAEVRRRSADDAIAVALTELVGIGPVLALTIRAEIGDIARFTRGAALACYAGLVPRVESSADRVYRGRITREGSPWLRWALIEMARHAIKRPDAVGRWARRLAVRKGLYKARVALARVLCDQVVRTWPTV

SEQ ID NO: 229878 - protein, 347 aa, unidentified
MSTVTIGMDLGDKKIQICVLDARGRKVREGSVANTAATLRKYFQRYAGAVVAMETGTHSPWISRLLASLGCQVLIGNSRKLRMIWSNPRKSDLRDAEMLARIARFDPELLCPVQHRSEQAHADLELVKARDVLVRNRRTLINHVRGAVKAFGVRVPRCSAESLPLRALPCLPEIVRPALLPVLETIQRLTDQIRDYDRRVARVSREQYPETQGLQQITGVGPLTSLAFVLTLEEPQRFEKSRSVGAYLGLTPKRDQSGETDKQLRITKAGNKYLRQLLVTCGHYILGPFGPDCDLRRYGLRIAARGGKNAKKRAVVAVARKLSVLLHRLWKTGAVYEPLRSGGPQVA

SEQ ID NO: 229879 - protein, 438 aa, unidentified
MSNKVIFNLDELFISVGIDVGADFSWMSIALPNQQFVGKPYKILHNSIDSLTTAVSKIKEAEELYSLESRIFLESTGIYHYPLFCYLRDKGFNCSVINPIITKNSTNINIRKVHNDRFDSKKAALVGLKPDLKVSLMPSDLALNCRNLCREYYDLMDNRSAYVNKLQGELRIAFPQYLGIFSKVTINTSLTLLETYTSPSAFLKADKQEIIDIIKSTARFGLTYAQNKYNAIIQAATDANQFGYIIDSNIKRIRLYISFIRKYDEEINSILESLHELVDANEDSDFVKQIHLIETFKGAGFLSAVSIMGEIGDFSAFSKPKQLFAYFGLDPAVKQSGKFEGTKVQMSKRGSAIARRVIHTLTLQSISISRNREAKNPVLREYYLKKCDSKPKLVAMGAVSHKVCNMIFAILRDNKPFKIIAPQEHIKQYNSAKCDIAA

SEQ ID NO: 229880 - protein, 330 aa, unidentified
MHVGVDVGKDSLDICYPDGTKEHVKNTRRCRTKLIKKAKAIGAIVSFEATGPYEEHLADECLASGVPAVRLDAWKTRRYAESQGMIEKTDAIDCEVIRDFAASLRPEQLRFVKPTTEGYRRLKRASSVRRNLIKAKTLVANQLESILDKDTKASVARLVDALDRQIEKMDALCAEAIRSDEKMSSLAARFEKVVGIGPVLINTMLSSCPDIGSFTAKGIAKMAGVAPIENKSCTIKKKSRTRRGRRELRSALYMAAVSACHSNHRLQPIYERFVARGMPRRVALIALARHIAVLMNYIAKYPDFNPDVDPKKAAMLALPKRGPGRPRKNP

SEQ ID NO: 229881 - protein, 443 aa, unidentified
MSLRKSVAPLTLAHPDAAGIDIGSASHFVAVPADRDEQPVREFKSFTADLYRLAQWLKDCGITAVAMESTGVYWIPLYELLDSQGFTVYLVNARHVKNVSGRKSDVLDCQWLQQLMSYGLLASAFRPSDQICVLREFSRQRQMLLASQVRHVQHMQKALTQMNIQLTQVLSDVVGVTGQAIIRAIVAGERDPHVLARLKKRQVKASEDDIAAALQGTWRHEHLFALRQALALYDAYQSQLDECDQLIQTELHKLQRHDGDPGKSQRRWPKKAMAFDLRTHLFAMCGVDLTRINGVDEMTAFKVLAEVGPDMTRFPTSKHFASWLGLCPGTRISGGKVLSSATKRSPNRAAQALRLAAAALRTSQSALGAYYRRLCARLDKPRAITAAAHKLARLIYAMLTKGTEYVDQGELYYEERYKQRVMHHLTKRAQAMGYSLTPLPETP

SEQ ID NO: 229882 - protein, 343 aa, unidentified
MVERTCIAVDLAKSVFAIAASTQPGQIREHHRLSRAQLLRFFAQRPAATVLLEACGSAHFWAREIERCGHRAVLLPPQHVRRYCPRNKTDRADAKALLEAFRNEEIRPVPVKTPAQQQLAALHRLRSAWLGTRTARINTLRGLLREQGITIPVGARHVVPRALELAGDADSDLSDALRFALFELADEIRNTERRPDELEKRLAAPAREDEQILRLRTIPGVGLLTATALAGFVGDLRRFPSGRRFASYLGLTPHERSSGAMRRLGAISKRGDTYLRMLLVHGARAVLAAAPKMKQPDPVRRWALDLAARVGHNKATVALANKLARYAWAVATRERDFASRIAA

SEQ ID NO: 229883 - protein, 393 aa, unidentified
MLFVGIDVAKNKHDCCILDSDGVVHFDNFQILNSAQGFSTLFTNICGCVPQIESHNVQIGLESTGIYGSNLENFLFSKGFSVVIFNPLSTNLYRKSQTLRKTKTDKSDAMFLAKMLISGNYQAHLPESLQLSEIKAFTRHRHRLVKQQSILKISINRILDIVFPEFSSVVSSIHQKSSYALLLELPNTEAISTCHLTKLTNLLKDSSKGHYGKSKATQIKQLAARSIGLNSQAIALELQQTIRLIANIQAEIDIVEKHIKLAMTEVSSPITTIPGIGNVLGSIIVSEIGNIARFDTPAKLLAFAGMEPSTYQSGNFTATQTPMVKRGSTYLRWAILTAARLVAMRDLTFKNFLAKKRAEGKHYNVAISHVGKKLVRVIFQLLKTNVVFVSQAN

SEQ ID NO: 229884 - protein, 369 aa, unidentified
MDDITYVGLDVHKATVCVAVAESGRGGEVRQVGVFQNRPEILCKMAAKLGRGGRRLSFSYEAGPCGYGLHRLLTACGHSCVVVAPSLIPMKSGDRVKTDRRDAMMLAKLHRAGELTAIWIPDATHEAIRDLVRARATAGRVLSKARQHLQGFLLRHDRIYRGARAWTQAYWRWLTTVRFEHPAQQIVLQDYIHAVEDAEARRDRLTRQIEEMLPSWSMAPVVAALQAMRGVALVVAVTVVAEVGDFRRFANARQLMAYLGLVPSEHSSGSTIRRSGITKAGNTLVRRVLIEGAWTYRMTARVSRKLHDRLEPLSPVIRGIAWKAQVRLCARYRRLAASGKPKVVVTTAIAREMVGFIWAIACIAQLALA

SEQ ID NO: 229885 - protein, 386 aa, unidentified
MQKLNDLSRSLIAFEPDGTLIAVIEMSLTSWLVAGILPGVERQPLKKLAVDETALLKLLHRWRDESEKAGRGIERIAVAFEAGRDGFWLARWLKARGIEAYVIHASSVAVSREHRRAKTDRLDTELLKRSFLGWLRGERDHCKMVEIPTMKDEDAKRPNREHNSLIGERSRIVNRMKATLVRLGIRGFNPKLKMASTRLDGLRTPEGEPIPPNALAELRRDMERRRLVNNQIRQIEEERLKRIDQAPCDGPHGMVRLLARVMGVGIETADMLVHEVLSRNMRDRRAVARYAGLTGSPDESGRKRREKGLARSGNARVRRGMIQLAWRFLLHQKNSALTKWFRSRTENARGTRKPMIVALARKLLIALWRLVREGIVPDGIVLRPAQ

SEQ ID NO: 229886 - protein, 378 aa, unidentified
MNAVGIDVSSRKSTVAVLRPLGEVVCLPFDVTHDIAGLASLVEKLKALDGETRVVMEHTGRYYEAVEKALHEAGLFVCAVNPLLIKEYGANSLRRVKTDKADAVKIARYALDNWADLRDFTPMDAIRYDLKTLNRQFQLASKQRTASANNLIALLEQSFPGIRKCFDSPVRSDGTQKWVDFAHSFWHVDCVRKQPFPAFCERYRKWCKRHAYLFKLSNAEEVYALAKRAVVLTPKSKVVKVLVQEAANQLSSISRSVEVYRAEMDRLAAMLPEYPVVMAMYGVGKSYGPQLMAEIGDVRRFERKQALVAFAGIDPMPNQSGDKNVRSNKSSKRGSPYLRKTLFNVIRTYLQCAPQDEPVFQFLNRKRAEGKQIGRAHV

SEQ ID NO: 229887 - protein, 361 aa, unidentified
MKKPMRHFIAEVPRRSSKVGMTIGIDLGDVWSHYCTLNEDGEVVDRGRFRTSPSGVEKWFTDLPRVRIAMEAGTHSIWISEQLQELGHEVIVANVRELRAISHSDRKSDQVDAEKLARYARLDPKILRPIAHRTVAQQEALTLIRARNLIVRLRTAAVNAVRGLAKPCGYRLPASSTLCFAKRCVAVLPPGLAQALGPVLEQIAEMTKKIKHYDRLIKRLTETEYPETQALIQVYGVGQLTALTYVLTLGSKERFQRSRDVGCYLGLRPKRSQSGDRDPQLGITKAGNIYLRTLLVECANHVLGPHGRDSTLRQWGLHLASRGGKQSRNRAIVAVARKLAVLLHRIWITQEPYIPFYQVAA

SEQ ID NO: 229888 - protein, 317 aa, unidentified
MTQDALVVGVDVGKDFLDVAFCPSGETWRVANDAEGRAELVRRLARLKLAVVAFEASGGYERPLLSALCRVGLPAARLNSFRVRKFGEALGIMAKNDRIDAGLIARFAATLPPRQTTTPDPAHEQLRELALVRRQLVDDRSRLQNQEEQTQNEMLQRFCRRRQATLAAQIVLIDKAIARMIAEDADLARKDARLRSVPGIGPTVAATLLALMPELGQITGKQVASLVGVAPFDHESGRYKGKRVIAGGRTPVRRALYMAALVAARHNPVLRQAYERLIKAGKPKKLALTALMRRLITILNAMLRNGEDWRDLAKAIA

SEQ ID NO: 229889 - protein, 448 aa, unidentified
MLLRARRSDSFSVGPLRTIVDDERLGRRRKMDVVVERCAGLDVHRDNVVATVRVPSDDRRRWLHKTRTFKATLAGLADLKEWLSGFGVTLVGMEATGVYWKTVFYALEDRFECWLLNAQHLRNVPGRKTDVKDSEWICQLVAHGLVRPSFVPPPEIRRLRDLTRLRKAQSNERTRAIQRLEKVLQDAGIKLTSVASQTYSKSARGMLEALLSGVSEPEELAELAKARMRSKIPQLREALANRFDVSHHGIMVAQLLAHIDTLEAAVGLLDEKIEAMLAPHAKVVELLCTIPGVAVRTAQVLIAECGLDMSQFPTVGHFASWAGICPGHHESAGRKKSGRTRPGPRWLTEALTESAKAAARSKGTYFAAHHAQLRGRRGEPRAIGALRHDILVAYFHIVRDEVPFRELGPDWQRKRYSPEHRARRLQRQIEALGFKVTLEEGEAAEQAA

SEQ ID NO: 229890 - protein, 411 aa, unidentified
MKVVHEICCGIDVHAKMLVACLIAANGEKKIRTFSTMTADLLQLRDWLVAAKCTHVAIESTGVYWKPVFNILEDALTVILINPEHARALRGRKTDVKDAEWLADLLRHGLLKASFIPPGEIRELRELTRYRESLVREQSGVANRVQKLLESGNIKLGQVASDALGVSGRAIIKALAQGENDPRKLAALARGKLKEKSLSLERSLEGRLTVNQRYVLGELVKRWEELEAADARVTSEIDKYVQARPKLARAREILDGIPGIGPRVAEVIIAELGITMAVFGDAAHLASWAGLCPGNKATGGKRMSGRTRKGNTYLRAALVQAAWGVTMKKNCYLSSQYFRLLKRLGRKKALVAVAHSLLVIIFHVLQRDQTYTELGGDYFDRHHVEQQREYYLRRLQMLGLKVTVEELPTAA

SEQ ID NO: 229891 - protein, 338 aa, unidentified
MKFKRISMDTSKHVFTIHGVDEQERPVLRREIRRAQVEPFFVKLASTEVVLEACAGSHHWGRVLGGMGHRVRLIPPQYVKPFVKRSKNDRNDAEAISEAASRPTMRTVPVKSVDEQAAAIIVKHRELMVNQRTQAINALRGHAAEFGIVAAKGGANVTALLALLSAEEAIPAIAKAMFEQMGQHVTDLDAKIDALERQLLEQHKANAVSKLLAAIPGVGPITAITMALNVNPANFETGRHFAAWLGLTPREHSTGGKHRMGKISKAGNERLRQLLVVGAMAVIRFAKPGSKSATAWLLQLLERRPRKVAAIALANKMARIIWAMMARGEAYRHQPVAA

SEQ ID NO: 229892 - protein, 403 aa, unidentified
MDITVSDFMKGRYNLMIYVGIDIAKLNHFAAAISSDGEILIEPFKFSNNYDGFYLLLSHLAPLDQNSIIIGLESTAHYGDNLVRFLISKGFKVCVLNPIQTSFMRKNNVRKTKTDKVDTFVIAKTLMMQDSLRFMALEDLDYIELKELGRFRQKLVKQRTRLKIQLTSYVDQAFPELQYFFKSGLHQNSVYAVLKEAPTPNAIASMHLTHLAHTLEVASHGHFGKDKARELRVLAQKSVGVNDSSLSIQITHTIEQIELLDSQLFSTELEMANLVTCLHSVIMTIPGIGVVNGGMILGEIGDIHRFSNPKKLLAFAGLDPTVYQSGNFQAHRTRMSKRGSKVLRYALMNAAHNVVKNNATFKAYYDAKRAEGRTHYNALGHCAGKLVRVIWKMLTDEVAFNLE

SEQ ID NO: 229893 - protein, 360 aa, unidentified
MSVTATHPSPDHSYYAGLDAHHAYVVVAVVDKQGTVVHQASVRTTEPARLVDTLAPYHSATHPLAVVVETCPFWPWLYDLLVPCGIAFQLAHAQELEAIAKAARKSDQRDARLLARMLAGGLIPAAYAKPPAQREQACLVRHRAALVRHRTMLANRIHSQLHAVGLTLPRERLLRLATHSWLRDTAGPLLRPEQRRLIESHWRLVRRLTRMIQRLEPAIAAAAQADPAAGLLATIPGIGPYRALLLATELMPLTRYAAEGKFVGYAGLAPITRRSADTVHHGPLPNGANRWVRGALISTVPTHLRYAPDSRLSQYYARQKARLGWQIARVATARQLARVIYHMLRTGEGWRATPAPVGRS

SEQ ID NO: 229894 - protein, 479 aa, unidentified
MSDHLIAIGCDSSKGRIDVEIRNHHGTVLHTGVFDDTPDDHAALSRLVDDLRERYSEARFLVGIESTGGMERNWLAFFRREKRWVKTMRVFKLNATAVHSFRSSQLHRAAGDAAAASDIARFLLERCARRQPAVEAESGPIVFYRTVRALSGELTATSQRLQTLLVAAQPDLVRFCRYGVPAWILALLERYPIAAMLARAKPATVDAIPHIDGERAAELVENAKRSVASLTDAATAATIRLLVARMHDTQARIDQGQADLLSIITADPQSPLAKAVELLDGIPGIAPWSAACLACEIGDPNRFAHAKAIIAWAGLDPIAEASGDERHDYGISHRGNAHIRAILFPLAMAGVLHNPVLKDFYHRLTTVNGKTHLEALVAVMAKLLRIAHAVMLSGKPFDLAHEAKRRKQADAVQSARSDTMAETPTPPPAKLNAPVCRREATRRKKAAAPGAKVRDQSPKRVPGREPQPQDPALVGQAKG

SEQ ID NO: 229895 - protein, 372 aa, unidentified
MESILYVGMDVHTSNYTLCTYSIEDDKEFGLVKFGPDHLNIVRYVKRLKEHHGQNTRIVCGYEAGGLGYSLYRLLTANNIECVILAPSTMPKAPNERKTDYRDAAKIARCLAYNSYRSVYIPDAEDEAVKEYIRMRDNTKDHIKQLKQRILALCTRWRKEFNGTKKFWTIAHMKWLQHLEFENPVAQEAFDEYVIQLNEANARLKRYDERIKKWAELPRYAEKVSKLTCFCGIKTHVALATIAEVSDFDRFPNANRFASYLGLVPGEYSSGSNVNRLGITKQGNSHIRKLLTEAAQCYARALPGKPSAELLKRQEGNDPKVIAYANKGNERLKRKFRSIAARKPKPLAVTATARELACFIWGMMTDHLEQVY

SEQ ID NO: 229896 - protein, 381 aa, unidentified
MKPETLDTIHDTPFSQCLYMALELSHGKWLLGFTIGFGQARRLRSIMARDRKALAEEIDLAKKRFNLAADIQVRSCYEAGRDGFWLHRYLAAQGIDNRVVDSASIEVNRRKRRAKTDRLDVCKLLTMLMRYHNGEQKLWSIVHVPSPEEEDQRQLHRELMALIAERTRHINCIKGLLVSQGVVFPIQTDFLCRLEAVQLWDGSKLPVGLHARLAREYERLQGGKQQIRELEHSRVEAVRTSSTPAVEQVRQLLRLKAIGMNSAWVYVMEFFSWRNFHNRREVGSLAGLTPTPYRSGESAHEQGISKAGNRRIRAMAIEIAWVWLRYQPNSQLSIWYRERFAKGNSRVRRIGIVALARRLLIALWQYLETGVIPAGACLSKP

SEQ ID NO: 229897 - protein, 439 aa, unidentified
MQVELPQYVRLIPQEMEPAMRKTGIHANTLLEVHRMYNAVGIDVSKAKSTVAVLQPGGTVLRKPFDVSHTSQSLHELSDYLGSLDGNTKIVMECTGRYHEPVVKVLSEAGLFVSVVNPHLIKNFGNNSLRKVKSDPADAKKIARYTLDNWAELRQYSGMDNTRTQLKTLNSQFSFFMKQKVAAKANLIALLDNTYPSVNKLFDSPVREDGSEKWVDYAYSFWHVDCVRRIGLKAFTERYRAFCKKHHYIFQPDKPEKLFNASKELVAVFPKEKTYKLLIQQSIQQLNPASEHVERLRKEMDELASTLPEYSTVMGIYGVGKTYGPQLIAEIGDVSRFTHREALTAFAGVDPGVDESRQHKSKSNRASKVGSARLRKTLCQIMTTLLQNAPQDDPVYRFLDKKRSQGKPYYVYMTAGANKFLRIYYGKVKECLRNLEQAE

SEQ ID NO: 229898 - protein, 461 aa, unidentified
MNRRKPADKQKRSTHRKVDWKALEIVHQDAAGIDVGGSEHWVAISPDRDSEPVRRFGCFTRDLHEMAQWLVEKRVRSVAMQSTGVYWMPVFEVLEGHGLEVYLVNAQHTKNVPGRKSDVQECQWLLKLHAFGLLNNSFQPTDEVRIAGTLWRQRGNLVAEASSAIQRIQKVLTEMNIQLSNVLTDISGVSGMTIIAAILEGERDPYELAAMVQSGVKASLEDIAKSLEGNWRKELLFVLKQHLELYQIYQQKIGDCDLESRQHLEVLNSTVDLTTQPIGPRPKGKKNSRNAPSFDLRTELYRITGIDWSQINGIDVLTAQTVITEAGADLSAFPNEKQFASWLGLCPTNEQSGGKILNRRTRKVVNRASVAFRNAASTLIRSQSYLGAQYRRLRTRLGAPKAITAMARKLACLFYRLIKHGQQYVDKGVEYYEARYREQQIRSLAKRAQKLGLQVIIPTTA

SEQ ID NO: 229899 - protein, 314 aa, unidentified
MDTTASFVGIDVAKAHLDIALGPAGATSRHPNDEAGIAAILALLAASPPALIVLEATGTLEVPLVAALSAAGLPVAVVNPLQARRFAQSTGRTAKTDALDARLLALFAERVRPEPRPLPDAAARDLADLLARRRQLIAMRTAETNRLGTAAAAAVRADLEAHIAYLTRQVGEMDRRLAAAVQASPAWRERDELLRGIPGIGPVASRTLLGELPELGTLGRRKIAALVGLAPMNRDSGTLRGRRMIVGGRAAVRSALYMAALTAVRHNPTLKAFYGRLVAAGKAKKVALAAAAHKLLTIADAILRSKRPWDPAKT

SEQ ID NO: 229900 - protein, 330 aa, unidentified
MKITNVLGIDVSKTTLDCHLYVQKSQLEPVPNNEKGYKLINKWVLKNCKNSVKGLIVVMEYTGLYTYGIERYLYEKGIAYVKRPALDIKRSLGMIRGKSDKADAQFISKYGWMRKDELKPMKPVEDSLLQIQQLMTYRDKVVADKASYEGRIKELHGFMGNNLHSLIKESTDYLMEVMEAEIKEIEQEIKDLIKKDKAIDKNYQLASSVIGIGFATAVHFVIATENFTRFSDARKLICYCGVAPFKHESGSSIRGKTRVSHLANKKLKTLLTMAAICAVRFDPVLKQKYEQKLKEGKPKMSVYNIIRAKLIERIFAVVKRQTKYEIRMAA

SEQ ID NO: 229901 - protein, 453 aa, unidentified
MTKHKTGDHPDLKLVNLQAAAIDIGSTMHMAAVNPDADIMPVRAFGTFTQDLHDLADWFRSCGVTSVAMESTGVYWIPAFEILEAHGFEVILVNARYAKNVPGRKTDVSDAGWLRQLHSYGLLRGSFRPEAEITTLRAYMRQRERLTEYAAAHIQHMQKALMEMNLQLHHVVSDITGATGMRIIRAIVAGERDPEVLAAHRDLRCKASTETIKAALVGNDREEHVFALTQSLELYDFYKAQIEVCDRRLEAAVGALTVRADDDLAPLPKARIRSRQQNAPSFDVRAALYGVLGTDLTQVHGLGPSLGLKLVAECGTDLCAWKSAKHFTSWLCLAPGNKISGGKLLSSRTRRSSNRAAALLRLAAVTIGRTDTALGAFYRRLSSRIGKQKAVTATARKIAVLFYNAVRHGMTYQDQGAAAYDERHRQRVLSNLQRRARILGYALAPMPEQQAVS

SEQ ID NO: 229902 - protein, 412 aa, unidentified
METVVERPSALDVHKEQVTACVRVPGKGRSREQHVAEFPTTVAGLLTLRDWLAAFGVEQVVMEATGVFWKPVWAILEDEFDCVLVNARHVKQVPGRKTDVKDAEWLCQLAEAGLLRASFVPPKPIRALRNLTRYRKTQIQERAREANRLHKALEDTGIKLDCVATDILGKSGRAMLDALVSGTRDPEILAELAKGRLRAKIAALKEALEGRFDHLHAVWIGAILAHLDFLDEQIANLTEAIGEQIAPFEKAVELLCTIHGVQRRTAEVIIAEIGVDMSIFPTAKQLASWAGQCPGNDQSAGRRRSGKTRKGSKWLDWALEEAAMAAIRTNDSYLAAQYARLRPRRGHKKALGAVKHSILCICWHMLSTGELYTDLGGDYFRKRDPERITKRLIAQLESLGHKVTLEELPQAA

SEQ ID NO: 229903 - protein, 424 aa, unidentified
MKVTYKTCCGVDVHKSFLVATIITTTGGIEPSYQKKRYSTFNNSILEFKQWLLDNDCHELCMESTGKYWIPVFNLLEDEINVTIANPKWVKAVKGNKDDTKDSKWIGDLFRLGLVKGSYIPCKKIRILREFTRYRYKIVSCRSSEKNRYQNALTVCNVALDSVVSDIFGKSSTSIIDYLLEQSGNSINHKEIASKLLKSLKSKEDAVIESIEGYQMTDSQKYRMHLVRAHMDYITAEINDVDREIEKLISSDPDFENAIQFLMTIPGVKRDSAITVISEIGINMTQFSSSKRLCCWAGLTPGSNESGGKKKSVRVTRAGVYLKPALVQCAHAAVKSEKFPYYKKKYESLMKRRGKKRAIVAIARMILTAIYQMLSTGESWNPSDLYKIDIPEALLEKQKAKAIKQAMKLLQREGLYPPPEPIAS

SEQ ID NO: 229904 - protein, 352 aa, unidentified
MRNKAMSESDARSIFVGVDVHVASWHVTVRTREVVLVRSTIGGRWAELRKVLSRWRPDQAVVIYEAGFSGFWLYDEVVGWGARCIVVPPSRIPVESGNRIKTDRRDSAKLAQLAATGQAPAVWVPSMAQRQEREVLRERRRLVRQGRQVQCQIKAILHCYGIDVPSRPGRWSQEYESRLWRLRFASASMQASFERLLARHQFLRHQTADQTKLIRELAREVSYQEKVTWLTSLPGIGVLTAMELLTELGDMTRFARAEEVAAYVGLTPSEYSSGASVHRGHISRCGKAAVRSRLVEASWIAIRFDQELRAVYERIRARQGGKRAIVAVARRLLLRVRRVLLEGRCYVPAIPV

SEQ ID NO: 229905 - protein, 392 aa, unidentified
MSQHFRFDASRSLTALEQDSTIVAVIEMSQTKWLVAALVPGVERQPLKKFDAQEEMLLKLLHRWHCEAGQAGRNIKRIVVAFEAGRDGFWLARWLRARDVEAYVIHPTSIAVSREHRRAKTDRLDTELLMRVFLGWLRGEKRHCSMVAIPTIEEEDARRPNRERQNLVTEQTRIINQIKAIFARFGLRTLRPTMRKLAEGLEDLRTAEGTSLPQNTLSELRRHLARLRFVRDQIRAVEQERLRKLAVAPAAETKSPDAMVRLIARVFGAGIETADMLVNEIFSRHWRDRKAVARYAGLTGSPDESGSRRRERGLARAGNVRVRCGMIQLAWRFVRFQKNSALAQWFAARTADGRASTRKTMIVALARKLLIALWRLVTRGEVPQGIVLRPAS

SEQ ID NO: 229906 - protein, 364 aa, unidentified
MMRIRKVAYRPVKDKRSTAVGVQGLTERFNHYVALDWAERVMALAHTKDPRKKPQAFARPADLKELRAYLSALPGRVILTFEETTSAQWLYLELCDRVERIVICDPYHNRLLLQGPKTDKIDAAKLCTLLCAGLLKEVFHTSDKLYELRRLVSGYEDLVRLGVGALNQRDALRRAAGPSKQAAGRFAPFVREHLERTIELYATMKPEYEKKFAALCRQYPLLRHQMELPGIGTIGAVKILAAVVDAHRFARAAQYLSYCGLVKHQKFSGGRSYGKRQARYNRTLKCVYKMAVHAALHGENPVHAYYEALLARGLAEHNARNACARYLARVSYGMLKSGEHYHPERWRENQESATTEAHQAKSTG

SEQ ID NO: 229907 - protein, 399 aa, unidentified
MPIMQPDSLNVIHARAAGLDVHKMQITATVRVARAGEDAETFTEVFSALPSGLVALCRWLDGHRVSAAVMEATGVYWETVFDALDSAGIEALVVHAQHVKQIKGRKTDVADSVWLARICQFGLCRASFVPDMQFRDLRKLSRQRRKVVQLRSVLRTRVHQILDSAGVRVGGVLSDLFGVNGQRILKGLAEGRSREDILASLSHHVRSRAELLCDALSAHLSAQARFILQDQLQAFEQARQRIATYDALIRQSLEPYRDRIDLLCTVPGIDESSACAGLCSGNNQSAGKKRSGKTRKGNTFLRSLLIECAHGAARTRDCQFNGYHKALTVRRGYKRATVATAHKLLRTVYYMLRNREVYRDPQTDYEKLMVKRNAPRWIRMLKKYGLDPATGSAAPPRAA

SEQ ID NO: 229908 - protein, 372 aa, unidentified
MSQDSITWVGLDAHKNSNKVAAFFPERPEPVEWQEVTTVEAVRRLARKLRREAPGEVRCCYEAGPTGYALQRQLRAEGIACTVVAPSLTPVKPGVRIKTDRRDARKLAELFRAGLLTEVHPPSESDEALRDLCRCRDDVRVDLLRARHRLSKFLLRRHCIYRQTKHHWGSRHVAWLEQLRFDDAMSQATFDSYFLAVQQLEERQRQLDARLAEFGGQEPYREPVAWLRCFKGIDTVTAVCLVAELHDFRRFRSPRQLMAYVGLVPSESSSGERERRGSITKSGNRHVRRLLVEAAWHHRHRPALSAPLRARREGQPARVLAIADRAQERLSARYRRMSQAGKVHPKTIVAMARELAGYLWAVLHPAAAPTRG

SEQ ID NO: 229909 - protein, 350 aa, unidentified
MKIIGCDFHTRYQQIAMMDEATGELIERRLDHENGEAQAFYRDLQGPVRVGIEATGPIRWFERLLAELGHELWIGDSAKIRASEIRKQKTDERDALLILDLLLAKRFPKIWVPTPAERDLRQLLWHRHKLVCLRTMLGNQLHALALSEGLCRKKKLFTKKGRVELLHLGLGPWASRRREELLKLLDQLEPAIAELDRAVMEQAQRREDAVLLMTHPGIGPVTSLAFVLAIGPITRFARSKKIASYLGLNPSEESSGGRRRLGAISKQGNTMVRWLLIEAVSAAVRKDPALRQDYQRLKFRRGHAVAKVAIARKLAVRMYWMLRSGAEYAQLVRRQGSPGATLMDASSSLG

SEQ ID NO: 229910 - protein, 411 aa, unidentified
MDVVHERAAGIDISKRDAKVAVRVPGRRLGSFTTTVRTFGATTAQILALVDYLLDQRVTTVVMEATSDYWKPFYYVMEDKLPVMLVNAKHARNIPGRKSDVSDAAWLAQLGAHGLLRASFIPAEPVRHLRDLTRARSMAARDRVRIVQRLEKFLESSGIKLSAVATDLTGVSARAMLEALIAGERDPKVLADLAKRTLRHKIPALVEALQGRFTEHHAFMVSQYLAQLDTQQATIEALTARIETVIAPFAQARDLLVTIPGISQMVADVIIAETGADMAVFPTPGHLASWAGVCPGMNESAGRVKSVHTRHGNAHLKAALGVAAMSASRTRNTYLAARYRRIATRRGPVLAVVAIERTILIAVWNMLTNRTTFVDLGGDYYTRRDPMRAKHTAIRQLEALGYQVTVQPAVA

SEQ ID NO: 229911 - protein, 389 aa, unidentified
MKKNTTTRKSPKKALAKAQSKQIRQLAAKQKLYVGIDLGDQTSRYCILDEGANVVSEGQVPTTKAGLDSLFAKMPASRIAMEVGTHSPWVSRHLEAMGHEVIVANARNVKLITQSVRKNDRIDARQLARLARADPKLLSPIRHRGERAQLDLAVIRARAELMEARTMLINSARGLVKPLGERLKKCDADQVRVGLGEGLSEGAQAVIVPLLKAVEGISEQIGKYDEQIAEMGKRYPEKKLLEQVYGVGPLIALTFLLTIEDAGRFAHSREVGPYLGLTPKQRDSGESQPELGISKAGDKLLRSLLVQGAHCILRKRAPESDLREWGMGKMGKGGKRAKKRAIVAVARKLAVLLHHLWATGEVYDAHYNRKAAEAAAAKAKGKSKGKVAA

SEQ ID NO: 229912 - protein, 355 aa, unidentified
MDSTKYIGMDVHKETVSLAVMNSAGKLVMESIIETKTATILQFIQGLSGNLHVTFEEGTWAAWLYDLLKPYVTKIVVCDPRRNALLKEGNKSDKVDARKLVELLRAGLLRPVYHGENGLRTLKELSRSYLTISKDLTRVMNRLKALYRGWGISCEGATVYAPHHRSEWLGKITEAGVRRRAEFFYQQLDALQALRQQVRRDLLAESRKHSARKLLRQIPSIGPIRAALLMALIQTPHRFRTKRQLWAYSGLAIEMHDSAQYRYVAGQLQRSKKPQQLRGLNRNHNHDLKAIFKGAATKASSGAGPFHDFYEALLTKGMRPSMARLTLARKIAAITLIVWKKGAHFDAEQLKPQAA

SEQ ID NO: 229913 - protein, 405 aa, unidentified
MTPTRRRVTGGFDTHVDTNVAAVLDTVTLRTLARATFPTTAVGHQAALEWMRAHGALDAVGVESTGTYGAGLARHLTAAGVKVIEVNRPEKPARSLDGKDDFVDAEAAARAVLSGRASAIPKSGDGPVEAIRSLETAHESAAHDRVEAINQFKSMMFRAPNQFRDVFSTKTFRHQLNAAVRFRTSYDDLVEQELRVALKMLAQRIRFLEAQIADIEARLRPIIAEHFPALLGLHGVGPHSAAQLLIAAGDNAHRLHSEAAFAKLCGSCPRPASSGKTVRFRLDRGGSRNANRALYRIVIVRMRHDDNTKRYVARRLAEGKTKAEIIRCLKRFVAREVFAAIINPPDNIPTGADLRAARDAAGVTLTALAVSLSIAPTNISRLERGIDHHTTRVHQALETITAMTT

SEQ ID NO: 229914 - protein, 345 aa, unidentified
MIPAPDDLIIGWDRADQKADLCLIDLRTGQRRRAVIATAPEALWEWLRELRQHHPTARVGLCLEQPAVHLVPFLEAYDWITLHPINPINLQKYREAFVTSRAKDDTKDAEYLADLLLTHHAKLPRWSPEDSATRSVQQLVVHRRAVVDERTGLSNRLIALLKQYFPQALTLCGQDLWRPLATAFLLKWPSLQTVQKAKPATLKAFYYRHGSRSAKLLEQRLALIEKAVPVTDETAGIGSFALRVQRLARQLQAVVRTIAEFDRQIAAAYAAHPDHGIFASLPGAGPVLGPRLLASLGADRERFAGSAAPLQCYTGVAPVTKRSGGSGRIHRRYCCPKFHRQSFHE

SEQ ID NO: 229915 - protein, 405 aa, unidentified
MERVIERCAGLDVHKKTVAACVRVRGTQHVRTFGTTATELLVLRDWLFAHEVTHVAMESTGVYWKPIFYVLEDAFTCVLSNAAQIAQVPGRKTDVKDCMWIAQLLEHGLIRASFVPPAPIRELRDLTRYRRALIEERTREANRLHKVLEDAGIKLASVASDVLGVSGRAILAALIEGTTDPMVLAELARGVLRKKLPALRHALMGRFREHHAFLVAQILAHLDYLDELIATVSGQVEVAIAPFADELARLDTIPGINQRTAEAVIAEIGVDMTVFPSARHLASWAGLCPGNNESAGKHRPAHARKGNRWLRSALTEAALAGAVRSKKGALAARYRRVMPHRGHKKAVVAVAHAILVTAYHLLARQVTYTDPGADYYERRHADRVRQRAVQTLEHQGYRVSLEPAA

SEQ ID NO: 229916 - protein, 351 aa, unidentified
MRTSQNTAETINTIGIDVGKNTFHLVGLDKRGAIVLQQKVTRHQLGRRLSNIPRCLIGMETCSGTHFIARQLAALGHDVRLIPAQYVKPFLKGHKNDYRDAEAIAEAVQRPTMHFVSIKTPEQMDLLALHRVRSRLVRQRTGVANQIRGFLLERGITVRQGFMPLRKALPEILSSKSDALSPRMINLIGELIQDWRRLDDRIASVSTEIEAMAKRDESCQRLMSVPGVGPIVSSAVVAAIGNGTGFKQGRDFAAWLGLIPKQESTGDRTILGKISKRGNKYARTLFVQAAHVVLERRPRTARQGLWPWIEQASKRLHRNMLAIALANKLARIAWAVLARGHAYQPRIIANA

SEQ ID NO: 229917 - protein, 445 aa, unidentified
MAHANRLSRGDVRRNARLDRLRGVVSRDRAVLAVDLADDKQVVVICDHDSRVLARRTWRCRPWQLDKALGWGLAVACRQGFAGVVVACEPTGHRWRVVVEHAHRLGLEAVCVQPLLVRRAREAEDFTRDKSDDKDALLIARLTTQLHCYLPEQPTAAWARLRHLGNRRVEQLTHTTAAQQRLRDLLECGWPAALEVARHPLDSLTWRAAMTVGRCDPVYIRRLGLARFARAVARELPRWGGQRRHLGVLRALYAATGDDRGVTAQRAGALERAALVLADFKQALAALAEVEARMAKVLAELGLAELVTSIPGLSVVGAAAILAETGDPTRFDDAKAVVKHAGLCPRDNASGSFAGKTTISGRGRPLLRLAAWRAVWGALPHNPVFAARYTHLTSRQRNRLSDGQARTAVAAALLRQLWVVCVNRIPWEPTVASGTTGKEVTDPAA

SEQ ID NO: 229918 - protein, 437 aa, unidentified
MTVTMIRFVGLDVHKRVVEACIVDAAGKVVLRERFALNRHTLELFATKILRPTDRVALEATTNCWAVAERLRPHVAGVLVSNPMATKAIAQAKVKTDKVDAYVLAQLLRCDFLPEVWQPDVATRRLRELTDRRSALVGQRTRMRNRIHSVLATRLIEPPLRLFSGEGLQWLGTVELDEQARLLIDSDLRQLESLEQEIDAVDAELARRGHQSDEVKLLMSLPGVDVTTAQAVLAAWGDPRRFPDGDHAASYLGLVPSTRQSANQCYHGPITKRGNSQARWMLIEAAQHLDKHPGPLGHFFRRLMKKKNRNVAVVAAARKLAAIGWQMLVAGEPYRYALPQTTESKLRQLRIRATGRRRRGGVAKGQKAQAILPGGGRTLRSRDQVAEAEGLPARTAPPAGERRVIAGTQTGPFVEGLGRPKIVPRTPAAGPRTNQAS

SEQ ID NO: 229919 - protein, 345 aa, unidentified
MKIVGCDLHTRYQQIAMLEEETGELIERRLEHASGQARGFYAGLEAPVRVGIEATGHTRWFEGMLAELGHELWIGDAAQIRASMVRKQKTDVRDAAHLLELLLSGRFPRLWRPTMAERDLRQLVWHRQKLVWMRTAVANQLHALAMGEGVCRKKKLFTQKGRIELAGLKLDFWASRRRQELLRLHDQLDASLGEFDQAVAEQAEQNPAAVLLMTHPGVGPVTSLAFVLTLGSVERFARSKQVVSYLGLNPREHSSGGRQRLGSISKQGNPMMRSLLVEAGHTAARLDQELRQDYQRLKLRRGGGVAKIAIARKLAVRMYWMLRSQASYAQLVRTQGSPRATLVEQ

SEQ ID NO: 229920 - protein, 426 aa, unidentified
MLSGGSYLSFKIFKFNCCGLDVHKTWIYACIGITDSNNRTEYKQARFSSFSKGLHQLCVWLAKYNCNDVCMESTGKYWIPVFNILEQHKIRVTLSHPKYTKPMKGNKTDRKDAKWICDLYMCGMVKPSFIPPADIRELRDLVRYRFKLTCMITGEKNRAQNCLTVSNLKLDDVFSDVFGKSSRSITEQILQHPGEKFDVSPFVDSRCKTPIEEIQAAVDGNISKEQDVKLRQCLDHIDELQKHISEVEQEILRLSDKYEAALNLIRTVPGFDKNPMTAIQVLSEIGGDMSVFPTAKHLVSWAGCCPRNDKSDRKIKSTRISCAGSYFKPVLVQIANALIKSKKHFEFTTRYKRIKTRRGHKKAIIARCRMILTAIWHILTDLKPYTSDGFLESRPVKKEKVLTTSQALNLLRQRGYLIKDEPSPVS

SEQ ID NO: 229921 - protein, 423 aa, unidentified
MDVLYERVAGLDVHKDTVVACVRIMVDGKTTRECRTFATTTEQLVALRAWLEECRCTHVAMEATGVYWMPVFRLLDADKFALIVANAAHIKNVPGRKTDMNDAMWIADLLACGLIQASFVPNEEVQELRALTRTRKQLVREQTRHVQRIEKTLAEANIKLSSVISDIMGASGRRMIQAMIDGVRQPNKLAELAGKQIKASPKELYDALHGRLTDHHRFLLALHLKQWDSIDETIRKLDGELDQRIGRMATAAEDRKIPFRALIELLTTVPGVSAVAAPAILSEIGPDMSRFPTAGHLVAWAGLCPGHNESAGKRKSSRLRKGAPWLKTMLVQCAWAAKRTKDSYYRAQFFRLQAKRGPQKAICAVAASILTAIYHILKHGTEHHDLGSAHFDRRPVEVKASRLVAHLKKLGFNVQLQPIAEAA

SEQ ID NO: 229922 - protein, 365 aa, unidentified
MQKISTIEKIGENVFQGQPTIGLDLGDRSSSYCVLDEAGKILLEQKLPTTPEAMKKTFGRMPRSRIAMETGTHSPWASRLLTALGHEVIVGHAQKVRLITKSRRKDDRLDARTLARLARIDPELLSPVKHRSAQAQLHLTEIRARAGLVSARTALVNAARGLVKSYGERLRKCHTQKVGREMTGELSVGLRDALEPLLREVESLNERTKEYDRRIEKMSKEKYPETALLKQVKGVGDLIATAYVLTIEDPHRFRKSRDAGCFVGLQPGRRNSGESEPQMHISKEGDEYLRTLLVQGAHYILGPFGEDSDLRRWGQKLSARGGKNGKKRAVVAVARKLAVLLHRLWVSGEAYEPLRNSQKAMSAAA

SEQ ID NO: 229923 - protein, 350 aa, unidentified
MLIIGCDYHPGLQQIAFVDTDSGELEEQRLRHREEAEKFYRDLAARGVPVRVGMEASGQARWFERLVAELNFELWIGDAAEIRAKRVRKKKTDREDARHILQLLLEDRFPRIWVPSWDNRDVRQLLWHRHRMVQMRTRIMNQLQAVALNEGLRCKKRLWRENGRKQLEAFALAPWASRRRHDLWELLDRLNPTIVELTQMIEQEVEKYPAAQRLMTHPGVGALTALAFVLVIGEPERFQCGKQIAAYLGLVPEEDSSGERRRLGHISKQGSAILRFFLVEAAQVTVRSDGEWRNKFFHLAMRRGRKIAKVAMARRLAVRLYWMWRQQWDYEQLKNFGPHVGQPGTGVGVQ

SEQ ID NO: 229924 - protein, 358 aa, unidentified
MAKASMAHRQATRVIVGVDTHRDVHVARAKDTLGRALGEMAIPASAKGYRALLSWSRGLGEIEAFGVEGTGCYGAGLARHLRSEGEVVIEVIRPNRQARRRRGKSDPADAEAAASAVLSGEASAIPKAGDATVEMIRALRVARSTANRARTQAINALHALVVTAPEELREDLRGLPGPRLVRTCASFRPGELIDPLSATKTALRSLARRHEALTAEVRGLGRELRGLTVKACPQLLDIYGTGPDTAGALLLAAGDNAERLRSEAAFAKLCGVSPVEASSGMTTRHRLNRGGDPHANAALYRIVMVRLRQRHPPTIDYVSRRTAEGKSRREIVRCLKRYVAREVYRALTEVNGAASSAA

SEQ ID NO: 229925 - protein, 436 aa, unidentified
MICLRAPRVGAMDQARTKGVALEIVYPRVAGIDVGKKIVAVAVRTPGDRPGQRHQQLRKYKTFYPMLREMVGWLVAQGVTQVAMEATGVYWRPVFHALCEAEQLEVLLVNARHVKNVPGRKTDAKDAEWLAELCEVGLLRGSFIPPAEIAAVRELTRYRKKLTEARTSELQRLCKVLEDGGVKIDSVASSITTVSARAMVEALIAGERDARVLADLARGVMRKKIPDLAMALQGRFGAHHALLARMHLEHVDQLSGMIERLDGEIDQVVAPFSEQVGLLRTIPGIGERTAQVLIGEIGVDMSRFPTADHLASWAGLCPGNNESAGKHQRARTRKGNREVREALVEAAWAAGRTGTYLGARFRRLHRRFGKQGGSKAAVAIAHNLLVIVWFVLHDGAGYRDLGADYFTRHDNPDAKKRRLIRELQTLGYTVDLTPAA

SEQ ID NO: 229926 - protein, 343 aa, unidentified
MLKVTIVGVDLAKNVFQVHGAAEDGSVVFRKKLSRPLFERFMAGHPPCTVAMEACAGAHHWARKLSYHGHQVRLVAPQYVKPFLKRQKNDAADAEAIVEAALRPTMRFVEPKSVDQQARAVAFRVREQLVRQRTEAINALRAYLYEFGHIAPEGIAHLPSLAKIVKDERTDLPDLVRDLCRRALMRIEELTEHLGELASKIAAMSRESALPRRLQTMPGIGPITALAIETFAPPMHLFRRGRDFAAWVGLVPRQHSSGGKQRLGKTSKSGQHDIRRLLIIGAVSVIRAVSRKGALQHPWLAQLRARKPTMVVAFALANKMARAIWAMLTRGEDYRAPALVSAA

SEQ ID NO: 229927 - protein, 442 aa, unidentified
MAMRKREEEVVVFPNAAGIDVGASSHWVAVPRHASDEPVREFGAMTDELKALADWLLECGMDTVALESTGVYWIPLYDVLERRGLTVWLVDARQMKYVPGRKSDVQDCQWLQKLMSLGLLRAAWRPREEVCVVRAVVRQREVLLVEQSSWVQRMQKALVQMNIQLTEVLTDVMGMTGQAIIRDIVAGQRDPAVLAKHRNQRVKASAASVQRALTGTWREEHVFVLEQALAMYDSLAQRLTECDAKLQALLAPLGRHDVKLAGPAKRAGKNTPGFDLRTALARWAGVDLTRINGLAVTSVLTVLSEIGPDLSRFANVKHFCSWLGLCPGTKISGGKVLSARTRRSTNRVRQALKLATMSLSRNGSALGAFYRRLCARMDKPRANTAVAHKLARLIYFMLTRGEQFVDRGQQHYEEHQRQRSIAALRRRAALLGFAITPTAAAA

SEQ ID NO: 229928 - protein, 352 aa, unidentified
MNATTVAVDLAKNVFELAVADEQWRVAERHRLTRTQFERWFNNREVKLVVMEACSSAHHWGRVLRARGIEVRLLPPQYVRAYVKRNKTDAADAAALLEAARAADIKPVAVKSVEQQALQALHRTRSGWMASRTGRINMLRGFCREFGLVVPEGAARGLAQIARFLADERSGLPGMLRGSMRLLLEEIRLMEARIQQLELDLVELAQQSPACQVLQSVPGIGLLTSTAMVAAVGDPRSFDSGRRYASFLGLTPREFSSGGHRYLGRISKRGDRYIRMLLTHGARSVLRAATVARRCGRQLDRLRNWALAVQARTNHNKATCALANKLARIAWAVWVKHEKYQTEPAFTAQPGA

SEQ ID NO: 229929 - protein, 375 aa, unidentified
MRQDRAGEVIASYYGIDLHKDQITWHCIHKTGNGETARENGRISTDRILEVLVPMLSVNDSYLIVEASGSSFFFYSLVESHCKKALVVNPVAFRELYMTGKKTDRIDAKKLAERLKYHIECGDTESGFPEVFVPDAEIVKIRKMVTAYELVVKQGTQIKNQAKSVFRSKLMSVAVDIMEKGLEDALKDKRIDEADRSILIMLKRIYDTLMEEKEEIKKQILLLGSFRFREEVKLLMSIPGISLMSATVFMADICTVERFRSEKKMTSYLASVGTVDSSGGITRNGGLSRRGRRTSYRYILQGLEHIVNGNKDFQKFKERHALTRSNKVRAAIVRKTFVSMYFMLKNKEAYRYLNEAIYARKIRDLKKYGIDFKCA

SEQ ID NO: 229930 - protein, 409 aa, unidentified
MDIVPIYKRVIGLDVHQAQITGCAITEQPDGSITYERREFGGFKRDRKALAQWARAICPDVVVMESTGIYWKSPYAALEGVGIVAWVVNARHVKAVPGRKTDVADAQWLASLARAGLLRASFIAKADLRSLRHIARHRQKLGGMLASEKNRLHKLLTDAGIRLGVVVSDLNGQSARAMVKALIAGKSVPDVLNLASKRLRASREDIFEALQAEEITPAHRFVLTEIMAHIEELEARMARFDAQLLRSLVDAGYGVPLRLLQTLPGIDLMGAAMLLVEIGGDMSVFGSAQRLASWVGMCPGNNESAGKRKSGRIRKGNAWVRRLLCEFAQAAGRSRCALKDKFQALNVRKGHKRSIVALGHKMLRTIYAMLSKNTHYVDKTVDYEALMVARNAPRWLQMLVKHGFVPAPA

SEQ ID NO: 229931 - protein, 364 aa, unidentified
MDPPLKDGVIMCQHRISIFKKRRRSMKDIKILGVDIAKDVFQLCGIDEWGKVIYTRRVKRAQYVSTVASLKVGCVVMEACGGANHWYRTFMGMGIPTQLISPQHVKPYVKSNKNDRNDAQAIAEAASRASMRFVRGKTVEQQDVQALLKIRDRLVKSRTALINEIRGLLQEYGLTMARGAKRFYEELPLILASEAVGLTPRMKRVLNCLYTELLNRDEAIGDYEEELKAVAKANEDCQRVQSIPGVGYLTALSVYASVGDIHQFHRSRQLSAFIGLVPRQHSSGNKEVLLGISKRGNVMLRTLLIHGARALLRHVKNKTDKKSLWLKALIERRGMNRACVALANKNAPIIWALLTRQETYRCGA

SEQ ID NO: 229932 - protein, 412 aa, unidentified
MGQAVKAWHPSGPLKHGTKGVCPMSNRNDQSKKSFTAFDQGTTLLAVVELSRNFWLVAGIVPGIERQPSKKLAADENKLLTLVRQWQQRAVKAGGEIKRIVVAFEAGRDGFWLARWLRARGIEAYVIHATSIAVSREHRRAKTDRLDTEHLKRVVLGWLRGEPDHCRMVAIPTIEEEDAKRPNRERETLVRECTRIVNRMKACLARFGVRGLNLTLRKAADQLETLVTPEGMRLPPLTLAEMLRDIARLRLLREQIRIIEKARVQRLKAAPVTRANMMVYLIARVVGIGIETADMLVHEILSRKLRDRRAVARYAGLTGSPDESGNRRREKGLARAGNARVRRGMIQLAWRFLRSHPGSALAQWYNKRAADGRGSIRKTMIVALARKLLIVLWRMVTTGEVPADIKLRPATA

SEQ ID NO: 229933 - protein, 310 aa, unidentified
MERIFVGLDVSKDRLDVHVRPTDERFEAAYDEAGVATLVSRLAGLRPTLIVLEATGGYESAVAAALAHAGLPVAVVNPRQVRQFALATGQLAKTDRLDARANARFAELVQPAARPLATEQAQALGELVARRRQLVEMLGAEQNRHRQARGRGLQQRIRAHVTWLTHAIAELDEEIARLVRASPVWRETEDLLTSAPGIGDIAAHALIAELPELGQLTRRRIAALVGLAPWNRDSGRWRGRRMIGGGRPAVRRALFMPTMVAIRHNPTIHALYRRLTAAGRPKKVAVIAAMRKLLTILNAMLRDRRPWQPA

SEQ ID NO: 229934 - protein, 428 aa, unidentified
MVEVNRSRIERFRQFKREIRGSEEYLVVGIDIAKEKHHAFFGTATGKTLLRRLIFDNHREGFEKLLIHVEAIKVQHGLKEVVFGWEPTANYHKPLGEYLIRKGYEVVLVGGVAVKKNRELLDNRWDKHDTKDAANVADLISQGKCLFYEYPSLALRELRDLLSLKRRLKKQEHGYQVRIRNHLLAQYFPEMDVYYEQSQVGSLGIVKWCLSPSKISEMGFDGFVRLVSSRRVGIVQERRLRLIWEKARGSIGCEVGEAVAFGASLMVDGLRQIREALKATEAKIEEVCKGFSEYECLLSIPGFGPDVSSKVLGAIGDPFRFQNGRQVLKLAGYDLSADRSGKESEQALPVISKKGKADLRYALYQAAHIASTKHSGFMTYYTDKLRGRQREQGIQTKMKVKLAAKLLIIAWTLMKRKEYFDPSYLDLA

SEQ ID NO: 229935 - protein, 353 aa, unidentified
MKTTYPIIIGIDTHKATHVAVAINTQGSRLAALSIPTNPKGYLELERWARSLGEVLAFGIEGTGSYGAGLSRSLLAQGHNVVEVTRPNRQLRYTQGKTDSLDAEGAARSVLSGQATARPKTQTGSSEMIRHLKIARDTAVKSRSQAMVTLKTLIINAPADLRDALDHIRGKIALIRHIAAFRPGDIDSPLASAKAAMRALARRWLWLHEEIIEHDKALERLVTQRAPELMASHGIATLTVAEMLILVGDDPTRIRSEAAFAKLCGVCPIPASSGKTHRFRLNRGGNRQANAALYRVAIVRMRNHEPTLAYVKKRTKDGKSKSEIIRCLKRYIVREIYRQLCVPKSPPKAALRI

SEQ ID NO: 229936 - protein, 361 aa, unidentified
MTGIVTYAGLDVHARSMHAAAIDVATGELLRARFGPGVEEPVAWLAGLPGPVRACYEAGPTGFGLYRAATAAGVSVEVIAPGKTPRGPSDGVKTDRKDAEFLARLLLAGSLTTVVVPPVEIEAARELMRAHDACRRDLMTARHRVSKMLLRHGRVYPEPSTWTVAHRRWLARQQFDETVSNLVFADLIACVDGLSSRKTAIAERLSRLAQDEAWWPTVARLRCFRGVDTLTAFALHLELGGDWQRFARANTLSAWLGLTPSLHQSGESSHQGSITKTGSGFARRLLVEAAWHYGRDPRIGVTLKNRQQGQPEHVLQIANRAQRRLHRVYHQMRGRGKPHNVTVVACARELACFLWAAATAD

SEQ ID NO: 229937 - protein, 438 aa, unidentified
MEEAGDEPLFCERAAGIDIGKQLVVVTIRVPSDTRRGGRQQETREFGTTRRQLLEMADWLRCWQVERAGMEATSDYWKPVYFLLEREGFDCLLYQASQVKALPGRPKTDRLDSAWLARITEQGSLAGSFVPSEDIRRLRTHTRYRRRLIQARTAEKARCEKLLEDGHLKLSSVISDIHGVSGRDMLRAIIAGERDPEVLAQMARTRMRRKIAQLREALDCSFFTPDHAFVLQMMLDNIDPYTAQIAVLDERIAILCEPYQRQVAQLDGIPGFGVTNAQDLIGEIGVDMAVFPTAGHLCSWARLAPGVRESAGRRKGKNATGRGNPYIGGALGEAAAGAGRTQTFLAAKYRRLCTRMPKKKAQGVIMRDQLVIAHALLSDPEAEYRDLGTGYYEQRERTRRRASSHVRSLERLGYKVTIERLAPEADPETGELITRTAV

SEQ ID NO: 229938 - protein, 412 aa, unidentified
MDVFCGIDWAEGHHDVALAGRDGTIVARRRVGDDAAGLGELLELLAEHGDSPQAPVPVAIETPRGLLVASLRATGRRVYVINPLAVARYRDRHSAAGAKSDKLDAAVLAGILRTDMHAHRPLPADSELAQAIAVLGRAQQDAVWDRVQAQNKLRSHLREYYPGFLAAFDGQRGGIARPEARAILAAAPAPADATRLTLARLRSLLRKAGRQRGIEREAARLHAAFLKEQMRQLPLVEQAMARQALALLRQLDAACQSADDLQAAAQESFGQHPDAGIITSFPGIASLTGARVLAETGDDRSRFAHAKGLKAYAGAAPVTRASGKKRSVTRRTVKNDRLAAAGYTWAFAALTASPGARAHYDRRKDAGDRHAAAQRNLFNRLLGCLWHCLQTGQHYNEETAFPTSTRKLPQAA

SEQ ID NO: 229939 - protein, 343 aa, unidentified
MAKDTLVAVDLAKSVFEVAVSHRPGQVATQRRYSRQQFPLALAQLPPATVVMEACGSAHFWARRIRSLGHEAVLLPPHAVRPYVRRNKTDRTDTKGMLEAYRNEEIRHVPVKSVAQQTLASLHRVRSGWLGERTARINTLRGLLREFGIVIPLGASHAVPSAWAQLEDAESEIPDPLRPALGEICSEIKGLERRIKMIEHQLAALAVQTPAVAQLMTIPGVGLLIATALVAFVGDIQRFPSGRHFASYLGLTPRESSSAFRRRLGSISKRGDVYLRTLLIHGARSVLLAAKRRTPDRLRAWALAREAARGHNKAATALANKLARIVWAVWKHDRPFHSVPNAV

SEQ ID NO: 229940 - protein, 442 aa, unidentified
MALSDSSEPPPAPVFAAFIGLDWGDKKHAWSLQEQGSTLIQRGELENTPEAIELWAIAMAQRFDGRLIAVALEQARGAVINVLGKYAHFYLYPVHPTTSANYRKSFSPSGAKSDPCDADILLDLLLKHREQLRPLRPDTEETRSLQILVEERRKQVDLQTAQAHRLTMHLKQSFPQIVQWFDDIKAPLVANLLERWPTLEQLQKARPETLRKFFHQNNCRNQERIEERLVQIREAVPATHDQAVLSTGILIVHGLFQILAALREVIVCLDVRIATIVKSHPDFFIVDSLPGAGPVMAPRLIAVLGTDRDRWNSAGELQCGTGIAPVIESSGKQYWVHWRWACPKFVRQTIHEWAQHSMKSCAWARQYYDLQRSREKSHHAAIRSLGFKWLRILFRCWKNREPYNEARYEASLGNHTAKAEEKTKKTTLELQWKNCGGFSKLV

SEQ ID NO: 229941 - protein, 361 aa, unidentified
MDVLHPRCCGLDVHKSSISACILLRETGRVQKHQRRFGAMTQDLHELAEWLRQFGVTQVAMESSGVYWKPVWNILERQFTVVLANAQHIKNVPGRKTDQKDAEWIAQLLQYGLLRPSYVPCEIIRDLRDLTRMRASLSQEASRLSSRIQKVLEDANVKLASVASNALGKSGRAMLEDIISGEDDPEHLASLALGHLRVKIPQLRLAVEGKIRSHHRFLLRRLLDQLQFVEHEIALLEERLEDIGGQRPELSQAVARWDTIPGVDRVAAWALLAEVGDNMAQFPTAEQLASWAALCPGNHESAGKRLRGATRQGSPWLRRMACQCAWAAARTKNTYLSSQFRRLAARRGKKRGDEVQVARIR

SEQ ID NO: 229942 - protein, 396 aa, unidentified
MISVGIDVSKGKSTVCIMKPCGEILESPFDIGHTADELDSLISLIKSFDEGTRVVMEDTGHYHLPVATYLSSHNIFVCCVNALRMKKFCSQSIRRAKTDKIDSIKIASFGITYWNELVKAYPSNVIYDELKFLARQYYQVTGMLVKSKVNFSNLLDQVMPKINDVLSNQGGNHKLTEFVSRYIHFQNILDMGERKFTSDYCKWAKKKGYRLNERKAAEIYAIAQNGIPTLPNSQSVKIAVSEAIKLIHSIEESRNTILAQMQDLCNTLPEYSVVKEMDCIGDTLAPRIIAEIGDVRRFKNKHSLVAYAGIDAPPYQSGAFHASERHISKRGNSYLRKTGYEIMQSLIKHKPADNAVYDFIQKKRSEGKCGKEAMIAGLNKFLRVYYGKVMEFYSEH

SEQ ID NO: 229943 - protein, 349 aa, unidentified
MEFQKHCVGIDISRLTFTACICSKLLNQDVKFSEVRTFSNDKKGFNQLNRWVVKELEDTSVLVYLMEATGVYYEKLAYHLFKIKKSVHVVLPNKTKHYFASLNVKSKTDEQDAKVLSQFGVERNHFVWNPPHPIYLELRNLTRYHHQLQTQRTSLSNIKHSKEESYSVQSFVLKSNKMLIKSIDKQIASCKKEIERLVNSDAELKEKANNILSMKGVGLLTVATIIAETLGFEQFHNVKQLVSYAGFDIVQRESGTSIKGKSRISKKVNKYIRNALYFPALVACRYNENLKNTYLEIVKRKPSKMIGVVAIQRKLLILVYTLWNKNESYQDDYKSKVAPTKAEATRDNS

SEQ ID NO: 229944 - protein, 339 aa, unidentified
MELYAGLDLHSRNTYIGIMDKAFNRVFKKRVPNHLENILQTLAPFRDQIKGFVVESTFNWYWLVDGLMDAGYSSAHLANPSAIKQYEGLKYSDDQHDAFFLAQLLILGILPQGYIYPKKDRPVRDLARKRMFLVQHKTAHILSLQSLIARCCAMKVRANDMRHLTVKELEMWLEEEYLVLSAQANLDSINFLKQKVKQLEKAIIQKVKLNKEFKYLLTVPGIGNILAMTIMLEVGDIKRFPKVGNFTSYCRCAPSRRFSDGKSKGSGNRKNGNRYLSWAFTEAVHLGRRHNERFRRYYNRKVAQANTSLATKALGNKLARICYYIMRDRVPFREELFCQ

SEQ ID NO: 229945 - protein, 477 aa, unidentified
MNIKAKKAKVQPLSKKSVINVLSQDEIKKKVQVIEQELKASTWRELETKGKFEKNDKLSFISEEMLIVGCDIGSETHYIRAIDTRGRELSKGAFEFSNSSEGFASAKAWVLKLAAKNDKKQIVLGLEPTGHYWFAIAAWMVSNGISVVQVNPYAVKQSKEIEDNSQLKDDRKDPKIIANLVKDGNYGMPYLPEDIYADMRRLSMFRDQLTEDRIRNINRLHREMKIYFPEYMDAFGKIDGAFTLEILKVAPIPSDIVELDEEGLKSLWHEAKLRGRGYSRARVIVDYAKKSVGLTGGTDAGRESIKWFVEQIIQLDEQLAEIENVLHQKCMEIPHAENILEINGVGENILAGILAEMGDISRFDDVKEIQKLSGMGLVACSSGKHKGQTKISHRGRKRLRYWLFQAAKSAVAHAVEFKLYDTTRSMNPLKKMQSLVVIACKILRVIYTILNTGMKYDPERMLRDIRYPQGNTVQAAA

SEQ ID NO: 229946 - protein, 400 aa, unidentified
MMTPDDIDVWVGLDVGKSAHHAHALDHDGNTLYDKPLKQDEKAIRTMLGKLSKHGRVLLVVDQPNTIGSLPLTVARNMGIAVAYLPGGAMRRTAQLLPGDAKTDQRDAHVIAWAALKLPETLRDAGPDDETLAALKLLAGHDEDLAHESTRHVNRLRSLLLQTHPAFERALKGERITRDATLALLERYGGPMGVKRAGIEDVKDWAKSNGLRAGRIIDDMFKAIGEQTVTVPGTLMAETIIPSIAHDIKTIRDRRREVGRQVEKLLEDHPLLTVLTSMPGIGVRTASNILLGIGGDIANFKSSAHLAAYAGISPVTGQSGTSIKGERPSRRGNKRLKNALWQTAFVASTKHPPSVAYYKRKREQGKHHNAAIICLARRRCDVIYSMLKNGTLYQEPALVA

SEQ ID NO: 229947 - protein, 340 aa, unidentified
MQEQLSRQYVGIDLHRRRSVIVRLDQAGNVLGTVRVENDPVEFALAMAEAGEGPEVALEATYGYYWAADLLKDNGAHVHLVHPLGLHWDSRRVKNDIKDATELAKRLWRGDLPEAWVAPPEVRELRELVRYRAKLVALRTSAKAQVHAVMAKCGILPGLDDMFGPGGQVLLDEMALEQPYRYRVDSLRHLVEVFDDEIDIVESQVHKRLARHQGYRAVQAINGVGRVTAAIFVAEIGDVTRFADARHLCSWAGLTPSHRESDDKAHRGHITKQGSTLVRWAAVEAVARYHGGAPIAPAFMRIQARRGNMIARVAAARKLLTLVFYGLRDGEVRCLKKKAA

SEQ ID NO: 229948 - protein, 399 aa, unidentified
MLNDTSTPVTASLSNDLSGATEIKNHILDFNHTYHFERIVIGMEATSLYSFHPAMFFHEDSQLKELHVEIMVEQPNKIKKYREAFEENKNDTIDAFYIADYFRIERFSPSFLKEEKYMALQHLTRTRLQIIEQLTRTKQHFIENIYYKCNTLAYQFKKEELSTNLWSSTMMTLMTDEMTLDELANMPLQELADWLQQMGKGHFKDSEKLAQTIQAAIRGSYRLSKLQQNSVNVILGLLAREIRNLEKMIKEIDKAIEDMVETIPEYQCLTSIPGVGKVYAAGIIAEIGQIERFKDHPQVAKFAGLNWREKQSGNSNSQHTSLVNRGNRYLRYYLVEAANSVRRYDDEYKDFYKKKYHEVPKHQHKRAIVLTARKFVRLVDVLLRNHQLYTPPRRLMEDK

SEQ ID NO: 229949 - protein, 319 aa, unidentified
MTITYPIAGIDIGKDTLDISLLHANGSFEAFSFANEKASRKKLVRRLEAKGVGLVVLEATGGYELPVMAALAEEGVAFARVNPARVRAFAKSMGQLAKTDRLDARCLALYGERVRPKPTPMPSQNESRLNALTLRRRQLVGMRQKERNRAHRTGEPDIAHSIERAIAFLSEEIDAIDAAIETLIASAPEMAERRDLIDSVPGIAANTANVLLAGLPEIGRMGTRKLRKLVGVAPLNDDSAERRGERHIAGGRAHLRQALYMAAQTGYRHNPALKALYERIRAKGKSHKVAIIACIGKMLAILNAIIRSKKPFDPKFATP

SEQ ID NO: 229950 - protein, 375 aa, unidentified
MPGIFITYYFITMAKQVKQPDPIKYSVGNDMSKDEMSVCFSQINSQQHVSIKGTRKFENNLRGWKALQNWITRFRKIADIPLSVVVEATGVYYEGFAYYFKEQGFNVSVVLPNKSKSFARSLNIKTKNDLVDSCILAQMGLERSLQTWKGMTDTMLKIKQLCRERHSLREMHTIISNQLHAHSHSHRSQKEIVKRMQKHMEFIAKQIKTIEDELQQTCAFDKSLQEKVDNVCTIKGVGFMTALVVISETNGFDLIENKAQLVSYAGYDVVENQSGTSIKGKTRISKKGNSHIRRALYFPALSAAAHEPKLQDIYQRIHQRNPKVKMIGAVAVQRKLLVLIYTLYKKNEPYDPKFEETKTQEQQKSRQDSRPAYTA

SEQ ID NO: 229951 - protein, 421 aa, unidentified
MVEELPQVIVGVDTHADTHHVAVVTEYGKPIADQKFAATAAGYSELLRFINSHGTVSAVGVEGTGSYGAELSRVLAKEELKVFEVNRPNRQQRRIRGKSDPLDAYQAAQSVLAERGISTPKSKDGPVECLRILRTARTSAMKARTIAINQIRSLLVSAPETIRAKYRGLPTSTMITALARMRPSGHPADTGYITALTLKTLALRYQSLRAEIAATDELLQEILDSYAPLLTELTGVGVEVATQLLVTVGDNPERIDNEAQFAALTGTAPVPASSGKTHRHRLSKGGDRQANSALHHVVLSRMQSDQRTQDYVAKRMADGKSKREAMRCLKRYVAREIYRQIFRPVAAPDITDLRPLRQQLGVTLQQASEHLNQWPSNLSRVERGIARNDHVAQTYRQWLTQQHLPTTRDNSHKLSTATTDK

SEQ ID NO: 229952 - protein, 394 aa, unidentified
MKLVGIDVGKNSHHFCVMNKETGEFNVAPSSFSNNKEGFDFLINSLKTYSKKSILIGMEDTGHYHVALLKFLLSNGYTVALINPKTTDLTRKMEGGITKNDKLDTITICDVLDTPERKKQYRITKVDRFDLYEQRQLTRHHHNLKEELNVYCNRLQKSIDLVFPEFNTLFSSKYSIVYMNLLKTFGSAEAIASTDIRTIRKCFEIKGRGNRISLTPEKLKECAKNSIGISSEVETIQIRHLVSQITLIKEQIAEIDKKIEESSITNNSPILSIPGISHFSGTSILAELGDIGNYSKPSQIIKFAGVAPYHYESSQYNAQHTGITKKGSKYLRKTLYQIILTVINNNPVFKKYYLLKISQGKGHRCAQGHCIRKLLRIIYHLLETGQSFDPALLR

SEQ ID NO: 229953 - protein, 338 aa, unidentified
MSKITTIGLDLAKNVFHVVCCDEQGKVVRKNMLKRSQVWAYFANLPPCLVGMEACASAHHWARELGALGHQVKLIPPQYVKPYVRGNKNDYNDALAIAEAVSRPEMRFVSVKTPEQQDIQALHRLRERCIADRTALCNQLRGLLAEYGLVLPKGIHVLRRRLPELLEDGENGLSDLFRRLLAQSYQQLQALDGHIDHYTREMKHQSQQSEACRRLQTIPGFGPIAAGVFHSAVGNGEAYRRGRDVSASLGLVPRQHSSGGKEVLLGISKRGDRYLRSLLVHGARAVVIQAAKKDDRLSRWINKVKAARGFNKAVVALANKMARMGWAVLVNKTVYQIA

SEQ ID NO: 229954 - protein, 409 aa, unidentified
MMKQNIIFGIDVSSKSSTVCVVIDRIKQGETFKITNDSFGYQDLLDRLNQYLITPLVVFEATGVYSLSLQAFLEDYHIKYLKLNPLKAKKLMDNNLRHNKTDKVDAYRLALIQFNAPQKLRAPQPKEYHELQNASRYYEELTQALIINKNQLHRNLQSTFPQIESILSTSSGRVYWTIVSLFPHAQYVLNHNENQVFQSLLAISGIGRQRAHYLTTRLYALARQAYPYDNESSITIRAIQRNIANLLSLSAERDNVINYMEKLAMQANARSLNVYESIPGIAKTTAVRLVAELGDLRRFDTSAQIDAFVGIDPGRYQSGEKDSHLGITKHGNHLARKILYRTITQMETVKATQPCHITDYYDKKKRSSNSRGYKKIAIASVHKLIRTMFALIKHDQLYDYNVATHNQRL

SEQ ID NO: 229955 - protein, 343 aa, unidentified
MEQLRVIGIDLAKSVIQIHGSDSRGKCLIRKKLRRNQLLPFMAKLPLCLVGMEACGGSHYWAREIKQLGHDVKLIPPQFVKPYVKTNKTDVADAEAICEAVDRPTMRFVPIKGPDQQAVLLLHREREGLIKERTAVINRIRSSFSEFGVVIPAGPKRLRQWLSDSYGDVENDLPATLNRLMLRMVDRLNYIESEICDLDKEINDQNKSDERCKRLIEVPGVGRLAASAIVASVGNAKEFRSGREFAAWLGLVPRQYSSGGKQNLQGISKRGDAYIRKMLIHGARAVIRHMNRNSAPVDWLEDLMRRRHRNVVIVALANKLARTIWALLSKEQSYKRYEDTVVA

SEQ ID NO: 229956 - protein, 418 aa, unidentified
MNSQTLASPIDRYIAIDIHKHYVLLGGMNAQREWVLRTRKVRMSRFPEWVLKNLIPTDAVVIESTSNAWEVYDLIAPIVAKAVVANPLKVGEISGAKVKTDRLDVERLLTLLIADIVPEVWVPPHHVRDLRSLISHRWRLHKQIAMTKNRLQSFIHRFNLIPPEGKLFSEENRSWWQDQDFSSIVRIQIEQDLLILEHLTAHKEAIHQELACLSNRKPWAEDMVFLMQIPGMGVVLSMTVLSAIGDISRFEHPKNLVGYAGLGAGVHDSGKKHQGKGITKAGRKELRWAMVEAAWSAVGSSPYWKSQYENLKNRSKHSNEAIVAVARKMLVAVWHVLSKREPYRHATQEDLAYKMVIWSQRMDPIALRGMTRQQFVKYGLLRLGVGHDLTRIERNGVPRRIAPTAEVLALKPDLPPPS

SEQ ID NO: 229957 - protein, 369 aa, unidentified
MTDLTLFVGLDVHKKTISVAVVEAAAGAVVRFYGTIANTPDSVRTLCRKLSKDGQQLHFCYEAGPCGYGVHRQLTRLGHRCDVVAPALIPRKVGDRVKTDRRDAMMLAQTLRAGQLTAVWVPDEAHEAMRDVVRLRTQAMRDLRKARQQLLSFLLRHGRNSPYGHWTKMHRRWLGELVFAHPAQHLALEEMLQRIERAEALCDRLKAAILELVPQWSLAPVVQAIQALRGVSLIVAAAIVAEVGCFSRFESPRALMAYLGLNPSEHSSGATIRRGAITKTGNTLARTCLVEAAWTYRFPPRVSQIIRDRLKELPEPIRAVAWKAQVRLSARYRKLTAAGKPGPKVVVAIARELVGFIWAIARMVEPKFA

SEQ ID NO: 229958 - protein, 279 aa, unidentified
MTTPISMLAIDLAKGSFQVCAVGPGGAVLYNRVLSRTRLATLLAEQPACVVAMEACATSHHWGRVAQSHGHEVRLVPAAYVKPFVKRQKNDKADAEAIAEAASRPTMRFVAVKSAETQGRAVAFRTHQCLVRQRTQLINALRGHLAEFGLVAPKGPASLKVLEIALADETSALPVVVREMGTIYLEQIAQLTEVIEQLADELEAASKTDAQLRRLCTIPGIGPVTAGAVAAFAPDLDTFDSGRNFAAWLGLVPRQRSTGGKTRLGSVEPRWARPTSAAC

SEQ ID NO: 229959 - protein, 350 aa, unidentified
MTTIARRITGGVDTHLDVHVAAALDERGALLGIESFATTPAGYRRLLRWLESFGTLELVGVEGTGSYGAGLTRHLLGNGVAVVEVDRPNRQLRRLAGKSDPSDAEAAARAAQGGQATGLAKSRDGNVESMRVLRVARFSARRSRTQAINQMRSLVSTAPDELRAELRDLSIYKILTIASAYRHTGRTDVTTLTKLALRTLARRALSLESEVKEIDALLKKLLAESAPELLAVDGVGTDVGTAILVAAGDNPERLKNEATFAKLCGVSPLDASSGKQVRHRLNRSGDRQANSALWHIVFTRMVNDPRTQHYIERRMKDGRTKKEAVRCLKRYVAREVFAALPRSQFGVDNP

SEQ ID NO: 229960 - protein, 317 aa, unidentified
MELSPIFIGIDVSKARLDVAIRPSGQTESVSNDTAGIEALVKRLSESRPALIVLEATGGVERSVTRALASAELPVVVVNPRQVRDFAKATGQLAKTDRIDAQVLARFAQAVRPALRPLPDEVSWELRAGVTRRRQITEMIVAERNRLGATSKAIRKRIEAHIRWLESELDRADQDLDQSIRQSPIWQENQELLQSVPGIGPVISRTLLAELPELGQLNRKQMAALVGIAPLNRDSGTMRGRRTIWGGRARVRAVLYMAALVASKRNAIIRTFYQRLRNAGKAPKVALVACMRKLLTILNSMIKHKTRWSENFSVQPC

SEQ ID NO: 229961 - protein, 314 aa, unidentified
MRNLFVGIDISKAELEVCVHPGSKGWKTPNNPVGLTELVGRLSELSPKLIVMEATGGLERPIQVVLEGAGLPVRVVNPRQVRDFAKGMQILAKTDAIDAAVLAKYGEKAELEARPVKDEQTRELEAMVERRRQLVEMLTAEKNRFKRAPSRVRPNIRAHIDWLERCISDVETEMQDFIGKLPEYKQKDEIIQSFKGAGPVLSRTLLANLPELGMIKNRKISALVGVAPFNRDSGTRRGHRCIWGGRADVRSVLYMATIVAIRHNPVIRQFHQRLIAAGKKPKVAITACMSKALIILNTMVRNGTRWMPPCAHAL

SEQ ID NO: 229962 - protein, 347 aa, unidentified
MLIIGCDFHPGFQQVAIFDNQSGEYEEKRLGHRSEAEQFYRSLQEPGVRVGMEACGHYPWFERLLAECGHELWLGDASTIRASAVRKQKTDRRDAAWLLELLRADRFPRIWVPSLEERDVRQLLMHRHKQVQTRTRVKNQLQAMALGQGVQKRRKLWTQAGRAELEKLELLPYAGARRQQWLRTLDGLGVEIAELDRQVEKEVKRRPEAMRLQTHPGVGPVTALAMVLTLGPAERFASGKQVGSYLGLIPSEHSSGGRQQLGHISKQGSWFLRFLLVEAGQTAARYDGELGRFYRRLAVRKHRAVAKVAVARKLATRLYLMLREQWTYAQLCKAMVSASPSHSVVED

SEQ ID NO: 229963 - protein, 299 aa, unidentified
MQSVCGIDVSKDRLDIMVLPEQQCFSVRNDAAGWAELVERLRGFSISAIGLEASGGYERGAMRALLAAGMPARQINPFKLRQFARASGVLAKNDPLDARMIASFVAIMPTQQAQPRAPAIDRLTEILAVRRQISAEKVAAENASRLLEDVMLQRLSRRRIARLEADIDMLDRHLTEIVGTDAALSYRYRLLTSMPGVGLVLACTLIALLPELGRMSRKQVAALVGVAPYAFESGKFKGRRCIWGGRAPVRNVLYMAAMSVLESRLQGVPRSAQGRRQAAEGCDRGHHAQDDHRAQRDGS

SEQ ID NO: 229964 - protein, 324 aa, unidentified
MRALYDKHGTEKTMNDSIGIDVSKTKLDCHRLRDGACETFANTKTGFAKLHRWIGKTTPARMIFEVTGPYHGAFERRLAGHLPLVKVNPLQVRRFSQELGTRAKTDRVDAVVLAQMGAAPGLQPDAPAREDQHDLKELQAARTALVKDRTGLLNRIRTQTLALTRRRSRALLRRIEAALKEIEAEIKTRLRASDEGALVHDILCPIPGVGEPTAAAILIECPEIGTLGRKQIASLAGLAPMTRQSGQWRGQAFIQGGRKFPRDALYMPALVAVRFNPDMAAKYRDMCARGKPRKVALTAIMRKLLELANALVKDRRKWAPKRAC

SEQ ID NO: 229965 - protein, 325 aa, unidentified
MIDQDGQVLANRNVPNGAEPILKVIGGLPLGTPAAFEACYGTSWLVELLEDYGFAPHLVHPSRCKAIASARLKNDKVDAAILGQLLRADLLPEAWIAPPAIRQLRALLRHRVALVRLRTRLRNRIHAIVADYGYDRPAGGYWTGPGRAWLAALELAAVSRELVEDYLGLIDALQQRIDRLDWEIRQRARSDPRVTVLTQLPGVGPFTALVILAEVGDVSRFASARQLASWAGLTPTVRGSDRVAHYGHISKQGSVWLRWVLCEAAQTAKRSPQFAATFQRIATRRGKKIATTAIARKLLTHAWHLLTKTDQAAAPQPAAPQTAAR

SEQ ID NO: 229966 - protein, 339 aa, unidentified
MKHVAIDLGGRESQICIRESDGTIVEERRYQTRLLPGLMKRWEPSRVIVETSAEAFMIADAALTLGHEVRVVPATLVKTLGVGDRGMKTDKRDARKLSEVSCRIDLPSVHVPSELSRRLKSVCGNREELIECRTKLINNARGWLRTQLWRVRTGATSTFPVRVREHSTTTEQLLPDHIERTLTLIETITTQIRVADNELETIANAHPICQKLMTVPGVGPVTSIRFLAAIDDVTRFRNAHALQSYIGLTPGEHSSSDSERRTGITKAGPKQLRRTLVQASWRCMNSRSEDPMIRWARELATRKNKFIAVVALARKLAGVLFAIWRDGTTYRTHLPEATN

SEQ ID NO: 229967 - protein, 352 aa, unidentified
MQSEEKVIGCWVGIDVSKDSLDVAVLTLGSDKPVHRKVDNKRSGFEEMKVFVEELVPLSECHFCMESTGPYGRGVATYLSVKGALVSVENPRFIKYFAMGKRFQQKTDKADAKIIASYCKQEAPRPWTPLDPSLRELDELLKRLKDIEKLRVQEANRGESKDLPQSALDSIARTLAFFKAETKAIQEGIEATLKKLPKIREMVDVLVREPGIGELTALRFLSHVSWTYETFESAQQCAAAAGYNPKRRESGTMVGHTRISKHGDASFRASMHLVAVTATRCNPKVEAFYLKRLEGGMAKLAAITACSRKLVMILFGILKAHAQGRTPVYSAEKPRYLTVTGTQRTFLKKDAA

SEQ ID NO: 229968 - protein, 378 aa, unidentified
MNRIIKIGMDVHTTNYTLCIFEPSFEHDGTVHCITQVKPEVKNIIHVIETFKKKHENEELNIVCGYEAGCLGYSLYHELKEKGIECAILAPTTMKTEKGGRKLKNDYRDAKMIAECLAYGGYSAVHIPTELDNSVKEFIRMRDDIKENLKSIKQQIIAFLTRNGKQFEGKSYWTRKHIDWINTVSFSEPLLQDTLNEYMIEYNHLCDRVEILDRQIEEISLKEEYVEKVQQLQCLIGIKTHTALSLIVETSDFNRFKKGNMYSAYLGLIPGDDSSGGHENKVGITKAGNSHLRRLLVEAAQGYTRGRVGFKSKDLKARQEKCGSEVVAYADRANERLRRKYYRMTLRGKKYNVAKTAIARELACFVWGIMTDHIDLCS

SEQ ID NO: 229969 - protein, 344 aa, unidentified
MHIASIGIDLGKTTFHLVALGEVNKVLVRKKFSRAQLLAYTANLPSSLIGLEACAGAHFMGAALREQGHEVRLIPAQFVKPYRKSNKNDFIDAESIAEAVTKENMRFVQIKTQEQLDVQAMHRVRDRLVQRRTALINEIRGFLLERGITFAAQPIYLRKNLPTVIEDAEQNLSPRLRWLLQRMWQEWKQVEIDIKAMTDEIERISNENALCRRLRQIPGFGPLVSTATVAAIGNGAAFRRGRDFAAWVGVVPRQYSTGGKQKLFGISKRGNVYLRRMLIHGARAVLLRVKYDTEGFGQWVHRLAQRAPRNKVVVAIANKLARIAWAVLSSGKDYQHQPLQITAA

SEQ ID NO: 229970 - protein, 357 aa, unidentified
MTTMTQPASTQVTVGVDTHLDVHVAVVKDQLGRRLATTSVATTPAGYAELLGWAEQFGSVEAWGIEGTGSFGAALNRFLRAHGQVVVEVNRPDRAARRRRGKSDSLDAEAAARTAQAQQGSMPKAGDGLVEMIRVLRVARASAMKARTQAINALKALVVTAPEELREQLRTLSTVRLVKAAAELESGAATDPSAAAKLAVQLLARRYQALTAEIMTLDAELDRLTATAAPNLLARFGIGSDSAGALLVAAGGNPARLRSDTAFAMLCGASPLEASSGKVRRHRLNRGGDRQANAALYRIVVARLRHDQQTRDYLARRIREGKSKKEAIRCLKRYVAREVFAVLRGNPQLQPAALPSP

SEQ ID NO: 229971 - protein, 396 aa, unidentified
MDVVYSHVCGLDVHKKTVVTCIITPDEKEIRTFSTMTDDLLQMVDWIKSKGCTHAAMESTGSYWKPVYNLLETEEIQTLVVNAQHIKHVPGRKTDVKDAEWIASLLRHGLLRGSFIPPRDQRELRELIRYRRSLIEERAREVNRIQKVLEGANIKLSSVASDILGKSARAMIEALIAGNVDPESLSELALRRLKNKKADLQRALKGLIGPHQRLMLQTQLRHVDELDALIQQLDEEIKRRMLPFEEDLERLDTIPGVARRTAEQIVAETGTDMSRFPSAAHLCSWAGLAPGNNESAGKRKSVFQQPRGLRFVIGPLLILPAAHKAPHLNPSYLSVQFCQMVMKTPADPFCFRNNGFETFLEFVEQLGCFIFIYLINNIGIHGHHAVVEAFINIPVA

SEQ ID NO: 229972 - protein, 343 aa, unidentified
MSGAYEGRQIVGMDLHRRRSVLVRMSETGEHLETVRISNDPEYLREVMTRAGEAPEVVLEAAYGWYWAADALAELGAHVHLAHPLGVKMFGLRRVKNDERDAADLADLLRMGRLPEAWIAPPATRELRGWVRHRAKLVALRSGLRCQIHAVLAGAGVQVPMSDLFGVSGRELLTTAALTVESRSRVESLLRIIGALDFEIDLYTKLVASRLRTDPGYHAIQAIPGVGPVLAAVFVAEIGDITRFHRPSELASWAGLTPKHHESDTTVHRGRITKQGSRLVRWAAVEAVQRVPARTRLGQRRDRVAERRGHNIGVVAAARDLITLVFYGLRDHHVRCLPTKAAP

SEQ ID NO: 229973 - protein, 409 aa, unidentified
MGRTLFVGIDIGADTNVVSIIDDTGDDVCGFSISNDLPGTERLVEKVVDVADNLPVDKVKIGMEATNLYWWHLSQALHDDPQLTALGTEIAVINPKVIDGFKNIYTDMAKTDALDARVIADCLRFGRVRPTPPPDMRYAPLQRLTRFRYHMVGNLTREKNRALNLIFLKFSTYQKECPFSNLFGKASTAVIGNLTPDEIANLPVEALVDLMLQHGNKRLKDVPEMAKVLKRAARNSYRLNPKMQETVDITLAMSLETIRFFEQQQKKIDQAIAKEIKAITHTLETIPGIGPVYAAGIVAEIGDISRFNNHNALAKFAGLTWRQNQSSKFNAQDIPLTRSGNYYLRYYLVEAANSVRVWEPEYGEFYRRKYAEARHHNHKRALVLTARKLVRMVFTLLSEGQIYQQRRLN

SEQ ID NO: 229974 - protein, 456 aa, unidentified
MPRSKHQQRKSTGQLSTVYPLAAGIDVGATAHVVAVPAERDERPVRTFRTFSADLRRLAEWLAHVGITTIAMESTGVYWIPVFEILEAHGFQVLLVNARDVRNVPGRKTDVNDAQWLQQLHQHGLLRGSFRPRDGVVRLRAYLRHRERLVDYAAAHIQHMQKALMQMNVQLQHVVTDITGVTGIRIIRAIVSGTHAPKKLAEYRDVRCAASPQTITAALTGNYRPEHVFALRQALELYDFHQTKIAECDAEIEAVLRRLNDDRDIPEKPLPEVRHAKGRNEPRFDVRAALYTLLGADLTQIHGFGPYTVLRLVAECGDDMRKWASAKHFTSWLSLAPGNKISGGRLLSSKTRRSSNRAAVLLRIAAVNIGRTQTALGAFYRRLAARTGKAKAVTATARKLAILFYNALRFGMSYKDPGTAYYEQRYRQRVLHNLQRRAQSLGLTLIAKTATADAVS

SEQ ID NO: 229975 - protein, 312 aa, unidentified
MPAKLPPTYVGLDISSDQLDYSRSENDEGRCAYTAEGIAELIKKLQVLLHARVICEASGGYEKRIVAELLQAGIEVCVVQPGRVRAFAYAEGLMAKTDRLDARLLRRFGEKIEVRLAVPTDPALTTLRELLEHRRQLTRQLIEVIGRLSLAGATLRKLLEKQRLFLEKQIAAVEGMIKDHIDQNPDLKQKSARLQQINGVGPVLSATILAYVPELGKIESNQLSALIGVAPHPDDSGLRNGPRHVRGGRAQVRRVLYMAAVCAARTNPILRAFYERLRANGKPAKVCLVAVMRKLVHLMNKLIFNPDFSLVR

SEQ ID NO: 229976 - protein, 339 aa, unidentified
MLIIGCDFHPGFQQVAIFDNQTGEVAERRLQHCEEAQEFYRLLAGQEVLVGMEACGHYPWFERLLAELGMELWIGDAARIRAMEVRRQKTDRRDAAQLLQLLMEDRFPRIWVPSLEERDVRQLLVHRHQQIQARTRIKNRLQALMLSHGVQKKRRLWTAGGRAELEKLELLPYAAMRRERLLAALDEVEAEIAGLNRQVEEEVKRRPPAMRLRTHPGVGPVTALAMVLTLGPAERFGNARQVGSYFGLIPSEHSSGGRQQLGRISKQGSSFLRFLLVEAGQTAVRYDAELGRFYRRLAMRKHRALAKVAVARKLAMRLYLMLREDWDYAQLCKAMCRQA

SEQ ID NO: 229977 - protein, 345 aa, unidentified
MNATTVAVDLAKNVFEIAVADTNWRVVERARLTRAQFARWFDNRAVGLVVMEACGSAHHWARVLRARGIEVRLLPAQYVRAYVKRNKTDAADAVALLDAVRASDIRPVAVKSVEQQALQALHRMRSAWMAARTGRINMLRGFCREFGLEVPLGAERGLAQMARLVADEHSAIPAMLRTPMRLVLEEIRLMEARVDQIERELAEIARHSPACAALTSVPGIGLLTSTAMLAAVGDPRSFDSGRRYASFLGLTPREYSSGSSRYLGRISKRGNRYIRMLLTHGARSILRAATVARRAGRSLDRLRTWALALQERSCHNKATCALANKLARIAWAVWTKHERYQSASA

SEQ ID NO: 229978 - protein, 316 aa, unidentified
MYLGIDVSKLTIDCCLIADGQNHQKKFQNNKVGFEQLIKWLQSHKVSDKLHCVCEATGTYYEALAEYLYSRYTITVENPRKIKGYAIAELQRSKTDTQDAKLIAQYCQDRKHKLKAWQPPAKEQKQLQEIARYLDYLKQQRATEKAKQHEAPDYIKSHIQTTISNLTSQIQTVKKQLLQFYKDNPSYNNLRKRLKTITGIGEQATAILLSTYKRHEFKNAKQFTAYLGLDPRKYQSGTSVNGKSRISKIGSSEIRKSFYMPAVVAYRCNAFPEFVGRLKNKGKHIKLILIAIMRKLAVIAFTLLQNGQDFQVERYK

SEQ ID NO: 229979 - protein, 388 aa, unidentified
MFKTVERPDAPAAIRMDIGAIFVSLELSRSTWLLTSVSPGAGEKMSQHATPAGDLRQLFECLAELKRKALARTGKTYPIIVIQEAGLDGFWIHRALEREGIESHVVDAASIAVPRRRRRAKTDRIDGKTLLRTLMAFKRGEPRVCAMAKPPSVEEEDRRRLGRERKTLIAERVEHVNRIKGLLFTQGAIDYQPLRRDRRARLEALRTGIGDPLPARLKDLISRELDRLELLLAQIKAVEAERDALLAEQSRQAPAAAAMLLAFKGIGPEFATVLWLEGLFRSFANRRQVAAYAGLAPTPWRSGSIAREQGASKAGNPRLRATLIELAWLWRRHQPKSALTLWFEDRVKANGGRVKKALLVALARKLLVALWKYVTTGLVIEGAVMTTA

SEQ ID NO: 229980 - protein, 372 aa, unidentified
MFIGGVIMTCFIGLDLSKFKHDCFIMDEHGEVVRNSFSFANDREGFNTLLNVLNDLDPSQEKRIGFESTGHYGSNLKLFLEANGYSFMEFNPLLVNRFFKSESLRKTKTDKADAQKIALYLYSRDYKPNPNSSYHLQCLKSLTRLREALVDERSLQLVRITNIMDKMFPEFKPLFAKKGLKAATAMYLLENYGSPSRMANMTLASYHKMASKLRKTISYAKFCKIKELAKSTVGNENDILSFELEVCLELFKELDQKVLQLDKKICFELSLLNTHIPSIKGIGDVLAAGILAEFESIDKFDNPAQLAAFAGIEPSENQSGTHDGGGRMVKHGSPHLRRYLIQAANNMLVHNPILYEYYLKKRSEGKSHNVAI

SEQ ID NO: 229981 - protein, 404 aa, unidentified
MDTRPEVWVGVDVGKATHHACAVDASGKTVFSQKLGNDQAAIEALIARAGQAGQQVRWAIDLTSPMALLLITALLAADQTVTYVPGRVVNTMTHGFRGEGKTDDKDAKVIAETARMRRDLNEVTMPDELVVGLAQLTSYRTDLMSDWVAGINRLRSLLGSIFPALEAAFDYSNRTPLVLVAGLCTPAEIRTAGIDGVATYLADNGAFKPAIGRTAVAAIDAAQRQTLALPGEGDTAMLVKRVARKLLDLDREIKDTDRLITTRFRQHPWAHIIESLPGMGPGLGAEFLVGTGGDLANFASAGRLASYAGLVPVPRDSGRVSGNLHRPKRYNRRLRRVFYMAALSSLRYENGPSRQFYDRKRSERQIHTQALLALARRLVDVLWALLRDGRKFDTDNPAQAAAAA

SEQ ID NO: 229982 - protein, 342 aa, unidentified
MQNMMIGVDLAKNVFQVHGASQTGEVLYRKKLSRKQFSAFMAPQEPSLVIFEACGSAHYWAREMEALDHEVRLIAPQYVRPFVKRQKNDAADAEAIVIAARQPEMRFVEPKTIEQQSRAAVFRGRERLVHQRTADVNALRALLYEHGHVFPAGIRHLNRMTALIEDEISGLPMLIREECKDLLAQIAEKTARIIERTVKLKTLAAQSDKARRLQTMPGVGPLTAVAVEAFGPDMAQFKTGRDFAAWLGLVPKQHSSGGKERLGRMTKAGQADIRRLLIIGAMSRLTWLGRRTIPAGSWLSRMLARKPKMLVAIALANKMARQIWAMLTKNENYRDPALAVVA

SEQ ID NO: 229983 - protein, 357 aa, unidentified
MAKCIKRMISVMSVIGLDLADVLSDWVGLDDGGKVVRTERVKTTESELRRVFGSIAATTIAIEVGSQSAWVSRVLGSLGHTVVVANARKVALIHQNRRKNNRIDAEFLARLARADKQLLFPIQHRDQNSQSDLVTLRSRDALVSCRTKLINYVRGVSKSFGKPLPKCSAPAFVTRCSERVSPELVGALNPILEQIAQLTDRIKRFERDIAAMVKRHSAAQILMKITGVGELTALAYVLTIEDPHRILRSRSAGAYFGLVPGSDDSGDKHEPRRITKEGDRFCRRLLVSSSQYILGPFGPDSDLRRHGLAIASRGGKNAKKRAVVAVARKLAVVMHRLWISGEQYIPLFNASRTPIAA

SEQ ID NO: 229984 - protein, 343 aa, unidentified
MKKLEPDATALLRLIERWRNEAVRVGRPISRIALAYEAGRDGFWLARWLIARGIEVHVIHSASVAVSRERKRAKTDRLDAAMLMRVFLGWLRGERGHCGMVAIPTMEEEDARRPNRERESLVNERSRIINRMKSALARLGIRGFKPHLRKAPERLAGLRTAEGTGLPANIIEEFRRDMARLALVREQISSIEKTRAERLERAPDTGPHAMVRLLARVIGIGIETADMLVREILSRKLRDRRALARYAGLTGSPDESGLKSRERGLAKAGNARVRRGLIQLAWRFLMFQKDSALARWYRTRTEGPSGARKTTMIVALARKLLIALWRLVTTGEVPDGVELRPAA

SEQ ID NO: 229985 - protein, 375 aa, unidentified
MTKHSEVFVAFDTSKLRNAVAIAEAGRAGEVRFLGEIENTAEATTKLVRKLEAKYERITFCYEAGPTGYELQRHIHGLGHECMVAAPSLIPKKPSDRVKTNRRDAVSLVKLLRAGELTAVWVPDRRHEAMRDLTRAREAAVIDLRAKRQRVSALLLRQGRCYPANKKTWTKVHMNWLASQRFEQPERGIVFAEMMFAIRQAQERVERLEQAIRTAVPEWSLAEMVTAFMAFRGIDLVSATCLLAELGDLTRFPTAPEVMGYVGLGCSEGSTGDRIKRGGITKSGNRRARRTLVECAWSYQHPPRVGIAKQAKVAAAPAKVREIAWKAQCRLNRRYRGLLRRGKLKTVAITAVARELAGFLWAAARELSSPQRVAK

SEQ ID NO: 229986 - protein, 351 aa, unidentified
MKTKTDSTPIIGLDLGDRRHTVCVLDHAGEIIAETTIPNTREQLEGLSRQYPGAVIAMETGSHSPWISRLFEARGHRVYVANARKVRAISQSQTKSDKEDARMLARLARVDPKLLSPIRHRSEGAQRALVRLKVRDALVRSRVNQANSVRFLLKSLGVVVPSAVKATVFVRRVRETLDAETLQLVTPLLTVLDGLNAQIKQLDKDLEELAATQYPATARLQQVPGVGPLTALCFVLTVESPQRFGCTRDIGPYLGLVPRRDQSGETDKQLPITKAGNAQLRCLLVNCAHYILGPFGPPSTLREAGQRIAVAGGSAAKKRSVIAVARKLAVTLMALWKSGAEYHALPAASNP

SEQ ID NO: 229987 - protein, 307 aa, unidentified
MTVCIGIDVAKASLEWVAGPEGEIQHARNEPRPLAGLVHRLVSLAPERIVIESTGGYERRLVAKLAEAGLPVVVVNPRRVRSFGEAMGVLAKTDAIDARLLALFGEKVRPPIRPILEGRDRLLADLVARRRQVVSMIVAEKSRRDTASDAVRRLMAPLLGQLERHLAKLDARIERELLADAERAELYELLQTVPGVGPGVARTLLVDLPELGHLGRREIASLVGIAPYARDSGSVRGLRRIRGGRASVRTALYLAAMSAARFNPVLREVYQRLREAGKPPKLAFVAVARKLLVILNAIARERTAWQA

SEQ ID NO: 229988 - protein, 366 aa, unidentified
MRESSTVATGRKQIFKQPRLTIGLVLGDRTSQSCLLDEARNVLLERSLPTTSNGMRQTFGKIPRCRVALETGTHSPWVSRQLSQMGHEVIVAHARNVRLIGESSRKDDQLDARTLARLARIDPGLLGPVRHRSAQAQIHLTAIRARAALVSTRTALVNAARGLTKSYGERLKKCGTEQMNREAAKGLSQELREALDPLLREIESLNERIAEYDRRIEQIAKEVHPEVALLKQVKGVGTLIALTYVLTLDDPHRFRRSRDAGCFLGLRPGPRNSGKSEPQLHISREGDRYLRMLMVQGAHYILGPFGQDSDLRRWGLKLAERGGKNAKKRAVVAVARKMAVLLQKLWVSGEVYEPLRNNHNLENAVA

SEQ ID NO: 229989 - protein, 386 aa, unidentified
MRGKTFIPHDYDVFAGLDVDKRSIAVTFTNHQGFIRSLRMPYSVERLLNHVRKHFPDQKIAFAYEAGPTGYGLYDGLVAQAYRCLIAAPSMIPKAPGQRVKTNRLDSVGLSENLRGGQLKSIHVPSGPYRELRHLTQLRDTFVSEMVGMKLRIKSLLLFEGIAFPPAPPGSQWSFRVKAKLRKLPCSGSVRFKLDQLLDSLAFSEKQVFKTTKEIRRFCQTDPELSQCLQYMMTVCGIGWIVASQLLARIGDWRELKNVRQLAGFLGLVPTEHSTGERTERGAITHTGDGRLRSKLIQAAWSAIRQDGELREFFRSVASTHPRNVAARVAIVAVARKLSGRISVVLRQQRAYVVREKVHSAPLTQEETLPQGTTRRQAEPGEAKDS

SEQ ID NO: 229990 - protein, 429 aa, unidentified
MNYTQNEKIEQVTDSTIVVGVDIGSQIHYARAFDNRGRELTKRVFSFHNDLEGFNSFNLWAETLKSENKKTAVLIGCEPTGHYWFAFAKYVKDHQKRLVMVNPFSVKKIKELDDNSPKKTDSKDPKTIAKLVVDGRYSIPYVPEGIYAEIRDLVYSRDRIMKQHNISANRIQRWLAIHFPEYLGLYTRFDAISGLAVIEKAPLPKDVIALGVNGIRKIWHDKKMRGRGVTEDRAKTLVEAAHNSVGLDGGIGTKSELYMLLEEHRLWTSQLEAVNKVLEEMILKVPHVEKLLAIKGVGSITIAGFIAEVGDIRRFDSPKQIQKYAGLELVENSSGKHKGRTRISKRGRRKLRKILYQVMVPLLARNREFREIYDYYVTRVKNPLKRRQAMVAVSCKLIRVFYAVLTKGMEYDRFKMMSDIQRKSDIIAA

SEQ ID NO: 229991 - protein, 334 aa, unidentified
MHKVDREGVPFTGGTLMPSFLGIDLSKETFHAFLLGDRADAKKVFPNTPKGFEQLTTWLKNRHTDEVHFCMEATGAYWEALALYLHGLDQHVSVVNPARIKAFAQSELLRTKTDAVDAALIARFCKSQSPEPWVPPSPEIRVLQALMRHCDHLKKTRAQQSVYAQSSDSSVVTASIREVIATLDEQIVQVERTIRQHFDEHPDLKRRRDLLTSIPGIGETTAGSILSEIPHLDRFESAKAVAAFAGLSPRERQSGTSIHGRPRMCKTGNARIRKALYLPAMVAIRFNPTLRLFGERLSAAGKHKRLINGAVMRKLLVLAYGILRSGVPFDPNYA

SEQ ID NO: 229992 - protein, 354 aa, unidentified
MSNKSTATVATMGIDIGKNSFHVVGFDERGAIVLRQKWSRAQVEMRLANMPACLIGMEACVGAHHLSRKLQALGHDARLMPAKYVRPYSKGQKNDFRDAEAIAEAVQRPTMKFVATKTAEQLDLQALHRVRARLVSQRTGIINQIRAFLLERGVAVRQGLRFLRTELPSILATRTDVLSPRMVRMIEDLASDWHRLDERVEGVSAEIEVLARHDPACERLMTVPGIGPIISTATVAAIGTGDVFSKGRDFGAWLGLVPKQTSTGDRTILGKISKRGNCYLRALFVQAAWVVLIKPKSWERYGLKPWIEAAKKRLHHNVLAIALANKLARIAWAVLNKERAFERVRRDATAPRPA

SEQ ID NO: 229993 - protein, 363 aa, unidentified
MYDSTTVTIGLDVHARSIRLAAVRADQLLEERTLPYDEEAVERVLRRWPGVRCCYEAGPTGFGLYRHLVERGIDCAVVAPGLVPRRPGDRVKTDSRDARKLARLFAGGLLEPIHVPSPEQESARDLVRAREDARLDRMRDRHRLSKFCLRHGRLLPTSSWTVVRRRWLSEQRFGFVAEQVTFDAYLHTVDLVDARIEALERAIRETAEQQPWKQLVARLRCLRGVDTLTALALVSEIGDFSRFRTAEEFMAFVGLVPSEHSSGEKRRQGSITKVGNSHVRRLLVESAWHARRRPKVGYDLSRRQRGQDAVVLERALRCQQRLYSRWQRMAGRGKPQQKIVVACARELAGFVWALATEQPLRST

SEQ ID NO: 229994 - protein, 316 aa, unidentified
MARPQHASVNVGIDTGKAQLDVCIHETKQFVSFANAPQDIHRLVLLLDLFPVERIVIEATGRLERAFVEAALERGLPVIVMQPIKIRRYAGAIGLLAKTDKLDAALIAEFAATVKPPLRRPVDENTRYIRDLLVRRRQLLQMSTMEKNRLQIMPPHLAGDIRTLIDELQRQVKQIDHHLDDAVQVQSAWQQQFERLIAVPGLGPTTVYTLLADLPELGKLSARQISALVGVAPFNRESGKLRGRRQIKGGRSSVRTTLYMAMLSAVRFNPPIRAFYQRLLAQGKHKKVALTACMHKLLVMLNAMVRDDAEWRFQET

SEQ ID NO: 229995 - protein, 349 aa, unidentified
MKVIGCDFHPGYQQIAMVETETGEFTQMRLSHSNNGEEARKFYAGLAGPVRVGLEASGQSQWFERLLAELGQELWIGDAGKIRASSDRKQKTDRRDAELILQLLLEERFPRIWVPTPAERDVRQLLLHRAKLVRVRTQVKNPLQALALNQGVQRKRKLWSAVGRQQLENLPLLPWASRRRTELLKLLDELDGSIVALDGAVCEEAHRRPAVRRLMTHPGVGPVTALAFVLTLGPAERFRRGKQVGSYFGLIPSEHSSGGKQRLGHISKQGSSFVRGLLVEAAQSAVRFEPQLRREYQRLAQRRCRAVAKVAIARKLAVRLYWMLRADLDYARLIQGSHAEQPESFCGRG

SEQ ID NO: 229996 - protein, 340 aa, unidentified
MTIRTIGLDLAKSVFQAHGVDETGAAVLKKRLHRKQMLPFFSKLPQCLIGMEACGTAHYWARTLAAMGHEVRLIPPSYVKAYVKRGKSDALDAEAICEAVQRPTMRFVPVKTVEQQSILMTHRSRSLLVRQRTMLANALRAHLAELGLVTNPGIANLAKLAQQALSDEDALPCHARTTLEVLVRQIMTLSEEITALDRKLLAWHAESEASRRLAAILGLAIVTATAIAATVIDPTQFRSGRQFAAWLGLTPQQHSTGGKTQLGGISKQGDRYLRRLLVVGATAVIRHTKDKPSPMANWIRKLLEKKAFRIVSVALANKLARIAWVVLTRKEAYQPYQLAA

SEQ ID NO: 229997 - protein, 429 aa, unidentified
MNYINCNQNFKISQVNSESLIIGIDIGSTFHFARAFDWRGKELDKTFKFKNSLEGFNSFYSWIKQVATMNNKISFIAGFEPTGHYWFPFGEYLKDNNIQLVMVNPYHVKRTKELDDNLQTKNDLKDPKVIAMLVRDGRFNFPYIPEGIYADLRNMDRIRESIIENINSIKNKIHRWLSIYFPEYKDIYAEIDSKSGFLILKQVSLPKDIAALGADKIVELWKKQKLRAVGIKKAKKLEEAAKNSIGCKNGSSSAKFEIKFLIDEYEHQQEQLKTVEEELEKLCENIPHIEEIAKIKGIGKATATSFVSEIGDIKRFNSSKQLQKYAGLALIENSSGKHKGLTKISKRGRKKLRTILFRVALPLIIKNKEFSSIYSYYLDRKDNPLKKKQALIAICCKLIRVFYAILSKGIKYDEKKLLEDIKRPARLVA

SEQ ID NO: 229998 - protein, 453 aa, unidentified
MKRETEKMGVVKMGAGLPVFNPHAAGIDIGDTLHCVALYDGNGGHEVKTTSAFTCDLYEIVDYLKSNGITTAAMESTGVYWLPLYIMLEDAGIEPYLVNAKSVKNVTGRKKDDTDSIWIQKLHTCGLLQKSFQPDNEIRLLRSYTRQRKNLILLCSDAVRRMQKALELMNIKIHTVISDILGKTGTKMVMAIIAGERNPQILATLCDPRIKAPQEEIIKSLQGIWKEEHLFMLEQAVENYEFHQKQIKSCEEKIKLQLLKQVATIKEGDITSLEETLKKKKISKPKKNQFNFALSPYLIAIIGVDLCKIPGISEVTALELISEIGLDMSKWKSAKHFAAWLNLIPNTKITGGKIISSKMMKKNNKAGQYIRQAASCLFTSKTPLGDYYRKMRARLGGKGAALATAHKLARIIYNMLLKKIEYKQELMIENHEKFIEEKIKKLENQLARLKKAA

SEQ ID NO: 229999 - protein, 340 aa, unidentified
MAILAGFDVHRAQITFDALNTETGEVLTGRMRADRAAVGEWAGRFAGERVEVAVEACTGWLFVYEALAGAGVVVHLAEPAEASALRGKKRRAKTDRADARWLRTLLAEGRLPEAWIPPAHVREWRTQTRLRKTLIDERTCWVQRIQATLFHHGIVDVPDQLLRSNGRAFLDTLVLPPAALQRITVALAIIDEIERQLIPLERELARLARRQLGCQALMDQYGVGPITATTILCELGDVSRLSASRKAVRCSGLDIGVYRSDRRSRAGRITRQGSPALRWALYEAAQTACKPASPDHADYLALKARGLTHTRASLTIARKLARRSYHILHELGPDALAPTT

SEQ ID NO: 230000 - protein, 352 aa, unidentified
MAATAQSAIAVIGIDIGKNSFHVVGLDGRGAIVLRQKWSRGQVEARFANMSPCLIGMEACVGAHHLSRKLKALVHDARLMPARYVRPYSKGQKNDFRDAEAIAEAVQRPTMKFVVTKTADQLDLQALHRVRERLVSQRTGIINQIRAFLLERGIAVRQGQRFLRVELPRILATPPDVLSPRMVRVIEGLASDWHRLDERIEGLSTEIEELAKRDAGCERLMSIPGIGPIISSAMVAAIGTGDSFSKGRDFAAWLGLVPRQISTGDRTILGKISKRGNRYLRVLFVQAAWVVLVKVKPTRWQGHGLRPWIEAAKKRLHHNVLAIALANKLARIAWSVLVHGRAFETNKRQAAA

SEQ ID NO: 230001 - protein, 401 aa, unidentified
MNTTTMLYVGIDISKDKSDICIKDVKGNDLIQRFKITNNKADLGYLYETIERIGSKTTGSIDVVFGMEATGIYSLPLYSALTRDGHKVKLYNPIQTNGFRKMNIRKTKTDPIDAAIIADMLRFSEPPQVNPIKDLNLYQLRELVRIRDRLIDKQTVCKVQLVRNIDTVWPDYSSVMKRATGATSIAIMKKYSVPSKVRAVSFEKFYELVKKKSRSKISPTTAEEIYAHAGNILTIPELDSIISVEIKTLITELELYGEQIRSVEKRIDQMMKRIDSKIMSIPGIADILGPTILGEIGDIERFSNVKKLVAFAGLDPVVSQSGRFENKSGKISKRGSPLLRHALFLAANSATQNDENLKRFYSKKRSEGKHHFSALNAVAAKLLRIVYWVLKNNKEYHTQLN

SEQ ID NO: 230002 - protein, 347 aa, unidentified
MLIIGCDLHTRTQQIAMLDTETGEVVEKRLEHENGEAKRFYEELKEPALVGMESTGYALWFAALLAELGHELVVGDAAKIRAMEPRKQKHDRRDAAHLLNLLVRGDFPRLWLPSVEERDVRVLLEHRHQLVELRTRAKNGLQAIALNYGLARRTRLWTERGQAELQKLPLREGMARRRADLLRLLAQLDSWIHELDQRLKREAEEREAARRLMTHPGVGPLTALGTVLVLGPVERFPDARHVTSSVGLIPQEESSGSRQRFGHLTKQGNRLLRFLLVEAAQSASRLDPGLRRGYRRLAFRKGHALAKVAVARKLLIRLYIMLRDEIDYAEFCRRGSHAGMLGEVALA

SEQ ID NO: 230003 - protein, 413 aa, unidentified
MAHKTAEVELHYGRCCGLDVHKELIVACFRNGSKNTIREFGATSKELQRLAGWLMDVDCEMAVMESTGSYWKPVYNILELLGLEVMVSNARDVKNLPGRKTDVNDAEWMARLLAQGLLKPSFIPDRSQRELREVTRYRKSLTEERAREINRLGKMLEGANIKLTSVVEDVLGKNSRVLLEAAIAGEPITGITIEGMLKGRIKGKSALLVDAMDGVLSKTQRLLIKAVLDHIDDMTRRISDLDDIIRGEMEKYDEAISRLDTVPGIGPQSAQTILAEIGLDMSLFPTAGHLAVWAGVCPGNNVSAGKSKGGRTRKGNQTLRTTLVQCAQSATNSKGTFFKAQYDRLVVRRGKNRAKMAVAHSMIIAIWHMLKCESDFIELGGDYYNRFNPEKKINMYLKKLKDLGWVPPVPVVS

SEQ ID NO: 230004 - protein, 408 aa, unidentified
MQTVHERCCGLDVHKKTMVACVLTSTRRETRTFRTMTFELLELVEWLEYERVTHVAMESTGVYWKPVFNLLGGRDFELLDVNARHVKAVPGRKTDVKDAEWLADLLRLGLMRPSFVPDRNQRELRELLRYRRTLIQEKTRLISRVQKVLEGANIKIGDVASNVVGMSGRAMLRELISGNTDTQAIAELAMSNMRPKRQRLALALEGTVGANQRFLLQSQIELIEVMEKQIEAINVEVEQRTRPFQAAIDLIDQIPGIARHGAEQIIAEIGIDMSRFPTPAHFASWARVCPGTNESAGKRRKASTGAGNPWLRSAVIEAALASVRAGRARPNFFAARYRRLASRRGSKRAQMAIAHSMLIAIYHMLRDDAHFVDLGPEHWDSRHRESVAQRSIRRLQQLGYRVTIEPAA

SEQ ID NO: 230005 - protein, 445 aa, unidentified
MPIVHRNAAGIDIGSQFHVVAIPPDRAEETVKSFKSFTGELHAMASWLLMSGIETIAMESTGIYWIPAFEILESYGFEVFLVNAREAKNVPGRKTDFSDAQWLQKLHQFGLLRASFHPTSDIAELRAYLRQREKLLDYKAAHIQHMQKALIQMNIQLHHVVTTITGKTGMSIIQAIVAGNRDPQDLVKFRDARCKNSAETIRAALTGNYKPEHLFALRQSLELYDIYNEKAAACDQEIQTVLDRIQQNIMPPEQPLPKAKHNTVNKNAPDFDIRQVLFNIIGVDLTQITGLVPYLSLKLVSECGTDMSKWPSAKHFTSWLCLAPSNKISGGKILSSRTRPSSSRAAALLRLAAAAISRSETALGAFCRRLSARVGKAKAITATARKIAVLFYNTLRHGLLYVDPGADYYEEQYKSRILGHLRRRADSYGFTLQPKDVSAATIGVS

SEQ ID NO: 230006 - protein, 407 aa, unidentified
MPDYDWYVGVDWGGERHQVAILDATGARVAEHQVAHSGAGRESLVEHLARLGADPGRVAVAIEVPRGPVVDTLLMRGYHVFALNPKQLDRFRDRYSVAGAKDDRREALVAASALRTDQLAFRQLQPDDPQVLRLRELSRTYDELLGEERRLANQLREQLWRYYPQALTHCPGADESWLWELLHEAPTPAHAQRFTRPALRALLARYRLRRITGDMLYETLQARSVTLTPGAAEAAAEHVELLLPRLRLVHEQRQQWERRMDALLDALGTPVEGRQEHRDVTILRSLPGVGRVVAATMLAEAWGLLAARDYQSLRAQSGVAPSTQQSGKQRLVLMRRSCNHRLRTAVFHWARNSVRLDPRCRAQYQRLRQRHSQARALRSVADRLLSVLVAMLCSGTTYDVTRCPNAA

SEQ ID NO: 230007 - protein, 411 aa, unidentified
MEQIHDRVAGLDVHRDTVAVCVRTPGPRGGAQTEKARFDTTTGGLAALAEWLAGHAVALAAMEATGVYWKPVYYALEGRFELWLCNAHHVKNVPGRKTDMSDAGWLADVAAHGMVRPSFVPPPPIRELRELTRYRKTQIDVRAAEIARLEKVLQDAGIKLTSVASKVLTQSGRAMIEALIAGQRDPVALAELAKGKLRPKIPQLTAALRGHFGAHHAIIAARILAHLDFLDETIGALDARIAARVAERYQSAARLLADVPGLERRSVEVIIAETGADMSRFPSPAHLASWAGLCPGNHESAGKRRRVATTPGNQWLRRTLIESARAAARTKDSYFGAQYRQIARRRGPNKAAVAVAHSLLDVIWHLLTTGEVFTDLGADYFISRQDKEHQARRLTRQLEKLGFTVQLTDAG

SEQ ID NO: 230008 - protein, 411 aa, unidentified
MQVIHERCAALDVHKKTVVTTIMKTQADGSVQEWTRTFLTMTADLLALDDWLRSHGIEIIAMESTGVFWRPVFNLLEEGRQVILVNAQHMKAVPGRKTDVKDSQWLADLLRHGLLKASFIPPKPVRELRDLMRYRKTIVQERADEVNRLQKVLETANIKLASVATDVLGKSGRSMLDALLDGQDDPEMLAELARGRLRAKLADLRKALDGRVQPHHRLLLTRILAHIDFLEESLAQLQAEMEQYLDPFEEAMELVQSVVGIDETAAASILAEIGTDMTRFASEKHIASWAGVCPGNKQSGGKRLSGKTTKGNPYLRAILCEVAWAIAHTKDNYLSAFYHRVARRHGKPKAIMALSHKVLVIIYHILRTKKPYTDLGADYFDQRDRGRIERHHIHRLEQLGYTVTLIPKEAA

SEQ ID NO: 230009 - protein, 421 aa, unidentified
MSYRVAAIDIHKKVLMVVVATAASEVDDATGEALEFDCRRFGTGSAERTHLVSWLQERGIAEVVMESTAQYWRPVWLDLEPHFAKLHLAQAQSNRAPKGRKNDFRDAKRLARRLLAGELMLSFVPDAEQRTWRTLTRSKQQLVRDRVRLQNQVEALLEEMRIKLSGVISDLFGVSGRRILSALAEGKTDPVKLAELGDDRLKCSREELADALRGAPTPTHLAVLKLDMERFEVFNQQIQNLNQLVAEELKKHEEAVIRVAEIPGFGVDSAQQIIAEVGVDAETFPSAGQFSSWVGVCPGSNVSAEENQSSRSPKGNRFVRRILTEAAQAAVRKKGGHFQSVFRRLLPRLGYNAAIWAIAHRLGRLLWKILHDGVRYIEQGTETNPKAKKRRAQKLAQALRKLGYCVTLTPIPPEPLLEGQG

SEQ ID NO: 230010 - protein, 424 aa, unidentified
MKYKMQYKQNQLIERISDSHLVVGVDIAQHIHVARAVNFRGIVVGDPLSFENNEDGFHRLKEWINELNRKNNLHSTIVGMEPTGHYWTNLSKWLLNQTIEAVTVNPHLVKRNKENRDNTQSKSDKKDAVVIADMVKNGYYTFIHKTPESFEKLQVLMSNRDVVVKRLVSSVNQINRWVDVVFPELREVFKNVTCKGAIATLRLFPTPGELKSLSPQDIVQGWRSIMKRQPGFQKARLLSELAKESIGSQTAIDAYTFHLSQLLEEYDLASIQLERVENEVTECLNQIPFAMKLLAMKGISKISLSGILGEAGDLSGFAHGNALLRHAGLHLVEASSGKWKGKVVISKRGRSRLRRFLYLATLSLVMNNPEFKDLHYNNIHVKKMKGMKSIMKLIGKLARILVSMARRNESYCPEKVQASTSVAA

SEQ ID NO: 230011 - protein, 384 aa, unidentified
MRTVCGLDVHKDSIYLCILNDSGEIFERVFGVLTTQLHEMRDLMLSCGVKEVSMESTSIYWIPIWRVLEGHFTLHLVNPYFIKQLPGRKSDVKDAQWIAECTMKELIGGSFVPPEDIQQLRQWDRRIFDLDEEIVRKLSKLDAVLQRCNIRLSNYVSNVDCKSYKKVVALLASGVTDPEVLVAQVHGRIINRHGRDTIKASLTGIVSEAEKDAMRQLAEEIEMAERHKRECQERMTAKCEELFPDELRRLQTIPGIKERAATSLIAEIGTDMDKFPTANHLASWSGLKPRNDESNRKVKSRRITHGNRYLRKTIIECAWAASRTKGCFFSRFSYHLTQVRRKNKMKTLVAVARKLLIAVWHVLNDKVEYKDFQKDPDTPDGNKG

SEQ ID NO: 230012 - protein, 449 aa, unidentified
MPKRQSKPEGLPIVHARAAGIDIGSRFHVVAVGSDLSDEPVQTFEAFTADIQRMADWLIAVGVKTVAMESTGVYWVPVYEVLESRGIEAVLVNARQARAVPGRKSDVNDAQWLQRLHACGLLHASFRPGRDIAALRAYLRVRERHLDYAAAHIQHMQKALTFMNLQLHHVVSDIAGETGLKIIRAIVNGQRDPKVLATLRDVRCKASAETICASLVGNYQPEHVFALTQALTLYDFYQLRVAECDAQIEGVLRLLAAQKPQPPTSLPKARHSTKQRNAVGFDVRALLYQLTGIDATQIHGLGPYLTLRLVGECGTDLNRWPTVKHFTSWLTLAPGCKISGGKVLSAHTRKTANRAVALLRLAAVAVGRTNSALGAFYRRLSARIGKAKAVTATARKIAVLFYNAMRFGTQYQDPGADHYEQKYRQRVIKQLRRRATEFGFTLQERASVS

SEQ ID NO: 230013 - protein, 389 aa, unidentified
MEARTLNHLPPAASHDGAVRCLLAIELSKKSWIVAVNTPLSDKISRHTLQACDWKGLLELIERIRTRVSQTFSRPVEVISCYEAGYDGFWLHRLLEAHGVRNFVIDPASVQVDRRARRVKTDNIDVGRLLRSLMAYLRGEPKVWSVVRVPSVTEEDDRRLHRERDRLINERVQHVNRIKGLCAVHGIYDYEPLRPNRLARLEQLRAAGKRELPPRVKAEIARELQRLELVLNMIKTIEAERDAIASAGKSSTHANAKKIQDLTRLKSIGPEIGTTLVGEVFYRQFNNRQQLGSYVGLTPSHFQSGPLSRDQGISKAGNPKARTVMIELAWLWLRHQPNSPLSIWFRERVGTAKGRIRRIAIVAVARKLLIALWRYLETGVVPTATVLKV

SEQ ID NO: 230014 - protein, 353 aa, unidentified
MIVVGVDPHKETHTAVVVDELGRKQAQLTVRARRDGHRELIGWARDVAPAGRLWAVEDVRHVAGGLIRELLAAGEMVVFVPPKLMAGVRRGGRERGKSDPIDALAIARAALREDAHLPAARLDKQVLEVRRLVDHRDDLVAERTRVINRLRWMVHDLAPELAPAPRALASARGCAKLEAGLRALPDSAGRRIALSQLARIIALTAEAGQAERELASLVRHLVPALLQVAGVGVITAAKILGEIGDIRRFRSLAAFARHNGTAPIPASSGTGKDGPHRLNRAGNRQLNAALHRIAIVQARCHDGARILLQRRGETAHETRKASLRVLKRHLSDVVYRALAADAWRLDDPAQQAA

SEQ ID NO: 230015 - protein, 481 aa, unidentified
MSKQEKRSKPLGEEKTRAGKGKRGRKRKGMCLEDRPILEVNAAGIHIGAREIFVAVPPDRDEHPVRVFSTFTEDLEKMAQWLASCGITTVAMESTGVYWIPLYDVVEKHGVKACLVDARGMKNVPGRRTDWHECQWLQFLHSVGLLRAAFRPEGDVCAVRSMMRHRTQLVEMTSQHIQHMHKALTQMNVQIQHVISDLTGLTGLAIVDGIIAGQRDPAALAKLRDPHIKASEETIRKSLVGNWRAEHLFTLQQSRESYQHYQEQISDCDEAIEKMLMAFAPRVDPAERPLPPDRKRKQRGRKKKNVNPKTGFDLRTESYKLFGVDLTQIPGLMAMVLMLFSEVGRDMSRWPTAAQFVSWLALCPDNDISGGRVLWRGMRRVHNRAGDLFRMAAYSLHHDQTPLGDYLRRMKSKLGPAGATTATAHKIAIIFYTMVNKQIEYDATLWAQRDAQREKRFEAKLKRQAQQLGYKLVPIEEKPAA

SEQ ID NO: 230016 - protein, 430 aa, unidentified
MTSIQPTPAGAALVAVDVAKLRNEVLIELPETRRRRRLTVANRRDEHDRFVAELQALARPVVVGLEPTGHYHRPLAWRLVQAGFDVRLVSSVALARTREALHNGWDKNDPKDAQVILHMLRIGAAKAYHDPLATGINDVQELSMTHEVVSRAKTEVLHRIQTHYLPLYFPEAERFLNSTRSEWFFAFLDRFPVPAAITTLSKEEFIKAAWHVVGRKVSKARLLGDIHETARTSIALPVAPDAPAVAMFRLVIAEARHLIRQRDAIERTAGELLGAHADYRRLQQIPGIGPINALTVLAEAGDLRRFGHHRQFLKFCGLDLATHQSGQFRGRTKLSKRGNARLRRTFWMAAQVAIRQRENGFRDKVERYVAGDRQDADLRRKAFTAVTAKMARVAHALIKAGADYRPFVEGPVPGGGTPLCRSRRGASATP

SEQ ID NO: 230017 - protein, 390 aa, unidentified
MPLVSGQAAAPTAVRTDLGAIFVSLELSRSTWLITSLSPGGGEKMSKHQVRGGDIAALLARFAELKAKALARTGKSFPLVVIQEAGLDGFWIHRALVGEGIESHVVDPASIATSRRRRRAKTDRIDGEALVRTLLAHKRGEPRVCAMVRVPTPEEEDRRRLCRELKSLIGERIRHVNRLKGLFFAQGIGDYEPRRSDRRERLDGLRTGDGRPLPEHLKALARRELDVIELLNAQIEEVKAGRDALLAAARATASPPAPVAMLLGLKGIGPGFAGALWSEGLFRHFDNRRQVAAYAGLAPTPWQSGRVDHEQGVSKAGNPRRRAVIVEMAWLWLRHQPDSALARWYRDRVRRDGGRMRKVAVVALARKLLVALWKYVTAGVVIEGAAMKSA

SEQ ID NO: 230018 - protein, 483 aa, unidentified
MMTVSNKSRESTSPTRRRSGSRKGRRGLCLEDRPVHNPNAAGIDVGAREIFVAVPAGRDEQPVRVFNTFTEDLEQMAKWLVGCGITTVAMESTGVYWIPLYEILERHHLELCLTDARHMRNVPGRRTDWHECQWIQYLHSVGLLRAAFRPPEQVCAVRTLMRHRGQLVEMASQHVQHMHKALTQMNLQIHHVLTDITGQTGLAIVDSILCGERDPDVLAGLRDPRVKASPDTVRKSLVGTWRMEHLFTLKQSRELYRAYQTEVAACDQQIEQLLGQFSPRVDPTERPLPPDRKKRQPRKRTRKGEPAKATPDLDLRTEAYKLFGVDVTQIPGIAVALALALFTELGRDLSKWPTSSEFASWLGLCTDNDKTGGRVVFRRARRGKHRAGQLFRLAAYSLHSASGPLGDYLRRMKTKLGPRAATTATAHKIAVIFYTIVRNQVEYDETIWAARDAARAQRLEAKLRRQAKGLGYQLIPIPEQPAA

SEQ ID NO: 230019 - protein, 346 aa, unidentified
MSGFTIGVDIAKRVFQVHAIDHETGEVTSKKLARAEFVAYFKKLPPSHIGMESCGSAHHWARELGALGHGVRMMNPMYVKPYVKRGKNDAVDAEAICEALTRPTMRFVPVKTIEQQSVLVVHRTRALLIRQRTMLVNALRGHLSEFGIIAPLGIERIPELIDRVLGREGDEFGITPLVRSIVVMYAEQIENIKEQIRKLERELRTWHRTSEASRRVASVPGVGTITATALVAAMPDPSAFQSGRAFAAWLGLTPKSSSSGGKERNGRITKAGDRHLRVLLVLGATSVLRRVRAGQQTPLYGWVKKLLDRKPPRLATVALANKMARIAWAVMARNVNYQPELAAAVG

SEQ ID NO: 230020 - protein, 466 aa, unidentified
MKHNRRRPVGKPRVSPSVLERINPDVAGIDCGSAEHFVAVPPDRDPTPVQSFPTFTSDLHRLADWLTACRVTSVAMEATGVYWIPIYEILEARGFDVHLVNARHVKNVPGRKSDVSDCEWLRELHSVGLLRGSFRPTDAIVGLRAYLRHRQTLIESAGAHIQRMQKALVQMNVQLPLVVSDITGVTGLRILRDIVADRRDPVQLAEHRDHRCRASKAEIIAALTGHYRPEHVFVLQQNLELFDACQAKLAACDTAIEAHVQKLTESSVAPATPLPPARVTKKPRDNEPRFEIRTPLHQLTGGVDVTQIDGITPYTALKLLSEIGTDMNRWPSEKHFTSWLTLAPKNKISGGRLLSSRTQPSANRAAAILRMSVMSLGRTQTALGAFYRRLAARIGKPQAITATARKLAILVYRALKGELLYQDPGANAYDAQQRTRLLRRTRQRAATLGFHLVNRETGELLEAVVS

SEQ ID NO: 230021 - protein, 481 aa, unidentified
MPSLRENSQRIKRFRELKATLRTDRTRLLVGIDVAQAEHVVHLRHAHTRVVVPTLTIPNTTRGFTQLWARIQQAQRSTGCREIVCGLEPTGTYHRALAAFLETQGADVVLISSSVAAWNRRTQDGTWDKNDRKDAANCADLLEQGKILFASQPTGPLAELRQLVRLLRRARTELASCKARWRTTLRPSLAPMGEPLPSRLWAELPAVLQAWEPVAPGRPAVPKGRLPLGLATACTDLDAQVTAVQARITTIEAACTPLAERLPAYALLRTIPGIGPTVGAILVAEIGDVAWFTTCSQLRKLAGLDIVRVQTGQYAGQWRISKCGRGLLRWALVPGRRWPRADHARPRPTRGPEGQAARGSVRGLQGHGRAGREATPARVGRVAERTAVRPDPGRRRPAAAALTAPLNTQGSCFPGESAARHHNVAARWDRRGTLARRSHSQQPGLGRVDPARQRGDRMAPLRWGMREHPGAVSGEDGRGDA

SEQ ID NO: 230022 - protein, 341 aa, unidentified
MDDISIIGLDLAKRVFQAHGARADGSVGFRKKLGRSQVLGFFAKQPRCIVAMEACATAHEWGRAIGELGHEVRLIPPIYVKPFVKRQKNDAADAEAIAEAAGRPTMRFVAVKSEAQQAKAMAFRTRDLLVKQRTQLINALRGHLAEHGLIAPQGPAHVKVLADALEAAGSRLETLVIELGRLYLEQIELLSGRIADLDKVLKREAAREEETARLMTMPGVGPLTAMAVQTFAPPMETFRRGRDFAAWTGLVPVQRSTGGKQILGRMSKMGQRDIRRLLIIGAMSVIRWAVRRGAPEGSWLARMLARKPRMLVAIALANKMARGIWAMSTRGENFRGPVAAV

SEQ ID NO: 230023 - protein, 402 aa, unidentified
MAEGSTRFFGLDIHKEYFVAVGVNRECEVVFGPQRVSNYQLEDWVFRVLTTQDAVVLEMTTNTYLFYDTLLPHVHSVIAVHPPNVALVTNVRVQTDKKAAQALAQLHAAGLLTGVWIPPHEVRDLRALIARREKMVRLSTMAKNRLHSLLHRNHLVLPEKPFSPEQRSWWESLPLSEAEQFLVRSDLDTLEFAQKQVEQAEECLKKASAEDERIPLLVQLPGVAMLTAITILAAIGDITRFPTAKKLVGYAGLGTRVHDSGMTHNSGRITKTGRKDLRRSMVNAANHAIEHHPHWKKEFGRLEPHLGRSKAVVAIARKLLVAVWHVLSEKAADRFADPASVARSFFAHAYKVGVRNLPEGQSAITFTREQLDRLGIGQDLKEIPWGSKRHKLPLSKLLPEKK

SEQ ID NO: 230024 - protein, 354 aa, unidentified
MKYYTSSTEFNCGIDLHARQMYVCVMDRQGKKLVHTNVKDNDFSFFLKLVEPYKHDLTVCCECMFGWYWLADACQQAGLTFVLAHALYLRAISGGKNKNDRIDSEKLTHLLRSNLIPPAYVYPAEKRPLRALLRQRIFYVWHRAELLARIHSHQLAHNRIPAKQTRRNRDPWKEQLLAAENHPLRQLALKNDLAMIQHYDNQIQSMEQELMRLTKKHESRDYALLQTVAGIGRSLGLTILYEIGDIARFPTVKDFLSYCRLVKGTVASAGKIKGLRGAKLGNPYLRWAFGEAAVIAKRDHHIIGPLSQRLEAKMGGNKFKANTVVAIKLARAVYFMLKNKTVFDPERLVAALAK

SEQ ID NO: 230025 - protein, 308 aa, unidentified
MIMQNYVGCDISKQWLDFFDEASSRCQRIDNQADAIAAYVAGLHPGRDFVVMEATGVHDRLLRHGLAKAGVSFSRHNPTHTHHYAKSTARRAKTDPLDARMLSGYGRRYHPEAEPVPREEGEHLQSLARHRDQLVDIRATLKKQRADAFDEIVMAELEELIASFNTRIKALESRIAETIRQVEDTARDNALMVSVPGVSKITALSLLAHLPELGQRSPKSITALAGLAPFDNKSGKLNRRSQIQGGRPRVRRALYMAALGAIRACDRFRAFYSAIAARSGSKKLAIIAVARKLLVVLNAIIRDKKAFA

SEQ ID NO: 230026 - protein, 354 aa, unidentified
MSKYTTESFVGMDIGDREIRFCILDPDGSVMASGSLETTVRGLNAFLDRFDTPETVLVALETGTHSPWISHLLEARGFRVLVGNARKLRAIWDTDNKFDDRDAEMLARIGRFDPALLYPIHHRSRRAHADLAVIKARDTLVRCRSTLIAYLRGISKTAGARLPSCTAEAFARRVVEHLPEDLLAAAIPCVNSIDELNGKIRQLDSHIETLCAEAYPETKTLRQIAGVGPITALSYLLTLEDPNRFLKSRDVGPYLGLTPKRDQSGQSDKPLPITKAGDTYLRRLLVGSAQYILGPFGADCHLRRYGMRIASRGGKAAKRRAVVAVARKVAVLMHHLWKYNAPYDPWYQPNAKAA

SEQ ID NO: 230027 - protein, 339 aa, unidentified
MKLYVGDDLHANNNFLALVDGKGKRVDQAKLPNDLFVIRDFLKPYQKDIVGIAVESTFNWYWLVDGLMASGYKLHLANPSAIQQYSGLKHSDDKHDAFWLAQMLRLGILPEGYIYPKEERPIRDLLRKRRHLVKLRTSLVVSLQNIISRNCGVSFRVNEIKRLKEDRVSPLLESNEDLALAGLTSKEMIDQLTRQIQRIEGTVVQRVQLKEAYRYLLSLPGVGKILALTIMLETGPIARFAQVGDYASYCRKVPSRWTSNEKTKGKGNQKNGNKYLAWAFSEAAEFARRFDRQARAYYTRKMRQTNSPVAHSALAHKLARAAYYLMKDQVPFMPEKLFS

SEQ ID NO: 230028 - protein, 351 aa, unidentified
MKTEPTAQPKLYVGIDIHKRSWKVHCATDLFMGKSFSMPPEPQILYDYVQKNFADHEVSTAYEAGCCGFSAHRSFKHFGWLSIVANPADIHRSGKEKYSKTDRIDAQLIARELKDGRLNPVTVPDVEREELRSLFRRRNDIIKDIRRNKSRIKMQLLYFGIPVPEGFNTDKWSHKFRDWVDAVTFAHPTAKSALDGRMRTFRFLDREKREVSTELRAYCRKHYKTDYDLLRSVPGIGGIVACGILSELGNLRRFTTIKHLAGYLGLAPGIYQSGDNSRDTGVIKRANKIMRSYFVEASWQAIRADPIMQAYYRKHLPKNSKTIIIKIARKLASRTLAVVKTGIPYQPGVLQ

SEQ ID NO: 230029 - protein, 470 aa, unidentified
MTEAPGRPAYWNVDVVEESELRSKPNQTPMPQEIPDAEHELVIERVAAIDVAKASGKVCVRSPRERRRVSKVWDVAATTGTVSDLAGQLTELGIEKVTVESTSDYWRIWYYLLEAAGLEVQLVNARDVKNVPGRPKTDKLDAVWLAKLTEKGLLRPSFVPPAPIRQLRDYTRLRVDLTRERARYWQRLEKLLEDALIKVSSVASKMDTLSVRDMIEALIAGERDPRRLADLARRRMKAKRLALIAALDGRFDDHHGELARMLLDQIDALSAQIVTLTTRIEALLEAAEPDDAGDRAHPPHDVGAAPAGPSTVERLTEIPGIGPTAAQIILAEIGRDMTQFPTAAHLVSWAKLCPRTIQSGPVIRGGKTGKGNPYLKGALGEAAAAAAKTDTFLGERYRRIVKRRGKLKALVAVARSILVVIWHLLNDPAARFRELGSDYHTRRIDIERRMRTHIAQLTAMGYRVTLEPAA

SEQ ID NO: 230030 - protein, 391 aa, unidentified
MIYVGIDVAKDKHDCFITNSDGEVLFKSFTISNNREGFETLFQKVQSVSDDLTKVKVGLEATGHYSYNLLGFLLDKGLTTFVINPLHTNLYRKSLSLRKTKTDKVDAHTIASMIMSDVNLKSYSDTSYHNEELKSLTRYRFDKVQERAKLKTSVSRLICILFPELEKLVATIHMASVYALLSEFPSAHAVASAHLTRLTNLLSESSHGRYGKDTAVMFREAARNSIGSNMPAKSLELKHTIKLIQELTSEIDEIETEIKSIMDEVNSPILSIPGINYRMGAMIIAEIGDFSRFDSPDKILAYAGMSPSTYQSGQLDNCYSHMEKRGSRYLRYALYNATKYVCHWDESFGTYLAKKRAEGKHYNVALSHATKKLVRTIYAMEKTGQSYSSAS

SEQ ID NO: 230031 - protein, 351 aa, unidentified
MRMYAGVDVHRGFCQTTVMDEQGAIVERAKIPTDTEHLAAFFERYRDAHAVIESNTIGEFVYETLDRLGVDVCLASPAQVKAIAQARVKTDTVDATTLAHLLRTNLIPEAWVGDEEVRELRKDVRARRGLRDISTELKNQIYAEMIRKGIAYEDGVLRSKKGRAWVRDQFVDNPRVIARLDLMEQTETTIDEYNKTVLLPKFTEESQAPLLATIPGVGYYTALTVVALIGDVTRFPDSDHLVSYAGLAPRVHQSANVLHLGPITKEGPRELRWVLVEAVHSHLKHCDAKDVCGLCRFYRRLSRRRGKMKATVATAAKLLRVMYWMLKMNQPYRPQGLDPEVGHAGKPPFDD

SEQ ID NO: 230032 - protein, 426 aa, unidentified
MSNKLVAGIDISKAFSDICILSPRNEIIVHTKINNDYEGMKSIDLTFKKLETDYNTQLVVIMEATAHYHQLLANFFRKLDYEIIVINPIQSNAIKNINIRKVKSDKTDAYNIALLYRLKNYSETETHADIIISIKKLCRQHKELTDEIVEHINRLTGFLDTSFPDFRKVFTDLQGKTALTILAEYPTVTAILDPELDKAKIINQIKTISHKSESYAIKKYDKLYQAARNSSEICISNLSTSILIQTTVAVVFSLKEALRAIDDEITRLSIMDKQFQANVKLLQTIPGIGEYTACVLLSEIGNIENFSKPKQLVAFFGLDPGVSQSGSYNRKNNKISKRGSPYVRTILHMLAKANVYSNRNREYPNPVMRDYFEKKIVDKPYKVVMCAVMRKMVQIIFAVLRDQKPFELRTPDDHQKMIRLNNKQAA

SEQ ID NO: 230033 - protein, 328 aa, unidentified
MQKSKEYVGVDVSKESLDMVMYSTGEMCCVGNDEAGIAKATGWLKQVDPAIIVMEATGGMEVSLYVALQEANLPVAVINPRQIRDFARSMGILAKTDKVDAKVLARYAATIQPEVRPLPDEDAHKLRALVTRRRQLGEMIIAETNRARATRDKAMKERIHAHIEWLKRELANIDKDISQRIKENPLWRAKNKLLQSTPGVGPVLSATLIAELPELGVLNRKKIAALVGIAPLNRDSGKHRGERSIWGGRCKVRQSLYMAALSAARFNPAIQAFYQRLIASGKDKKVALTACMHKLITILNAMLKHNSYWSCNHATFPDASLPSAKTVA

SEQ ID NO: 230034 - protein, 397 aa, unidentified
MNLNIGIDIAKNVHEACLVNENGEQIGKFIRLKNSKKSIEKFTKHIESVSKELNAKPRIGMEATGIYWYSLFSELSKKYKIHVYNPSQISGFASVNIRESKTDKIDAKTIANMLRFGESPKTNYSDTQRLELREYGRFYFKLTSIKINLKKRLRRNLHLIFPGYDEIFKNLYTATSKEIITNITTPEKVLEMGEKKLLELMKEKSKNHIDPEKAKILIEIAEDTIPSEIIKESSLFEFQMMLEMIENYEKQLASIENKMMSIWNKVREKHYIQTIGGVTELRAAMIWAEMGDVDDFKHPDQIVAFAGYDPKVRKSGNKEVIGGPNKRGSKILRWVLGWTVQEAKCSNPVIGQYFDKKIEQGKHYNNARCAAAKKLIRIIWSVEKNKKPFQIPCNLIS

SEQ ID NO: 230035 - protein, 314 aa, unidentified
MAEENVYIGIDVSKGWLDVAVEPSGQFWRTENNEQAIANLSERLAGLTPVRIVVEATGGYEVKLVTRLCEANLPVARVNPGRVRKLAQGLNWLAKTDRIDAKLLARFGEKADPRLTKLPNEHERRLAALVKRRKQVLDMLVAEQNRLETAEPEVVQYIQDSTTVLQKQLDELDQAIQSLIDKTPDLKDKQDLLLTVPGVGPVTASTLASQLPELGACDRKEIAALVGIAPFSHDSGKKRGKRFIKGGRPSVRSVLYMAALSATRFNPVIRVFYNRLIQAGKEKKVALVACMRKLLTILNAMIRNHQPWQSSFSY

SEQ ID NO: 230036 - protein, 397 aa, unidentified
MTESSDYESVQVFIGVDVGKDTHHAVAINRSGKRLFDKALPNDENKLRSLISDLKQHGQILLVVDQPATIGALPVAVARSEGVLGYLPGLAMRRIADLHAGEAKTDARDAAIIAEAARTLPHALRTLKLADEQIAELSMLCGFDDDLAAQTTQASNRIRGLLTQIHPALERVLGPRLEHPAVLDLLQRYPSPEKLASLGEKKLAAQLCKLAPRLGKRLAADIAQALAEQTVVVPGTNAAAVVLPRLALQLITLRKQRDEVALEVEQRVLAHPLYPVLTSMPGVGVRTAARLLTEVACRAFASAAHLAAYAGLAPVTRRSGSSIRGEHPSRRGNKALKRALFLSAFAALRDPLSRAYYTRKMSQGKRHNQALIALARRRCDVLFAMMRDGTFYTPQGS

SEQ ID NO: 230037 - protein, 323 aa, unidentified
MTYIGIDISKDSFVAAFPTVSGYQTQTYPNTVKGIRKFIGSLSVTEHHCVMEATGNYGFLLLYLLDRQGIASSMVNPKQIKHFSRMMMTVTKTDPKDACMIAMYGEKMNPPVYKMPSEAVMLLKQKKTIIRQLKKQLTASKNLKSSLVVLPFQDKNGMKALDKTISFLASQIESLESELADLASSEFDRQVKLLTSIKGIGITLATALIVATGGFSYFNNAKQVSRFIGICPTYQQSGTSVHIKGGINRNGDASLRSLLYVASWSALRGNTTCKECYARLKANGKPSKVALIAVANKLVRQAFAVIKSDTPYVDGFVSTHQTK

SEQ ID NO: 230038 - protein, 433 aa, unidentified
MLKINYMSTLFVGIDVSSKTNAVYAMDFEENKYISSSFGNNQPGADQLVTMIAQCMHKHKNLDTVLIVLESTSVYSVHISNFLSTSEVLMPYKPYVFCVNPKATSNYRKSYIGMEKTDPTDAYLIADFGRVGRTKKLEPWRGGQFIALKRLTRHRMHLSECITREKTYMVSNLYLKFSELQLLEGDDKPFGSLYGATSSAVLTEFLSPQEIIDMPEEELLTFLAGKSRNRISDLSKTSELLRKAARDSYRLDKCMYEPMNVSLASSFNCIHAYQKEIKLIEQAIEKCINGMNPNALIILQSIPGIGPVWASGILSEIGDITAFHSSDALAKYAGLYWPKGDSGDFTSEDNKMSKAGNPYLRYYLGEAANSVRKHIPEYADFYARKYAEVTKHQHKRALALTSRKFVRLVFGLLVKNQLYTGEKLDAEYNIESN

SEQ ID NO: 230039 - protein, 357 aa, unidentified
MTTLEKTRCMYVGIDVHKDTHTAVGISPYGEKMFEITVGNYKNDFEMLKEKVEEMKGILSPYIGLEDVRGYGERLAEYLYQIYPVYHVPSILVDRQRQNETHPEKSDSLDAQGVAKVMIQNINTLLPYTISKEGEKAKQLKEISVDREDLVLERTRLKNQVHTLLYRIYNTEYANKYKDSFSIKALTFWRNAKPKCDPFLLKAMKRKVRRLLDIHTEVNDLEKDMKILLDEGEYTIHTASGCGLVLASTIIGEIGDIHRFTSPGALAKYAGTAPRERSSGKKVRHVKSRSGNRRLNCAFHRMALAQISRMGNDRARTYFKRKVSEGKSKSQALVCLRRQMVNIIWMMLKHKTVYRNA

SEQ ID NO: 230040 - protein, 487 aa, unidentified
MEIIYERVAAIDVGKKEVAVAVRTPGEGRGAPRVQEVGKFKTFYPVLQVMVAWLVEQRVTHVTMESTGVYWRPVFHALCEVDAGFEILLVNAGHVKNVPGRKTDVKDSEWLAQLLEVGLLRGSFIPPADIAAIREVTRYRKKLIQSRISELSRLGKVCEDAGIKIDSVASSLTTKSARDMVEALIGGERDPRVLADLARGVMRKKIPDLSMALAGRWAAHHAVLARAHLDHLDHLEAMIARLDAQIEEMTFPFQAQVAALCTIPGIGDRTAQVIISEIGVDMSRFPTADHLALLGRAVSGEQRVRGQARQHPHPQREPGDPHRAGRGRLGRRPDQHLPRRPVPSPSPPVREEERRQSGRRDRPQPPDHHLVRPARRRRVPRPRPGLLHPPRHPRHRPPQEPTPQRATRARLHRRGHHRGLNTAPPPSRLHCAPPGAVACPLTIKFHLSPNIPFGDATRRENGAGLPADADALLGCEPVSQSGAGVLT

SEQ ID NO: 230041 - protein, 396 aa, unidentified
MIIVGIDIAKHNHQAVIIDERGVALCKPFSFPNSNAGVKKLTDAIAQVSTNPTDVIIGMEATGHYWLALYSALLPLGFTLHVINPIQTDAMRHATTIRKSKTDVIDCELIAQTIRFGRFSVTHIADEDMIALRQLTRFHFSLVDSVSQVKLQVIALLDQVFPEYQALFSDTFGKTSLELLLSYTTPEDILTLDTDALVDLLARCSHGRLGLAKAHQVKDAAQNSFGIKFGQDAFTFQIRSLLAQIQLLESQIDQLDAQVAQLYDSFHSQLHTIPGIGPVLAAAIFAEVGDISRFGSDPARLVAYAGIDPSVKQSGIFVGSQNRMSKRGSPYLRRSLWLAASVAYRFDPVLAAFYQKKRDEGKPHMTAIGAVARKLTYIVFAVLRDNNPYFPIPPSH

SEQ ID NO: 230042 - protein, 415 aa, unidentified
MEGLSPLHRRVAGIDVHRMLHVVTVLIEQPDGSVSKHSREFGGFKRDCRALAEWLAGLEVQLVVMESTGIYWKSVYAHLENAGITAWVVNAHFIKHVPGRKTDMLDSEWLAVLARFGLVRGSFIPPKDLRELRLVSRYRRKLNSMCSRQINRLHKMLDDAGIKLGAVASDIHGVSARAMVRGLIEGQSEAVLLSHARGALKRKTEELAASLDGDLSERHLFVLRHLSESIDALPRQLADIDAYLMRAMQPYAWAHRLLQTIPGIDATAAALILIEIGQDMARFGSPERLACWAALSPGNHESAGKRKSGRTRHGNNTIRFILCECANAARMTKSTLASKYRSLMVRKSHKKAIVAVAHKMIRLIYILLSRRQPYLDQTIDYAAMSAKKNAPRWIKQLKAIGKWPETGATAAHATT

SEQ ID NO: 230043 - protein, 464 aa, unidentified
MNSVYHTELSSLEETRCQFNGGRCAIKLGIDVHQEFYVVVMQEGGANPKPPQRFQRQAFLHWAGRLKQKSGAEVYAVYEACGFGYTLHEQLSTAGARSLVTTPMRLNLERKRKNDRMDARESCVRLSRYLDGQSHELRPIRIPSRSEQQRRELGRQREFWKREVRRLENHGRALRIEHEHETLEAGWAGPRKWKRLAPQCSEFVREQLTPVVAQIRSAKAQLDRLSEQIASLVKKEQIPTGLGALTVSLIEGEVCQWERFAHRKAVGSYTGCCPSEHSSGPIQRFGAIDRHGNKHLRVLLVEAVWRLLRWQPHWHARQKYLLKLRHGSKKKIAVALARQLAIDLWRWRTGRASAQELGWSLPTLPLPEQPKPALVFTKPHQPRQSVPQGGTLLDAAADPKGSSLRMGAFHPQALPQVQARHHGRRSPLATARIGAGDREKPPHVNGKPPIAEQTDPWEKPQKQK

SEQ ID NO: 230044 - protein, 456 aa, unidentified
MAKKQMTLEVVNPNAGGIDIGSRSHWVSVGQNSQDVKEFGVYSEDHQKLCEWLKKHEVNTIAMESTGTYWQNLFSSLVAYGFDVILVNGRQTKNIKGKKTDILDCQWIQKLHSLGLLSSSFLPDSTTAIIRTYSRHRQNILKQSASTVMKMQKYLRLMNMRLDVVVNDIVGLTGKKIITDFVSGKISGKELAKNRHYNCKKSIEEIEKALQYNGREDYYFALKQEWNTYLHLQKQIDEVDKQIKKHLADVIDKDGNKKQHIASKKPYKRKNKNTIRGIDMNQISYQYFEGIDLMAIEGVNDATIMSIISEIGLQGIKKFGTAKQFTSWLRLAPNNKTSGGKILSHHLPKGSNRLKIALRQAANAIGNLKEGHLNDFFRRINYKRGRATAVSATARKLAVIIWNMLVKGIPYSPPTEYLFLDQKRKMKLVSRIKKNIAKFELKPEDVGFNKELIISV

SEQ ID NO: 230045 - protein, 424 aa, unidentified
MNCTQNERINQVSEQTLVIGVDIASELNYARAFNWRGIEQGKVFKFFNNLEGFQAFNEWAHQVMSANKLTNIMVAAEPTGHYWFGLADYLKDEKLKLVLVNPFHVNRAKELDDNHPSKTDAKDPKTIAKLVIEGRYMEPYIPEGVYADLRIMYNCRQKVTKAMISLENQLKRWFRIYFPEYLSVFGNLSGQGSMAVLEKAVLPEDIISLGIDGINKLWRERKLRAVGMKRAESLYEAAVKSIGRREGSVGGRAEFRMLWEDYCHKMEQMEKLNIELESLLHKVPQAEEVLKMKGIGVVSVAGFFAEVGDLRRFESPKQIQKLAGLAIRENSSGKHKGQTTISKRGRARLRAVLFNAAIALVGRNGAFKSIHEYYIGRKANPLKKKQSIVAVSCKLIRIIYAICRHKEAYDEAKMLRDIRREQLA

SEQ ID NO: 230046 - protein, 349 aa, unidentified
MSQTLNTAIAVIGIDIGKNSFHVVGLDDRGAIVLRQKWSRNQVEARFANMPPCLVGMEACVGAHHLSRKLHGFGHDARLMPAKYVRPYSKGQKNDFRDAEAIAEAVQRPTMKFVATKTADQLDLQALHRVRERLVSQRTGIINQIRAFLLERGIAVRQGQRFLRAGLPDILATPSTVLSPRMVRVIEDLTGDWRRLDERIEGLSGEIQAIARQDLGCERLMSVPGIGPIISSAMVAAIGAGDAFSKGRDFAAWLGLVPRQMSTGDRTILGKISKRGNRYLRVLFVQAAWVVLIKPKSWERHGLKPWLEAAKKRLHHNVLAIALANKLARIAWSVLARGRDFEASKLQVA

SEQ ID NO: 230047 - protein, 409 aa, unidentified
MRYYVGVDWADQTHAVWVVDASGTKITARTVPHTAAGFSEWGRELDEWRAQGIERWAAIERPEGRVVDFLLDHGVVVYPVNPKALDRARDRFRQSAAKSDPFDARVLADFLRTDYLHLQALQPSSDGAQELKLLTEDCQRHIRQQTRLVNQLTTTLKAYYPRALEVAELTTALAREFLQAYPTPDALTALTTRQWQRWARGRRLSEARIGALWAVLQQPPLPVPAHVVRAKARLMLSLVEQLTPVVAAVVQYRKAIDDFFASMPAAQWARTLPIGKHGITAPTLWARLGDAPGRWESFRHLQAQAGTVPVTKRSGKQRSVHFRFACDKSLRHVVDQVAFLSLLSSAWARAYYEQQRARGHAHHQALRALGAKWLKIIFVMWHRQVPYDEQYHLATMARQQLRQRQQQIA

SEQ ID NO: 230048 - protein, 314 aa, unidentified
MSTSTFVVGVDVSKKTLDVHLLPEGRGLHFTNNPPGRQALLQAVASGKPQCVAMEATGGYERALAVEFAAAGLPVAVLNPRWVRDFARATGRLAKTDKIDAQHIAEYAQKVQPEPRGVPDATGRRLQDLVARRRQLQAMHTAEANRLEHAADRDIRHSIRTVLKSLERQIGRLDQLLEQTIQSSPSRRRTVERIESLPGLGRQTAILLATRLPELGRMNRRQVAAMVGVAPLNRDSGQYRGKRMTGGGRPDVRAGLYMPILSAIQHNPVLRKFYRRLVEAGKAKMIAVVACMRKLLVILNTMIKNNQSWNPKMT

SEQ ID NO: 230049 - protein, 415 aa, unidentified
MALKIVYKICCGIDVHKTFVVACIASTNDKGVTSYESHRFSTYTSGLKTLLQWLLKRNCKDVCMESTGKYWIPVYNILENDCSIVLAHPKYVKAIRGKKTDKKDAKWIADLFKHDLVAGSFMPPADIRQLRDLMRYRFKLTCFQSSEKNRLQNCLTVSNIQLGNVVSDTFGKSAQAILDKLLENPADTSFDLEPLVYKSLKKKLPELRDAIDGYITPEQVGKLKVIKAHYESLESRKAELEELILAIAAPYQQELAILQTAPGIRSDFTAIGIISEIGTNMEAFPSAKHLCSWAGLTPTNNESAGKKKSVRVSKAGCYIKPLLVQCANAVVTSKKHPEIRNRYLRLKKRRGHKKAIIAIARMLLTALYHMLKNGENYNAELYRKSDLPPADWEITVEQAIIIARNQGYKIKSATA

SEQ ID NO: 230050 - protein, 364 aa, unidentified
MKRKVYVGMDVHKETIRIACLTNNTKEIVKEQQIKHNEVQIKKFVNKLKSEWNEIHSCYEAGVTGYPLYRNLKSLGVNCILVAPGKIPRQSSDKIKTDKRDAIKLAKLLRSGELESIHVPSEEDEAVRDYLRSRDSLRLDLGRNRQRLMKFLLRKGITHSKTKYWTVSHNKWLNNLQFNNEILQETFNDYYSRVRVQEENLKAMDKRIQEIAESEPYREKVGILRCFRGVDYLTAMFLLCEVCDFKRFKTAGSFMSFLGLVPGEYSSGSKRKQTGITKTGSPRLRRILTEAAWQHRFPGTGSKIVTARRSGQPALVVALAEKASLRLHKKFRNLQQRGKTPQVMITAVSRELSGFLWAAMNLVA

SEQ ID NO: 230051 - protein, 482 aa, unidentified
MKPKQLGKTNQATDHPTPGSWHEMNRKQRRETMRKIQSEDLTLEVVHPDAAGIDIGNESHYVAVPPKRDSQPVRRFGCTTAELKAMANWLKQCGIRTVAMQSTGVYWIAAYDILEQAGLEVYLVNARDTKNLPGRKTDVQESQWLMKLHTYGLLRNSFRPSQETRTLRTYWRQRNDLIQSAGRHIQRMQKALTQMNIQLANVLSDLSGVTGQSILKAILAGGRDPHKLAKLRDPHVKASEEKIAQYLEGNWQEDLLFLLKQEQEGYEFCQKQIAACDQQLQQYVQGREDRSQGASLPEERRKTRLRKKKGNAPQFDLRAELFRMTGTDLTQVDGIDVMTATTILSEAGGDMSKWETENHFVSWLRLCPNNRISGEKVVGKGRLPTSNRASIAFRMAANSLRLSDTYLGAQFRRLRTKLGSPIAIKAMAAKLARLVYRMLRYGMKYVDRGAKFYEAQHRELEIRRLKWKAAKLGFKVVEAPAA

SEQ ID NO: 230052 - protein, 457 aa, unidentified
MNPKRSKPKNDRTMPMIHPNAAAIDIGATMHTAAVRADRMPEPIRSFGTFTTDLHRLVDWFTECGVETVVMESTSVYWIPIFELLDARGFAVFVVNARDAKHVPGRKTDVSDAQWLQRLHSYGLLRASFRPKGQIAELRAYVRQRERLLEYAASHIQHMQKALTEMNLQLHHVVADVTGATGLRIIRAILAGERDSKVLACLRDYRCHSSAEAIEKALTGNYRAEHLFALELALALYNIYQDKASACDARIEAVLKELSISRGRDACPLPSPRRRLHGKANGPDFDVRAALFKLLGKDLTQIDGLGSYLSLRLIAECGDDLSAWPSAKHFTSWLCLAPSNKISGGKVLSSRTRRSGSRASALLRLAAVTVGRTDTALGAFYRRLSARIGKAKAITATARKIAVLFYNAVRHGMEYVDPGSSYYETRYRTRVVENLHRRAKAFGFVLLPLESKAGAVS

SEQ ID NO: 230053 - protein, 374 aa, unidentified
MGHHSEAFIGIDTAKLRNAVAVAEAGRKGELRYLGEIDTSETATRKLVAGLAAKYRKLTFCYEAGPTGYGLQRLIESLGHTCLVVAPSLIPKKAGDRIKTNRRDAEGLARLLRAGELTAVWVPDARHEAMRELTRARDAARQDLTRKRQQVSSMLLRLGKIYPGIKTWNARHRTWLAHLKLDHREQRFALEEMLQAERQAGERIGRLEQAIREAVADWSLAPIVPALMAMRGIDLVAAVTILAEIGDLSRFESPRQLMAYLGLVPSERSTGEAVRRGGITKAGNGRARRVLVEAAWAYRHPPRVGVEKQVLVSAAPQAAREIAWKAQVRLCKRFRTLSRKGKKSTVVATAIARELAAFIWAIAREVHATPARMM

SEQ ID NO: 230054 - protein, 442 aa, unidentified
MLDTNPTHDLVIGLDRSDRKADLHFINTATGQTNSESLASSPENLRQWLLNLRQKYPKASVGICLEQPAGHLIPFLETYDWITLYPINPISLQKYRETFVTSRARDDGKDAQYLAELLATHRDKLKSWQPQDSQTRLLQQLVAHRRAVVDERTALTNRLQALLKAYFPQSLELCGEELWRPLATAFLLKWPTLLAVQQAKGADLKEFYYLNGSRSQKLIEQRLKLVEQAVPVSHEPALNLSFSLRVKLICRQLQDVVTTVKEYEKQIAQCFQQHPDREIFASLPGAGPVLAPRLLAAMGAERERFDSAVSLQRYTGIAPVTKQSGKMCYVHRRYLCPKFERQSFQEFADQSVLWSRWAAAYYLSQRSKGKPHSTAVRALAFKWQRIIWRCWQSHTPYKEEVYEAALRKGGSKLLGLFNQIDLGKNPVKNPAKPPSKTAVKKT

SEQ ID NO: 230055 - protein, 342 aa, unidentified
MTTIQYCVGVDIASSTFTAAVGEIPWKVVLKPQTFDNTEDGYQTFLDWLAQHHLSVSETVVCMEATGVYSEGLAYFLYAKGYRVAVQSPLEVKRTFKPYGPKSDAVDSLQIAEYASRHTDKLSFWKPKNEILEQVKALLAVREQFVTQNTAHKNALQAIQRKVVRTPFAEQSYLQLIEQLKKQIQAIDSEVRRLIESDPTFKEMLLLLLSVPGVGLLLAAHFILLAQFSLEYKVLASFLGISPNEHSSGSSVFKHATSRHFGPASIRKLLYLAACSICTHRPQFHVYLVRKTKEGKPPRLVLNNVENKLIRIMCAVLQSKTAFVENYHSVQPLAFQKPLTNS

SEQ ID NO: 230056 - protein, 391 aa, unidentified
MICVGIDVAKDKHDCFILNSEGVVLADVFTIPNNLEGFHTLLNKLRSCSTPQDSIKVGLEATGHYSCNILGFLLDNGLATYVLNPLRTNLYRKSLSLRKTKTDRVDARTIAAMLLSDAGLKPYTDIAYHNEELKSLTRYRFDKVKERAKLKTSISRLVCILFPELEKLVPTLHMASVYALLSEFPGAKQVAATHLTRLKALLADASKGRYGRDMAVVIRDAARCSIGSRMPAKSLELQHTIRLIRELDAEIEEIEAAIQAIMDELHSPITTVPGIGSRMGAMILAEVGDFSRFDSPDKLLAYAGMSPSTYQSGQLKNCYPHMEKRGSRYLRYALYNAAKYVCHWEPAFAAYLAKKRAEGKHYNVALSHAAKKLVRLIFALEKSRLPYCPIA

SEQ ID NO: 230057 - protein, 335 aa, unidentified
MLFSGIDLHKRSLVIHTLDAEGATTREAELRSDRAAVMACFGTLPGPHRAVVECVQSWYWLRDLLAPAGVDLRLAHAKYVKAISYAKVKTDRVDARMLAQLLRVGLIPEAHMIGPEHRETRDLLRSRLQLVTRAVRCQHAVGSLLEKYNVAAPTELPELARLQATLQEEQRALLRTHIKRVEATLKQRLLPTPDVQRLVRVPGIGKLGAYTLVLEIDDVQRFPTVRHFHSYCRLVPGADNSAGKTRHKRSRDGNRYLKLVFHTAAIRAAQYHPEIRQEYRRLARRKGKIVARALIAKELARIVYFVLRKQEAFNGRFRGHILTPKPPRWPRLASP

SEQ ID NO: 230058 - protein, 338 aa, unidentified
MALYAGIDLHSNNNYLAIIDEHSQKVFGKKLKNSMPLILTILEPYKKELAGIVVESTYNWYWLVDGLQEHGYKLHLANPSAIKQYEGLKHTDDKWDSLWLAHLLKLGILAEGYIYPKKTRPLRDMLRRRMLFVNHRTADILSFQSMVTRTTSNQISGNDIKKLKESDAERIFTDPDLIFTAKRYINIIASLTVQIKIIEKHVKDRLKLSENFKCLLTIPGIGYILGMVIMLEAGDISRFEKVGNYSSYCRCVKSERFSNGKKKGSGNSKNGNRYLSWAYVEAATFATRFCDPARKFYQRKSAKSNETIAKKALSAKLARASYYMMRDQVPFNSDMLFA

SEQ ID NO: 230059 - protein, 315 aa, unidentified
MKNCIGIDVSKNSFDVYCTHNEEHSSYANSSSGIKDFVKYCQKQEPELIVLEATGGYESLLVSVLIAKDFIVSVVNPRRIRDFARATGQLAKTDKLDAKIIAKFGATLEPRPYTIIDKQRLVIKELVVRREQLVVMRTAEKNRMDKAFNKVAYNSNESIINVINKQIDKIDKAIADHIDKLPELKQKAEILESIPGVGNKTASMLVATMPELGVLNRGQIAMLVGLAPINRDSGKMRGKRATGGGRKNVRHKLFMPALTIVRYNPALKIFYERLVAKGKPKKVALTATMRKLVCIMNVMLKNNSVWENRLIIKDA

SEQ ID NO: 230060 - protein, 388 aa, unidentified
MRPISQTTTQKLSHRQSDDATLYASLELSQATWLVTSLSPGSEKMSKHSTPGGDGAALLGLLRRLQVRAEQITEGPVGIVVIQEAGLDGFWVHRLLNANGIESHVVDAASIAVPRRRRRAKTDAIDGETLLRTLLAWQRGEPRVCAMVVPPTPEQEDRRRTSRERAVLLQERVRHVNRIKGLLAGQGITDYEPLHKDRRAQLAALKTGDGQPLPMRLKAELLREIELIELLMRQIAEVEVERDTAVELDAEGNQSPVVLLARLKAIGPQIAAVLYLEGLYRSFANRREVAAYAGLVPTPWRSGTIDREQGISKAGNRRLRHIMIELAWLWVRHQPDSALSRWFRARVGTERGRIRRVAIVALARKLLIALWRYVTHGEVPEGAVLKAA

SEQ ID NO: 230061 - protein, 413 aa, unidentified
MEHKTITAVGIDVSKGKSTVAVRRPGGEVVLTPFQVEHDAAGLSGLVRTLQNLDGDIRIVMEHTGMYWRPIALALKEAGFFVSVVNAILIHDFSDNSLRKVKTDKADSMKIANYALSFWAELRDYSPEDETRQMLKMQNRLYLRTKKSSVVLRNGLISLLDQTFPGVNTLFDSQPKRSNGHFKWVDFVKRFWHKDCVADVSLAAFSDAYRKWCTRSGYRFSQSDAERLHAAARNSVATFPKNDSTKLLITQAVDSLNAVYDALYILRGEMLRLASLLPEFDVVMEMQGAGEVTGPQLMAEIGDVRRFTHKGSLVAFAGMDAPPFQSGTFDSKSRRISKRGSPHLRKTLFMVASTILQHSDPDNPIFQFMDKKRAEGKHFYVYTVAGAAKFLRIYYARVKAHLMALDAGTSTAA

SEQ ID NO: 230062 - protein, 382 aa, unidentified
MAGTEPHAWGTGRMDDITYVGLDVHKATVCVAVAESGRGGEVRQVGVFQNRPEILCKMAAKFGRGGRRLSFSYEAGPCGYGLHRLLTACGHSCVVVAPSLIPMKSGDRVKTDRRDAMMLAKLHRAGELTAIWIPDATHEAIRDLVRARATAGRVLSKARQHLQGFLLRHDRIYRGARAWTQAYWRWLTTVRFEHPAQQIVLQDYIHAVEDAEARRDRLTRQIEEMLPSWSMAPVVAALQAMRGVALVVAVTVVAEVGDFRRFANARQLMAYLGLVPSEHSSGSTIRRSGITKAGNTLVRRVLIEGAWTYRMTARVSRKLHDRLEPLSPVIRGIAWKAQVRLCARYRRLAASGKPKVVVTTAIAREMVGFIWAIACIAQLALA

SEQ ID NO: 230063 - protein, 347 aa, unidentified
MRFYTGQHQHYCGIDLHTATMYVCILDAAGEIRVHRNVKSSPEALLEIVAPYRDGLVVAAECTFTWYWLADLCAKENIPFVLGHALAMKAIHGGKAKNDKIDSHKIAVLLRGGMLPQAYVYPAAMRATRDLLRRRLHFVRKRGQLLAHIQNTIHQYNLDPFGKRIAYPANREGLLEHFPDPAVRKSVEVDLALLERYDALIADLELTIVRHAKRHDADAFHRLRSVPGIGKILALTLLYEIHDVTRFERVQQFASYARLVKCAHESAGKKLGSGGAKQGNVHLKWAFSEAAVLYLRHGADGKKLLARLERKHGKGKALSILAHKIGRAVYYILARGTVFSPEKFLHA

SEQ ID NO: 230064 - protein, 328 aa, unidentified
MEQELHFIGIDVSKAKLDVDVLRPDGRHRSKKFANTPKGHDELLSWLRSHNVAPAHVCMEATSTYMEDAAASLSDAGFTVSIINPALGKAFAQSEGLRSKTDAVDARMLAEFCRQKRPVAWEAPHPVERALRALVLRHQSLTDMHTQELNRRETAREVQMPSIDAHLLWLEAELKRLEKQIKDLTDDDPDLKHRRKLLDSIPGIGEKTSAVLLAYVGLKDRFGQARQFAAFAGLTPRQHESGSSVNRASRMSKAGHVSLRRALYMPAMVALYKTEWGKAFRGRLEKNGKGAKLIIGAMMRKLAQVAYGVLKSGRPFDATLHQENACVA

SEQ ID NO: 230065 - protein, 349 aa, unidentified
MSAKFNCEIAVIGIDIGKNSFHVVGLDRRGAIVLRQKWSRGQVEVRLSNLPPCLIGMEACVGAHHLSRKLTSLGHDARLMPAKYVRPYSRGQKNDFRDAEAIAEAVQRPTMKFVATKTAEQLDLQALHRVRERLVSQRTGIINQIRAFLLERGVAVRQGLRFLRAELPRILARPCKALSPRMLRVIEDLAGDWRRLDERIDGLSTEIEVLARQDAGCERLMSVPGIGPIISSAIVAAIGGGDAFSKGRDFAAWLGLVPKQISTGDRTILGKISKRGNRYLRVLFVQAAWAVLIKPKSWARHGLKPWLEAAKKRLHHNVVAVALAKKLARIAWSVLAHGRVFEATRIRAA

SEQ ID NO: 230066 - protein, 447 aa, unidentified
MEVVYRRCCGIDIHKDFITACVLVNEPGKQREVRKKEFRTYWSDLQKLKLWLYASKVEQVGMESTGVYWKPVWNVLEGHFPLLLANPYHMRNIPGQKTDQKDSEWISDLLAHGLLRPSFVPPRPVQELRDLTRYRAKLTGECNRVHNRIAKILEDANLKLGSVASDILGLTGRRVIEAIIAGQEHPDWLADKACGTLRAKRDQLRLVLKGRITDHHRYMLRELMADLDQIEAKILRLETEIADRMKPHAGAIERLMTIPGFKLITAWSVVAEMGTDMSAFPDAAHAASWAGLAPGNHQSGGKRRSGRTNKGNRWLRRALVQSAWAVSHKKNCFLTAQFYRRAARQGEKKAIVATAHQLLVIAFHILRDGTVYREKGGNYFDQLNPERTKRKLMARLERMGFDVILRHSTTDPIPPPSAPPPSAPPPSAPRRGRPCKCVERGIDCKHR

SEQ ID NO: 230067 - protein, 339 aa, unidentified
MDEAKNVVWAGFDVGKDSFVAALDQETANDRRKVTSLPCRKFKLNQDEVEKFFHWAQEFSPDAEIRIVMEATGCYSDHLANWISQMHPEVAVTLGNAGSIHAFIQSLNLPHKTDRLDAQAIARFGTERQPKPTKRPTKTVLSLRELSRTRTALIKAKVEFSNRQETLIDPFTIEINQQTISMLEEKIKEVGLKIKECVMKDDEIRGEIELMCTLPGVSFISACDIIAELGSLKQYSAKELSAMSGLAPRIKESGSSVHSSYLSRKSSGRLRQILYLDSLIGVKNILVLQEFHHRLLEKGKKKMTVRCACMRKMLLILRSIVVHQRPYQTDFSKKVVNSI

SEQ ID NO: 230068 - protein, 333 aa, unidentified
MKIYVGIDIAKLNHFAAAISSDGEIIIEPFKFTNDADGFQLLVSKLESFDKNSLIIGLESTAHYGDNLVRYLVTELYQVCVLNPIKTCQMRKNNVRKTKTDKVDTYVIAKTLMIQDNLRFVSFFDLDMMDLKALGRFRQKTIKQRTRLKIQLTTYVDQVFPEIQYFFKSGLHQHAVYALLKEAPSPKEIASMHMTHLANLLKVNSHGHFTKEQAKELRVLAQKSVGANDSAISIQITQTIQQIELLDSQLEKIEAEMTDIMKFNDSVIMTIPGIGYINGGMILGEIGDIHRFSNPNKLLAFAGLDPSVYQSGNFQAKTTRMSKRALVFYDMPL

SEQ ID NO: 230069 - protein, 375 aa, unidentified
MTKPLLYVGLDVHAASISAAVAEAGRSGEVRLYGKIPGDLHAVDKFLTRLGHPDKELHVCYEAGPCGFVLARHLRAKGIACTVVAPSLTPRAKGDKVKTDRRDARMLARLHRAGELVAVHVPDPDDEAVRDLCRARTDAVEDMRRTRSRLRAFLLRNGHPPAGGKAQWGEAHKSNLRKLGLRHPAMGVVLEEYIGATDATCERIARLEKAMEEQLESWTQKPAVEALMGLRGFRVVAAMITVSELGNVHRFTHARQLMAYVGLVPGENSSGESRRLGAITKTGNVHLRWLINECAQHYRLPPKISPALGERQKAIAAEHRATVKEISWKCQNRLYNKGRKLTGRLKMRQKVQIALARELCGFVWAVLKAVQPAAT

SEQ ID NO: 230070 - protein, 341 aa, unidentified
MSEVNTIGLDIAKHVFQAHGADASGRVVFRKKITRSKLMEFFASQPRCMVALEACGGAHHWGREIGKLGHTVRLIPPAYVKPFVKRQKNDAADTEAICEAAQRPSMRFVAVKSEEQQANSMVFRARDVLVRQRTQCINALRGHLTEYGWVVPKGTAHVATLIGQIEDPNFSLPESARAIFRVLITSLTSLDESIAVLDGEISRRSKEDPVARRLMTIPGVGPITATAITALAPPIETFATGRDFAAWLGLTPLQKSTGGKQRLGAISKMGERTLRRLLIIGGSAVVSHACRRGAPDGSWLARMLARKPRMLVTVALANKMARIIWALLAKGGVYQAPVAAA

SEQ ID NO: 230071 - protein, 343 aa, unidentified
MTMDTIIGVDLAKNVFQLHGASDSGEVKFRKKLTREQFRRFMADHPPAMVAMEACGSAHYWAREMEKLGHAVKLIAPHYVKPFVKRQKNDAADAEAIVIAAQRPEMRFVVPKSEEQQARAVLFRARERLVHQRTDLVNSLRSVLYEYGHVVPQGIKHLPRVAEIIEAPDSDLPALVREECRELLEQIAQISDRIAEKNAKTKKLAAETDTARRLQTMPGVGPLIALAIEAFAPSMENFQRGRDFAAWLGLVPRQFSSGGKQRLGRVSKAGQADIRQLLIMGAMSRLNWAGRRGIAEGSWLARICTRKPRMVVAIALANKMARAIWAMLTKQQDYRDPTMGIAA

SEQ ID NO: 230072 - protein, 445 aa, unidentified
MAKRTVQFSMVNPKAAGIDVGSKSHWVCAGQGMDYVREYAVFTEDLHQMANWLKSLGIQTIAMESTGFYWKSLFLLLQDYGFEVILVHAAHVKNVRGKKSDIQDCQWIWQLHSAGLLSASFQPDELTESLRAYTRHRKSLIDGAARYISKMQKALVVQNVHLSVVLTDITGKSGQAIISAILNGERDGQKLAALADRRVKADKATIAKALTGHWKDQHLFELQQSWQMYHFHHQQIAECDVQIELILQAQIEANGQQDLAYEPKKKKKRKKKDPSFDLAQKAYQLTDGIDLTEVDGVSFGLLLALITEVGLDLSMFPSAKHFVSWLGLCPNKKVSGGKILSSKTRKNKGRLAYAFRQSANSVGNQKDTALSYAFRALAYKHGRKVAITATARKIATIVYNMLEKGQPYQPMGTLQYQNMVRQKKVMNIQRTIKKHDVKVDELAFS

SEQ ID NO: 230073 - protein, 353 aa, unidentified
METAYDGRQVVGMDLHRRRSVLVRMTEDGQRLGVARITNSPAGLCRVIAQAGASPRVVLEGTYGWYWAADTLAAAGAEVHLAHPLGVKAFTYRRVKNDERDAADLADLLRMGRLPEAWIAPPGVRELRELTRYRHKLVGLRTSCRNQVHGVLGKLGVPVTCSDVFGVAGSVWLDELRLPQPYAGKVTSLRQLAGELTTEITMLSEVIADLLAGHRGYQVIQQLPGIGPALAAVIVAEIGEVRRFGSAAQLCSWAGLTPRHRESDTKITRGHVTKQGSRLLRWALIEAVQHVPAGSLPGTVKQRIIARRGKQAKNIAKVAAARRLLTLVYYGMRDGQVRCLSQNPAGSPPARAA

SEQ ID NO: 230074 - protein, 355 aa, unidentified
MSSEKYIGLDVHQATICVAVMDAKGKVVMESILETKATTILEFLAGLRGTLSVTFEEGTWAAWLYDLLKPHVANLVVCNPRKNALLKHGNKSDKIDARKLANLLRLNDLEPVYHGETGVRMLRELARSYLTMVKDVSRVMSRLKAIYRSWAIPCAGRDVYYTRHRGEWLGKIPEAGCRRRAEQLYQQLDMLQPLRQQARRELLAESRKHTITAKLRQIPSLGPIRSALAVALIQTPHRFRTKRQLWTYSGLGLETRDSGEYHYVEGQVRRRKKQVFIRGLNKDHNHDLKGLFKAAATRASVRPGPFQDFYQRSLAKGIQPTMARLTLARKIAAITLTLWKKGASFDVEKLKAQAA

SEQ ID NO: 230075 - protein, 343 aa, unidentified
MKLIRVGVDLAKSVFQVHGVDRSEKAAWRRKLSRAEWIKAVQQNVPLEAEIGMEACGSAHHWARELRALGYSVKLIAPQFVKPYVKSNKNDATDAEAICEAMSRPGMRFVSVKTIDQQDVQAAHRIRSELMDQRKAKVNQIRGLTAEYGLVAPREILHLRRAIPLWLEDQENGLSPRFRRLLTGLWDDLRVLDGRLVELDQEITTIAASDPVAKRLQQLRGVGPLIATALVATVGDASQFSNGRQLAASLGLTPKQNSSGGKERLLGISKRGDCYVRCVLIHGARSMINSAKTKTDPLSLWVLRIAATRHPNVAAVALANKKARIAWAMMWHETDYQPALAAH

SEQ ID NO: 230076 - protein, 342 aa, unidentified
MGQVTTIGLDIAKSVFQVHGIDTTGEVVLQRRVMRPRLLAFFAKLTRCLIGIEACATSHYWARELRKLGHEVRLMPPSYVKPYVKRQKNDTADAEAICEAVGRPTMRFVEVKTPEQQSVLVLHGTRSMLMRQRIQLSNAIRGHMAEFGIVAPIGRLGLQALIDTIHDEADDRVPAEARSCLQMMAAQLRLVNAQILENDRRIRTSARATEVGRRLMGIPGVGPVLASAMVASVPDPSMFKSGRNLAAWIGLVPRQNSSGGKERLGGITKQGNRYLRQMLVVGALAVIRYAARHGTRRPWLVQLMARRTTKIAAVALANKTARMIWAIMTNGQKYREPELRAA

SEQ ID NO: 230077 - protein, 318 aa, unidentified
MSEPVVVGLDVAKATVDVALRPSGECWSVPNTDAGAAELVTRLRPLTPALVVCEATGGFERATIAALATAGFPVVVANPRQVRDFARATGQLAKTDRLDAGILALFAERVRPTPRPLPDGAAQLLDAVLTRRRQLLEMLTAEKNRLGFAPKPLHRGIQAHIRWLERQLDDVTKELAGLIEASPVWRAKDDLLQSVPGVGPIVSSTLLGELPELGTLSHKQAAALAGVAPLARDSGTLRGKRMVWGGRASVRTALFMAVLCGRRWNPVLKVFYERLIAAGKPKKVALIACARKLLTILNAMVRNNTRWMNPHAKIQYSC

SEQ ID NO: 230078 - protein, 391 aa, unidentified
MVCVGIDVAKDKHDCCILDSDGTIRADCITIPNNMDGFKQLLQTIRDCTKKSDKIKVGLEATGHYSYNILGFLLDNDLAVYVMNPLHTNLYRKSLSLRKTKTDRVDARTIATMLLSDVDLKSYTDTAYHNEELKSLTRYRFDKVRERAKLKQSVSRLVTILFPELEKLVPSLHIASVYALLSEYPGAKQISEIHLTKLTNLLVTASKGHYGKEKATLIRETARASIGSVMPAKSLELKHTIKLIRELTSEIDEIEVSIQKIMDELNPPILSIPGVGIQSAAMILAEIGDFSNFESPDKILAYAGCSPSTYQSGKLTNCYAHMEKRGSRYLRYALYNATKYVCHWNPVFAEYLAKKRAEGKHYNVALSHATKKLVRLIYALQKSGKAYLVAA

SEQ ID NO: 230079 - protein, 352 aa, unidentified
MHDITPDAIVIGVDTHKDAHVAVAINGLGAKLATASFPVTTQGYRQLADWAAGHGAVHTIGIEGTGSYGAGLTRSLTAMGVRVIEVGRVNRQLRRRHGKTDTVDAESAARSVLAGDAQGQPKTGDGAVEMIRHLKIARDTALKARTQAMVTLKTLLINAPQLLRERFIGITGKMTLIRGLAALRPGMPVSPTASAKMALRALAHRWLMLDAEIKEHESVLEVLVRAQAPALMDAPGISTGTIADMLVVLGDNPQRIRSEAAFAKLCGVCPVPASSGKTSRYRLNRGGNRRANAALYRVALVRMRHHLPTREYIKRRTAEGKSPREIRRCLKRYIAREIYQHLCTGKHPAKHS

SEQ ID NO: 230080 - protein, 359 aa, unidentified
METQVKKIDFKGQNIYVGFDAHLNSWKVTVMVEDIVYKTFTQPPKPDVLYNYLKRTFPGGNYHSAYEAGFCGYWIHDKLISYGIKSIVVNPADIPTTDKERVQKEDKRDSRKIARSLSAGTLMPIYVPSIHTLRDRSLLRTRAMLVKDLARYKNRIKSYLYFYGISIDVSFSNPQSHWSNRFISWLENLEIDGGSGKEALNILILECKNLRASILKITRQIRQLSHTAAYREQVILLKSVPGVGLLTAMILLTELESIDRFRNIDKMCGYIGLIPSTKSSGEKERTGDITPRCHSVLRTAIIESSWTAIRNDPSLMKSYHLYCKRMESNKAIIKIAKKILSRIRFVLSNKKQYVCLIKN

SEQ ID NO: 230081 - protein, 345 aa, unidentified
MKKSLYCGIDLHSNNAMYVVSDEQDKMLFKKRLANRFPVVLEALEPFRKRLKIVAVESTYNWYWLVDGLMEAGYPVCLANPAAIDQYDGIKDANDLTDAAFLAHLSRMGVLPTGYIYPKEDRPVRDLLRRRMLLVQKRTSIILSVQNMVLRHTGQSMNWRQIRKTGTKALIALLDNHDCLLFVAYQQIDLIEQLNEKVELFEDKVLQKVKLRPDYQVLLTMPGVGVILGLTIMLETGTIDRFCKPGDYSSYCRTVRAKRTSNGKKKGNNNSKNGNKYLAWAFVEAVHRALSCCPPAKQFYERKKAIAKAKGGGTLATKALAAKWSKAAYYMMKRQEPFDLARVFG

SEQ ID NO: 230082 - protein, 347 aa, unidentified
MDQQSHYVGLDVSLETTSICVIDDAGAIIWRGKCCSDPDTITAVVRQHAPGAVRVGLETGQLSNWLTLSLRRRGVPIVCMDARHAKAALSLQINKTDANDAFGLAQVVRTGWYREVAVKSMDAHTLRMLLVARSRLVSQRQATANTIRGLLKTFGLVVARGSKGLFPVRVREQIAGNPALIAIIEPLLAVWSAIREQVTMLDRQILARARNDQVARRLMTIPGVGVVIALAYTAVIDDPARFRRSVSVGAYLGLTPRRYQSGEVDTTGHISKCGDSLLRGYLYEAAAVLLHRDGRTSILKSWGLGLAKRIGMRRAKVAVARKLAVIMHRIWSDHSEYRWTATPPTAA

SEQ ID NO: 230083 - protein, 337 aa, unidentified
MHSTTIAVDLAKSVFEVAVSEWPGRVRVRRRLSRGQFARFLAEQPPATVVMGACGTSHFWGREARTRGHQVVLLPPHAVRPYVLRNKTDGADAKGLLEAVRNEAIRPVPVKSIDQHVLASLHRLRSAWMATRTARLNTLRGLLRELGFAIPVGARQVVPAVWELVSDAESELPDALRPVLAEAAREVAELEVRIRETMVDASELLGRLRTIPGVGLLTATALVAFVGDVQRFPSGRHLASYLGLTPREASSGLRRRLGAISKRGDPYLRMVLIHGARSVLLHAKRRPVQQHNRLRNLGAGSRVRARPQQGGRRPGQQARSHRLGGLADTPLMVHRRA

SEQ ID NO: 230084 - protein, 349 aa, unidentified
MLHVGLDLSRRRLDVCVLSDEAELVEELAAPPDLDGLRYLVSKLARHGEPVRAVIESMTGARFVHDTLEQLGWDVLIADAQRVKGLAPLACKTDRVDSRVLAVLSHRNLVPAIWLPDPRVRSEREQARFRLHLVKHKSMLKHRIHATLMTFGHPCPVTDLFGLEGRNLLERLEIPPPWRETLDASLYLIDYLESEIHAIERELRASGADHRYVPLLLTVPGIGWVLAFTIAAEIGDITRFASAKKLVGYTGLCPRVRQSGESDHRGPLSKQGPRYLRWAMLEATMHALRHPAYAERYQRNKQRLGKQRGARVAQVDLARKLTEAIWHMLTTNQPFDPAAAGGATFRLAA

SEQ ID NO: 230085 - protein, 346 aa, unidentified
MNYCGIDLGGVSSYVYVTTDRGRKLWSGPVETSKEALKARLRRFRREGLSVAIEAGNQTAWVYEVLVAMGAKVTVVNPNKVKLIAESRRKTDKVDARILCELLRIDALPHPVHMPGRQTRALRGLLVARRQLVAARTKLSNVVRGMLRQEGIRLSAGALSSLAGWERVFVNSFSCEHVMTVVRAYYQSFKALTQSVHVLERKLAERERTSPEAKRLQTMPRVGRIASLTFLAAVDDVNRFPSSRKVVGYSGLAPIVRQSSERTQYGPISREGRRELRAVWVQIAHLVAIDRHRETQPLRSWFNRVAKRRGKKTAVVALARRLLVIAYHLLREESDFDAARLKRRAA

SEQ ID NO: 230086 - protein, 405 aa, unidentified
MWYVGIDWADDHHDAVVIDDAGKRVAATRVPHTFEGLAELIAFLRGIGDVDAQPAHLACIVETNRGLLIAALLEAGVPVYPVNPTTVDRQRKPSGAKTDAIDAYLLARTGRSDLADLRRLTPDGPLVAELKLLTRDQDSLIQGQTRLVNQLTACLKAYYPVALELFDKLHQGATLAFLRAFPTPDEARAATMEQIASVLTAARYATAQAKAHEIQQRAQLPQLIADPVVTRAKARLMLTLAAQLQVLVAEIAAYDREISRVFAQHADSAAFASLPRAGKRLAPRLLAEWGDDRGRYAAAANVQALAGTSPVVFQSGNYASVHKRYACSKPLRNALHQFAWQSTLQDDWANAYYRRKRREGKSHTKAVRALANQWVRIIYALWRKRETYDPMVFVAAQQAHAPRAA

SEQ ID NO: 230087 - protein, 347 aa, unidentified
MSEISIIGLDLAKQVFQIHGADPAGRCVLRKQLKRREVLQFFAKLRPCTVAMEACGTAHYWAREIGKLGHCTRLIPPAYVKPYVKRGKNDAIDAEAICEAAGRPTMRFVPVKPMENQAIVMLHRSRDLVIKNRTMLVNALRAHLAEFGFVAGKGIWKLPDLVKIVSQAPAEALPELVRTTLSGLLDIIAATSSQLDAIEKRLREWHKKDARSKRLDTVPGIGLIAATACRALVPDPKLFRNGRHFAAWIGIVPKLDGTGGKTRLGRISKAGDRYLRRLFVLGATSLLRSLENKSTRLALWVQALLARRTKRAVTVALANKLARIAWAVMTRDEAYKPLAAAQPAGCA

SEQ ID NO: 230088 - protein, 357 aa, unidentified
MTNDKYVGLDVHQASTSIVVLDCNGKTISESVVRTRADAIRDFIHGLSGTIHVTFEEGTQAAWLYEVIRRLVAELIVCDPRQNKVLAAGNKGDRIDAKKLAELLRAGLLKPVYHSNQDTKLLKLLTHNYDSLVSDTTRVMSRIKAVFRGQGIPCSGRDVYYKRNREEWITRLAEAGLRTRAQFLFDELEPLKGLRRAAKKVMLKEARRHKAFKILSEVPTLGPIRIAQIIAAVGSPHRFRTRRQFWAYCGFAVVTRSTDDYRFDENGPLRRSRPPATRGLNRNFNRRLKHVFKSAALQGASKEPFKSYYQARIAAGMRPEMARLTLARKIANITLTLWKNGDQFNENKLSEPHDRTT

SEQ ID NO: 230089 - protein, 338 aa, unidentified
MKLYGGIDLHSNNSVVALLDEQDQVVYQKRLGNDAQGILAALAPYQEAIEGLVVESTYNWYWLVDALMDAGYPVHLANTAAIVQYSGLKYSDDDSDARWLGKLLRLGLLAEGFIYPREERAVRDLLRRRSRLVQQHTANLVAVQNLMARNRGRSLSANAVRRLTPEAVAQLLPDANLALAVQSTLLAMRAQEAAIDLLERQACAQVQLRPAYRHLLSVSGIGKVLGLIILLETGPVRRFAKVGNDGSYARCVGSERLSNGKRKGRGNTKNGNKYLAWAYIEAANFAVRFNPTIKRYYQRKRAKTNGIVAIKTVAHKLARACYYILRDGTDFEVTRAFS

SEQ ID NO: 230090 - protein, 338 aa, unidentified
MKTYAGIDLHSSNNYIGIIDEQDHRVYQKRLPNQIAHIKQALEPFKESLQGVVVESTYNWYWMVDGLQEHGYKLHLANPSAIKQYEGLKHTDDKWDSFWLAHMLRLQILPEGYIYPKEQRPIRDLLRRRLLFVRHRTSHILSLQSAITRNLGYTISGNDIKRLHESDADKLFNEPFLIGAARNSISTIHFLGKKIQEIERSVKSHVKLKPEFKYLLTMPGIGNILGLTIMLEVGDINRFTKVGNYSSYCRCVKSERISNKKKKGEGNRKNGNKYLSWAYVEAANFAIRHYPEIQSFYQRKKATTNGVVAIKALSNKLARASYYIMRDHVPYDMDQLFR

SEQ ID NO: 230091 - protein, 347 aa, unidentified
MDHYAGIDVSLECSSVCVVDASGKIVREGKVATEPEALIGYFGSLGVAVVRVGLEAGPLSQWLYAAMQQVGLAVELLETRHVRDAFKAMPVKSDRNDARGIAQLMRLGWFRPVHCKSLGAQELRAMLTARKLVQSKLHDIENSLRGILRGFGLKVGKTTARSFAGRIRELVAGQATLQTIAQALLAAHAVLLREFNGFEKQVRLMARAHDQAKLLMTTPAVGPIVALTYACAIDDPARFKSSKQTGAHFGLTPKKYQSGNTDVTGRISKIGDAAVREALYQAAHVMLTKPLKGCSQLKSWAMRIARRAGMRKAKVALARKLAVIMHRMLADAKPFNAAASTKPIAAA

SEQ ID NO: 230092 - protein, 446 aa, unidentified
MATNLTCIHENAAGIDVGSRSHFVAVPPGRDKDLVREFPFFTEDLIKLAAWLKKCKIETIALEATGSYWLPLFDILSEKGFEVCLVNARHIKNVTGRKSDVLDCQWLQQLHSYGLLRPSFLPDQITEEVRQYARHRDGLIRQASRQLQLIQKNLVVMNLQLQNVVSDISGDTGMAIIRAICGGERDPKELAKLRNPRCKNPEEVIAKSLVGNYKAGTLFALKQALATYDHYQRQIAQCNIEIERRIGKFEDRSGGAQQPKRKREAKKNNLGFDFQQALWRVLGINLMDIPCMNTSTALTIISEIGPSVDKWKSPKHFASWLGLCPNNRISGGKRLSGRTKYSSNRIRTALRMAAQTLERSSTALGAFYRRMKARLGAPKAITAAAHKLAVLIYRMIKGRMPHNEKGPLYFEQNHKERSKRRLQRLAEQLGYDLVEKQQTEEVVMVN

SEQ ID NO: 230093 - protein, 343 aa, unidentified
MTRFVGLDVSQKITAICVVDDAGRRLWRGQCPTNPEQISILVRRHAGNDARIGIETGAMTPWLVHELRNRGLEVVCLDARHARAALEMQINKTDQNDAEGLAQIVRTGWYRSVHVKSFESHRARALLGARTQLIGMTTRLSNHIRGVLKTFGLLPGEMRGLPFDRKVETLLLDRSDVALIVRPMLVAWRQLREQIAVFDKAIRVLVRSNSACRLLMSIPGIGVLSALAYVSTVEDPARFGRSRSVGAHLGLTPRQYQSGEVDRSGRISRCGDTLARTLLYEAAVVILSRLKKASSLKDWARGIANRSGNGKARVALARKLSVILHSVWRSGEPFRWSESARAA

SEQ ID NO: 230094 - protein, 353 aa, unidentified
MSNILAIDLGKNNSAVCIFDRSSLRCKYKTLRTRKQVMHDLFVEYQDQIEIVLFETGSQMGWVADILWALKIPFKVANTNHAAWKWKNNPNKSDRKDAQRLAMMYHSGFFPTVHVPKRAVRQKRSLINYRDDLVKRITKVKNSIRAILAREDIYLPSGKKGWAIKALSPIREMAIPVKEIDDLEQIWKGHLNSELNLLDEINQELKAVESKLDALGEADEKVKLLRTVPGVGPRLSEAVVAIIDDPHRFKNGRQVSSYLGMVPRRWQSGQVDITGRISKCGNKLLRTLLVEVSWLGLRESWMREIYNKVKHGNKKRAKVAIVALARKLLVICWAMLKNGTTFDADYAKRFVKC

SEQ ID NO: 230095 - protein, 338 aa, unidentified
MIGVDLAKNVFQLHGASMAGHLKFRKKLTRLQFHKFMSEQGPAEVVMEACGSAHYWAREMIKLGHEVKLIAPQYVKPFVKRQKNDVADAEAIVVAAQRPEMRFVEPKSAEQQARAVLFRARERLVHQRTDLVNALRSVMYEYGHTVPQGIGHIKRIQAILDEPNSDLPALVREECLDLIEQIAEKTARVEAKTRRAKELAAETATAQRLQTMPGVGPLTALAVEAFAPAMVTFKRGRDFSAWLGLVPRQHSSGGKERLGRVSKAGQADIRRLLIIGAMSRLNWLGRKTIPEGSWLARMLAKKPRMLVAIALANKMARAIWAMLIKREDYRDPALLVAA

SEQ ID NO: 230096 - protein, 403 aa, unidentified
MNMNAVGIDVSKGKSMVAILRPYGEIISKPFEVKHTVSGIRSLIEQIQSIDGESRIVMEHTGRYYEPLVRELSKADLFVSAINPKLIKDFGDNSLRKVKSDKADAVKIARYTLDSWTELRQYSLMDEIRNQLKTMNRQFDFYMKHKTAMKNNLISILDQTYPGANTYFDSPAREDGSQKWVDFSATYWHVDCVRKLSLNAFIDHYQKWCKRRKYNFSRSKAVEIYEASKELISILPKDDLTKLIIKQAVEQLNTASQTVEQLRTMMNEAASKLPEYPVVMAMKGVGKSLGPQLMAEIGDVSRFTHKGAITAFAGVDPGVNESGSYEQKSVPASKRGSSTLRKTLFQVMDVLIKTKPQDDPVYLFMDKKRAQGKPYYVYMTAGANKFLRIYYGRVKEYLSSLPE

SEQ ID NO: 230097 - protein, 345 aa, unidentified
MQSRIIAVDLAKSVFEVAVANPQCRVLERHRLSRKAFSAFIAAQPPALVLLEACGSAHFWGRTAQALGHDVRLLPAQYTKPYRRRGKTDRADTEALLEAHRCDDIKPVPVHAVEQQTVQQLHRAREQWKRTRTQRLNGLRGFLRELGFDIPIGAKTAQRHARLFIDDPAVPVPLKSLFTRMLDEIASLETHIADVERQLKALTKHNTDVQRLQTIAGVGLLTSTALVAAVGNPQRFPSGKHLSSWLGLTSSEHSSGNRRRLGKITKQGDTYLRTLLVHGARSLLSRIKTLQRAGKALPRLHQWAAALELRVGHNKAACALANKLARICWAVWTSQNDFNPNHVPA

SEQ ID NO: 230098 - protein, 456 aa, unidentified
MARKKRDKQGRSNNAVLPVMRPDAAGIDIGATEIFVAVPADRAAENVRSFPTFTQDLYGLADWLKACGVKTVAMESTGVYWIPLFQILEDRGFEVYLVNARHVKNVPGRRTDVSDCQWLQFLHSVGLLRASYRPEQEVCAVRSLLRHRESLVQMAATHVNHMQKALDQMNLQLHHVISDITGLTGLAIVDAILAGARDPFVLAKLRHERIKASEEVIAKSLVGDYRAEHLFTLRQSVAAYRSYQKLIEDCDQEIRRCLDQFKPLHEPTAEVSRARTKSKPPSNDGVLRNELRRVFGVDLTKIPGIRTGIAQTLFGEIGPDFTKFRSASAFASWMGLCPDNDISGGKVLWVGTRKVKCRAATALRMAAQSLHHSQSGLGDFYRRMRAKLGAPKAITAAAHKLARIIFHLITTRQEFDDSRFASDQLRYEKRQESKLRAKAKALGFQLIPADHGVVVP

SEQ ID NO: 230099 - protein, 346 aa, unidentified
MKHSAGLDVSVKETAICIVDEVGKVVRETKVLTEPEAIITLLNSAGIEYERIGLEAGPLSQWLVNGLSEAGLPVICVETRHMKAVLKAQQVNKSDRNDARGIAQMMRVGLYKPVHVKTLASQQERMLLTTRKLLRDKLQDMENEVRGTLRNFGLKVGVVSPGRFEARIKELVAGHLRLEMIVTPLLAVRRVLREQLATLHKMVLDQVRGDPLCRRLMTVPGVGPVVALTFRATVDQAQRFARSKMVGAHFGLAPRRFQSGEMDYDGRVSKCGDAMMRTALYEAAQVLLTRTQKWSWLKAWGMQVARRRGAKKAIVALARRLAVVLHRMWVDGTEFRWRKEAEAAAA

SEQ ID NO: 230100 - protein, 339 aa, unidentified
MKKRYMGVDLHRNCFTVYTRMEDGSGESREWAIRDRKAFAETVKASDAVAVEAMGTTRLFTEALKERGCRLVVVNPHQFKVISQSVKKTDEHDAKVLAEFLSKDLLPEVRMKDEEHARVASLAQTRDKLVKLRTTLKNKVNNMLAARGVLMRKESLSSEKGLSAVLAAPVSDLERLELEILVEEIRHLNESIQKLEGLLRDQGPKLPGWENITSIKGIGETGASILLSVIGNIHDFADEGKLAAYFGIVPRVSNSNETERRGRITKQGCKLGRTALVQCALIAARYSPYLHTYYRRIAATRGTGKAIIALARKFLGIIYKTLKNNWIFKDFPRFVLANG

SEQ ID NO: 230101 - protein, 370 aa, unidentified
MKQYSEAFIGLDTAKKKHAVAIADVGREGEIRYLGEIDSSPAAVERMIRKLAGRCEKLHFCYEAGPTGYGLYRQLRALGHDCTVVAPSLIPKKAGERVKTNRRDAVTLARLFRAGELASVWVPDAVHEAVRDLVRAREAAAQDLRRKRQQLLSFLLRHGRIFSGRQHWSRAHLRWLAQQQFDHPAQQIVFQDAVDAIDDAATRLRRLDEQVAAIVPSWSMAPLVDAYQAMRGVSFVVAVTFVAEIGDVRRFDNPRQLMAFLGLVPSERSTGERVRRAGLTLAGNKRARRVLIEGAWSYRYPARVSQTLQARLEGLPQAVRAIAWKAQIRLCARYRRLNAAGKKLPVVIAAIAREIAAFLWAIARHVAPAV

SEQ ID NO: 230102 - protein, 448 aa, unidentified
MEIVNPNAAGIDIGSRFHMVAVNQNVDDVKEFGVYTEDHEAMIIWLKENSITTIAMESTGSYWQTLFSALQRAGFEVILVNGQHTKNLKGRKTDVQDCMWIQKLHCLGLLNGSFLPGKYVEQLRTYYNHRQHLIEHCSKYINKMQKSLRLMNIRLDVVINDITGKSGRAILNAILSGEREPTVLASFANVWVKKSKEEIAKSLHGNWREDLLFELQECLSLYDIYCGKLAFCDEEFDKVLQFAKSIDMRLPIAIPSGRVVRDRSKHAPVFNVRKLAYMHLGVDLFDIKGVSHNTVLCIMSNMSREEMKKFPTVKNFTSWLRLAPNNKKTGGKIISSRTPKGKNQIALALRQASNSIGNQKDHPLTHFFKRVAYKKGRVAAITATARKLAVIIYHMITKQQAYEPINSEQVIARIKKHQISNIKQRLNRLNLTPNEFNDIVKSVSLSAN

SEQ ID NO: 230103 - protein, 400 aa, unidentified
MLSIGIDVSKGKSTVCGMKPGGEIVYTPFEIQHTREGMSDLVSLLRSSGEEVRAVLESTGNYHCPVVAALLENGIFVSVVNSLRMKRFCSQSIRKVKTDRIDAMQIALYGLAYWQELQPARLPEDTYRELQLLARQYYQMTSMLIKAKVDFNALCDQVLPGMQELMSDHAGRHKLSDFVLRYHHTTHILEMGETRFRKDYCKWAEKKGYRNCERMAAHIFATAQNGIPVLPNAPSTQIVITEAIRVLHTVEASRDAILTQMQALAKTLPEYSLVREMPCIGDTLAPRLIAEIGDVRRFHSKRALIAYAGIDAPPYQSGKFRANNRHISKRGNRYLRKTGYEVMQSYVMHKPANDPIFTFIEKKRGEGKSGKLAMVAGLNKFLRVYYGKVTELYRSLPTIE

SEQ ID NO: 230104 - protein, 335 aa, unidentified
MFYVGLDIHWKTTTICILDKNGRRVKRKTIHSNWKRVLEYCRQIDGPFAVVYEASCGYGYLYDQLSKIASRVVVAHPGQLRLIFRSKRKNDRVDAEKLAKLLYLNEVPPVYVPSVDVRQWRALITHRQALIAKRVRCKNGLRALLRGQGIVAPKGLWSRRGIAWLEALCLNGEWLGIQRDTLLAELEMFDAQIDRVTAALDRLGASHPGVALLRTIPGVGPRTAEAVVAYVADPSRFARNRQAGAYFGLVPCQDASAGSNRLGHITKEGPSVVRKLVVEASWQLIRRCPRTKQRFERLAQGKKERRKIALVAVAHHLVRCMTSMLRTGEVWRDAA

SEQ ID NO: 230105 - protein, 376 aa, unidentified
MPFGVSTQAGVDRDPVSWKEFRGHMAMLAEVVDAVIGGDTHRDTHALEMTTPVGATITTITISNDDAGFVEALAWIAEHAPGPRLVVGLEGTRSYGIGLARAAAAAGLSVVEVERPRRVARRRGKSDPLDAHLAAVQVLALPADRLPTPRADGDREALRILLGARAELSTSRTKQINRLRALLLAGDDTDRDLARGALTDKRLAAIYRRRGSTHASVADAVRRAEIRRLTAAIRAATQQLVTNKRQLTELVTTVAPGLLEKVGVGPVSAAQAIVSWSHRGRCRTEAAFAALAGASPIPASSGRTTRHRLNRGGDRHLNRALHDIVKTRWRVCPRTHHYIARRRAAGRNDREIRRSLKRYVARELFRTLNATALDNT

SEQ ID NO: 230106 - protein, 296 aa, unidentified
MADKLIVGIDVSKDWLDLCASNAAGVERIANTRQAVAAWLERVAPGLIACEPTGGYERTLIAAARERGIPFVRVHPNDVVAFRKSRGIKAKTDAIDARLIAAFVCDKLARAELRTSLIGDERLRALAARRRQLVDALQAEGCRLGVAALPAVHASLEAVIAVLRHSLEALEAELADAIAAHPQTAELARLLQTIFGIGPVAAITLIADLPELGLLSAKQIAALVGLAPHTKRSGKTRYRETTGHGRPGVRRVLFNAARAAVRHPSLFKDFYDRLVTDNRRPGKSLPQRKRGSPSPP

SEQ ID NO: 230107 - protein, 420 aa, unidentified
MNKITISKKGQYVNSDVLVVGVDIGKGFHMAVARRRDGSFTKALKFSSDAVGFNNLKVWLDQWYVQDSFSRVLIGLESTGHYWMTLAFWLQNQGIEVVQVNPLHTHKAKDLYDNTPGKTDKKDARIIADLVSQGKFLNCIIPQGRYADLRYLVLLRNRLIKQRTRELNNMHRVLDVLFPEFTKVFKNLKTQSSLYLLRYYYTPALLLSCSHKRLAKRLGKISRGQLRLDKLCLLYELARSSVGITEGINGLRIMLFRGLLRYGQLAQEISALEDRLEELVCGLPETVYLRSVKGIGLVTVAVILGETGGLQHYSSAEEVIKLAGLNLYELSSGKHRGKRRITRRGRSLLRAGLYRAAVGMVRRGGSLHDFYQRLRDRGKYGAVALVAVACKLMRLLFALVRDQRYYVADYTYSNVISRVA

SEQ ID NO: 230108 - protein, 364 aa, unidentified
MKKSSKKQQGGAGAESRPEKVVGLDLGDRHSHYCLLTVAGEVMEEGRIQTNTAALEKHFGSEPRMRIALEAGTHSGWVSRLLKSYGHQVIVANPRKIPTLTASKSKNDRNDAEQLARMAAFDPELLHPIEHRSAERQQDLNLIHTRSVLVRARTMLINCARGLVKSAGGRLPACSSEAFSEKVPAAVPPALKAACTPLLKQIAQINQTIAAMDKQIDGLDKKYPEIAVLRTAPGVGPVVAACYVLTLDSPQAMPTNRQAGAYLGLRPGQQQSGDSNPQCGITRTGNTYLRSLLVQSAQYILGRFGPNSELRRWGLKLAASGGKRGKKRALVAVARKLAVVLLSMWRNRKKFEPFPQSAAQLATV

SEQ ID NO: 230109 - protein, 367 aa, unidentified
MFHVGLDIHTQRIAICALDERGQVVHRSQVRGIQDMVRVLASLPDRFEVCYEASCGYGHFHDLLRPLATRVVVAHPGQLRLIFRSKHKNDRNDAERLAKLLYLGEVPAVHVPALEVRTWRELINCRSQVIAKRTRAKNTVRALLRGAGITPPQHPGLWTKKGLAWLRQLELPTASQQLRRDLLQEEIEGLLRQVRRLEQQLNRQAQQTPAVARLRSIPGVGIRTAEAVTAFLDDPQRFGNAKAVGSYFGLVPCQDQSGDRNRLGHITREGAPVVRQLVAEAAWQALRRSPAVRAYFERVRREDPQRTKIALVATAHYLVRVMWALLKRATVWQENPALAPALASGTGPVAGPGDDSSTKAGGVANEV

SEQ ID NO: 230110 - protein, 355 aa, unidentified
MTSPRARAQAPIRTVIAGVDAHKDTHHVVVLTGLGQRLADRAFPATIAGYADLRDRVGSHGPIRCFAMESTGSYNAALTRYLIGTGADVVEVNRPHPRTRSRVGKDDAIDAEAAARKALSGQCTARPKDTTTAVESIRVLTAARDSAVKAPTQAHAQLRDLLITAPADLRERITATTSAARAAACRRLRPGTSAPDRPAQAVRTALRSIATRISALDEEISALDTRLDALVTATAPTLTSRTGIGTHTAARLLITAGANIERLDGEAAFARLCGTAPVPVSSGRTRRLHRGGDRQANKALHQIAVCRLRHDPRTKTYMQRRLDQGLSKKDVLRCLKRSIARQAFKDLTTDLHPTP

SEQ ID NO: 230111 - protein, 355 aa, unidentified
MIYVGIDVHKKHCQSALMDETGKVLEQVPFKNTGDGVAYLIDKIKPYGEAKAVLESTGNFWLKSYEALEKADIHVSLSNPLKTRAIAEARIKTDKIDAKLLAHLLRANLVAESYVPDKETRNRRALLRHRSSLVKTRTELKNRIHNLLDKYDLQPEYTDLFGNRGMEWLRNLQLQSTEKTILNSNLELLEALNSQIQKISLEIASIAVNKDDVKLLMTLPGIDYYAAMVIANEIGDVTRFPEANKLVSWTGLAPSTRQSGSRVKHGTITKQGNKTLRWILIQATHNACRNDERFQNFYQRIARRRGGNKAMVALAREMLVIIYHMLTRNEPYRSMDPELYRSKLKRLERLGNSSL

SEQ ID NO: 230112 - protein, 344 aa, unidentified
MITIGIDPHKSSLTAVAVEPNGQPHAPIRLVVDKHTPVALLAWAAQWPDRQWAVEGATGLGRGVAQQLVTLGEVVVDVPAKLAARARLLGSNSARKTDVADAISVAAVALHNRRLNRVQLGDHTTIMRLLTERRDDLVAEHTRWINRLHVLLRDLHPGGAEVRLDTAGASALLTKIRPVTAADHQRKQIARDVVRDLRRHEASIKELEKELRAAVTASGTTLTQIQGIGFLTAAKILALTGDIRRFPNQEHYASYAGTAPIDVSSGEQETHRLSRRGNRQLNAAIHVAAVTQARDPGPGRDHYRRKVTEHKTAKEARRSLKRRISNAIYRRILADHQRLQLEAA

SEQ ID NO: 230113 - protein, 341 aa, unidentified
MKNLFIGVDFSKEKVDVAIIFADGLTETAARVFNEFKTTVSGYKQLVKWVEQNSYGIDSSLWLFCGENTGDYSKGLCNFLYGKGYDMWLENAKSIKDASGLRRLKSDRADASMIAEYAMRNYDKAIMYEPLSESLAQLRELFLYRQMVVRHRCSFQVRRGEKRLTMEKSPIKTMISQSGRHIVSELNKEVEKIDKRIAELIKSDEELTEVFTIVTSVPGIGTQNAVCLMVYTDNFRRFNYDSRKIACYYGIAPFGKDSGTSVHSDPHVHYMANRQIKSMLTQAALAAVNFNPVIARYYMRLMERGKKKQVALNNVKNKLVHLITAMVRNRQLFTTEYKITA

SEQ ID NO: 230114 - protein, 430 aa, unidentified
MGLVVQTALHPEQDEHGMFYEWFVGIDWGSQQHQVCVLDRDRRRVGERSVDHDGASLARLADWLWTVSAGQSQQVAVAIEVPRGAIVEGLLERGFHVFAINPKQLDRFRDRHSVAGAKDDRRDAFVLADSLRTDQPSFHRLQLDAPQLLLLRELSRAEEALLEDFRRSANRLRDQLHRFYPQMLELCAAADASWLWDLIDLAPTPAHAALLSEEHVQRVLKAHRIRRLTAKEVLACLQAPALPVAPGAAEAAQAHCGFLLPCLRVLAAQLQACSQRVSALLHTLAQEPGEGEGPSDVAIVQSLPGVGRKITAWLFAEAAQALAERDYQVVRTHGGVAPVTRQSGKRRQVVMRRGCNPRLRHALYHMARVAMQRDAHFSQVYAALRAKGHRHGQALRTIGDRLLRILMAMLRDRLCYDVSRIRREPVVQMR

SEQ ID NO: 230115 - protein, 340 aa, unidentified
METSIKFYLGIDVSKSWFDVSVLKVVNHEKQPMLTEQFVNTKEGIGSFQKWLGQQGVPFDENTLIVIENTGVYHRPVWEFCSKHNLPLHIGNAAHIKWSLGITRGKNDQIDSKRLCNYCYKQSDELKATPVLNPVFMNLKDLMTSRTRLVAQLQATKSYVKELLCTNDKALLKTLEKAHKAAIDGIEKSIAQIEKAINDLIVSDEKINRNYELIKSIPGIGSITAIYIICCTNNFANKPSGKQLASYAGVVPFEHSSGSSVRGRNKVHKMANKELKKLIHMCAVSSIRYSSEMKAYYDRKKAEGKPGLSVVNAIKNKLLLRVVAVVNKQEKYVENYQKVA

SEQ ID NO: 230116 - protein, 344 aa, unidentified
MKNKEVTKQVVGIDIGKDKFYVCYKIKYSDFSVTIKGTSSFTNDYQGFTSFLDWCSKRDKNDDSLKLIFVMEATGVYYEELAYFLYEKEKQVSVQLAKKLKYFAKGCNLKTKTDKVDAAMIADFGIEKNLTGTDLWEPPSNQFKMIRDLTREHTSLKNSQTAAKLQLHAMEYSARYEPMVLELKKEQILFLSKQIELVEKALRKKVSEDEIIANKIKRIEEIQGLGFMTIVKVITEVNGFILFKNIRQLVSYAGLDVVENQSGSHKGKTKISKNGNARLRAALYMPALTSTKHNKTLKSFYERINENRAIKMQGVVAVMRKLLILIYTIWTKDVDYIDNYQGVK

SEQ ID NO: 230117 - protein, 423 aa, unidentified
MKPITSQQFTAYVGIDWADTKHDVCLQAPGNESREFDCIAHRMADIDHWAQSLYKRFKGPIAIALELAKGPIVYALQRYDFFVLFPINPLTLAKYREAFKPSRAKDDPTDAELALELLMRHPERFAPLHPQSAGMRTLLSLTEHRRELVGDKTRFTNRLTNTLKQYYPHALDWFDQRDTILFCDFLNRWPTLAQAKRARRASLQAFFYAHNGRRPHVISARLDAIKAATPLTEDRGVIDPCRLHVLVLVEQLRTTLQAIDRFDREVATLAPTLPDYALFQDLPGAGPHLAPRLLAAFGEQRDRFQAAAELQKYAGIAPVTERSGKKSWIHWRWQCPTFLRQTFVEWAGQTINKSFWAGAYYRQQRDKGNSYQAAVRSLAFKWIRILYQCWKTRTPYDESRYLNALRKRGSPLLKNLELNTKSA

SEQ ID NO: 230118 - protein, 343 aa, unidentified
MQIRSVGIDLGKTTFHLVALSAAGKVLLRKKFTQKQLITFTANMQTSLIGMEACSGAHFLGRVLREQGHDVKLIPAQFVKPFVKSNKNDFLDAEAIAEAVERQNMRFVPIKTDDQLDLQALHRVRDRLIARRTSVINQLRAFLLERGMTFAKTPAKLKVAMPEILENADANLTPRMRNLVSLLWSEWKDLEQQIVGMNAEVEQIASSDPACQRLRQIPGIGPLVATAIVAAIGNGAAFHKGREFASWLGLVPRQHSTGGKARLFGISKRGNRYLRKILVHGARSAVLRVKRERAPFGAWLDALETRAPINVVIAAAANKLARIAWAVLSSGQEYRPAMSPMGA

SEQ ID NO: 230119 - protein, 325 aa, unidentified
MFVGLDLHKRYSEFAIMDIFGKVLRQGRIENTLEEMTTFSESIPAHSSIAIESSSTWYWAHRLLSGRHKVILSNPVKNKAIASAKVKTDKIDSLMLATLLRGGFVAESYVPSRETMELRELVRYRANLVRQRTRMKNQVHAHLLMNNISIEAGPFTKGFVEEVRKIDDARVQGYLRLIDGLNREIREASVAIRQKAGSNEEANLLMTIPGISFYSALLIVSEIGEISRFEDSSSLVAYAGLAPSTHSSGGKTYHGPIMKSGSRYLRWIAGQCTRVHMRAEPDGTVAIFYARLARKKGDQKAIVAASAKLLKVVYWVLRERRAYHS

SEQ ID NO: 230120 - protein, 338 aa, unidentified
MKNKSFIGIDISKNVIDVSIFCEETPIKDFSHDVFNNSRKGFGEMCIWLKKNHVVLSNCLFGMEFTGSYSMELEKFLNARNYQFCMLSTHVVKHYPMGPKDKSDKIDSAKIADFLYRYNGTECVKPYNMPDKTMQRLKALMNERKFLVEQRTCFMNRRQLCTTKEDTQLYDGYIKKLSHDIENIELEEQKLLATDDSLLSTYKNLLTIPGIGFVNAINVIVITRNFTAFETARQYASYVGVAPHFRTSGTSVKWRPRPSARCDGQAKADLSMAATVVVQYDAELQSFYNRKLGGKQDSDTKRKALNAVKFKLVLRMFAIGKQNRKLEPLDSIGFKEQQ

SEQ ID NO: 230121 - protein, 350 aa, unidentified
MTIVGGFDVHRKQITFDYVDDDGLVHWGQIRPATRKTLRGWLGEHCPDGDGEFALEGCTGWRYVSDELAAAQLGVHLGDPAEIAAARGPKKRAKTDHADAKLLRTLLVEGRFPESWVAPAHVLEVRTLGRLYCTLMDERRAWQQRIHAQLFHQGCPPVRALLSHAGRTALIGAELSPVGRQYVDTALHRIDELSAEIEPLRTQLVNFARCQTGCQALQRHYGIGWLCAAIIWAEIGDARRFHSSDQLVRFAGLDVTVYSSDSKRSPGHLSRQGSPELRWAAFEAAKCAARRGSPDYDYYRRLAAKRDGHNGKNPTLAVERKILRRCHHTLDELGDAALAMPDNRPHQVAA

SEQ ID NO: 230122 - protein, 416 aa, unidentified
MLFVGDDWAEDHHDLVVIDDNQKVVARARVPEGPAGITAFTDVIARAALKTVTSDDDLDDDAVEVMVGIELNHGPWVQALVAAGYQVFGVDPLQAKRFRESWSNSKTKSDSGDALGLAELVRSRHRTLTTVGADSEGSAAIRILAREHQRAVWDRTRQTNRLRSTLREYHPAIVTIAAKYDLPLHDKTILGLLTLAPTPTAGAAITVRQVLPLLARRHDKDAKAAWIVQALRQPQLPVGPEIVEAYAITVRAATRVISSASSHIAELEEQVNAHFSRHPDAEIYLSQPGIGQVIGARLCGEYGDDSTRFRTAKDRRNFAQTSPLTRQSGKLRIVCARKAGNDWALDAAVRQANAAIMHDKHAHAYYRRQRDRGVKHNAALRQLANKLTGILHGCLARHHRYDPAIAWANADLEVPA

SEQ ID NO: 230123 - protein, 444 aa, unidentified
METESSAGSGRRCIGLDVHREFAQVAIWQGGLVTQAGRFATTPEGVRAFAEGLGPADEVALEATGNTWAIATLLASRAGRVVVSNPVKTRAIAEAKVKTDKVDAEILAQLLAADYLPAVWRPDPATAALRRQVLRRAHIVRQRTRLKNQVHAIPHRNLIPRCPAADLFGHKGRRWLGEQDLPPDELAAATALLRQLDFHAEELRLIDTDLGQVALGRPEVLRLMTVPGIDATVALSIVAAVGDFTRFRTPEKLVAYLGLNPRVRQSGGQPASHGRITKAGSAHARGMLVEAAWSASKAPGPLRAFYQRVAARRGMQVAVVAAARKLTVLCWHLIISGEDYAYAQPSLVAHKRRKLELRAGSPAARGHKGKSAGYSLKAVRAAERDLSTQAETAYRTIVAAWQPTRPATRTTARKKIAARSGVDVAATTGARLPRPSRGDAARQG

SEQ ID NO: 230124 - protein, 313 aa, unidentified
MEPVSVGIDVSKRQFVIAVDPSGERWTSETTAAAITTLVARLRALAPRIIVVEATGGYERALVVAIAGAELPIAVVNPRQARAFAQAIGRTAKTDAIDAGVLAAFGGRVDLPARPVTDTATQALAALMARRRQLLEMIGMERARLEHAPATGPLTRDLRRHIHWLERRVKDVDDDIGTSIEAHPTWRVQDDLLRSVPGIGPTTARTLLADLPELGQLDRRAIAALVGVAPMNCDSGQSRGQRHIWGGRAPVRTTLYMAALTATRHNVALRAFYRRLRDAGKPAKVALVAVMRKLLTIVNAMLKHQTRWQDQPA

SEQ ID NO: 230125 - protein, 346 aa, unidentified
MKQATTIGLDLAKQTFQVHGADADGSAVFNRRLRRAEVLGFFEKQPSCLIGIEACGSSHYWAREIAALGHEVRLIPPAYVKPFVKRGKTDAADAEAISEAVTRKTMRFVPVKSVEQQAAAIVLKTRGLLVRQQTQAINALRAHLSELGVVVGTGTAKVAGLIEIVHDDTDARLPKAARFALSAIADQIEALARQIARLEREIVAEAKRDEDMRRLTTIPGVGAITAASIKALVPDPAGFKSGRHLAAWLGLTPKSHSSGGKERLGKISKMGNTELRTLLVLGATSVLRHARGNNNASKWVTAILARRPYKVVAVALANKMARIIWALLTKGGTYRKMETASGAASA

SEQ ID NO: 230126 - protein, 345 aa, unidentified
MHRLSISRSYQLFAGIDVSAATVTVSWMAPGGRPSRPITIEQTLQGYAFLQQQLCASGLSPQAILVVLEATGSYWITLATTLAEAGFAVSVINPAQAHDFAKALLKRAKTDDLDAQMLTELAARLQPEPWTPPPAVYAELQQRLSQREALVQIRTQVRNQRHALLRQPRVIAAVQQRMDDLLDTLAQQIADVEHELALALRQDEAWAAAAERLQTISGIGRLTACWILVTTLKFTLCPTPEAAASHAGLAPYVRLSGSSVRGRAQIGQAGNRHLRRALYLATFSAVRYNPIVKAFYDRLRAAGKPPKVARCAAARKLLHIAWAVVMKEQDFNPQHCVRPALRAAA

SEQ ID NO: 230127 - protein, 410 aa, unidentified
MQSFFLGADVSKGYADFVILDDRKKTVTENFQLDDTNKGHRRLFQVIDRVLKQHPQASLFAAVESTGGYENNWYRSLQGFQQTLKISVARLNPLGVMHNSKADLKRNNTDKISARSIAEYLIAHPEKVTYRQHDQWASLRKQWGFIRMLSKQTTQMLNQLESLLYSANPDLLRFCKDGLPAWVLRLLLKYPTATHLARARVSSVAKIPYVTLQRAQELVEAAKHSVASATDPVTGQLLQVTAKQILSLQKTIDAQQALMVAQCSSPEVELLKTFTGIGDSSAIGIMLEIQDIERFSSSKNLASFFGLHPVFKISGDGSSGFKMSKQGRKEPRRILYMVALTAIRSNPVIRDVYEHHLSKGKCKMAAIGVCMHKILRILYGMLKNQTPFDPKIDLKNRQRGVGKKNQSLNK

SEQ ID NO: 230128 - protein, 428 aa, unidentified
MNKGRTPIAIIFVLEVHTMTLTCVGIDVSKGKSTVSAYQWGDIVVKKPHDVPHTASALSELADSLKLLGGEVRVVMEHTGRYWLPVAQVLYESGLFVCAVNPKLVRDFGDNKLRSVKNDKADSKKLSRYGLKYWTDLIPYVPTEIAHQKLLEFSRQFDSSNKLLTGLKNNLQAIVDVTFPGVRKLIKSRARDDGHIKWVDFVCTFFHCDYVGKLGEAKFVERYRRWCKRNGYNFTAKGASKIYAAAQDQVPTLPCDADTKLLISETARQLTCVSATVETWRAKLTEIASTLPEYDCVMSMYGCGKTTGPQLMAEIGDPTRFSSKKSLVNFAGIAPGDNQSGDYKPKSSPASKKGSPHLRKTLFQVMSTLLQNSPADEPVYQFLDRKRSEGKNYYVYMTAGANKFLRQYYAKVKAYLNEGSSEQAPLEL

SEQ ID NO: 230129 - protein, 401 aa, unidentified
MAARQETAWVGVDIGKTHHWVCALGADGERLLSAKVANDEAEIVELIATVQGLAAQPVWAVDIVGAPSALMLALLAQAGQSLRYASGRMVAAMSGAYAGEGKTDAKDAYVIAETARLRRDLAVVDHDTDLVRNLAMLTAHRADLVADRVRMINRLRDLMTSVFPALERAFDYASRKGALVLLTGYASPHRIRRIGHTRLAAWLRQRKVRDSAGVAARAISAAHAQMTVLPGQGLATRLIAELATNILTLDERLKSLDAQIAETFDQHPQAAVIQSMPGFGPVLGASLLVGAGDLRAFPSAGHLAAAAGLVPVPNDSGRRTGNLHRPKRYSRPLRHVFYLSAQTAMQRPGPNRDYYLKKRHHGRTHSQAVIALARRRVDVLWALLRDNRTWTLSPPAAAQAA

SEQ ID NO: 230130 - protein, 339 aa, unidentified
MQVTTIGLDLAKNVFQVHGVTKEGEVVFNRSLRRAQVLTFLASLPRCLVGIEACGTSHYWAREIAKVGHEVRLIPPAYVKPYVKRGKSDAIDAAAICEAVTRPSMRFVAVKSPEQQAVLALHRVRDLIVRQRTQIVNMLRGVLAEFGIVVRQGAGHAIAFAKHCFEGVEQDLPDPARDIVTNLSHQLVALHRRVLWYGRQLNRAAPLDARVARLRTIPGVGPITASAIVASIGDGRQFSNGRSLAAWLGLTPLNRSSGGKERLGRISKMGDRYIRRLLVLGMTSRIKQIRHRPDQFDPWFSEILERKPAKLAAVAMANKTARIIRALLTREQDYKVRTA

SEQ ID NO: 230131 - protein, 343 aa, unidentified
MEAVKVIGFDIAKSVFQVHGLNAEGKVIIRRQLKRRHVLPFFQKLPPCLVGIEACASSHYWSRELQALGHTVRLMPAAYVKPYVKRHKNDATDAEAISEAVTRPNMRFVATKTPEQQSCLTLHRARHLFIRQQTAVINAIRGHLAEFGIVAPVGRKGVEDLLRVVADPKDERVPKVARACVVALGAQLRMLKAQILEFDRMINAWHRSNKTSKELDEIPGVGPALATALVAGVADPKAFRSGRDFSAWIGLVPKQHSSGGKEKLGSISKRGDRYLRGLFTSGALAVIRYAKIHGTKHRPWLTRLLARRPTKVAAVALANKIARMAWAMMAKGERYKEPVALAA

SEQ ID NO: 230132 - protein, 364 aa, unidentified
MKKLTTAATNWIGKQERLTIGLDLGDRSSHYCVLDESGRIVTESKTATSPKAMEAVFGGMTRSRIALETGMHSPWVSRLLSQHGHEVIVAHARNVRLIGESRKKDDRLDAQTLARLARIDPELLCPVKHRSAKAQADLSLIRARAGLVRARTALVNTARGLAKSYGQWLRGCNVRKMNPEKAEALSPELQVALQPLLAGIEAVSEQIGEYNERIEKLAQESYPEVKLLKQVKGVGTLIALTFLLTLEDQHRFSKSRDVGCYLGLQPGRRNSGQSEPQMHISKEGDPYLRTLLVQGAQHILGPFGPDCDLRRWGLKLAERGGRNGKKRAIIATARKLAVLLHHLWVSGEVYEPLHNNRTAIAVAA

SEQ ID NO: 230133 - protein, 429 aa, unidentified
MNSTQNKKIEQVKETTMIVGIDVGSEKHYFRAFNWRGIELTRKPVPFSNSMEGFNSFYNTIVELMKKSELEEALVGIEPTGHYWFDLGQFMGEKNIKFVMVNPHHVHKTKELDDNSPSKNDRKDPRVIAGLVKDGRYFYSYMPTGVYAELRNASNRRFVLVEELTRVKNRLQKWIAVYFPEYKGIYTHIDAKGGLLVLKQAPTPEEIVKLGVEGIIKIWKDAKLRGNGHKKAMQILNAAMRSIGLKIGLREARMEIQDLIEDYELQTKRLERINDLIKELCQQIKYANKLLEIKGIGITTVGGFIAEVGDITRFDNTKELQKLAGLELVADSSGKHNGKTKISKRGRKRLRYLLFEAAISVVGKNEEFKEIHRYYITREKNPLKKMQSLIAVACKLIRVFHVILTKGVSYDASKMLEDIRHPGVQLKAA

SEQ ID NO: 230134 - protein, 410 aa, unidentified
MRYYLGVDWADQTHAVWVVDESGMKVTAGAVSHTAEGLGAWGRELDEWRAQGIELWAAIERPDGRVVDLLLDHGVVVYPVNPKALDRARDRFRQSGAKSDSFDARVLADFLRTDHAHLRALQPSSEAAQELKLLTEDCQRHIRQQTRLVNQLTATLKAYYPRALEVAELTSALAREFLPAYPTPAALTALTERQWQRWARAHRLTEARTGELWNVLRQPQLPVPVHVVRAKARLMQALVKQLMPVMAAVAQYRRAIDDFFASMPAAQWARTLPIGKHGITAPTLWARLGDAPGRWESFRHLQAHAGTVPVTKRSGKQQRVVQFRFACDKALRYVVDQVAFLSLLSSAWARAYYDQQRARGHSHRQALRALGAKWLKIIFVMWERHVPYDERYHLATMTRQQLRPRQKQIA

SEQ ID NO: 230135 - protein, 280 aa, unidentified
MNIIGLDISKDTIDATLHKTNGSIHYIKFKNNDDGLKQFRLWIKGNRIRKVYIGMEATGIYYEKAADMLSSYYTVYVINPLKIKDYGKSRFNRTKTDKADSNLIADYIKRHQDTLIPYQIPKNKALQKLINLKNQLQQQQKQIKNRLHSTEEDFIRNIHQDLIDTIQDKMEQVKIAISEQIKKQTDYNHYRNLQTIPSIGKDTASVLYAQLTEKHFKTANQFVSYAGLSPAIIQSGTSVRGRGRLSRYGNRRLKSTLYMPALCAYRFNAFPKLGRVLNLT

SEQ ID NO: 230136 - protein, 364 aa, unidentified
MKEITLLGIDLAKNVFQIIGLDKHHKEVVRKRLNRIKLHEYIGNLPKCRILMESCGSSNYWGRTFVSMGHEVNLVSPQHVTPYVGNHKNDYKDTEALLEVGTRPRTKFVSIKTIEQQDMQSILRVRERIVGNRVSLSNQLRGLLLEYGIDISKGFSSLKEKIPKLLDSSNEQLSIQMKEVVSECYEEFKGLSERIAAYDKRLERMSAQHESCQLLRSIPGIGPISAVALYSSVGNGSQFKNGREMAAHIGLVPRQHSSGERQVLLGITRQGDGNLKQLLIHGARAVVQHAQKKTDWRSEWINKLSVRKHKNVVATAVANRTARIAWAVLSSGTSYRKGDIELTQDGACHMQINNALPIIEGRQV

SEQ ID NO: 230137 - protein, 342 aa, unidentified
MLDTDTGELEEKTLEHQGETVRKFYSALSGSILVGIEATGSMQWFLELMEELGIECRVGHPAKIRKAETRKQKHDRRDARLLLTLLAENRFPTIWMPSSEQRDLRTLLRHRHQWVRLRSRVQHTLQSMALNHGLRRGRSLWSQAGQGELRALPLAPHASERRKALMTLYPRLQESIAELDRQVSEQTQQRTDARRLMTHPGVGPVTALATEVFLGDPKRFSDGKALASYIGMIPSEHSSGRRQRLGAMSKQGNALLRYLWCEAAMHAVERDPELKRFYRRKLVQKGLGKARVAAARKLGIRLWIMMRDEIDYQEFCRRGKARQESGSVRAGMPDRNSGPAEQ

SEQ ID NO: 230138 - protein, 404 aa, unidentified
MWFVGLDWADEHHDICVITDAGKQIGSLRIAHTPEGFQDLKDFLLSITGPNRKEEVVCIVETNHGLLIAWLLETGYPVYPVNPKTVDRHRSASGAKTDKIDAYLLAKHGRSEIADMRRLEPDSAIVAELKALTRDQDGLIRSQTRLVNQLTACLKAYYPVALHLFSKVQQRCTLAFLQTYPTPQEAMAASIGQIAQVLKEAGHPTANKVAPKIFETLHQPQLTADAITTRTKARLMLVLVKQLQPLVEEIAHYDKVIEELFLTHADSKMFRSLPRAGKRLAPRLLAEIGDDPDRYADAASLQALAGTSPVLFESGNYSKPHRRYACSKPLRNALQQFAWQSTQTAGWARDYYRRKRKEGKSHTVAVRALANVWARILFAMRSSHSCYCAATFEDAQRKHAPRAA

SEQ ID NO: 230139 - protein, 327 aa, unidentified
MQTVTTIGFDIAKSVFQVHGVDAAGRVIIRRQLKRRHVLAFFQKLPPCLVGIEACASSHHWSRELQALGHTVRLMPPAYVKPYVKRQKNDMADAEAICEAVTRANMRFVPTKTPEQQSCLMLHRTRHLFIRQQIAVINSIRAHLAEFGIVAPVGRKGVTELLQIVADTNDKRVSEVARACLAALGTQLLSIKKQILEFDRMIMAWHRSNQTSKRLHYIPGIGPMLATALVASVADPSTFRSGRTFRPGLGSFPNSTPVGARSGSAASVNRVTAICVACSWPEHSLSSAMPRSMAPGIGPGSRRCWVGARPRSLLSHLPTKSRGWPGP

SEQ ID NO: 230140 - protein, 352 aa, unidentified
MDDINSATIIIGVDTHKATHVAVAINMQGARLAALSIPANAKGYQELESWSRALGKIEAFGIEGTGSYGAGLSRSLLLLGHKVIEVTRPNRQLRYRHGKTDSLDAEGAARSVLNGQAMAKPKTQTGPVEMIRHLKIVRDTAVKCRTQAMVTLKALIINAPAELRGVLDSIKGKITLIRYVAAFRPGKITSTTASAKAAMRALARRWLMLHDEIQTHDKELERLVIAKMPNLMASHGIGTMAVAEMLILVGDDPSRIKSEAALAKLCGVCPIPASSGKTNRFRLNRGGNRQANAALYRVAIVRMRNHEPTIAYVQKRTRDGKTKSEIIRCLKRYIVREFYRHICMPKTAPATA

SEQ ID NO: 230141 - protein, 314 aa, unidentified
MSHVFVGIDVSKDRLDVATCPEPSSWSVPNDEAGIEALVQRLLPLHPARVVLEATGGLEMPALGALAAAGLPAVAVNPRQTRDFAKAAGLLAKTDRIDAAALARFAEALKPEIRPLPDAAAQELGALIVRRRQVVQMLTAEKNRRQSAPKRLHKDLDRHIAWLEEALRRLDDELQKTIRNSPAWREKDDLLQRVAGIGPKTSAVLIAELPELGRLNRHEIAKLAGVAPMNRDSGRYRGERHIQGGRAMVRTALYMATLTAIRCNPVIAAFYQRLRDDGKKSKVALTACMRKLLVRLNAMIRDRVPWREKSPQVT

SEQ ID NO: 230142 - protein, 291 aa, unidentified
MNLSVVLGVDIAKLKFDVCLVKENQKVKHKVFANTTHGFRQLIAWLDSHQVGSLHICLEATGSYGEALALHLFDEGYQVSVVNPAAVKAFAASRLTRTKTDKVDAELIARFCLAQQPEAWQPPLPQVRRLQALVRRLESLIEMRVAEENRLSSGVAVDAVRHSLEDHIAYLVEEIKQTEQMIREHIDNHPDLKVQSDLLDSIPGIGQTTAALLLAEIVNIKEYKSARQVAAYAGLVPRERRSGSSVRGRVQLSKIGNARLRKALYFPAMTALRCSSFFQQWASGMRERGKV

SEQ ID NO: 230143 - protein, 338 aa, unidentified
MNTYYIGADVHCNKTELAVESKNKITQRFSVPTTIQAISEVLKSLPGKKHLTFEEGPMAGWLYRNLTDKADTITVCDPRRNKLIASDGDKNDKIDVPKGACLLRGKYLRSVYHSTDDKIVELKRWVGLYLDRVKQATACINKIRSQARMYGIKIPRRVLRDDRHRQEWLCSLSTDSVAQRLQILWIGYDASAQQTKMAKQQLSKLAGIHPIIRYWGKLPGVGLIHATTIFAYLDTPWRFKKKNKLWKYCGLGLVRKVSGTRAGRLKMNWSSNKRLKNAVMGAAISAIRHKDNIFRHYYERIVKDGITLGNARHAVARKLLTVMWGMWKNMSRFDESLC

SEQ ID NO: 230144 - protein, 277 aa, unidentified
MNLSRIGLDLAKQVFQVHGVDRHEHVVCRRQLKRAQVRDFFRQLPPCLVAMEACGSAHYWARELRELGHTVRLIAPQFVKPYVKGDKHDAHDAEAICEAASRPSMRYVPVKSAEQQAVQSVHRVRSRLVRARTALCNEVRGLLGEFGLIATRRGRAATMALLETVTATEPASLPAPMGELLRELKDELQTLEARIARLERQIQAHVRGDARIQRLLAVEGIGPISASAVAASAGDARQFRTGRQFAAWLGLVPRQHSTGPVERSCHTVVETSTTIAQ

SEQ ID NO: 230145 - protein, 507 aa, unidentified
MLDFFFIILTNGFSLKDYTMENNAFLGVDVAKGSADFLLVNARKETLEEGFMLDDCAEGRKVLCRLIEKWFASGITHLYCAVESTGGYENNWFTLLCSLSASYDQKNKTLRVARVNPRPVKACGKAGMLRTQTDQTSALAIASYLIGFPENVRYSPHTGQSDDPVWLAARGQAGLIRMLIKQKTQLSSQLEKLLYTRLGETMIYCRNGIPGWLLRLVSRYPSREHLQRAGAGKLAKIKGLSPDKAKSLLGKLNGDQPATPVIACHTIKATARGILHLQKQIDTQQTFLIDQFSEHPDVRLLESITGIAVTSAVRLIVEIEDVSRFDSSKAFCAYFGVHPTWRESGDGHWKTGMSKQGRAQVRGMLYMSSLTAIRWDPDLKKLYHRFRKENRMNHYQAMGVLMHKLLRIIYGVLKNQTPYDRQVDRENRRQSKEKQQAYQKKIAQNKAVQKTTRQRFMSNRADSTEDAPISRRAWKKRKQEASQSSLVEEYAGSPPADNPKRIPTENI

SEQ ID NO: 230146 - protein, 364 aa, unidentified
MKKIAYLGVDYHVKTVTITVYINGDGFYETVRFKNSDKTITNYLKKLSKQFEIRICYEASSSGYVFQRKMEKLGYHCDVIAPSLIPRKPGDKRKNDHRDSKKLAENYAKGLLTVVHPPTEFEESIRGLVRCQLAMKNSEKRIKNQINAYLLSRGHRWPKSKWTLEHYSWLSNLELRDQYSQMALEEYMGHLEYITARVQALKQEIEKLANSEIYAPSVKKLRAFKGIGTMTAMLLIVEITDFRRFPTAGALMAYLGLIPGEETSDSRSKDKAITKAGNTRCRKAIIGAIQHYMKQPRITAPMQRDLEKVDAHSANIAIKCMKRLNKRFWALIHKGKTPNKVKVAVARELVGFVWAMMQPEPTII

SEQ ID NO: 230147 - protein, 342 aa, unidentified
MDHFAGLDVSVNETSVCIVDDTGRIVREVKVASEPEALLRVLGNPAYRFKRIGLEAGPLSQWLFSGLAEAELPVVCVETRHMQAVLKAQINKTDRNDARGIAQMMRVGLCRPVHVKTLRSQKLRMLLTHRKLLQSKAIAIENDLRGTLRNFGLKVGMVGTVRFEARIQELVENFPDLSVLVEPLLIVRRALREQIVILHRRLLAIVRDDEVCRRLMTTPGVGPVVALTYRATVDVPARFRKSRAVGAVFGLTCSRYQSGEIDWSGRISRCGDEMMRVMLYEAAQSMLRSKKWSWLKAWAMQIARRRGMKKAIVALARRLAVIMHRIWVDGTEFRWTRETAAA

SEQ ID NO: 230148 - protein, 391 aa, unidentified
MQVAADRTEAPPAIQTDLRAIFVSLELSRSTWLITSLSPGSGEKMSKHSVQAGDIAGLLKRFARLKEKARARTGRGFPIIVIQETGLDGFWIHRVLHSEGIESHVVDAASILTSRRRRRAKTDRIDGETLVRTLMAFKRGEPRVCSMARAPTPQEEDRRRVCRERRTLVGERVRHVNRIKGLLFAQGVFGYEPLRKARRERLEDLRTGDGRPLPVHLKAQIIRELDRLEVLLEQLKSVEAERNALLKPATGEAASPATMLAQLKGIGPETAAVLWSEGLFRQFDNRRQVAAYAGLAPTPWQSGSIDHEQGVSKAGNARLRTTMVELAWLWLQNQPTSALSLWFHERVRLGGRMRKTIIVALARKLLIALWRYTTAGVVIEGAAMKAAPATI

SEQ ID NO: 230149 - protein, 350 aa, unidentified
MKKHITIGMDLGDKNHIAVVLDHNGNEMECIQLKNNKISLRRYFQRYLGATVAIEAGTHSPWISRLLKELGCQVYVGNPYKLRVIWDSTDKSDERDARMLAMVCRLEPRLLWPIHHRSESAHNDLETIKARNMLVQTRTKLINHVRSAVKTTGQRLPKCSAASFAGRAINLLDKSMLPALEPLIDTIAQISDRIKKLDKHIERLAIERYPESEVLQQVQGVGPLTALAYVLTIEDPGRFAKSRMVGPYLGLTPRRDQSGDIDKQLPITKAGNSYLRKLLVGCAHYIIGPFGPDCDLRRHGLKIAARGGKNARKRAAVAVARKLSVLLHSLWVSGQEYEPLYCSVKLDKAA

SEQ ID NO: 230150 - protein, 426 aa, unidentified
MNYKQNEKILQVTEKTLVVGVDIAKEMQFCRAFNYRRLELGKLYSFSNDRSGFDGFKEWVEQLMKENGLDSLIIGMEPTGHYWWNLGEYCRDNAMKIVLVNPFHVKRSKELDDNSPTKNDRKDPKTIANLVIDGRFVETYMPTGIYAELRSVVRMYDHVIGCKSVVENKILQWLDNYFPEFTKVFGSWDCKSGMITLREFPLPSMIVNLGETKVLEIWKKEIKQGVGKKRAQKLVEIAKRSVGSNEALKMGAKELHYLISEYDVYVKQLDEIKIEMENLLRQVPGAKEALKIKGMGLVTVAGIIAEIGDISRFQDARQIQKYAGLNLVETSSGKHKGETTISKRGRKRLRMMLFRVMMPMVANNAEFKQLHQYYTSRKENPLKKKQSLILLCCKLIRVLYAILTKGVEYDGSKLMKDIKRPVEQAA

SEQ ID NO: 230151 - protein, 323 aa, unidentified
MDVHKESFTLCAYTIDAEKGSHFQRTEADYKNVLKYLEFLRTVYGNDANFICGYEAGCLGYTLYHQLTEHDVNCVILAPTTMLEQRSKRRIKTDRRDAEIIGKCLAQHNYSPVHIPTATDEETKEFLRMRDDHKLALKKVKQQILAFCLRHNYRYDGNSHWTAAHIKWLKSLNPEALYKEILDEYLLTYTTLSDKVERLDKRIEELASKDEYRESVKKLCCFIGIKTHTALSVLVEVGDFQRFASAQNFASYLGLVPGEDSSGDGQTRLGITKAGNRHVRMLLTEASQCYARGQIGFKSKELKSRQAGNSPQVIAYADKANEA

SEQ ID NO: 230152 - protein, 428 aa, unidentified
MNEDELSRLKEFRQLKKQIQGSETHLIVGIDVAKERHHAFLGTASGKTLLKKLIFENSASGFCELLDRVEAVRAQSGLSEVVFGLEPTSNYHKPLSRYLINKGCHVVLVGGKAVKNNRELLDERWDKHDTKDAANVADLVSRGKCFYYDTPSWEIEELRELHSLRTRLKKEEHSLSLRIRNNLLAKHFPELDSFYSACEREALAIVRWCLNPRKIAVMPFDEFFKRVAPNARGIAQKLRLQKIYRLAHESIGCPVGGAVQFQAGLLVEKIKQVREQISEVDQLIGQICAQFPSYEYLLSIPGFGPYVASKVLATLADPRRFDTAKQVVRTAGYDLCADRSGKRSDQAVPVISKKGNSQLRYALYQAAMVASSRHRFFIAYFARMLQGRERERGIRTKMRVKLAAKMLVTAWTLMKKGEPFNPDYLNVQ

SEQ ID NO: 230153 - protein, 392 aa, unidentified
MLFVGIDIAKRNHEASVIAQDGSVVRKAMRFANSQAGYNKFMDMVRSLSEPVVFGMEATGHYWLTLYTHLRNDGFTVYVINPIQSDALRGMYIRKTKTDSVDSVIIADVIRFGRYCETSVDPGDLQAMRELCRQRFYIIDMASDLKRKVIALLDQVFPEYEKLFSDSFGLSSMELLSQYTTPEEMLSVSSQQLAEVLKKASRGRLGAEKAVEIQNAAKNSFGIVMASSSFSLIIRQYIEQIRSLESSVDIFDTEIARLLSGFDTQLTTITGIGSTLAAVILSEIGGDIRRFSSPAKLAAYAGVDPTVKQSGDFSGTRIKMSKRGSPCLRRAIWLASTVAAFKDPVIHALYERKRAEGKDHMTVIGHVCRKMISIIFAVLRDNTPYVPAVISD

SEQ ID NO: 230154 - protein, 356 aa, unidentified
MPSITPDNAAVEVVGGVDTHQDTHTAAVIDLVGRVLGTQQFPATTAGYTALLTWMRGFGRLPRVGVEGTGAYGAGLARRLRDEQVELVEVDRPDRKTRRFQGKSDPIDAIQAAKAALAGERTGTPEQRDGRVEALRNLRVARRSAVDQRADTQRQIKALIVTAPDQLRAQLRGLAVKQLIATCASLQLDPADAAAPATAATIALRSLARRHQQLSAEITELDELLEPLVAAINPGLLAAHGVGPDVAGQLLVTAGENHDRLTSEAGFAMLCGVAPIPASSGRTNRHRLNRGGDRQANAALYRVVLVRLRWDPRTRAYAEQRTKEGLSKKEIIRCLKRYVARELYQLITSKDLELAA

SEQ ID NO: 230155 - protein, 356 aa, unidentified
MNQLTTVGLDLAKDVIAACALDLHGAVLERRVLKREAFQRWAEQLPVCTVAMEACGSAHHWGRWFAARGHTVRLIAPQFVAAFRKGGKNDAADAEAVAIAARQPTMRFVPIKTIDQQTILAWHCAREGWKEERTALMNRVRGLLTEFGIVIARSSDRFLAELPRLTEDPRLPDAMQGLLLEAREQLASLHARLARCEAQITNHARSNTAAQRVSALLGIGPITSSALAATVPDTTTFKSGRQFGAWLGLTPKQHSSGGKTRLGRISLRGNVYLRTLLIQGARSTLQSALRADLSRASRLQRWIIELYGRRGYHKTLVAIANKHARIVWAILAKDERYDASAWQRHPMAQALPAASS

SEQ ID NO: 230156 - protein, 336 aa, unidentified
MEYGAIDLHQRYTWIRLVTPDGTEILEKRVPTTREALTVAFAGRPRARILIESSTESEWVAQTIEACGHEVIVAAPGYALMYGHRDPRIKTDRRDVRALAEACRLGIYRLAHRVSAEQRARRRELKVREVLVRQRTALINLLRAELRQEGLRLRSCAAESVVRQYRALAVPATLAAGVSLLVAALEDLTDAIAASTAALTEVAKADPIVRRLQTAPSVGPITSLTYRAVIDDVFRFHDARGVTAYLGLVPKEESSGDRQRKGGITKAGPTGLRVLLIQASWGIWRQRKGGGALHAWVERLAARRGKRIAVVALARRLARILYAMWRDDKDYRVQPA

SEQ ID NO: 230157 - protein, 403 aa, unidentified
MKHVIAFDVSMGKSYMVIYNVQKQCVFESEIKHTKPDFKKLQEKIHKLTDETGESPEIVFEATGIYSRQLERFMQNNQYTYCLLNPLEAKIQCDSLRIHKTDRSDAHRLALTHFTVTRRVSTGTDNLFYQLKSLSRLYSELDDELSIIRGRMHKVIQLTFPELERIFTSRSDLFLNFVQLFPHPNCVLGLSKTIIKNRIRANTNKKISNITAEKKAIQILEIAKICYPAVSQNDVLCDQLKLYARRYQELLHQKECCINKMVYIAEQRAEYNIILSLPGIGPNTAVRLMAEIGDITRFNNNKQLNAFAGIDIRRFQSGKTVFKDKINKRGNKHLRKLLFLIIQNMIKQRRYGQNHIVEYYDKLKTQPYNKCHKVASIACVNKFLKLLFHLITHDIHYDYRLTA

SEQ ID NO: 230158 - protein, 345 aa, unidentified
MATYYIGADVHSNNTELAIEKRGKIVARYSVPTTIPSISNVLQSLQGKKFFAMEEGPMAGWLYRNLNKEVDKFIVSEPRRNKLITSDGDKDDKVDAGKLAALLRGNFIKAVHHSDHSTRAHLKHWVNLYHDRVCDAVRNINKIRACCRMHGVAIPRRVVRNIVHRHNWLSGLNNPVLKEQLKMLWIGYDATKMQVEIAKKQLSSSARKYQVIRYWRRLSGIGLIRAVTIFAYLDTPWRFKKRAKLLKYCGVGLERTASGKDRKGMFKPARLKLPRAVNRRLKNAVLGAATSAINQKGNVFKDYYERMLSNGITPTNAQHSVARKMVSVMSAMWKTNSPFDKKLLR

SEQ ID NO: 230159 - protein, 288 aa, unidentified
MENIALIGIDLGKNSFHIHCQDHRGKAVYRKKFTRPKLIEFLASCPATTIAMEACGGSHFMARKLAELGHFPKLISPQFVRPFVKSNKNDFVDAEAICEAASRPSMRFVQPRTESQQAMRALHRVRESLVQDKVKTTNQMHAFLLEFGISVPRGAAVISRLSTILEDNSLPLYLSQLLLKLQQHYHYLVEQIKDLESQLKRKLDEDEVGQRLLSIPCVGTLTASTISTEIGDGKQYASSRDFAAATGLVPRQYSTGGRTTLLGISKRGNKKIRTLLVQCARVASNGIA

SEQ ID NO: 230160 - protein, 335 aa, unidentified
MDNHTQYLGFAGVDLAKKVMQIHFVTADGEITDKSAKRAEFLDFFRNRGKCLIGMEACGSSQDWARKLEAMGHEVHLLPPKAVKPFVSGQKNDHNDAIGIYKAMFNGVRRVPVKSTEIRDLQTLRRIRSQVTKDKVKEINHVRGLLAEYGIVMGKSLNAFNKDISSALGILTERGDVSPLVAEELRTTVEAIKAKIERQKKLDQEIEQLARGCKNYENFLKTPGVGPFTAAMLCVLLCDPSIFANGRQFAAYIGLAPRSRGSGGKNYVTGIPSKFNCDSESRAVLVECAQAIARCKNKSLWVEEILRRKPKKVALIAIANKLARQVWAMANKGDG

SEQ ID NO: 230161 - protein, 330 aa, unidentified
MNLQGRAPGGHERPSCGVDVSKAHLDMRLADEDQRLTNDSAGWGQLVAKLKKVNVDLVVVEATDGYERGLVCALQEAGIAVARVNPRQARDFAKSIGVLAKTDRVDARVLRDFADVLARHQDRSKYVTPMVEPERQALLELVTRRRQLIEMRVAESNRLDRASKLTKRGILSVIKLLDKQIKVIDDEIDDNLDEHFKPQKELLDSVKGVGPATIMSLVAALPELGRLDRRSISKLVGVAPLANDSGQRRGKRSIWGGRASVRSVIYMAALVATQHNPVIRAFYARLLAAGKPKKVALVACMRKLLTILNAMLRDGKAWDAAKALNHAPAA

SEQ ID NO: 230162 - protein, 310 aa, unidentified
MEITVGIDVSKAQLDVHVHPAGESFAVGNDEAAVQALGERLGQLEGLVRIGIEATGRHERLAVAEFAAAGLPVVVVNPAQVRAYAQAIGQRAKTDPIDARLIALFVEAVRPDIRPMPDTQTLELAALMARRRQIVNMLAAEKARRQQADAGPARVSIARSVTFLTDELKSLDLEIDKTVRGTPVWRDKEDLLSSVPGIGKTIARTLLAELPELGTLTPKQAAALVGLAPYTRQSGRWRGKSFIGGGRTAPRGALYMGAMVAARFNPTLKAFRDKLVAAGKPKLVALIAVARKLVIILNAILRDAKPWRTA

SEQ ID NO: 230163 - protein, 318 aa, unidentified
MAKQVVRCTYGVDVAKAWLDIYSGEQGTVERIDNTAGAIDAWLRSLGGEARIAVEATNRFHEAVAGQALASGHQVYVVDALKLCRYRDAVGRRAKTDRHDAVLLARYVEQEHTELRLWQAPDPQQVRLWKLLKRRATLVQTTVRLRQSLSDLGGLDAAAMELIRHCRQLVQQVERALQQQARQLGWGDDLRRTQAVPGVGPLTALALVITFRRYRFRSADAFVAFMGLDVRVRDSGTFRGRRKLTKKGDPELRRLLYNAAMAACRQPYWKTYYRSLRGRGFSGTAALVALSRKLARVCYALLSKQTGFNPEHRACTAT

SEQ ID NO: 230164 - protein, 347 aa, unidentified
MRFYTTQHPFYCGIDLHARTMYVCILSQSGEVLVHRNMKTDPDTFLHVVAPYRQGLVVAVECLFTWYWLADLCADEGIPFVLGHALYMKAIHGGKAKNDKIDSQKIAALLRGGMLPQAYVYPARMRATRDLLRRRMHLAHKRAELLAHVQNTNSQYNLPAIGKKIAYKANREGVAERFADPAVQKSIEVDLALITYYDELLRDVELTIVKTARHHDAHTLHLLQTVPGIGKILSLVLLYEIHDVHRFPRVQDFVSYCRLVKCARESAGKRYGTSGTKIGNAHLKWAFSEAAVLFLRDHPAAQKYLARLEKKHEKGKALTILAQKLARAVYHMLTRQVAFDREMFFQR

SEQ ID NO: 230165 - protein, 328 aa, unidentified
MSKQVLYVGIDVGCEELWVSVPGRKPRRFEHSKQGIRSLYNWAARKASDDQMHFCMEATGVYSISVASQMVNEYQSRISIVNPAQIAAYGRVQMKRSKTDQIDAEVIRSYAESQKPSVWKPAPKPLRQLSALVTQTDAIKDCLGQWRNRRHAQKFVPDLPDEVKKTQRSIERSLTTQLKKIETAIANLCAQESALAQQVALLCTIPGVADQSAVKLLAYGQNWLTERSAKALTAHAGLAPHHHQSGTSVRGKSRIDKRGNPKLRKTLFMPALVAVHYNPVLMRFYQRLLKNGKPKKLALVAAMRKLLLISRAMLIAKKPFNPLNTALT

SEQ ID NO: 230166 - protein, 426 aa, unidentified
MNKVEGIRLEIFRQFKKEIRGSREYLIVGIDVAKEKHHAFFGTATGKTLLKRLIFENSIKGFSRMLSHVEAIQESQGLRKVVFGLEPTANYHKPLGEYLIKCGLMTVLVSGVAVKRNRELLNGRWDKNDDKDAANIADLISQGKCLFYEYPEMWLRDLRSLLALKRKLKKQEHSYRVRIRNQLLAQYFPELDRYSGRPEVEPIVRWCLDPSRIAGLENDQFMNLVAPGRKSLAQHRRLQVIQELAVDSIGCTMGEGAGLEAQVMVDGLRHIRKAVKVTEAKIEEICGSFPEYACLLTIPGFGPDVSSKVLGALGNPHRFSNQKQVLKTAGLDLSANRSGKTSQTAIPIISKQGKADLRYALYQAAFVASTQNIDFMQYYTQQLQGREKERGIKTKRWVKLSAKLLIIAWTLMKKKESFDPRYFNQG

SEQ ID NO: 230167 - protein, 339 aa, unidentified
MKITTVGIDLAKHVFQVHAVDAAGNAVVKKQLKSDMELPFFKGLGPGGVAMEACGSAHFWARQLTKLGHDVRLIPPQYVKPYVKRNKNDAADAEAICEAVSRPTMHFVPVKTEDQQAILSVHRVRQGYVKARTAQANQIRGLLAEYGITINLGISAVRNRVPDILEDAENGLPTLFRRLLKRQFDNLEHLVQQVLDLDAEILAWHKASEASLRLEKIPGIGPITASAIVASVGNAANFKNGRQMAAHLGLVPRQHSTGGKSTLLGISKRGDSYLRTLLIHGARAVIRFSKSNAWLDGLANRRHKNIAAVALANKNVRTIWALLAHNSSYDPNHISIRPV

SEQ ID NO: 230168 - protein, 412 aa, unidentified
MNPIIDRCAGLDVHQATVMATVRIPGDAGHRDVITEEFSTTTVALLTLRDWLRAYGVTHVAMESTGVYWKPVYYILEDEFSLLLVNAQHVKRVPGRKTDVNDSEWLAQLLECGLLQGSFVPPRPIRDLRDLTRYRKHQIRDRAREVNRLHRVLEDAGLKLSSVATNVMGSSGRAMLDALLQGTTDAAVLADLAKGKLRRKLPALREALQGRFRPHHAALLGQILAKIDFLDEAIELLTVDIDRLVIPFEPMLTNLDTIPGVDRKSAITMVAETGGDMTRFPTAAHLCSWSAVCPGQNESAGKRRSGKTRNGNGYLRTALVESGLAATRAKGTALQARYLRVKRNRGHKKAVLATGHQILEIAYYVMRDGTAYQELGADYFDRRHRERAIRRHIRQLEQHGYHVMLVETVTSS

SEQ ID NO: 230169 - protein, 344 aa, unidentified
MTIVEERTAVTGGVDTHSEVHVAAALDSVGSLLGTREFPATAAGYSGLLGWLGTFGDVALVGVEGTGSYGAGLARYLAARGVRVVEVDRADRQDRHRNGKSDPLDAVSAARAALSGRASGAPKGRDGAVEAVRALMVARRSARHERTQAINQARALILTGPDELRSRLAGKRAAAFAEAIAALRPRPGDAAGYSLRVALRELGRRVQFLDEQVARLDELIVPLVTARAPGLLSLYGVGPDTAALLLIAAGDHPERLRSEAAWAHMCAVAPIPASSGKTRRHRLNRGGNREANHALWRIVITRMSAHAATRAYVERRTAEGLSKKEIIRCLKRYVAREVYPYLRG

SEQ ID NO: 230170 - protein, 388 aa, unidentified
MTPTSGSLSHPITLDYENTLVLAIELSKTSWVLAAQVPGLPRVKAKQTIAPRTEALLAAIDGYRDRSRAAGRTIERVVAIYEAGWSGFWLARWLARHGVETHVVQPSSVPVDRRARRAKSDGIDAELLLRTLLAWFRGEPRVCSMVPIPDEADEDERRRVREREDLVAERVSLVNRVGAVLATLGVRDYNPLRRDRRARLEALRTALGDQLPPHARARILRMLDRLELVCAQIAELERQRDAVLEEEAPDKAEEMIQQLAGLRGIGVQSATVLVREAFMREFANGKTLGSYAGLTPTPFSSGATQREQGIGKAGNRRLRTVMIELAWLWQRYQPGSAQVSWFRERTAGTGRRMRKVMVVAMARRLLIALWRFATQGVVPEGAVISPAC

SEQ ID NO: 230171 - protein, 321 aa, unidentified
MNSSNIIAGIDVSKTKLDIHIHPLGHYKTFENNVQAIDQVLDFLRLHNVTKVGLEATGGYEKLCAYTLLSNGFEVYVIQPRWVRDYAKSLGISTKTDKIDCSIISRYINNTDMRVAPLNVNNTDCLKQKLSRRNQLVEMAKIQKTQAHQITDASIIKQIEELLIILQNQIQILEDEMMALVDQSQELKKKYISITSIPGAGKTLAITMICYMPELGTLKHKEISSLSGVAPFNRDSGFSKGKRCIQGGRSQIRTVLYMCILSAQRYNSYIKIFFDRLYDQYKKPYKVASTAAMRKLLILANSLVRDGRVFTEEYSPNSTFI

SEQ ID NO: 230172 - protein, 397 aa, unidentified
MHKLFVGIDIAKLNHQATVIDETGKVLGGSIRFPNTTKGGTTLLEHVTKFRDGDTPIVFGMEATGHYWLALYSFLVGKGHTAIVINPYQSESWRKVYMSAVKTDKEDAFLIADLLRFGSIKKSQVPSEVTIALRNLTRFRVSMSLQLSDTKRRILTVLDQVFPEFPALFSDAFGKTAISILEEYQTPEALETLSSRKLTNLVSKLSRGRFGKAMAQSLHAAASDSFGITFALDSFSLQLKLLLHQLGLLVGQLNLLDEEIAKLFGTESKLLTIPGVGPTTAAAITAEIGDIQRFKTSAQLVSFAGINPTVRQSGNFIGNKNKMSKKGSPYLRLALWQASVVASRKNPILKAFYEQKVKEGKHKMTAIGAVSRKLTGIIFAIMRDNKSFMIWDTVSNC

SEQ ID NO: 230173 - protein, 358 aa, unidentified
MNYVGIDMHKQSFQAAVVDETGSRLDEFKLRNNREGIEPLIQRVGRYGSFQAVVESSANYWTKLFDIMEENHVPIKLSNPYKTKAIAEAKVKMDKLDARTLAQLLRAGLVAESYVPNRIDREKRALIRERASLMKTRTELRNRIHDLLAKYECEYGFSDLFGEQGVKWLKQLKLSQHDKTILEVNMRVLETLNEQIEKISIEIAKLATDPTDKNKQDQVKLLLGLKGIDYYGAMILLSEIGDIKRFPTPEKLVSWAGLAPRTHQSGENSYNGHITKKGSSRVRWILGQAAQTARQHDPKFKTFYERIATKKGHNKALVATMRKMLVVIWTILTKNEPYRGEDRELTERKIKRLIRISS

SEQ ID NO: 230174 - protein, 308 aa, unidentified
MYDSTTTVAVGLDVHARSIRLAAVRADELLEERTLPYDEEAVERLLRRWPLVRCCSEAGPTGFGLYRHLVDRGIDCAVVAPGLVPQRPGDRVKTDPRDARKLARLLAGGLLEPIHVPSPELEAARDLVRAREDARLDRMRDRHRLSKFCLRHGRLLPTSSWTVVRRRWLGEQHFEHAAEQITFETYLHALDLVDARIEALEQAIRKTAEQAPWRELVLRMRCLRGIDTLTALALVAEIGDFSRFRSAEEFRAFVGLVPSESSSGAHRRQGSITKVGNSPACSSRPPGTRAGGRRSATNSPAASVAKTP

SEQ ID NO: 230175 - protein, 343 aa, unidentified
MGEVSTIGLDIAKSVFQIHGVDVDGAVVMRKRISRAKLLEFFATLPACLVGVEACPTAHYWSRRLGALGHTVRLMPPSYVKAYLKRSKNDANDAAAICEAVTRPSMRFVATKSEQQQSGLMLHRSRQLLVCQRTMLSNAIRGHMAELGIISAKGRNGTAELLEIIADEHDDRIPSAARFSLDVLARQYAVVRAQIVAIEKRIHAWHRSSEESRRLEEIPGVGPIVATALVAEVGDWKEFTSGRSLAAWIGLVPRQHSTGGKERLGRISKQGNRHLRWLLVAGAMAVIRYARQHGTKRPWLARLMDRRPLKVAAVALANKIARMAWAMMVRGERFKEPKLLPAA

SEQ ID NO: 230176 - protein, 317 aa, unidentified
MSKHTTVSAGIDTGKCKLDIALDRCPERLQVDNTDDGHAVLWGWLRQHRVERVGIEASGGYEQAVVSALRRKGFLVIVFQPVQVRAYAKYRLQLAKNDKIDAALIAACTAEAKKIHPPPDPRLAPFAELLTVIEQLTEDIARLKTRRATSRDEQIRRFWNEEIARLKRLQSQKLKQLVAAIREHRDLADRLELIVSVDGVGLRTAVAILVRMPEIGRITREQAAALVGVAPYDADSGSHIGLRHIEGGRERLRKSLYTAALPAAFNWNPELMAIYKRLTAAGKPHKLALVACARKMIIFVNTVVARGTPWVPRDALI

SEQ ID NO: 230177 - protein, 338 aa, unidentified
MIVIGVDVHKHSLTAVAIDEAGRMLDETTVTAADDELLVWAREIGDERLWALEDCRQLTRTLERQLLVAAEELVRVPPKLVAPERRAGRARGKSDPIDALAVARAALREPGLSRPRPDEQPFRDLKLLVDHREDLVDERRRAQQRLRWHLHQLDPSFVVPARRLDRPTHLERVARWLARREQEVQVRVARELVARCRSLTRTIVELERELEQRTVETAPALLELPGCAALTAAKLLAEVGPIDRFQTDAQLARHSGVAPLEASSGRVQRHRLDRGGNRQLNAAFYRIAITQARVHPAARAYLERKQAEGKSRREAIRCLKRQLARVVFNTLKASPALT

SEQ ID NO: 230178 - protein, 350 aa, unidentified
MVVVGADVHKHTHTFVAVDEAGRKLGEKTVSAVTAGHAEVVMWARERFGVGVVWAIEDCRHLSARLERDLLGLGQKVVRVPPKLMAQTRASARTRGKSDPIDALAVARGFLREPDLPVASHDEVSRELKLLVDRREVLVAQRTATINRLLWRVHELDPRRAPKPRSLDLVKHRQILGEWLETQSGIVAELARDELADIARLTETINALAKRIGDRVREVAPVLLAMPGCGELTAAKLVGETAGVTRFKSEAAFARHAGVAPVPVWSGNTKGRVRMTRSGNRQLNAALHRIAVTQIRLDGLGQTYYRHRLAGGDSTSEALRCLKRRLARVVFNHLNADHNNRQQPCQTAAA

SEQ ID NO: 230179 - protein, 424 aa, unidentified
MKHHGWPSREGILTESYRFFVGIDWAWERHTICVLGSDGEVIDRRTIEHSGAGLTQLADVLEKLSSGDPFSVAIAIEMPRGAIVESLVERGFAVYSLNPKQMDRFRDRHTVPGAKDDSRDAFVMADALRTDLHLFHRVRLDHPDILRIRELSRSEEDVQQDQMRAGNQLRDLLNRYYPQMLQLCPAVDQAWFWDLLEMASLPARGAKLSKSRIEKLLRSYRIRRLDADEIQQTLSVPALQLAPGACEAASEHVLLILPVLRLLDRQREEIARRMQLLLEKMSEDEQVAEHRDVKILLSLPGVGRVISATMLAEASQPLAERDYHAIRSYAGAAPITRRSGKRKMVVMRRGCNPRLRNALYHWSRVSSQNDPRSKEHYAALRAKGHSHGRALRGVADRLLAVLIAMLRSGTLYDPNHQTAAMPLK

SEQ ID NO: 230180 - protein, 320 aa, unidentified
MQTSKVYTGIDVSKAALDVAVYGKVERHSFTNDEQGISQLVSWLKGLNPEMVVMEATGGLETPLVAALGVAGVPVAVVNPRQVRDFAKSIGRLAKTDALDAEVIAHFGAVADLKPRPLPDAMTRELAAVLARRRQVLEMLTAERNRLGTALSHVTERIRVHILWLEEELDKLNNDLSHIIRESPAWREKDDLLRSVPGVGPVLSTTLLADLPELGTLNRRQIAALVGVAPFNRDSGMLRGRRTVWGGRADVRGALYMGTLVATRYNPVIRRFYQHLCASGKMKKVALVACMRKFITILNAILRHHTPWSEPVFQLIGPCS

SEQ ID NO: 230181 - protein, 384 aa, unidentified
MQASNICTPIGGDIGTIFVAIELSRRSWLVTVHSPDRDRFSRHNVLGGDHAGLLALIERVRERAARRLGSAPAVVSCYEAGYDGFWLHRLLTAAGIINHVFDPASIAVEQRARRAKTDRIDGELLLRTLMAHCRGEPRVVRVVRVPSAGQEDMRRDSRERQRLVQEQTAHINRIKALLRLLGMAVGNPRRRDWLSWLEAQRDWQGEPVPPRQMTELEREHARLMLVREQIAALERASAASPASEAAAQRGENKCLLQRLRGLGAAFSGTLANEVFYKDFSNQRQVGGYVGLAPSPWCSGGTDREQGISKAGNPRARQAAIECAWLWLRHQPDSALSRWFRERTANASKRIRRIAIVALARKLMVALWRYLTTGLIPEGAVLSNA

SEQ ID NO: 230182 - protein, 314 aa, unidentified
MHIIGFDVSKDELVGVCINKRGEVREKYVVKNDIESINQFLDSVPDKVTVGCESTSEYHNVLALSCIDHDIPCYVLNPIITKQFTKATVRKRKTDLSDAHVIAKCVLQGQGERVFRECFNPAKRILRTSAQLSQLSVTVGHMRLGFENHWSKELEIQQELDVLKTRIDNAVKNVRTLGIERSNKSLVELVSSIPGIGENLAAIVVSEIGNVERFRNIKALTAFAGLDPRVRQSGVTLARNTRITKRGSPYLRRALFIAASIAQRHDEFFKAYYAKKRLEGKRYTEATIANARHILQRIYAVWKRGTPYVIHSSV

SEQ ID NO: 230183 - protein, 406 aa, unidentified
MGQQVFVGLDWAEGHHDVFIEDDSGDRLGGGRLPGGVEGVARFHEWVAGYVDDPADVLIATETDRGLFLGALVAAGYRVLAVNPMSTSRYRERHSTSGAKSDPGDAKVLADLARTDAHNHRPVAGDSELAEAVKVLARAHQSMIWTRQRQTNQLRSTLREFYPTALDSFDDLAGRDALAVLAVAPTPTAGRQLSRSKLAAALRRAGRQRRVDERAVEIQTALRAEQLAAAPLIADAMGATVTALVAVIAELQTQISRLETELADRFEQHPDAKIIRSLPGLGMTLGARVLGEFGDDPNRYATAKCRKNYSGMSPITRASGKHHVVLARYARNRRLADACYQWAFATLTASPGARAYYDQRRTAGDTHSRALRALGNRLVGLLHGCLRHGACYNEQTAWGHRQQFAA

SEQ ID NO: 230184 - protein, 353 aa, unidentified
MKTYYVGMDVHRASMVIVVLNGAGKIVMQSVIETGAERVRGYLKQLRGKVYVTFEEGTQANWLHEVVRPLVTEVVVCDPRHNKLLQSGNKSDRVDAQKLAELLRNGALQEVYHGDNGVRTLKELVRTYDCLVSDTTRVMNRLKAIYRGRAIGCAGHDIYRQDRREQWLEKLRERGAKQRASFLYQQLAALKPLRHEAKRLMVQEARGQRAYPWLLSMPQFGSVSVAQLLAIVSTPHRFRSKRQFWTYIGLAVVTRTTADHEVVQGVLRRSKRPVSTRGLNRNHNHLLKRVFKNAAQGACHSGPFKAAYDLRVAQGMAPSLARLTVARQLAATTLAVWKRGEQFNPERMKQQAA

SEQ ID NO: 230185 - protein, 414 aa, unidentified
MKSWEEHLHFAGLDWASDHHDLSIINRQGQTEASLRFSHDSDGWSQARELLSRFGSNIPVAVETRHGIAIEQLQGCGCIVYPVHPLSAKQYRQRKAPSGVKDDQLDAWSLADALRVDGHAWKVLSPEDPLIIELRLLCRDEIALIEQRTALVNQLRAALREYYPAALEAFEDWTQESAWQFIIAFPTPGELLKAGRRRWEKFLHTHKIWRPQTAPVRLEIFARAGQFCGSTPVTAAKRLQALAVAKVLCTLEAQLRLYRERIEELFKSHPDSHLFGSLPGAGAKLAPRLLGEIGDQRERFTDANALQCYAGTAPVTLRSGQIQRQRFRHSADPILRASVHLWADLSRKKCAWAETYYKAHRANGQSHACALRCLGQRWLKILWKMWQSRSPYNEALHTQNQVEHGSWILQLKPS

SEQ ID NO: 230186 - protein, 346 aa, unidentified
MRIIGCDYHPSWQQVCWMETTTGETGEVKLDHASGEATRFYRQLPGPALIGMESTGNCQWFVEMATTAGHDVWIGDAARIRASEVRQQKHDRRDAALILKLLLEGRFPRIWTPSGEEKDLRQLLIHRYKLVRLRATTKNELQHLAMNQGVTRKRRLWSKAGEKVLRELPLRPWASRRREDLFKVRGMLNEQIESLDAAVVEAAEKNEKAKLLMTQPGVGPITSMAFVLTMGDVNRFPRGKQVASYLGLIPREYSSGGKQRLGSISKQGNRFMRMLLVEAAQIAVRYDPGFRNEYLHRCHTKAKGVAKVAAARKLAIRLYWMLRTNTAYPEVVRVESSSRVPLVSAS

SEQ ID NO: 230187 - protein, 343 aa, unidentified
MDHFAGLDVSVKETSICIVDDTGRIVREVKVASEPEALLQVLGNPIYRFKRIGLEAGPLSQWLFSALAEAGLPVICVETRHMRAVLQAQINKTDRNDARGMAQMMRAGLYRPVHVKTLRSQKLRMLLTHRKLLQSKAIAIDNDLRGTLRNFGLKVGVVGTVKFEARIKELVENLPDLAVLVEPLLMVRRVLREQFSILHRRLLAIVRDDEVCRRLMTVPGVGPVVALTYRTTVDVPARFRTSKAVGAVFGLTPSKYQSGEINRTGAISKCGDEMMRVMLYEAAQIMLVRLAKWSWLKAWAMKIARHRGMKKAIVALARRLAVIMHRIWVDGTEFRWTREAAVA

SEQ ID NO: 230188 - protein, 343 aa, unidentified
MTQYVGLDVSMKETKLHVLDEAGKRVWRGRCASEPAAIAAAIRRYAPAAVRVGLETGPLTTWLWTELTAEGLPMVCLDARHAKKALDMKVNKTDANDAEGLAHLVRAGWYREVRVKGRGAMLTKALLGARSHLLSITLSLENQIRGLLKTFGRIVPKGAGGLFEKNVRALITDDAEIAAVIMPLVQARQMTRSKCAALDSRLIAAVRGNATHRMLMTMPGIGPITAVAYVAALERPDTFKRSRAVGAWLGLTPRRFQSGEIDYDGHISRRGDGQLRALLYEAAAVLLTRVRMESGLRRWGLMLRKRLGFKRAATALARKMAVILHAMWKSDTPFNPTLGAAAS

SEQ ID NO: 230189 - protein, 345 aa, unidentified
MKSKIISVDLAKDVFEVAVANCQYRILERRRLSRKEFSTFLATQAPALVLVESCGTAHYWARQAEAAGHRADIVPAHYVKPYRRRGKTDRIDTEALLEAHRCEGIKPVPVRSVEQQQIQQLHRVREQWKRTRTQRINGLRGFLRELGFAIPEGAKIAQRRAREILDDEAIPAPLKVVFTRLLEEIATLENDITSVERQLKALTKANANVQRLQTVSGIGLLTSTAMVASAGSPEHFPDGRHFASWLGLTPREYSSGNKRRLGGISKQGDCYLRMLLTHGARAVLARAKQLQRAGRHLSRLQQWACQLEQRIGHNKATCAIANKLARICWAVWKYESDFDSNRAVA

SEQ ID NO: 230190 - protein, 345 aa, unidentified
MPIVGGLDIHRKQLTFDYLDTETGEVKRGQIAPADRAHLRAWLARFAGRDDVAFALEGCTGWRYVAEELAGAGVAAHVAEPADTAFARGRKRHAKTDKTDSRHLRELLAEGRLPECWVPPSHILECRALLETYHDLRAEHTGWVQRIHAVFFHQGAPALGEGALRTDRDLEALRAAAAAHLSPAGQLQVATALDMLAGLEARLDMLRHRLLAAARSLSGARVLAERLYGVGPVTGLAMTCWLGGAGRFSSSRKAVRFAGLDVTVWSSDRKGPPGRLSRQGPEVLRWAVYEAGKTHARASAPDHRYYAAVKDRKDGKRAAISEARKILRQACHILAELGDDALTAA

SEQ ID NO: 230191 - protein, 391 aa, unidentified
MGCPMPQRNDLSRSLVPFQQDGTLVAVIELSRSSWLVAGIVPGLERHPLKKLAPDADALLRLLHRWRDEAAKAGCAITRLAVAFEAGRDGFWLARWLRARGVEAHVIHPSSVAVPREHRRAKTDRLDTELLKRAFLGWLRGERGHCTTAAIPTAEEEDAKRPNREHESLVGERTRIVNRMKGALARLGVRGFKPTLRKACERLGTLRTAEGAPLPPNTLAELRRDMARLRLVREQIAEVEAARLERLEEEPGSRPHAMVRLLARVIGVGVETADMLVREVLSRDLRDRRAVARYAGLTGSPDESGRRRREKGLAKAGNARVRHGMVQLAWRFLLFQRESALARWYRERTADARGGTRKTMIVALARKLLIALWRLVTTGAMPEGVVLRPAA

SEQ ID NO: 230192 - protein, 355 aa, unidentified
MDSKKYIGMDVHQASISIAVMDATGKVVVESIIETKATTILEFIRGLKGTLWVAFEEGTSAAWLYDLLKPRVAKVIVCDPRKNALLNAGNKNDRVDARKLSHLLRAGLLTPVYHGESGVRTLRELSRSYLAVSKDLTRVMNRLKAIYRSWAIPCAGEKVYSPRQRNAWLEKLSQVGVRRRAEQLYQQLDALVQIRREARRELLTESQRHPATPLLRQIPRLGPIRVALLIALIQTPHRFRTKRQLWAYCGLALQTRASGEYRFSGGELQHGKRLPALRGLNVNHNHDLKNLFKSAATHVSTSTDPLGDFYRSLLAKGMKPTMARLTLARKMAAIVLSIWKKGARFDPAELKRQAA

SEQ ID NO: 230193 - protein, 339 aa, unidentified
MKVYAGIDLHSSNNYVGIINDQDQRVYQKRLPNQVDHILEALEPFKESMEGVVVESTYNWYWLVDGLQAHGYKLHLANPSAIKQYEGLKHTDDKWDSFWLAHMLRLHILPEGYIYPKEERPVRDLLRRRLLFVRHRTAHILSLQSSITRNRGYTMSARDIKKLDTPDADTLFDNPFLTVAAGNSISAIQFLKIRIAEIEKTVKSHIQVKPEFEYLLTIPGIGNILGLTIMLEVGDIARFPQVGNYSSYCRCVKAERLSNNKKKGEGNRKNGNKYLSWAYVEAAHFFRRYCPQANAFYQHKKAKKNGIVAIKALSNKLARASYYIIRDQVPYDPEKLFSQ

SEQ ID NO: 230194 - protein, 420 aa, unidentified
MKYVGIDIAKKFHIACVLDEDNSFITRNYRINSELTDFDLFYQLLESIDQDKSQFLIGMEATGLLFENLYLFLKRLGYNVVLLNPYQTTKFREMDTMKYVKNDNIDSQMIAALLKSGRYSKGFVSEDIYQAIKSLYRHKATLMQEMKNAKRQVSTSLAVVFPEFERIIRDPFSVSGMALLEKYPTAKHYKGASGERILKLFRNIKGNNFNLQKANDLLDLARLTIYQGNASDERAYVILSNLRRIRFLKEEIEQCESQMFTLLNESEQAVSASISKEEEIYIADLVDNLRSIDGVSDKTIFAVLSECGDITRFKSGQAFIGFLGLYPTLYQSGNTTKYGRLAKRGAKLAKMAIYQAAVACVRHNSELKKVYLDKKSSGRAPKECVVVVARKLAMIIYSIYKNNTAYNPARVFNTQASLSH

SEQ ID NO: 230195 - protein, 313 aa, unidentified
MGVFVGIDVAKGKVDVAIGAIDEPFEVPNDESGVMKLASQLKTLSPALVVMEATGGYERLMARGIAEAGLPVRVVNPRQVRDFARATGRLAKTDALDARVLAAFAEACHLEARPLPDEQTEALAFLVARRRQLVDMRTAEKNRIDKAPKELREQIKAHIAWLDKAIGRADDEMDALIRRSPIYREFDERIRVIPGVGPQTSRILIACLPELGKLDRKQIAALVGVAPMNRDSGTHRGARRTWGGRAAIRCVLYMAAVAAVRCNNSVLRPFYDRLRAAGKTKKVALTACIHKLLIIINAMARTGQPWTPVPSPA

SEQ ID NO: 230196 - protein, 337 aa, unidentified
MKSWSVTVLSETSVLKKFSQHPSPEALYGFLTRSYPGAEYHSVYEAGFCGFWIHERLTALGIDNIVVNPADVPTKSSEKLRKTDTVDSGKLARSLRANELKGIYTPDSVSLEMRSLIRLKNSITKDTTRQKNRLKSQLRYLGIEIPQEFLTPFSNWSKRFFAWLKEIETLTPSGRQALDIHIRHLEELRRQKLEMTRALRTLAKTDRFREPLRLIMSVPGFGQATGMAFLSEICDITRFRNAEQLAAYIGMIPMCHSSGEKDGTGDITIRKHAVMRCNLIEAAWVAVRQDPAMNLFYTEQCKRMPKSKAIVKVARKLVNRLFFVLKHQTEYVNSIVS

SEQ ID NO: 230197 - protein, 349 aa, unidentified
MRFYKNQHKYYCGIDLHSTTMYVCVVDQTGAILVHRNIPAEPQRLLNLLVPYREDVVVGVECMFCWYWLSDLCTNEGIPFVLGHALYMKAIHGGKAKNDKIDSEKIALLLRSGMFPESYAYPKELRAARDLTRRRSFFVRKRSELFAHIQMTYQQYNFTAPGRKIAYRANREVMEKPFQDESALKAIEADLALVESYSEIIRKLEAHITKLTRRNNPFAMNFALLQTIPCIGPILASTILYEVHDIKRFPSVQHFCSYARLVKPQKTSAGKVTGGGGGKIGNQHLKWAFSEAAVLFLRTEQGKKYFERLRKKFSKAKALSVLAHKLGRSVYFILLRQQQWSDEKMLLVA

SEQ ID NO: 230198 - protein, 414 aa, unidentified
MDVVVERCAGLDVHRDSVVATVRVPGKGKSRRRRAQQTRSFGTTIRQLEQLANWLQGFGVTLVGMEATGIYWKPVFWVLERRFECWLLNAQHLHNVPGRKSDLIDSAWCCQLLEHGLVRPSFVPPPEIRRLRDLTRLRSTQMEERSRAIQRLEKVLQDAGIKLSSVASKTYSVSARAMLEALLGGVSDPAILAELAKGKLRAKIPQLQEALANRFELAHHGILVAQPLAHIDALDETVANLEARIIEATDPHAELITLLSTIPGVGRYIAEVLIAECGVDMTVFPNAEHLVSWAGICPGTNQSGGKRRSGKTRHGDRWLRTALSEAARAAARTKNTHLASHYWQIRGRRGEKKAIGATRHDILIAYYHITRDQVPFRELGPDWLARRHSVEHRTRRLVKQLEALGHAVTLEAAA

SEQ ID NO: 230199 - protein, 416 aa, unidentified
MNAVGIDVSSRKSTVAVLRPLGEVVCLPFDVTHDIAGLASLAEKLKAIDGETRVVMEHTGRYYEAVAKALHEAGFFVCAVNPLLIKEYGANSLRRVKTDKADAIKIARYALDNWADLRDFTPMDAIRYDLKTLNRQFQLASKQRTASANNLIALLEQSFPGIRKCFDSPVRSDGTQKWVDFAHSFWHVDCVRKQPFPAFCERYRKWCKLHAYFFNLRNAEKVYALAKSAVVLTPKSKVVKVLVQEAANQLISISRSVEVYRAEMDRLAAMLPEYPVVMAMYGVGKSYGPQLMAEIGDVRRFERKQALVAFAGIDPMPNQSGDKNVRSNKSSKRGSPYLRKTLFNVIRTYLQCAPQDEPVFQFLNRKRAEGKPFYVYMLAAANKFLRRYYAKLRDYFASLDTLQPVAPIPTILKAAL

SEQ ID NO: 230200 - protein, 412 aa, unidentified
MECWRDGDATKGSEDELIWKWLGAAQRATNTPNHMHSTKQNKPSNASKVNLIKLSADVHKRDYKISRQIGDQNIQPAQVFKPEEAFEWAVKQLDHAGRVVFCYEAGFSGFSLARRLEKQGVEVVVMCPQKLDERCRKVNTDKRDSRAIAGRLDRFLAGNDEALVQVRIPTEKEEDQRALSRQRDQMMKARKQFEAQGRSLLYFKGLNCPAYWWRCNDAGWKVTVREQSWPAEVVERLEVYRRMALAAENEVAALTEQIEKAAKENLPNTMQELPHGFGELSLEILRREVCDWSRFKNRRNVGSFFGLCCAESSSGTQQSQGSITKTGTSRGRHALLELAWRALQFQPDYWVVKKFKSKIEQAKPRSVLRKKLIVAMARLIAVDLWRLYTGQTTMVKLGLKAQSAKTYVLKPA

SEQ ID NO: 230201 - protein, 345 aa, unidentified
MALYVGLDVSLRMTSICVVEANGSSVWEGKAESEPVPLVKVLSPWRDKIALVGIEACPLSEWLYGALVESGFQIVCIETRHAQRFLSSRPNKTDRSDARGIAEMMRLGHYRSVHVKSKASQLLRTTLIARKKFVDHMLAIEDTIRGLMKVHGLKLGAVHRSRFAARVETLLADAPDLRMAIEPLLEARNMMRKHKALMDRQLSQMARKDDVCKRLMTVSGVGPLVSLTFKATIDDPNRFKDSKAVAAHLGLTARVYQSGEIDRSGNISKCGDKLMWHALYEAANSHMRISKKWSILRAWGVKLAKRIGSRKACVAVARKLAIIMHRMWVEETDFRFGKPPVIQPT

SEQ ID NO: 230202 - protein, 339 aa, unidentified
MAILYVGIDLAKNVFAIHGVDEHGKPALVRPSVPRARLHQLVAALPPCTIGMEACSGAHHWARLFAKQGHTVRLMAPKFVAPYRMSGKRGKNDAADARAICEAVQRPNMRFVPVKSHDEQARLCVHRVRQGLVEQRTATINRIRGLLSEFGIVLAQKAATVRREAAAHLEDLPGWANTAVGDSLSELHRLDERITEYDRHVVHMAREDERSQALMQLSGIGSTTASALVSTIGNARDFKNGRQLAAWLGLVPGQYSSGGKTRLGGITKAGDGYLRTLLVLGAKAVLAAARNKHDRLSRWAMALEVRRGYWKAVIAIAAKNARMAWAVLAKGDEFKPLVA

SEQ ID NO: 230203 - protein, 413 aa, unidentified
MNKKLSMNTAMKYVKAAGIEVHADFILIAYRAYGEIKLAEFPNTTDGIEQATRFMLKRNIKLACMESTGCYHCGIYFALKAARIRVMLLNPAKSRSISPHKTDERDAIWLLRLAETRLIEGSYMPDDKIFELRILTRRRMKIADTIANLKKSLMSVLEAMGVKIRELSKSARSSSIRRFLDDILRGELGKYRKQDVAEKLFNIFQKSSPELIRLVKSYIVAIKSLEKVLESIDKTIRDAVEDYIEEIKILMSVPGVSFKLAASILAEIGDVNRFDSPEKLVSYAGLVPSVYQSGGKTRLRGTVRSCNIYLRRVMFLVAFGAMRSKSRIVQDFVSRLKARGKHFKVIVIALARKLLRIIWYLLRRREKWCERLREKRIPPRARRSRVTIEEAIRILYEAGYIVIKRGESMQATV

SEQ ID NO: 230204 - protein, 345 aa, unidentified
MEPMYYIGLDVHKQKISYCVKEGGGKVFAEGWIPATRSDLDRWMNTLPQPWSAALEATMFSGWIYDHLKPHAAALKVAHPLMLRAIAAAKKKNDRIDANKICDCLRCDFLPECYMAPTAIRERRRTLRYRSLLVRQMVAMKIKISTLLMEAGVSYNKSKLHKAGYFRELLASNPDINESLRSLLGQCREMVVRLSKMETALIHSLQQDRLLAERVERLMSIPGIGPITALTWALEIGEVQRISSIKKAISYCGLCGDEQRSANSVQRTPISKQRNKHLQTTLIEAAKMAPRYSPTLALLYDREKQKGNANRATLAVARKLVAYLMAVDRGQTHFLVIDQETCTAA

SEQ ID NO: 230205 - protein, 365 aa, unidentified
MSESITYIGLDVHKRSIAVAVREAGSPVREEQLPNERAAVARWARGWKRRSGGDLLVAYEAGACGYALQRQLERLGIACQVVAPSLVPRKPGERIKTDRRDARKLAEYLQGGHLTPVHPPTPAQEAARDVCRAREDAQQDRMRCRHRLSKFLLRCGQSYTPGRKHWTGSHQAWLAKLSLGEPAAQIVFDDYRLAVAQRDARIDALDRQIEGLAQEAPYRAAVGALRCFRGIDTRTAFGLVTELHSIEHFDRPSRLMAFVGLVPSEASSGERQRRGAITKAGNGHARKLLIEAAWHARHKPAIPAALRKRREGQPPEVIAMADVAQLRLHRRYWRLVQRGKPTTVAATAVARELAGFVWAALRAGA

SEQ ID NO: 230206 - protein, 313 aa, unidentified
MNTEIVHYGTDVAKATLEINGASGGPSLANTARGHTQLLAWLAQQPGVPHVICEATGGYERAMVAALQAAGVRVSVVNPHRIRAFARARGVAAKTDRLDAAVLRDYGICLAPAPTTPLSAVQLELAALATEYQYVVASITREQGHAELLVHPQAQRHSEARVRQLERQRDQLEAALAQALEADPQLSQHATRLEQVEGIGRKTAVSLLAFLPELGRLRPGQAAALAGVAPFNRDSGKWCGKRMIGGGRPAVRRALYMAALSAAKHNPVLAPFYQRLRTRGKPAKVALTAVMRKLIEHANRVLAQSQNLSPCIA

SEQ ID NO: 230207 - protein, 427 aa, unidentified
MNYKQKQRIEQLTESTLIIGADIAKSKHVARAQDFRGIELGKRLVFDNTRAGLTKLMHWIRTLMVEHGKDHALVGIEPTGHYWLPMAEFLRKEGVPVVVVNPLHVKRSKELDDNSPTKNDIKDARVIAQLVKDGRYSEPNLPTGVYAELRVGMVQRDRLNQDLNRVKGRIHNWLDRYFPEYTSVFKDWEGKASLMILNTCPLPREVIKTGTEAIVTLWKTEIKRAVGIKRANKLMQVARESIGLSTGIEFARHEIRMLLEQYDILCKQMEILMEAVQELLQQIPGSTEMMTIPGVGLVTVAGFLAEVGDLKGYEHGQQIIKLAGLNLKENSSGKHKGQSRISKRGRPRLRALLFKTVLVMVAKNREFKAIHQYLITRHGNPLKKKQSIVALCGKLIRILFTIGSKQTPYDAEQVLGVVRQEQLQEAA

SEQ ID NO: 230208 - protein, 403 aa, unidentified
MLFVGDDWAEDHHDVYLMDDAGARVAARRLPEGVASIAELHELIAAHAEEPGDVVVGIETDRGLWVNALSAAGYQVFAINPMAVARYRDRHRVSGAKSDAADAKLLADLVRTDRHNHRPLDGDSPEAEAVKVLARAHQSLIWARARHIRMLRSALREYYPAALQAFDDLGGRDALAVLGRAPTPAQGARLSVSKIGTALKAAGRQRSIESRAQQIQAILRAEQLSAPEAVAAAFGATTRATVNIVIELNEQISALETTLANHFEKHPDADIYRSLPGLGVILGARVLGEFGDDPNRYTNAKSRKNYAGTSPLTIASGKKKAVLARHVRNPHLYDAVDRWAFATLLSSPGARVYYDQHRAAGDTHHQALRALGNRLVGILHGCLRHRTHYNEHTAWAHRIPTAA

SEQ ID NO: 230209 - protein, 346 aa, unidentified
MILIGCDYHPSWQQICWVDTATGETEERKLEHASGEAERFYRQLPAPTVVGMESTGNCQWFVEMATAAGHDVWVGDAAKIRACEVRQQKHDRRDAALILKLLLEGRFPRIWTPSGEEKDLRQLLIHRYKLVRIRAQVKNELQHLAMNQGMTKKRKLWSKAGEKVLRELPLKPWGSRRREDLFKVREMLNGQIALLDQAVVEVAEKNEKARLLMTQPGIGPVTSMAFVLTMGDVSRFQRGKQVASYLGLIPREYSSGGHQRLGSISKQGNRFMRMLLVEAAQNAVRYDPGFRNEYLHRCHTKAKGVAKVAAARKLAIRLYWMLRTNTAYPGVVRVESSSRVPLVGAS

SEQ ID NO: 230210 - protein, 343 aa, unidentified
MESISTIGLDIAKSVFQVHGVDAAAQVVVRRQLRRRQVVAFFQQLPPCLVGIEACASSHFWSRELQAMGHTVRLMPPAYVKPYVKRQKNDSTDAEAICEAVTRPNMRFVPTTTVEQQSCLMLHRARHLFIRQQTAVINSIRAYLAEFGIVAPVGRRGVEQLLEVVADTADHRLPEVARACLAALGSRLQALKAQILEFDRRIIAWHRSSSTSKRLDAIPGVGPALATALVASIADPKAFRSGRDFSAWVGLVPKQNSSGGKDKLGSISKQGDRYLRSLFTAGALAVIRYAKIHGTGHRPWLTGLLARRPTKVAAIALANKIARMAWAMMARGERYREPVALAA

SEQ ID NO: 230211 - protein, 343 aa, unidentified
MDHFAGLDVSVKETSVCIVDDTGKIVREVKVASEPEALLAVLTNPACHFKRIGLEAGPLSQWLFSALAEAGLAVICVETRHMRAVLKAQINKTDRNDARGISQMMRVGLYRPVHVKTLRSQKLRMLLTHRKLMQSKAIAIENDLRATLRNFGLKVGVVGTVKFEERIKELVEDLPDLVVLVEPLLIVRRVLREQLGILHRRLLAIVRDDDVCRRLMTVPGVGPVVALTYRATVDVPSRFRNSKAVGAVFGLTPSKYQSGEINRTGSISRCGDEMMRAMLYEAAHTMLVRSTKWSWLKAWAMQIARRRGVKKAIVALARRLAVIMHRIWVDGTEFRWTREVAAA

SEQ ID NO: 230212 - protein, 385 aa, unidentified
MLQKDKHDCFITNSEGEVLFNAFTIPNNADGFHDLFQKISSLTNDFSNVKVGLEATGHYNYNLLGFLIDKGLPTFVINPLHTNLFRKSLSLRQTKTDKVDAHTIALMMMSGVNLQSYSNTSYHNEELKSLTRYRFDKVQERAKLKTSISRLVNILFPELEKLVPSLHMVSIYALLAEFPSSAQIASCHLTRLTNLLANASKGHYNKEKAIEIRNAAKHSIGSNMPAKSLELKHTIRLIQELTSEIDEIECSIKSIMDEIRSPILSIPGINYRMGAMIIAEIGDFNRFSSPDKILAYAGLSPSTYQSGQLDGCYSHMEKRGSRYLRYALFNATKFVCIWDNQFSAYLAKKRSEGKHYNVAISHAAKKLVRVIYQLEKSGQLYHRAA

SEQ ID NO: 230213 - protein, 315 aa, unidentified
MIVGIDVSKNWFDAAWQEDGQGRHQRFEYTDEGMGQMLAQTPGASHYVMEATGTYHARLALRLRESGRQVSVVNPLIIKRFAQMQLSRVKSDRADADLIRRYGEQQPLHPWAPATDEVLELQQAHGWLDDLICERTRLVNRQEAHAHHAKPSAFVIAQMTAQSQQLNKQIKDCERHLEVLVKKSFPELFERLLTIPSIGAKTAIELIIVTDGFTRFEDIKALCAYVGVSPTTFRSGSSVNGKGGIAKLGQGRMRQLLYLCSWTAKTCNPACKALCARLKALGKPPKVINVAIAHKLLRQAFAVATTNTPFSAEYA

SEQ ID NO: 230214 - protein, 311 aa, unidentified
MEEITIDKGCGLDVHKETVVACVMGRGIKKEIRTFSTKTNDLLRLKTWLSGLGITHIAMESTGPYWKPVFNILEDSFTLILANARHIKNVPGRKTDVKDSEWICRLLRSGLLSSSFVPPQGIRELRDLTRYRRKLIQALSAEKNRIQKVLEDANVKISSVLSDTFGVSGSQMLEAIMDGKLHEEEIADLAKGRLKSKKAEIREALVGYFHDHHRFMIKASLEHIKYLEKLISDLDLATKKKLEQYQKEYDLLQTIPAVKEQGAAVIIAEIGVDMDIFPSDGHLSNWAGMSPGNNESAGKKKVERQPTAIRI

SEQ ID NO: 230215 - protein, 404 aa, unidentified
MVKYHIGIDVSKRRHRACIRNLAQDSYSGIFSIEVNRQGFEKLINTLEKLSTNKEDFLIGIEATGSYGDTLSYYLLSRGYKVVEINPYQANQFRKAQGKIAKTDSIDARSLAAQLALGNHKALAIPDPVLDNLRELTRFRADMVKDRSALVNQLHETLSTLFPEFATVFSQLDSTSSIALLIAYPGPEYISRAGEAKIAESLRVASRGRMGETLAKSLVEAAQSSIGVLQRQPALATKVSILGGRLVSLSAAIERVEKEIADLFYKLPYKPEDFPVGDIPSLATLVSEIEDIHRFSTLKQFLSHFGWCPQSFQTGSYNREHPRMSHAGNKYVRRIIWMLSIVAITNVPRYRDYFQQRVNEGKPKMHVIVAVARKLLSVLYAILKKGVPYDPDWEVNRHFAMARH

SEQ ID NO: 230216 - protein, 410 aa, unidentified
MNAVGIDVSKGKSMVAALRPLGEVALTPREIPHNAEELRNLANLIISLGENTRVIMEATGRYHEPIAAALHESGIYVCVLNPILIKQSGAGSVRKVKNDRKDALKIAKYGLDNWVNLREHTPMDTLRQQLKLFSRQYNLYMKTSVSLQNNLISLLDKSFPGANDYFDSPARADGHQKWVDFAADFWHCDCVAGLSQKAFTERYQKWCKRKGYNFSVKKAEEVYALSAGHFPTLPKNDNTKLLITSAAAELTAASAVLMTIKAEVIRLARLLPEYDIVFAMYGVGEITAAQLMAELGDVRRFENRGSIVAFAGVDPEVHQSGAQARISNPASKRGSPHLRKTLFQVVSTHLKRSPTNEPVYQFLDKKRSEGKPYYVYMTAAANKFLRIYYARVKEYLNALDKNREAIAPNG

SEQ ID NO: 230217 - protein, 343 aa, unidentified
MEHYVGLDVSLKETVVCIVDQSGAIVREAALPSDPETIAEFISANSTNVGRVGLESGATSTWMWTELDRLGLPAICIDARHAKAALSMQINKSDRNDAAGIARIMQTGWYREVRVKGLDSHAIKAVLVSRALLVKMKRDLENQIRGLLKNLGLVIGRAKMNTYAERAVELIEDKPELAAVVEPLLKVREAVERQIADLDRKVMRLARSDAQVRRFMTTPGIGPITALCYLATIDDPTRFNKSRNVGAYLGLTTRRYASGEIDWTGRISKCGDAMLRSYLYEAANVLLTRVAKWSALKAWGMRLAKRSGMAKAKVAVARKLAVILHRMWIDGSEFNWSSKRAIA

SEQ ID NO: 230218 - protein, 382 aa, unidentified
MRASTIGTPTAGHCGTIFVAIELSQKSWLVTLHSPDRDRISRHKLEGGDHCGLLALLESVRARAAGRLGSAPKVVSCYEAGYDGFWLHRLLEAAGISNLVFDPASIAVEQRSRRAKTDRIDGELLLRTLMAHLRGEPRVVRIVRVPSVEQEDARRASRERDRLVKEQTAHTNRIKALLRLVGMAVGYPRRRDWLNWLERQRDRQGQAMPPHLQAEVRREHARLMLVRQQLAALEQAPAAQACPVPAAMTERRDLLQRLKALGPAFATTLTNEVFYKDFRNRRQVGAYCGLTSSPWQSGGIDREQGISKAGNPRARLKAIELAWLWLRHQPESELSRWFRSRTANAGKRAKRIGIVALARKLIVALWRYLTTGLVPAGATMKA

SEQ ID NO: 230219 - protein, 403 aa, unidentified
MSSVFAGLDWASRTHAVCVIDERGTVCRQWDVAHDADGLRELNGQLRALRVVRIAIERPSGLLVDALVEAGFEVVPIHPNAVKASRPRYRSHGGKSDASDAYLLADLLRTDGHRFKPLAAQSDEIRALRALVRGRDDLVATRVQLANQLRSLLQSYWAGAAEVFADVDSPIALAFIQRYSTPESAARLGPKRMAAFCAQHAYCGRRSAEELLQRLRHASSITVGELEMDAKGELASSLARTLSTVVDQIRLLSSRIEHHVATSDDGRILMSFPRAGRVCAAQILAELGSVRERFDSDEHLAAEAGVAPVTYASGKHKAVVFRWACNHRLRRALTTLADNSRHASAWAAAIYATARGRGCDHPHAIRILSRAWLRVIWRAWIDRKPYDPALHGGLQTMIKAAGG

SEQ ID NO: 230220 - protein, 345 aa, unidentified
MSMVSGVIGGVDTHADVHVAAAVDRNGGVLGIESFPTDTVGYETLTGWLAGFGPVVKVGVEGTGSYGVGLSRYLHSEGVEVVEVDRQNRQARRRFGKSDPVDTVSAARAALSGTASVTPKGRNGPVEQMRVLLVARRSARRQRNQTLNQLRQVVITGPDEIRARFKDRAKAGLVSEAVRMRPRKGNDPVTYTTYVVIRGLARRIKDLNDEMRSIDGALKELIDVTAPSLIECHGIGTDTAATLLVTAGDNPDRLHTERSWAHLCGVTPVSTGSGKTSGRVRLNHGGDRQANAALYRIVLTRMSSDAETRNYVRRRRAEGLSTREIMRCLKRYVARQTFKHLPRVA

SEQ ID NO: 230221 - protein, 340 aa, unidentified
MDMTTLGIDIAKSVFQLHGIDADGAVVVQKKLRRGAVLNFLGKVGPCLIGMEVCATSHYWAREIAALGHEVRLIPPAYVKPYVKRQKNDAADAEAICEAVTRPNMRFVPIKTEEQQSVLVLHRARDLLMRQRTMILNAIRGHLAEFGIIAAQGPRQVMGMIARLRDDGDASLPEIARSALLALGAHLEALAGEIRTLERQLMVWHRADPTSQRLETIPGVGLITATALAASVSDPSVFKSGREFAAFLGLVPRQNSSGGKDRLGRISKMGDRYLRKLLVVGATSVIRRAGSNPTKTGAWVRSLMERKPARVVTVAMANKTARIAWAVMTRGETYRASPIA

SEQ ID NO: 230222 - protein, 439 aa, unidentified
MKKNLTEEVIAMHGKDYNKQIARRQRIKRTSLVIGMDIGNEFNAMCLMNKEGEVLGKYPRIYNTRKGFDYFAKVVEETKAKRGFGNVLIGMEPTGHYWRKIAYFAKEKGYEVRFVRTTALRHQRELDESSSAKSDVRDAVTIANITREGKYIDTVIEDGVLRQLRILAHVRERIQRYNTGSKHALKAVLDDYFPELKGIFWSMKSKGLWAVLENSPFPEDVIDLGLKRLTELIAKSTRRKGSAVKKAEGLYQAARESVGLKQIGVADRYRAKMYLEEVKRSEEQLKGIEEQMKRLLEEVPYAKNILSIPGVGVVSCAVFLGELGNPFNFEHPKQIIKYAGYDPQENDSGQSIGRKRISKKGRWLLRKYLFFMSMRVIYRSTFFREYYQGKLKSSNRFGQPLKKKEAICAVAIKLIKVIFALLRDERTFTAKAPDLVLAA

SEQ ID NO: 230223 - protein, 343 aa, unidentified
MQTITTIGLDIAKSAFQVHGIDAEGKVIVRRQLKRRYVLSFFEKLQPCLIGVEACASAHYWSRELKALGHTVRLMPPAYVKPYVKRQKNDASDAEAICEAVRRPTMRFVEAKTPEQQSCLMLHRTRHLFIRQQTSVINAIRAHLAEFGIVAPVGRNGVEELLDIVADANDKRLPELARACLGALGAQLRMLKAQILNFDRMITAWHRSNETSKRLDELPGVGPALATALVASVADPKVFRSGRDFSAWVGLVPKQNSSGGKQKLGSISKQGDRYLRSLFTAGALAVIRYARIHGTKHRPWLTALLARRPTKVAAIALANKIARMAWAMMARGERYREPVALAA

SEQ ID NO: 230224 - protein, 405 aa, unidentified
MKVYIGIDWSKDKHDIVFMNEQGGHISHLTIEHSPEGFELFDEKREIMGVQPQQCLVGIETHHNLFLDYLWSRDYSSIFVLPPFQVNRSRGRYGSSGASSDRSDAGLIADILRTDRHRLTLWRPDLPLTQQIASRVSLQSFLTHSIIQITNRLRMVLWRYYPNAAHVFSSLDTQIALEFICAFPTPADAEKLTFEDFRRFAKQHRYPNPKKLPACFARLQRNQPQAEQATVQAFRDEAVRLSKLSLQLVRERALTEREINKLFAAHPDAPIFSSLPGAGKRLAPALLAKFGDNRNRFPTTQALQSVAGTCPFTKQSGKRKYVLFRYACDREFRNIAQMWARASLKESVWANTYFQMALPRCKSFSHAYRRLANRWLVIAWRIWQDGVTYDENLHMRKHAMRVKPN

SEQ ID NO: 230225 - protein, 342 aa, unidentified
MQITTIGLDIAKTTFQVHGVDGEGKVVVAKRLRRGRVLGFFEKLGSCLVGMEACATSHHWAREIARHGHEVRLMPPGYVKPYVKRGKNDAADAAAICEAVRRPSMRFVPVKSAAQQSALMLHRTRDLLIWQRTQLINALRGHLAELGLVAAKGREGVARLLALVADQGDERLPALARFACQALMGQLAALQGQIGVLERRLHAEHRANEASRRLETIPGIGVITASALVGTVTDPAAFRSGREFAAWIGLVPRQTSTGGKARLGRISKQGDRYLRRLLVAGALAVLKQARARPDKHPWLTRLLARRPAKVAAVALANKMARTAWAVLARGESYRASAPAAAP

SEQ ID NO: 230226 - protein, 310 aa, unidentified
MESVFVGIDVSKDRLDVHVRPREETFAVARDGAGLSALVERLRGLEPARIAVEATGGFETVVTAALAAAGLPVVVVNPAQVRHFAQAVGQRAKTDPIDAALIARFVEATRPALRPLADEATRLLADLVARRRQIVEMIAAEKTRQRRAPAGRIERSIARLIAALEKELASLDGDIDAGVRGSPLWRDKEDLLASVPGIGPITARTLIAELPELGSLSHKRIASLAGLAPYTRQSGRWKGQSRIGGGRKSVRSALFLAALVAGRHNPVLKAFRDRLVGAGKPKMVAIIAVARKLLTILNAILRDNKPWQTA

SEQ ID NO: 230227 - protein, 429 aa, unidentified
MMNTSNTYPLHPKMTRTYAGVDSHRDSHTIVILNCFHEKLGEIKIGSAPSEFSKFLKRIKKYLQPNTTWAFGFEDTSAYGRSFVKFLVDKGYLVKHVEASKVATERGQVLYKTDQFDAECACRVLINQFDNLPDATPQDKYWVITNLVTRRNALVKINVMVKNSLHGAIADHYPHYKKFFSCVTRDSALAFYEAYPSPHHLDNVDSHQLAEFLHSASKGRLSSTKAEIILNHVQRDNVPKLEFQDAQDFTVKSLVRQVKNNLAELSAIDEEIEKILQHFNYPLTSIKGIDTLTCAKLIAEIGDIRRFKSAKHLAKYSGVAPVTYASGLTNLQRANARGNRKLNEIFFKIALTSVTPIGKNNVLVNPICYEYFQKKLSEGKTKNQALKAVQRRLVNIIFSVMKHQRPYNAPDISYLETYENNANAFAYSS

SEQ ID NO: 230228 - protein, 356 aa, unidentified
MNIRRVQHFVVDGKEIFVGLEDSKKTWKLAVRSEGMLIHQASMEAKYSVLIRYLRNNFPNCTIHLIYEAGFKGFNLHDRLVDDNIDCVVIPPHVVTEPKVNRVKTDKRDARRLALILENHDFRDVCHVPDRERREDRQISRTLIAMQKDIIRTRNRIRKLLDFHGIEVSFPDRWGRDEFRALKKLPLSEPLRISLDILLTQLEELWAHQMTLRAALRKLCRKERYAKAFTIARSLPGIGWFTAIRLILELGEDLSHFTSGKKIASFVGLTCSEYSSGQTEWKGHITGMGSRFIRATLIENSWAAIRKDPVLLAKFSRIWRASGSKKKAIVAVARMLIVRLRACVILGTPYSLGVVR

SEQ ID NO: 230229 - protein, 369 aa, unidentified
MAEDNTVFVGIDAAKAKHAVAIAEPGRQGEVRYAGEIATSPEAVRKLITRLAARHGKLHVCYEAGPTGYGLHRQIVGLGHACTVVAPSLIPRRPGDRVKTNRRDAVSLARLLRAGELTAVWVPDEAHEAMRDLVRAREAAVEDLRRKRQAITSLLLKHGRTFAGRKPWGEMHRRWLQQQAFGHPAHEVLLQEMMLAERHARERLERIEAAILRLLPGWSLAPVVEALQALRGVSVVTAVTIAAEVGDLGRFASARQFMGYLGLVPGERSTGETVRRLGITKAGNGRLRRVLVEGAWTYRHPPRTGKKKHYLREGLPPAVKDIAWKAQARLCARYRALSARGKKLTVAVTAVARELAGFVWAIGQEVKPA

SEQ ID NO: 230230 - protein, 363 aa, unidentified
MQSKQISFKGQKVFVGIDVHKTTWSVTVLLEVGVPKTHPQKASAKELFDFLNRHYPDGEYHAVYEAGFSGYATYYALTEYGIHCIVVNAADVPTTQYENVMKSDPIDSVKLAKALRAGQLKGIYIRNRENLDDRAAVRYRGAIAREVNRYKTRVKHLLYSNGVDVPERFDKSGHWSRAYLNWLRTDVELLSSTRLSLDLLLDQAEIARQGLLKATLAIRHLSQSPKYADRYDLIHSIPGIGPICGMTILTEVEDVTRFRNEKQFASYLGLIPTCHSSGDKVIHGEKTFRGNKQIGPMLVEASWRAIYIDDALACAFFQYKHRGFNAQEAIIRVARKLSNIILSVLKNGKQYEPFMGNRHTTTE

SEQ ID NO: 230231 - protein, 345 aa, unidentified
MLADELEFVIGVETHRDEHALALVACPSGACLVEALIAADAGGYAVALALARRRAPGRRAWAIEGSGSYGKGLARSLVSEGERVLEVERPRRAGGRGRAKSDRLDALRAARTLLAEERPSLPRAAGRREALRVVLAVRTSAVAARRVALNQLRALLVTCPEALRAELRSQTRARLLRRCGELAPERDDPELAGTLLALRLLAARIESLSAEARELERELGAQAEQIAPALLAEYGIGPIGAAQALVSWSHRFRSEAAFARLAGAPPIPASSGKTVRHRRDRGGDRKLNHVLHQIVITRRKHDPRTIAYIERRRREGKSEREAIRSLKRYVARHLFRVLEETAMTA

SEQ ID NO: 230232 - protein, 359 aa, unidentified
MRIIGCDLHSRQQTLAMLDTATGEIEKTTLKHEENIVRKFYSNLPRPVRVGIEATGSMQWFVSLMEELRIECLVGHPAEIRAAEPRKQKHDRRDADLLLSLLVEERFPTIWLPTKELLDIRALLRHRHQWVGLRIKIQNALQAIALANGLRRGPSLWTQAGQQSIASLPLSPHAAYRRNELQAMYVKFEAEIEKLNQRVEQQARERSGARLLMTHPGVGPITALATDVFLGDPARFANSKELASYVGMIPGEYSSGKRQRLGGLTKQGNPLLRFLWSEAAIHAVRRDPELKHFYHRKLIQKGLGKARAAVARKLGIRMWIMLRDRIEYHEFCRRGQKQQRSGDACAGMPGRRYGAKVTG

SEQ ID NO: 230233 - protein, 349 aa, unidentified
MKKIFIGIDFSKEKFDATVIKAEDLSEMLSVGHQEFINKVSGYRKMLRWVNSLCGVDTCEDWLFCDENTGGYSQMMSDYLYSKGYDLWIENALSIKRAFAMKRGKGDRSDSLMIAEYAMRYQDKACLYEPLSPALSQLREVFLYRHMLVRHKCSFEVRRIEKRFTQQKSSAKTMISQNSRHILTELNHEIQKCDQRIQELVRSDEELSRIFGIITSMPGVGTLNAVCLMVFTNNFTKFDYNARKIACYYGVAPFARDSGTSVHSAPKVGYLANKMIKSLLSQAALAAVNFCLAMSMYYHRLVDKGKKPMVALNNVKNKMLAIITAMVKNECKYQPEYVSINAGSEMLNK

SEQ ID NO: 230234 - protein, 415 aa, unidentified
MASLVRWVGRGIGLDVHRDFCVVAICEDGKVRAGGRVPSTPEGLRLLAESLLATDRVALEVTASCWEVTRILEPFVDRVIVVSPDDTGIASARAKTDKLDARALASLCWKGELEAVWMPDERCQILRRRLTRRTQLVHARTRAKNEISAVLQRRLVERPAFADLFGVTGRRWLAEVELPLEERESVDAGLRQIAFLDVEIKAVEKLIAQQALSWPEIRRLMTVPGVNLICAATFIGAIGRADRFFTQRKLVAYLGLDPKVRQSGEAPARSGRISKRGSASARWALVEAAWSVVKQPGPLRAFYERVRARRGHGKAIVATARKLAILFWCMLKRSEDYAHQRPALTKKKLRELELTAGAKPRTKQAAGIWSTNRAIRDAERALTEQAEISYKRMVTDQRAGAPARKVGASATPERA

SEQ ID NO: 230235 - protein, 349 aa, unidentified
MSVDPAYKVARSGAPAAETRWKDRTVIDAILGIDVSKNTLDVSISSCTKVRTKSFANSSDGWHHLLDWLIAQKIQRVHACLESTGRYSLGIACSLYEAGHVVSIINPAQIRDFVRTKLGRNKTDGIDASRIREYCELFKPSPWAPPSEAHRRLGELQTIRAGIIAGLTEWKNRKNSGIVDTEAQALADATILHFTSQLGAVDKAIALTIDNDSDLRSKRDLLLSINGVGDTLAGVVLAELPGPDVLRSSGEVVAYAGLNPRQHQSGTSVDRATRISKIGNAVLRAALYMPALSAMRYNPAIVALVTRLKSRGRLKPKQIVVAAMRKLLVLCFGVLKTGKPFDPAIAMGC

SEQ ID NO: 230236 - protein, 322 aa, unidentified
MSNPTATQPIYVGVDVSKKSLEVYILPTGDSFEVPNDQDGLDELAGRLKGGASPTLVVLEATGGYERPAVAAIAASKIAVAVVNPRQVRDFAKATGKLAKTDRIDALILARFAQDIRPSPKSPPDAEAREFSDIVARRRQVISMMSAEKNRLSITDSEAVRKRIQAHVKWLEKELERIDGDLGEAIDKSPTFKENEALLKSVPGVGPVLCRTLLAELPELGSLSPKKLSALVGVAPLNRDSGDRRGERSTWGGRAGVRGALYMGALVASRHNPTIKEFYERLVAAGKPKKVALVACMRKLLTILNAVLRERSPWRCPHALIS

SEQ ID NO: 230237 - protein, 465 aa, unidentified
MRTDKTLWRNRNARKELTRRLQSENPGLEVVHPHAAGIDVGNSAHYVAVRPDRDPQPVRRFECFTADLHRLANWLQNCGVKSVALQSTGVYWIPLYDILEEHGFEVYLVNARHTKNLPGRKSDVQESQWLLKLHTYGLLNNSFQPLSKIRILRTYWRQRLLHVTGAGTCVQRMQKALTQMNIQLANVISDLSGVTGQLIVRAIVAGERDPHKLAELSHPRIQASRAEIAKSLEGNWRQELIFVLQQEMEMYDTYQRRVAECDQELQKHLRTFAATVPTPVKEALPPKKKKKQNKNNPHFHLADELQRITGVDLTRIDGVDVIVAQTLVSEVGLDMSRWKTEAHFASWLGLCPDNRISGDKVLSRGTRHVLNRAANALRLGASTLLKSQTYLGAQYRRLRSKLGAPKAITAMAHRLARLVYRMLKYGQHYVDKGAEYYEQRNRQQQIEFLRKKAAQLGLQVTAPHA

SEQ ID NO: 230238 - protein, 386 aa, unidentified
MQAAVWPQEAAIRVDLGAIFVSLELSRSTWLITSLSPGDGERMSKHMIEAGAAGLLLEHFERLRAKAQQRTGRWWRGIVIQEAGLDGFWLHRLLESEGIESHVVDAASILVSRRRRRAKTDRIDGETLLRTLMAYKRGEPRVCSMARLPSPAEEDRRRLLRERKTLMAERVEHVNRIKGLLFAQGIGDYEPLRRDRRLRLEEVRTGDGRALPANLRAQIVRELDRLELVLQHLAQAEKARDELLEREAQALPTPAAMLMRLKGIGAEFASVLWSEGLYRRFDNRRQLAAYAGLAATPWRSGSVAHEQGVSKAGNPRLRSTMVQLAWLWLRHQPASALTLWFHERVKQAKGRLKKTLIVALARKLLVALWKYATSGVVIEGAVMTSA

SEQ ID NO: 230239 - protein, 467 aa, unidentified
MSTARRRPGRKAKARSPFIVLDRHAAGIDVGAAEHWVAVPPDADPIPVRCFGTFTADLQALAAWLLACGVTSVALEATGVYWIPLFELLEARGLQVRLVDARQTRALPGRPKDDIRDCQWIQRLHSCGLLRAAFRPDDQVVVLRSYLRQRQMLIGCASDHIRHMQKALEQLNVKLPEVVADITGVTGMSIIQAILAGERDPVQLAKLRNQHCKQDEATIAKALHGNWRAEHLFCLRQALELYEFYQRQLAACDRQLDAQLQTFADRSAQAPVPPRPTGKYKKRHKHQGNVPAFDARTRLYRMSGVDLTRIEGIEEGTALVLLSEIGLDMNRWATEKHFCSWLGLCPQHKISGGRLLSRTVRPGVNRAAQAFRLAARGLERSQSALGAFYRRLKSRLGAPKAITAAAHKLARLVYSLLKHGQAYTAQGLEEYEREYQERQVRNLTRKARELGYTLVKPELAADAPVSG

SEQ ID NO: 230240 - protein, 346 aa, unidentified
MEHYAGIDVSLELSSVCVVDGRGKIVKEAKVASEPEALVYFLKELGFAVDRVGFEAGPLSQWLHAGLTQAGFETVLLETRHVKAALSAMTVKTDRKDACGLAQLLRMGWFQQVHAKSIGSQEIRALLVARKQLLGRLLDVELSIRGILRGFGLKVGQVTRKTFEARIRELVTGHTTLERIAEAMLSARATLKAQYEKLHKAVLAIVREDVVCRRLMTVPGVGPLVAVTFKSAVDDPSRIAKSKAVGALFGLTPRKYQSGEKDVTGGITRTGDEMVRTALYEAANVLLSRITRFSKLKRWGMDVAKRRGSKRAKVALARKIGVILHRMWIDGTTYRWAEAKPIAAQG

SEQ ID NO: 230241 - protein, 387 aa, unidentified
MAQVNDLSRSLTAFDPISTLVVVVEMSKASWLVSGVVPGVERQPLKKLEPDATALLRLIERWRNEAVRAGRPISRIALAYEAGRDGFWLARWLIARGVEAHVIHSASVAVSRERKRAKTDRLDAAMLMRVFLGWLRGERGHCGMVAIPTMEEEDARRPSRERESLVDERSRITNRMKSALARLGIRGFKPHLRKAPERLAGLRTAEGTGLPANIIEEFRRDMARLALVREQISSIEKTRAERLERAPDTGPHAMVRLLARVIGIGIETADMLVQEILSRKLRDRRAVARYAGLTGSPDESGLKRREKGLAKAGNARVRRGLIQLAWRFLMFQKDSALAQWYRTRTEGPSGARKTTMIVALARKLLIALWRLVTTGEVPDGVELRPAA

SEQ ID NO: 230242 - protein, 349 aa, unidentified
MLAEKVDYVIGVDTHRDRHTLAVVVASTGAVVAQHAVGTTIRGYAAAVAFAERDAAGVRVWAVEGAGHYGAGFTRYLSGRGQLVIEVGRTARGERRLHGKDDALDAVRAARSALASKTLTLPRAGQRQEALRVLLLTRRSAVDVRRLALVQLRSVIVTAPESLREELRRLPVGQLIRRCSRFRRSDSRTPDELAVVLVLRSLARRIEAATEEANDLEREIIGHVRALVPELLNEPGVGPIVAAQLIVTWSHRGRLRSEAAFARLAGVAPLPASSGQTIRHRLSRGGDRQLNRALHTVILHRRQHDPATRDYIARRVAEGKSSRDATRILKRYLARHLYRVMQNAPLAMT

SEQ ID NO: 230243 - protein, 376 aa, unidentified
MKYVGVDLHKKTISVCVVVLERGKKKVIARQRLECREEAAIVAWFATLGSFEVVVEATASYEWFVKLLEPLAHRVLLAHPKKLRIIAESKRKTDRLDAQVLAEFLASDEVPLAYRPLPRVREHRTLVRYRDYTQRRMTSVKNKLRHILAKYNADVPHLFTAEGQEHLASVPLSTCDRFVADELSAELHQHRERLLKVSRELRAFAAQAPLAEKEARAIEDSIPQVGPVTADVVLAELGDWQRFRSQADVAAYAGLAPGFRTSESRTKQLGITKEGSRLLRWTMVEFAWRMVRASRKWGRHFHRLEARVGAKKAIVAIARRLVGMIFALLRTGRKYSLLQDAPTASCRSKSPRDTHPSDPSCLRGQPRQASSLGAGG

SEQ ID NO: 230244 - protein, 388 aa, unidentified
MNVVADKSEPLTAIHTQLGAIFVSLELSRSSWLITSLSPGRGEKMSKHSVRGGDFAGLMQLFAQLQEKAKLRTGQSFRVIVVQEAGLDGFWLHRALQNEGIESHVVDPASIATSRRRRRAKTDKIDGETLVRTLLAYKRGEPRVCAMVKAPTPDEEDRRHLCRERKALTAERVRHVNRIKGFLFSQGVSGYQPLRRDRRQRLDELQTGDGRALPQHLKALINRELDRLELLLKQIKTVEAARDALLAVEQTAKPAPAAMLLAIRGIGPEFAVILWSEGLFRHFDNRRQIAAYAGLAPTPWQSGAVDREQGVSKAGNPRLRTTLIQLAWLWLRNPPRSALSVWFHERISRNGGRLRKTTIVALARKLLVALWKYVTAGVVIEGVTMKVA

SEQ ID NO: 230245 - protein, 355 aa, unidentified
MNSEKYIGLDVHQATICVAVMDPKGKVVMESILETKATIILEFLAGLRGTLSVTFEEGTWAAWLYDLLKPHVANLVVCNPRKNALLKHGNKSDKIDARKLADLLRLNDLEPVYHGESGVRMLRELARSYLTIVKDVSRVMSRLKAIYRSWAIPCAGRDVYYTRHRGEWLGKIPEAGSRRRAEQLYQQLDMLQPLRQQARRELLAESRKHTITAKLRQIPSLGPIRSALAVALIQTPHRFRTKRQLWTYSGLGLETRDSGEYHYVQGQVRRRKKQVFIRGLNKDHNHDLKGLFKAAATRASVQPGPFQDFYQRSLAKGIQPTMARLTLARKIAAITLTLWKKGENFDAEKLKAQAA

SEQ ID NO: 230246 - protein, 391 aa, unidentified
MVCVGIDVAKDKHDCCILDSDGTIRADCFTIPNNMDGFKQLLRTIRDCTKKSDKIKVGLEATGHYSYNILGFLLDNDLAVYVMNPLHTNLYRKSLSLRKTKTDRVDARTIATMLLSDVDLKSYTDTAYHNEELKSLTRYRFDKVQERAKLKQSVSRLVTILFPELEKLVPSLHIASVYSLLSEYPGAKQVSEIHLTKLTNILATASKGRYGKEKAVQIRNAAKTSIGSVMPAKSLELKHTIKLIQELSAEINEIEDSIQQLMDELNPPILSVPGIGVNSAAVILAEIGDFSNFSSPDKILAYAGCSPSTYQSGKLTNCYAHMEKRGSRYLRYALYNATKSICHWNPVFAEYLAKKRAEGKHYNVALSHVTKKLVRLIYALQKSGKAYLPAT

SEQ ID NO: 230247 - protein, 347 aa, unidentified
MNAEPEQLSEPPSSDRASQGHLKRKAECKMKQVDEYAGVDVSKAQLDVALRVSGRHWSVTNDETGIAEVVTELHAIRPVLIVLEATGHLEMPLTAALLAAGLAVAVVNPRQVRDFAKATGQLAKTDTLDAQVLAHFAEAVRPPARPLPDANTQALAAVVTRRRQVVEMLTAERNRCGSAPAAIRPRIEQHIAWLVEELADLDTDLQQRVQASPAWQTQAQMLQSIPGIGPTTACTLLAELPELGHLDRRKIAALVGVAPFNRDSGPRHRQRHIWGGRTAVRTTLYMATLVATRCNPVIQRFYQRLLEAGKPKKVALTACMRKILTIANAMLKHNLYWNPEYPSQVIA

SEQ ID NO: 230248 - protein, 403 aa, unidentified
MEPRMRKPKQPDRKQPQQQRKPNDLSHCLAALDSDHTLVAVVELSLSNWLVAGVVPGVERQPLKKLKPEPGPLLELLHRWRLEAERSGRKIARIAVAYEAGRDGFWLARWLMAHGVEAHVIHPASIAVSREHRRAKTDRLDTDLLKRAFVGWLRGERDHCKMVAIPTLAEEDAKRPNRERECLVAEQSRLINRMKATLVRLGVRSFNPRLKGAAERLETLRTPEGGTIPPNTLAELRRHIERRSFICEQIRKIEAERIERLTRAPDTGPNIMVCLLTRVIGIGVETADLLVHEVLLRTMRDRRAVGRYAGLTGSPQRSGSMSREKGLARSGNARVRRTMVQLAWRFLRFQSDSALARWYHQRTDNAPRVRKTMIVALARKLLIALWQLVREGVVPEGVAMRPA

SEQ ID NO: 230249 - protein, 451 aa, unidentified
MSKKVIELDALEQINLDAAGIDIGAESIYVAVPPGRDTESVKEFPTFTADLQRTAEWLKKCKISTVAMESTGVLWVPIYEILEHHGFEVFLVNTYHLKNVQGRKTDVLDCQWIQQLHTYGLLKASFRPPEEIVEIRGYVRHRDTLVKYRSAHIQHMQKALNLMNLKLVNVLSDITGVTGMKIIRAIIDGERDPYVLANFRNKLCKKDEEEIAKSLEGYYRPEQVFVLKQSVEQYDFYEKQIQEVDQQLESLYKKYDPPDEDNYKNRKKHKPRKNQAHFDLGDSLYRMAGVDLTKIDGVDALIAQKVLSEIGTDMSKWPTVKHFTSWLKLCPNNKVTGGKVIQTGTQKTKNRATTALRIAAFSLSHNNKSALGSFYRRIKARNGPSEAITATAHKIAKIIYFMLRDKTDYYDLGENYYQEKFREILIKKLHKQAANFGYYLEPYNMAIPLVS

SEQ ID NO: 230250 - protein, 346 aa, unidentified
MKILALDLGKYKTVGCDYESASGVHQFKRGFTTPAGLTRMVQEAKPDRVVIEICSIAGWVCDLLREMGIEVQVANTSDDAWRWRKVKQKDDRRDALKAARLSAVNQIGEVYIPRREVRQWRALITYRQQLVRRRTKIKNHLRDLLLREGQLLGRGSSCWSQEGLKKLEQQAQPFSECGPTELWRGELQLELEQLREMQRQVAVVTGQLDKMGAGDARVRLLRTMPGVGPRLAEAIVALLDQPQRFRKASQVSGYIGMVPKALDSGETERRGHITRQGSRLVRSLLVEVAWAGLRHNAWVRQTYQRLSGGKKARKKIAIVAVGRKLLVRCWAMLRDNRAWDWQPQIT

SEQ ID NO: 230251 - protein, 346 aa, unidentified
MAHTSDVVVAGVDTHLDTNMAAALDGVGGELGTRQFPTTPAGYRALLAWLSSFGTVVRVGVEGTGSYGAGLARHLADQGVEVVEVDRPNRQNRRRRGKSDPIDAVSAARAALSGEASAVPRSRNGAVEAIRVLRVARSSARHDRTEALNQMRSLVSTAPDELRQQLRDLSGLQLIDQAAALRPGAEMSVVSATKTALRELGRRARYLGEQMDRLTAYLGPLVAATAPALVARPGLGTDTAGALLVAAGDNPERLRHEASFAHLCGVSPIEASSGKVTRHRLNRGGDRRANHALWRVVMVRMVSDPDTRAYVERRTKEGKSKREIMRCLKRYVAREVYPLLVAKEGG

SEQ ID NO: 230252 - protein, 341 aa, unidentified
MQITTIGLDIAKNVFQVHGIDAAEKVVVRKQLRRGQVFAFFAALPPCLIGMEACATAHYWARELTKLGHEVRLMPAKDVKAYVKRNKNDAADAEAICEAVRRPTMRFVRAKSAEQQGRLMQHRARDLLLRQRTQTINALRAHLAELGIAAAQGREGLKQLLTIIADEGDERVPIDARASLIVLAAQLQALQTMIGSIEKRLVVQHRANEASKRLESVPGIGLIGASAIAATVTDPKAFRSGRDFAAWIGLVPRQDSTGGKQKLGPISKQGDRYLRRILVVGAHSVLRRAKQSPEKYPWLTQLLARRPFKVVAIALANKMARIAWALLASGGRYRAPRLAAA

SEQ ID NO: 230253 - protein, 413 aa, unidentified
MNYEPITAVGIDVSKGKSTVAVRRPGGEVVLTPFSVEHDAVGLSSLVKTLRSIGGDIRIVMEHTGMYWRPIALALKEAGFFVSVVNAMLIHDFSDNSLHKVKTDKADSMKIANYALSFWAELRDYSPEDETRQMLKMQNRLYLRTQKSSVVLRNGQISLLDQAFPGVNTLFDTQPRRSNGHFKWVDFVKRFWHRDCVAGISLAAFSDAYRKGCAKSGYRFSQSDAEKLHTAARNTVATFPKNDSTKLLIAQAVDSLNAVYDALYILRGEMLRLAFLLPEFDIVMAMQGAGEVTGPQLMAEIGDVRRFTHKGALVAFAGMDAPPFQSGTFDSESRRISKRGSPNLRKTLFMVASTILQHSDPANPIFQFMDKKRAEGKHFYVYMVAGAAKFLRIYYARVKAHLLALDAEASTAA

SEQ ID NO: 230254 - protein, 397 aa, unidentified
MERPAPPASAFTWIIHLSVNGADIRRKEPAVSSIAHRGFVHLGMDVSKDSIAVAVLSPDRDVAEVDKIFHDTDSVRRLVKRLGKPKEIWACYEAGPTGYDLQRLLTSMGVRCDVVAPSLIPKGSGDRVKTDRRDARRLAGLHRAGELTPIAVPTPAQEGVRDLCRTRGDMVQDLTRARNRLSGFLLRHSVVWRGGSPWTERHRRWLATLSFDDPAIATTYAHYLATVKLRDTELESVEADLVPWCTRGPFADQVPRLAAYRGVTRIGGLCLAAEVFDWRRFPKARPFMSFTGLVPGENSTGLTQRRGSITRAGNAHLRGQLCEAAWAYQHSPNVGVGIRERQVGVPPETVARSWTAQIRLSRRFRQLAAHKNVRSVVAAAIARELAGFLWAEMVAEV

SEQ ID NO: 230255 - protein, 330 aa, unidentified
MSSTVSFSYYVGLDVHRKTISYCVKTSDGRIVRESSIPSNRDALSKWAQSLDQPWCGGLEATICSHWIYQHLKPYAQELKMAAPVRLKAIAAGKRKSDCLDARMLADLLRRNLFPECYVMPPDYADLRRQLRYRALLVRTQVQFKNKTAGLLIENGVEYETNRLHQKKYFAKLLETSPPMPEQLKRLLGFNRMEIETLRRIDRSIISSLQCDPLLADRVARLRTIDGVGAIAALTWALETGEPSRFPNANHALSYCGLCSPQRESAGVAKRSPLSKQRNRFLQTTLVEAAHLAPRFNEACAPFTKWRVRKATAIAQRLKSPAGSYAICLP

SEQ ID NO: 230256 - protein, 382 aa, unidentified
MAIPELAVGGRIVAPLAVAGWKKAGSPLTPFIGPGWLLEHQVRINREDGSTKMPHDTPACLAAGIDVSKRKLDVAITGSLERFTAPNDAAGHAVIAERLQSLGIQRVGLEASGHYEAAVVQHLRQRDFVVLVLDPGQVHGWRRFQKRRAKTDPIDAALIAEVTAAVDLPRQAPDPRLAPLAEHLTLIEQLAEDIARLKTRLERYSEAAPLRFLKAEIQRLTKCRARQLARLIGLLRAAPDLARRFDILLSIPGVGEITAATFVIRMPELGRLSRAEAAALVGVAPFNADSGEQAGQRHIAGGRSRLRRAVFLAAFAAAQQWNPLLQATYRRLRDAGKHHTVATVACTRKLVAIANALIAIANALIARGQPWQPEPPVRHGAF

SEQ ID NO: 230257 - protein, 338 aa, unidentified
MKHKRIAIDTSKHVFTLHGVDEQDSAVLRRNLKRSEMEAFFRKLAPTEVVMEACGGAHHWGRLLSRLGHRVRLIPAQYVKPFVKRAKNDRADAAAINDAASRPDMPVVAVKSAEQQASTMILKHREMLVGQRTAAINALRGHAAEFGVIAAKGTAQIQALLERLAADEAIPAAAKTMFAQMGAHVAALDQQAATLDEELLTLHKANPVSQLLAAVPGIGPISAITLALSVEPTHFASGRHFAAWLGLTPKEHSTGGRPRLGRISKAGNERLRQLLVVGATAVIRHAKPGKSSVSDWLLQLLARKPRKLAAVALANKTARIVWAMMARGEAYRRSPIIA

SEQ ID NO: 230258 - protein, 388 aa, unidentified
MNRIIKIGMDVHSTNYTLCAMEPTIGAEERIFGEVQVAPDYKEIIAFITSLKKKLGLNNDYSIECGYEAGCLGYTLYHQLTAAGIKCVILAPTTMLTQQGKRVKTDKRDAYLIAQCLCYGGYHPVYIPTGKDDSVKEYLRMRDDHKIALKKLKQQINAFVLRHGYQYVGTKWTIRHITWLKKLQLDPIYRETLNEYMASYDEQEAKVERFDKRIEEIASEACYKDNVKKLGCLLGMRTHTALSLIVETGDFARFAKGNIYGAFLGMAPGEHSSSTNLNRLSISKAGNSHLRRLLVEASKGLCKGVVGYKSKELRSRQKGQPTEVIAYADKANIRLRSKYYKMIRHGKKKNVAVAAVARELACFVWGMMTGNIHPASTAGSSAPAVSQG

SEQ ID NO: 230259 - protein, 418 aa, unidentified
MLGVGIDWAEDAHAVALGTPDRGVFEIATVAHNPAAVDALIGRIATLEPDPAEVRVVLETRHGLLVEKLVDAGYTVVPVNPDLIARRRGPANKKDDPEDARIACLLALDRFTTLKPLIPHGEAATEVRAIARDDSRASKDQRRLLNRLRADLLAVFPAAMHIGGDDLGAPTFLKLLERWPTAQSLAEASRDDIATFARTCRHGWPDRFADKVAAALATEQFEARPALVRAKADTTIGLYVTLLAIGHQRRAWEKRMGQLLVGDGANQDDTPGQKFPGGEIYLSMPGLGVRLAARVAGEIGDHPGQFDTPNALQAYGGKAPVTRRSGKSELIVAKRLACNRYLDGAVQDWAFCSLRWSNWAREYYDELRGRGKGHHAALRSLGNRWLNILWHCLDRNALYDENLHQANRQRARGQLAAA

SEQ ID NO: 230260 - protein, 346 aa, unidentified
MDIMHYVGLDIHKKTISFCVKLLDGTVLSEGVLKATRQDVDHWLMKLPKPWIAGMEATIFTGWVYDQLLPHAAAVKVAHPLMLRAIAAAKRKNDRIDARKITDLLRVDLLPECYMAPQQTRDLRRSLRYRNLLVRQVTQTKNKVSGLLMEAGIEYNKQKLHQKRYFSELLRRQGEEQLPASLIPLLQLSRTTLDTFGKMERQLLEGLQRDALLEKRLQRLMSIPGVGPVTATTWALEIGEVRRFAGCKQAVSYCGLCGTEDSSAGKQKRTPISKQRNKHLQTVLIEAAKLAPRYNPELALVYEQEKKKGNCNRATLAVARKLVAYLLAVDRRETGFVRQPATKEAA

SEQ ID NO: 230261 - protein, 442 aa, unidentified
MAAARVNGGTERTAVKERTRENGRPRVVRSKREVTGSCRNVALSKGDNDGAEPPKSAGWRAKRQSRIRKEPVMNKGITFVGLDAHKASISVAMLLPNAAAPIEWELPNEASAVRRMVRKIEREAPGEVRTCYEAGPCGYALQRQITEAGDASCMVVAPSLIPRKAGERIKTDRRDARKLASLFRAGLLTEVQPPSARDEAVRDLCRAREDARDDLMRCRHRLSKMLLRRALIYGGRTNWGQAHRLWLGALRFEDPVDQAVLDDYLLAIDHLVDRLKGLSQKLEDLSREAPYARPVAALRCFRGIDTLTAITIVAELHTFGRFTSPRGLMAFLGLVPSEHSSGASKRQGSITKAGNSHVRRVLVEAAWNYRHRPGTAALKKRREGQSPRVIAIADRAMIRLHRRYSRMTSARVPAPKATVAVARELVGFIWAVLYPMHTPAAN

SEQ ID NO: 230262 - protein, 344 aa, unidentified
MFFCGLDVSLRETAICIVDADGKIMKELKVASDPNAIANAIRDSGFVCEKVGLESGSTAAWLQAGLVALEFPAICIDARHAAAMLQAGLRNKSDRNDARGIAQLIRMNAYRPVWVKSERSQRLSALFTASNTLQDQLVRIENVVRGLLRCDGVRLPLGRRHFEAEVRNRVGDHGEIMATIEPLLVARAELIRQRSVFDQRIIALARRDQVCKLLMTMPGIGAHVALSFKAGIDDPGRFRRSRDVGAHFGLTPRRYSSGEVDLSGHISKMGDRHVRHMLYVAAQVTLRRDQGLWSSMKAWAMNVAKKRGLAKARIALARRIAVTLHKMWLTGEPFHWQKPGAAMA

SEQ ID NO: 230263 - protein, 417 aa, unidentified
MTCAPIFLPDQPANGLTAGIDWARDDHALAIVDARGKQIYRDTVEHSDAGLRALLKLLANHGVGEVAIERPDGPVIDALLDGGLTVVVISPNQVKNLRGRYGSAGNKDDRFDAFVLADTLRTDRARLRPLTPDSPATVALRRACRARKDLVAHRVALANQLREHLRRVFPGAVGLFADIDSPISLSFLSRFDCQDRADWLSPKRLAAWLASVGYCGRTDPAVLHARLTDAPRGATGDHGTAESRVTQAYLAVLASLTDQIKALSIQIDEQLALHTDAHIFTSLPRAGRIRAARLLAEIGDCRARFPTPDSLACLAGVAPSTRQSGKIRSVGFRWSCDKQLRDAVTDFAGDSRRANPWAADLYDRAIARGHDHPHAVRILARAWIYVIWHCWQDNTAYNPDQHGALQRLIQSRNHAAA

SEQ ID NO: 230264 - protein, 407 aa, unidentified
MPLFVGIDVSSKNLDACLMDGMGETLATQTVTNNLPGASELRDAILQHAEADDTIQIAMEATSVYSWHPAMFFHEDPELKQRRTKVFTLNPKLVRNFKKAYAEMDKTDPKDAWVIADRLRFGRLPKSVIQSEQYLALQRLTRMRYHLIQSLTREQQVFLNHLFFKFSAFNLEVDTPVFGHAITEFLLEAYSLDEIAQMPLEDLAMYLQTKGHGRFSDPKDLAASIQKAARSSYRLSKCVEDSIDLVLGSSIEIIRHLKRQIKDLDKAIARVLDGIPNTLQTIPGIGPVSCAGILAEIGDIECFDDQAAIAKFAGLFWPRHQSGDFEADDKMLARTGNRYLRYYLVEAANLVRRHEPEYRAFYQKKYREVHKHSHKRALVLTARKLVRLIDALLRNDQIYAPKKKVTR

SEQ ID NO: 230265 - protein, 478 aa, unidentified
MARTRKKPVPAPAGEGVEVIDAPVQVIARAAAIDVAKGSGMVCTRLPSETRAGRRTQRVWEVTATFAAVVTLMDHLVNQGIERLVLESTSDYWRIWYYLAEAAGLEVWLVNARDVKHLPGRSKSDKLDCVWLCKLNERGMLRRSFVPPGQIRDLRALTRLRARLVHDRTRHQNRIEKILEDSLLKISSLISDLMGVSGRRMLAALVNGERSPKALAALGDYRLRATPAQLEAALTGRFRDIHAFEIGMLLELTDDLTAKITRLDQQITGLLEQIPGISGACTSCGVIGGGHAPACASDQAKVLSVIERLDEITGAGPDTAQVIVAELGTDMTQFPTPGHAAAWAKLTSRTIQSGATTKNGRTGKGNPYLRGALGAAVMTAANTDTFLGERYRRLARRRGKQKAIVAVARTICEIAYLIINDPGFRYIELGAGYYARLDPKRQTSNKIRELEKLNPGMVVTLTPREPDPGTPATQTPAA

SEQ ID NO: 230266 - protein, 336 aa, unidentified
MTITTVGIDLAKNVFAVHGVDQNGRTVLVKPKVSRAALPELIASLPPCVIGMEACSGAHYWARLFRQYGHEPRLMAAKFVSPYRMAGKSGKNDAADAQAICEAVRRPHMRFDESQQAMQCLHRTRQGFIEEKTATYNRLRGLISEFGVIAPQSADALRHMVSVQKSSLPLQVQQCVDDLMEHVDRIEANITEYDRILSHIAKTDHRSQRLMELKGVGPTTACALVASIGNAHDFKNGRQLAAWLGLTPSQYSSGGKSKLGRITKAGDSYLRTLLVQGARSVLIGAGKRTDSFSRWVCMLVERRGYWRAVVAIAAKNARLCWASLHYGDDFRLYSVN

SEQ ID NO: 230267 - protein, 414 aa, unidentified
MRVYHNVCCGIDVHKKSVTACLMWGPADREPQYEIRRFGTMTRDLQRLAEWLEQAGCEVATMESTGSYWKPVWNVLEGRRMKLILANAKHVRALPGEKTDRKDGKRLAELTRHGQIRPSFVPPQAILELRGLTRYRSKLLAAGGDERRRIQKVLETANIKLGSVLSDVFGVSGQRMLQALVDQDAVDTQKVAQLAHWSLKPKMDALQQALEGKLTPHHRFLIELSLNHMRAVEAQVLRLDEEIQRRLKAYQEEYALLQTIPGIKEAGAARILSEIGADMSAFADGDHLSSWGGVCPGNNESAGKKFQSKIRKGNQHLLSALTECSWAATHKKDCHFRRKYYRLKARRGSQRAIVAVSHAMLKCIFIVLSQRRAYEEPKPASLTDPQKRRKVSSLCRQLRELGYQVELKSKELNG

SEQ ID NO: 230268 - protein, 458 aa, unidentified
MYRELQPLREALSQELKASLFPAVAGIDPHKLLETYLDRLTMYIGVDVADQTFTALAMDASKEILDSLEGCANEPDGFQRFLAWARALRQQHGLRIIAVAGETTGIYYWALWDFLGQQPDIARVLYNPRTTEHMGEVLSKKVRNELVDALLLAEQLRLGSTPEVLLQEDADLITARYYSRAARDLAQQINRKKNQLRSLLRAYSPPLCKVFPGSKLHHPAVYALLQENLFPDEFLQVGAEALATTLTAHCRTAFGLTEAQQLIEASRQTLIRPIGRDVIRDLVCAHVQDITTFQQRKAYYLKTGYALINDRLETKLLRTVKGSGISNTLALVTEIGDTQRFPTGEHLASFLGLTTSKHISGATLYRSKRITKQGSPNGRYAAVNVAQHLSRYVPRYQAMYQRIKDRKPPRKGHFVALVAIARDFVANVLYDMWRHQRPFFLEVSDYRDYRRKNHLSDD

SEQ ID NO: 230269 - protein, 318 aa, unidentified
MSDSVFVGIDVSKAQLQVASLPSTALEGIPAARKGTFANDGAGIKKLVTSLRALQPALVVLEPTGGLEMPAAMALGAAGVPVAIINPRRIRDFARAEGRLAKTDALDAQVLARFGQAMRPEPRPLPEAGVCDLRGLVGRRRQVVEMITAESNRRSSSPPEVREHIDRHLAHLRAERTWLDERLAEAIRSHPVWRERARLLRSVKGIGPVLTATLIARLPELGTLSRKEIAALVGVAPFNCDSGKHQGKRKCWGGRADVRRVLYLATLSASRFNPPIAAFYQRLLAAGKPKKVALTACMRKLLTLLTAMLRDGRSWQPT

SEQ ID NO: 230270 - protein, 344 aa, unidentified
MEGYAGQQFVGIDLHRRRSVIVRTTDRGDPLETVRISNDVDSLEKVMARAGEAPEVVLEATYGWYWAADALADVGAVVHLAHPLGVKAFSYRRVKNDVRDATDLADLLRMGRLPEAWIAPPATRELRELVRHRAKLVALRSGCKCEVHAVLAKCGVQVLMSDLFAPTGIGLLERLDAPAPYLARVGSLRRLIDDLDVEIDLFSRLIRGRLVADPGYRAVQTIPGIGPVLAAVFVAEIGDVHRFPGPAQLASWAGLTPKHHESDTHVHRGRITKQGSRLVRWAAIESVQALGPGTGAGRLKRRVGDRRGRNIGKTAAARQQVGYVYYALRDGHVRALTQRPRVAA

SEQ ID NO: 230271 - protein, 314 aa, unidentified
MSLCFVGIDVSKDQLDIHVRPSDQHRCFANDDTGMASLVEFIQPLQPELIVIEATGGYQHQVVAMLVDNQFQVAVVNPRWMRDFARSIGQLAKTDKIDASVLSFYAQVVKPQPRLLPDDSRDELRAILNRRRQILDMIIAERNRQALAPKKIRRQIQTHIDWLQKRLNESNDDLHRHIENSPVWKAKDEILQSAPSVGPITSMTLLAALPELGQLNRQEISALVGLAPINRDSGKQRGHRCIQGGRASVRQILYMCILSAIRHNAVIRSFYQRLVLAGKPRKVAIVACMRKMLTILNAMLKSNAKWSAAHAKVS

SEQ ID NO: 230272 - protein, 408 aa, unidentified
MKLVHSCCAGADVGKDEVVVCLRKRDRRKTVREVRRFPTLTCDLLRLADWLAEAGCTHVAMEATGVYWKPVWHILEERFEMILANAARIKNVPGRKSDMNDASWIAELLAHGLIERSFVPLAPIQELRGLTRTRRQLVREGIQHTQRIQRVLEDANVKLASVISDVLGKSGRRILDAIVSGETDPEKLADLGSERLKCDRATLVEALRGRVQAHHRFLLRQHLQLIADLDRAIAQFDAEIERVIQPFRDVVERLTGIPGVSDTAAHVLIAEIGLDMSRFPTAAHLLSWAGLCPKLDESAGKKRSVSLRKGAPWLKPVLVQCAWAAAKKKNTYLQAQFVRLKSRRGPKKAVVAVAASMLGIAYFMIRDQTPYEDLGADYFTRRDKAKIASRLANRIRDLGYEVDIKQVA

SEQ ID NO: 230273 - protein, 310 aa, unidentified
MRTICGVDVSKAWLDAFIRRVGYQRFANTPEGVAALAKWAREHGAELIVMEASGGYEQPAYLALWQHGCPCAIANPKAVRHFAKAMGKIEKTDRIDAEVIAEFAEVRRLKPMPPASPEQQRLTALAARLRQLTVDLGVQKQRLHTTREPLALASLKETIAFFDRQIKALAQEIGKLIQTNPLWQALDTTLRSVKGVADRTVTRILADLPEIGTVSNRAIAKLAGLAPIANDSGQRSGPRPIRGGRPDVRSILFLVADIARKYDPSLTDFRDRLLAKGKPKMAVRIALARKLLVRLNAKARDTRAQFANGL

SEQ ID NO: 230274 - protein, 315 aa, unidentified
MEAMIERCAGLDVHQETVVACVLVGPLEKKPNKSIESFPTTTKGLLKLNDWLMSMQVSDVVMESTGVYWKPVWNILESDFQLVLANARHVKNVPGRKTDVKDAEWLAKLLRSGLIEGNFVPPEDIRDLRDLTRYRKKLIGNRTAEQNRIHKILQDANIKLTTVLSDIFGQSGRRILEAIIDGEKLEESNLKELVHWRTKASLPEIADAINGRIRRHHRDMLQYHWNHMIYIEEAIEKLEEQIDQYLTPYQRETELLDTIPGVNKAGAATFIAEMGIDMSVFKSAKHLASWAGVCPGNNESAGKKKRVKQRKVTKH

SEQ ID NO: 230275 - protein, 342 aa, unidentified
MTMIGIDPHKATHTAVAVDDDENVIGEFTLRSSNNQAERLTGWAGGFGKREWAVESANGLGYLVGQQLVAAGETVFDVPPVLASRVRLLGSGKSQKNDPNDARSIAIAALRSDRLGVVEPDDHVTVLRLLVKRHRDMARLRSKHCSRLHALLLELEAGGIGVKISVTNASELLDSIIVTDEAARYRVLVAREVVDDIARLDATLKASKKRIAVAVTASGTSLMDIVGVGPVGAATIIGYTKNVSRFPTRGHYATYNATAPIEVSSAGNTRHRLNLRGNRILNHAIHIAAVTQLRHDTNGRIYFDKKIAEGKTPKEAIRALKRRISDAAYRALIADAARTTTN

SEQ ID NO: 230276 - protein, 315 aa, unidentified
MPNLYANFVGIDVSKDKLDVYEAKNKKYHTVSNDKKGIAQLLKLLSPQADLLVLVDLTGGYENNAANALHKKGFNVHKAQGRKIKQFMSSFGQKAKTDRIDAKMLTIYGAKMQETLRLYQPCDNQLKELISRREDLKDMLQKEKNRKERFCNKHAVSSLTSTIYFLQKKIEEIESEINEIINNDKELKEKAQAIKSVKSVGDKTAMTLLAVLPELGFANRREIAALAGLAPYANDSGKSSKKRKTSIGRPLVKRMLFMCAMVAIQKHSALKAFYDNLIQKAKMKMVAIVAVMRKLLVIINNACKAFYAQRTFTGV

SEQ ID NO: 230277 - protein, 347 aa, unidentified
MEYYVGLDVSQKEVSICVVDGAGAVVAEGKALTEASEIVSWVKEHVGAVERIVHESGPLSIWLTRELAARGAPVVCIDARAAHKVLSARMNKSDRADAEALAQLARIGWYREVHIKSVASDHLRVLLGTRERLIEIRKDIEAQVRGVLKTYGIRLGTVTQGRQRASFREQVKAAAAGIPALEILAAALLAVHEVACAQAAAVHGELVAIARDSELARRLRTVPGVGPIVALNFIAIVDDASRFAKAVDVGPYLGLTPRRHQSGEVDYSGRISKRGDAGMRKLLYEAASVLINRVQRFSPLKAWALRLAARKGFKKAAVAAARKIAVVMLRLWRDGTTFVWTKEALPA

SEQ ID NO: 230278 - protein, 316 aa, unidentified
MYVGIDVSKAELEVAVGEEGWTVGNDTAGIEELVERLTEQSPELVVLEATGGHEAPAVAALAEAGLPVVVANPRQVRDFGRATGQLAKTDRIDARVLALFAERVRPEVRALPDEAAQELTALLARRRQLLEMLVAEKNRLNMAPKTVRKGIRQHIEWLKRQLRMVDSDLERRVKESPVWRAKEDLLRSVPGIGPVVSRTLIGELPELGRLSRREIAALAGVAPLNRDSGTLRGKRMVWGGRRSVRAALYMAALTGSQRNPVIREFYERLIERGKPPKVALTACMRKLLVIVNAMVRDGALWDPAAHASDAELAHSC

SEQ ID NO: 230279 - protein, 399 aa, unidentified
MQILYSRCCGIDVHKDSVTVCVLVYSDTPEPEVRKKEFATYFKALLNLKMWLLSQRVTHVAMESTGVYWKPVWQALESNFELILANPYQVKNIPGKKTDARDSQWLAELLAHGLIKPSFVPSAETRELRDLARYRVKLVEECNRTHNRIHKVLEDACIKLDTVATDILGASGRNMIRAIIDGKTNPDWLADKAQTALRGKLPQLRLAMRGRITEHHRMMLRELMEDLEFTEGKIQRLDQTISGRIDVEKLTRLCTIPGVSAITAWTLLAELGSDMSVFRGPKNAASWAGLCPGNNTSGGKRLSNRTRKGNRWLRRALCQSAWAATRKKNCYIAAFFYRKAGKHGIRKAIVATAHRLLQRLGLNVVVEPQTGAPPAPPRRSKTGRPCKCSERAIPCKHNH

SEQ ID NO: 230280 - protein, 418 aa, unidentified
MDIRPPFSYQATVGIDWADQKHDVFVRFANGNSYRRKIDSRPEAIQEWLLELRSTCAEGKIAIALEQRRGALFYQLCTHLNWIDLYPVNPHSLCSFRLTFFSSRAKDDPIDGQLLEELVRTHCHRLRRYQPEATTERKLDLYCRHRRSLLDLATKSELKLISTLKQYFPLAVNLFAAVGMKSDIALNFLSRWPTLNELHRAKTHTVRSFFYAHNSRSQSLIEKRLQQIGEAHNVTDDLALIEPLVLTTKCLVGQLRQFNQAINEFDHKIKELFKSHPDHLLFEGLPGAGEKLAPRLLSVFGSDRSRWTDATDLQKYSGIAPVIERSGKSLWVHRRLSRPIFICQTFHEFAQQSTRFSSWADQFYRRQREKGKSHHSAIRSLAFKWIRIVFACWKANKPYDESFHVNALAKRNSSLSST

SEQ ID NO: 230281 - protein, 341 aa, unidentified
MKIVMLGIDLGKNLCSLAGLDQMGAVVLRRRLKRESLLRFTAQLEVCTVAMEACCGAHHLGRQIAEQGHRVRLMSPEYVRPYVKAQKNDERDAEAIAEAATRPTMRFVELKSEAQLEVQSLHRVRGRLVTERTALINQLRALLLERGITAPQGRRKLERLLSEILADEDNGLGSRLRRLIEDMRSEWRGLDERITAFDDELVERARADDAARRLVTIPGIGVLTATALVAAVGNARTFARGRDLAAWLGLAPRQATTGGKPRLLGISKRGNRYLRMLLIHGARTALPGLAQSDTPLGRWLKGLLERTHRNVATVALANKLARIAWAVLAHDRRFVAVHTGG

SEQ ID NO: 230282 - protein, 420 aa, unidentified
MKEPAINDFSALIGIDWADKKHDICEMPAATNDYQFSVISSKPQALHDWALSLKQRYPGKPVAIACELKKGPLIYALSRYEHITIFPINPSTVARYRKAFTQSGAKNDPSDAFIQTEILTLHMDKLTPIQPESADVRVLAQLVEYRRKIVQERVDLSNCITATLKNYYPQVLDWFKEKDTIIFCDFVARWPSLAVSQKVRKQTLMNFFNHHNSRYPQVNEKRCTDIKAACALTDDPGVIEPNRILIEVLIPQLKLLIEAIDRFDLEIKKYYKAQDDRIIFDSLPGAGVQLAPRIFVAFGTNRERYSAAADLQKYAGVAPVIEQSGKKKWIHWRYSCPTFLRQTFVEWAGLSIRYSFWAKAYYEQQISKGKPHNTVIRALAFKWIRIVFRCWKTNTPYDESTYLKALKKRGSPLLKFAAES

SEQ ID NO: 230283 - protein, 422 aa, unidentified
MLAEARDDEVIIERIAAVDVGKAELACCVRVPDERRPRRRLQEVEVYPTMTRSLLRLADRLRCLGVTRVVMEATSDYWKPVFYVLEAAGFETWLVNAKDVKHLPGRPKTDKLDCIWLCKVAERQMIRPSFVPPPPIRRLRDMTRYRIDLVTTRTAEKQRAEKLLEDACIKLSVVASDIFGVSARAMMASLIAGERDPKVLAQLARTAMRRKISALEEAFTGHFTDHHAFLLAKMLARVDALDGDIAELDAVIEQMIAPFASAAERLDEVTGIGLVAVAVIIAEIGTDMTRFPTSGHLVSWAKYAPGVKESAGKKKGAGTTGHGNPYLARVLGEAAIATSRTDTFLGERFRRIARRRGSKKAIVAVGRSILVIIWHLLSDPTVRYADLGPGFYDARISHSRKTHNHVRQLEALGYKVSLEPAA

SEQ ID NO: 230284 - protein, 472 aa, unidentified
MLPIQSLPLGHDISNEESVMPKRTSPGTKRKKHSRILEQINHSAAGIDAGAEWHFVAVPEERATPSVRKFATTTGGLYALADWLAAAGIDTVAVEATGVYCMPLLDVLDGRGLAVVLAKPASLKSVNDRRKTDMLDCQWIQMLHGFGLLRASLRPTQMVAAFRTYSRQRRMLIEQASTAIEHMKKALTSMNIRVELAVSDITGRTGMHIIRAIVAGERDPMVLAGMRDERCAKSEQAIAEALLGKYSDEQLFALDQGLRTWDHYQLLIAECSQRLAEQSNAFEKKADRKNLPKARQPERERKNGLPLDSRAIYYEILGQDLTQIDSIGTSTTCAFIAEVGTNVDAFPSVKHFTSFLRLSPGSNISGGKNKSGKNRRTTNRLATALRLAAQTLTRSQSALGAFYRRKRAQLGAEKAITAAAHKLARMIYFTLKEQRPYLDPGPDHYLQRHRERIIRSMEKRAQQLGYQLVRAA

SEQ ID NO: 230285 - protein, 331 aa, unidentified
MRYFQPPPNTRFYAGVDLHARSLFLAVLDRDGQIRFSRNLPAQPEPFLRAVAPFRDGLVVGCECMHCWYWLADTCRDHDLPFVLGHAWGMAAVHGQKTKGDRHDAEAIARLLRGGNFPLAYAYPKERRGLRDLLRARLRLVRQRSELYGHIHTARRQANLPPVASDLKYKSKRAASAAASADPFVRRRVETQLALLEPLDTTIRRLEAEIEEAAQEHYPTELAVLQSTPGVGPVLSLTILLEIDTIERFQRRQQFCSYARLCGAVQESAGKRVGVGNRKAGNAWLKWVFSEAAVLSAQKDERIGHLLQRLASKLGKAKAISALAHKLGRAF

SEQ ID NO: 230286 - protein, 347 aa, unidentified
MKKKRNLVESKIFKQVVGIDVSMDKIDIVMCYINNEQEIITQFSTIIDNKLKAFNKLTSMVEKYRIKEVPLWYNMEATGVYYEELAYYLSGKECQVSVILPNKGKQYCKSLNQKGKTDKMDAKMLARYGCERKLECWKEPSPFTRQLRELTRERITLVQERTRVKCQLHAKDHSFEPSPQTIGRKNKFIEFINNQIDEVEAQIEALLKSNGEVYQKIVKINSIKGLGIITIATILAETDGFSRFENIRQLVSFTGLDIKMNESGRFKGKTTISRKGNSFIRSALYMPAISAATNNPDLKIYYQRISSRKKVKKMAVIPVARKLLILIYTLWKKDTEYIVGYQSAKAA

SEQ ID NO: 230287 - protein, 374 aa, unidentified
MRSTDAAAEARETVFAAIELSKKTWVLGIAFPDRDRPSIHRIPGGNVAELVSRLRVAARNNRRILVCYEAGYDGFWLARALAKMGIECRVLDPASIQVNRRARRVKTDRIDVLALLRALIATDRGERHVCAIVRVPSVEEEDARRSHRERQRLIRERTGHINRIKGLLFAQGIRDIKPKLRRTRIDFAALETGEGHPLPDRLRRELEREYARLALIETQLREVEKERDLADAQDPVVERKRQMLVALQGVGGTSAAILAREVFARPFANRRQLGSYLGLTPSAYDSGSVTRCQGISKAGNSWARRILIEVAWLWQKHQPASPLSHWYIQKTSGQSSRIRRIMLIALARKLAISLWRYVETGLVPEGVVIAGAEA

SEQ ID NO: 230288 - protein, 330 aa, unidentified
MNTTTPVLLALDIGARKHAFASEHDGRRTVGTVANDPQQLRAFLKDLMRPNGTLQVLMEATGIYYLDVALIAEELGAQVSVINPRTAHNFAKALGQRSKTDALDAVMLLDFLKRMPFTPWQAPAKPLLELRHYGRYLVQLTEESTAARNRLHALSSTTSSPAFLRADLKRSIASLERRIERIRAQAMALIKADEWLKMRLDALLTIIGVAEVSAIALLSELAALPSSLSGRACVSHAGLDPRLHESGTSVHKPVRISRHGNKYLRRALFHPAMAAARHDPMAAAFRQRLLDKGKKKLQAVVAIMRKLLTAAWALVRNPATYKPEKLYAGA

SEQ ID NO: 230289 - protein, 425 aa, unidentified
MDRLWADLYEHIVGGSWMDRIFAGVDVGKEVHWACVLDRDGHVLLSRKLRNDEDDITLLLSEVRSFEVSDVVWTVDLIAVEASLLLAILFDHRQSVQYLPGSAVNRAAAGYRGEGKTDAKDARVIADQSRMRRDLTRLLPDETMVREMRMLITRRNDVVADRIRTISRLRQQLTALCPALERAAKIAEHHGWVILLSRYQRPKAVRRAGVSRLTALLTAHGLRPTTAAKIATSAVEAAKTQSVHLPAEELAAELVADLARDVLRLNAVLVELDAKIESRFRLHPLAEIVVSMPGMGPRLGAEFLSAIGTIEAFASPDHLASYAGLAPVPRDSGKTTGRHHRPYRYNRQLRRVMYLSALHSIRFCPESKTYFEKKKAEGKRGNAAVMALARRRTNVLWALIRDNRTWSPTPPHRMPLARGSTPAAA

SEQ ID NO: 230290 - protein, 372 aa, unidentified
MEQNTTYVAFDTSKETITVALAEGGRRGEVRFFGTVANRPEAVRKLVDKLAGRHSRLAFCYEAGPTGYGLYRQIRALGHDCQVVAPSMVPVRPGGHIKTDRRDATTLAALFRAGELTAIWVPDAAHEAMRDLVRVRQTATEGVRRARQQLLSFLLRHGRIYPTKRHWTRAHRRWLAEQRFEHPAQQIVFEELIQAVEQAIARRDRLQQQMIALVPSWSLQPVVAALQALRGVAMVAAIILVAEIGDFRRFATPRQLMAWLGLVPREHSSGGSTSRGAITKAGNGRARRLLIESAWTYRLPARIASELLARSAALPETVKAIAWKAQVRLCARYRRLRCTGKPTNVVTVAIARELAAFAWAIAITVMPAPQTA

SEQ ID NO: 230291 - protein, 349 aa, unidentified
MGEVITIGVDIAKLVFQIHGVDADGAVVIRRRVGRARVLEFFADLPPCRVGMEACATAHQWARELAKLGHDTRLMPPTYVKAYVKRGKNDAADAAAICEAVTRPSMRFVPIKSVEQQGVLMLHRARDLLIRQRTQLTNALRAHLAELGLVVAKGREGLHQLATVVTECGNERLPSDARFACQAIVTQLHAVQIEISGLDKRITQIHRANADSKRLATIPGFGVILSTAVVATMTDPKAFRTGREFAAWIGLVPRQNSTGGKERLGSITKQGDRYLRRLLVVGATSVINSARARPYKYPWVIELLGRRPTKVVARALANKMARIAWAVLAKGERYRAPTRSSNAVVPAAA

SEQ ID NO: 230292 - protein, 420 aa, unidentified
MNDIIAGIDVHKRVLMVVVGTVCGAAADDGSEPREPIRFVQRRFGTTTSELLHLLAWLQQHGAQEVVMESTAQYWKPVWLALERHFRLRLAQAWSNRAPRGKKTDFKDAQRLVRRHAAGELTLSFVPDAEQRQMRSVTRRRTQLTRDRVRIQNQLESLLEETRIKLSSVVTDLLGSSGLRILAALGQGETDPAKLAAMGDARLQCGSEELADALTGSVSEIHRRLLQQHLAHLALIDAQMEELSLLAADAMRQHSDAVIRLVRVPGIRVLAAQQIVAEAGPQASAFPSAAQFSSWIGVCPGREESAGENHSSHCAKGNTYMRRVLCQAAQAAVRTKNSYFQQKFQRLIPKLGYAKAIWAMARHISVVIWKILHDGAQYEERGLPTTPQAAKRRIQRLTKQLRALGYSIELKPLSPKAILA

SEQ ID NO: 230293 - protein, 331 aa, unidentified
MKSADITPSAYLGIDVAKEKVDCMLLVDSHSGYQVFAHTPAGFEHLSDWLRREQVSCVHACLEATGCYSDALALYLVEQGHTVSVLNPAVLVTYRQSRNTRSKTDKLDAMLLAHYARERQPRAWHPLPAEVVALRSLLAYRSDIQQTLLQARNRQRSGGLESWVADRLQTQIEQLVKEFKLVAERIWKHLETSTNLSATWFHLQTICGIGQLAAAHIIAQIGEIERFAHPGALVSLAGLAVKQRESGRSLRGRAQMDRHGRGSLRQLLYMCALVAMRWDPHMRAWAQRLKARGKPTKVVLVAVMRKLLHIIYGVWKHASDYDAQLAFPTAA

SEQ ID NO: 230294 - protein, 362 aa, unidentified
MRIIGCDLHARQQTLAMVDTTTGEVVKMTLTHEGNNVQEFYSKLPRPVRVGIEATGSMQWFVNLMEELGIECLVGHPAEIRAAEPRKQKHDRRDADLILKLLMEDRFPAIWLPSKELLDLRALLRHRHQWVRLRTRIQNALQSIALANGLRRGPSLWSQVGQHAIASLSLRPHTAYRRSELQALYAKFEAEIEKLNQRVEEQACQRPGARLLMTHPGVGPVTALATEVFLGDPARFADSKALASYVGMIPREYSSGERQRLGGLSKQGNPLLRFLWGEAGAHAVRRDPELQRFYRRKLVQKGLGKASVAVARKLGIRLWIMLRDQIEYNEFCRRGQKQQKSSDAYVGMPETRYGAKSHRPVD

SEQ ID NO: 230295 - protein, 341 aa, unidentified
MEQATTIGLDIGKHVFQLHGADAAGHVLFRKRITRVKLLGFLAAQTRCVVAMEACAGAHYWAREIAKLGHHVRLIAPAYVKPFIKRQKNDAADAEAICEAAQRPSMRFVPVKTEEQQANGIVFRARDLLVRQRTQCVNALRGHLMEYGYVFPKGITHVETLVALVEDLQSSLPDSVRVILKLLVDTFTALEAQIAVLDAEINQRSKSDPTARRLMTIPGVGPIASTAITALVPAAEGFPAGRDFAAWLGLTPLQKSTGGKQKLGAVSKRGERTIRRLLIIGASAVVQQASRRGAPTGSWLAQMLARKPKMLVTVALANKMARVIWALLVKGGTYRAPAVAA

SEQ ID NO: 230296 - protein, 407 aa, unidentified
MDVQHPKCAGLDVHQHTVVACARLVAGSTVRHERRTFGTTTADLLALSDWLTAHDCTHVAMESTGVYWKPIWQVLEGQFTLVLANAMHIRNIPGRKSDVNDATWIADLLAHGLIRGSFVPPAPVQELRDLTRTRKQLVREITQHTLRIQKTLETANLKLTGLLSNILGMSGRAILHALVAGETDPERLADLVHGRLKASRADLVAALHGRLTAHHRFLLQLHLTQVDALEQAVHAVEERLGHALVPFRTALDRLITMPGVSETVARVLVAEIGFDMTRFPTAGHLVSWAGLCPRLDESAGKRLSTRTRPSNPWLKTTLVQAAWAAARTKDTYLRAQFLRLKSRRGPKKAILAVASSMLTAAYHMLKHDLDYRDLGADHFDRRDKTKLANRLIQRLQELGLSVEVRAA

SEQ ID NO: 230297 - protein, 388 aa, unidentified
MPAAETPVAYLGIDVGKSSHSACALDAGGGVAFRAELANRPDDIDRLLERAGSGALVVVDQKRNIGALVLARAHAHGNPCAYLPGYAEKQARGMFPGIAKTDAIDAEVIARTALGVPRALRPAPEEPEGTASLRILSSQREFASSARTRAKNRLRATPLEADPALEGAVDPSSRWQVSMLAEFGGAAGCSAAGWRRFSNAARRAGAPAAGARRLWEALLASSRSGRRLPAGEDVAVRILAREIASLDADIEELDSLVADSLAGDEVYECLLTVPGIGPKTAAALVTSIDISAFRGHDELASYCGVAPSDRRSGSSIRSTSPQHGGNRRLKNLLIFSCNSLIGTDNRFGRYYGECRARGMRHSKALKAVARKRLKVIYAIMRDAVPYAA

SEQ ID NO: 230298 - protein, 331 aa, unidentified
MGNVSNECKGLPRPESGIATAVPRSTVDANWLQQRGAQMKDVTTVRIDLAKNVFSVHGVDARGSMVIRKAISRARLLPEIAQLPPCIIGLEACSGAHEWARRFRQLGHDARIMASKFVAAYRKGGKNDGNDAEAICEAVSRPSMRFVPVKTVEQQATLTLHRVRQGFIEERTATINRLRGLLAEFGIVLLQRAIEVRRGAGKHLDLLPATAARATRDLLEHVQALEARIVEYERELETHAHHDDRARRIQALHGVGPVSASAVVATVSDAREFASGRQFAAWLGLVPRQYSTAGLSSSARQSPWAASILGAVSRPREPHFWCEWPDARFQA

SEQ ID NO: 230299 - protein, 331 aa, unidentified
MKQIYGIDLSKEKFDVCFLNEKKELIYLEIKNKYSPICKFLSKLKQNSILCIEHTGVYGYLLMFLANSFNVQICAIPGYEIKHSLGLQKGKSDSIDASRIREYGERFYDKLQKTTFYSEEMNELKELHSLRKLLVKQHKMLETSMKEKDKQPFCSLMVNKIAETTLETLNKQIEEIENQIQEIITSNEEFKANSCLIQSIKGIGPVTTNELIIKTHNFQKIQTAKKGASFAGICPFPDKSGKMVKKSKVSKMSDKSLKTLLFLCASNAIQHNKDMKHYYEKKLAEGKPKYLALNNVANKLIKTVYAILESRQMYDPFYICPDPRKTDKKVA

SEQ ID NO: 230300 - protein, 387 aa, unidentified
MLATLNDDFTSEKVILAVSLELSNKSWKLGLSDGRRDKPSVITVSDEQAQARLLAVVKVIEETRMKWQLPNDVKVVVMHEAGQDGFWICRALSEMGYPCLVIDPASIPVGRQARRAKTDRLDAIMLVNSLRAWLRGERDRMRVLHVPDELAEEERQLVRDRGVLQKEIGQHHDRMRKLLRTVGCWDEVEHHLAQRLQAGEIRCHDGRALPKELLARLLRECERLAQVEEQFKALTKTQVAQLSEAVQEKVATFAKLKAIGDIGAIRITTELFWRRFDNQKQVGSCVGLVPQPYDSGDTRIDQGISKQGNRRVRSLLIEMAWMWLRYQPESKISLWFAQKTHSQTPNKRGRRVAIVAVARRLAIALWRYIEYGVIPEGAQFKEVKSGG

SEQ ID NO: 230301 - protein, 362 aa, unidentified
MQRSRPFWSHVILELITTKDMNNIYIGMDLHKSTSSFCVMDKEGLILREQRIPTTVSEVTKFINSLGKKQSISVALEPVSQWYLYADLLEELGTDVHLANPRRLKAIATSSSKTDKIDAKVIADHLRTNHLPEAYHAPKEVRGWKELVRSRSALVKLRTETKNRIHAVLFKNGLESPVASLFTSRGIIWLKSLEMESHFKLSIEKYLSVIEYLTKEIKDMEKVVREKVSETKEMKLIKSIPGIGDILSATIMAEIGDIKRFKSPKQLQAYAGIVPWVHNSGDKQHNGRITKIGSAWLRYAVIESVVGMARTRRSSDLKDYFLKVKERRNYQTATVATARKLLAIIWSVLRNDREFIARYPAI

SEQ ID NO: 230302 - protein, 410 aa, unidentified
MKHSKSKIKANTVRVDERNIVGIDIGKRRHAATAVSPKGVTITKLKSFENNRNGVDQLERHVLVPATALHKPMIAMEATGQYWNALHDELQRRGYSCVVLNPIQTNSRARNQIRKTKTDLVDSGLIARTILSGDARWTIVPDESMFELRLLVRHRRRLIRTHGMILRYAISLLDRIFPEFEGIFSKPFLSSIRQLIREVGITPCSLIGNRKMVQTVLERASRKRFSQEKIDLLLSRAKESIGTQQGNNTVNHQFRMIVDYLDFVEKQIKEVNLELRKRMEETPCPITSLGIGPELAATILAESGDVTMFAGPEKYSAFCGLDPSEYKSGDSIKGRTPISKRGSPLLRWAMYTSAVTVCKKHHDFNRIFERHAHKGYRYAMIAVAHKLARVIWRLMKDNRKFTKRPPKRTI

SEQ ID NO: 230303 - protein, 350 aa, unidentified
MRFAEGFKFVIGVDTHKRTHAIAVVDDRGGVQMQATDTTDPAGIARLIDIAHAHAPGLRLWAIEQTGSYGASLAVELARRGELVVEIDRPSRPARRNGAKDDGLDAIRAAREALGREHLARPRARGAREALRVLVATRRAAMLARIAAICQLKALVVSAPDELRESLRGLPTRELIRTCARLHRMSAHDDERRGTVLALRATARRIEYLTLEQAEVECELERLVRQERPELLELVGVGVQVAAQVLVSWSHPGRIRSEAAFAAMAGVAPMPASSGEITRHRLSRSGDRQLNRAIHNIVLTRMRVDPQTQAYVARRQAEGRSAREIKRCLKRTVARQLFRFLEGNSQSTAA

SEQ ID NO: 230304 - protein, 413 aa, unidentified
MIPIEKLFVGIDVAKSSLVAHAMDNNGDDVFHSFKIENNNPGCLKLIDFIAKHANDYKIDIIKIGMEATNVYWEHCYQLIQNSDKLNTNFKLVLYTINPKVVKNFKEAYNKLPKTDSIDAWVIADRLRFGRVKNSSTPEEVYRPIRQITRFRFKMSKTMRAEKNRALTLVFLKFSDYDDSSPFGTFSDASMALLEKFTLEEIVNTDIKELAKFLFKNSNNRLGGSTSIDVIIKTLKKAARNSYRLKPRMDQAISQTLAMTFDNIRFFDRQLKRAQKVITRELKTIPQTLDTVDGIGPILTAGIISEIGDIDRFDNQASLASYAGLTWTRHQSGSFEAEETSLTKKGNKYLRYYLVEAANSLRVHNEEYKQYYYKKYNESNKHKHKRALVLTARKFVRLVFALLSKGEIYQPGR

SEQ ID NO: 230305 - protein, 320 aa, unidentified
MMAQNDQIVVGIDVAKDKVDACIRSLSLRQTFPSTAQGHRKLVAWLRKHKVNKAAMEASGGYERDWAKVLRQAGIEVRIVDPKRVRSFALSAGRLAKNDAIDAEMIAWFAETFDEAPSQTHDAAHQELAALVKARKGLIGLKTRLQSQDEHVAPGPVQKAHARVLKSLAAEIAKLEAAISAKVKATPEFAERAEIIESVPGFAETTSATLIAGMPELGKVSKEIAAALLGAAPYDDDSGKRRGERHIKGGRRWVRNAIYMPCLGAATQNNPVLKAFYQRLIAKGKEPKVALVACMRKLIVILNTLIARRQKWDPSRYALS

SEQ ID NO: 230306 - protein, 320 aa, unidentified
MTILTSPTVIGVDVAKAEIVAYREDLEITQVINNDRTSVGRWLKTLPAQSSIALEATNLYHLDTAELAHGMGHRVYVVDPYRVSHYRESIGQRAKTDPCDARLLARYLTSEQHRLRVWSPPPRHYTVLKSLLNKRAQLMKARVSIMLSWSNEPLLEDLLAHGLEHFKQLDQAIQELLRKVSQEAGISENIRRCKAIEGIGELTATGLATTYMRGEFASADAFIAFLGMDLKAKDSGKKHSPRHLSKKGDGELRRLAHNAAMAACRSPVWKPFYESYLARGLARTQALVILARKLCRVAFALMKNQSEYQPNLRLQGSPAT

SEQ ID NO: 230307 - protein, 419 aa, unidentified
MSFKIIKNNCCGLDVHKTWIFACIGITDSNNRTEYKQARFSSFTKGLNELCDWLAKYNCKDVCMESTGKYWIPVFNILEQHSFWVTLSHPKYTKPMKGNKTDRKDAKWICDLYMCGMVKPSFIPSADIRELRDLVRYRYKLTCMITGEKNRAQNCLTVSNLKLDEVFSDVFGKSSRSITEQILQHPGEAFDVAHFVHGRCKTPIEEIQAAVDGAISKEQAVKLRQCLDHIDELNKHISEIEQEILRLSDKYETALNLIRTVPGFDKNPLTAVQVLSEIGGDMSVFPTAKHLVSWAGCCPRNDQSNQKIKSTRISRAGSYFKPILVQVANALIKSKKHPEFTTRYKRIKARRGHKKAIIAICRMILTAIWHILSDLEPYTPEGFLESRPVKEEKVLSTSQALNLLKQRGYIIKDEPLAVS

SEQ ID NO: 230308 - protein, 387 aa, unidentified
MPASGPRPDLVAVQVNLAAIFVSLELSRSTWLITSLVPGGADKMSKHSVRGGDVAELMAHLAKLRDKTHARAGASFPIIAIQEAGLDGFWVHRVLERAGIESHVVDAASILTSRRRRRAKTDRIDGEALLRTLLAYKRGEPRVCTIVRAPSPEEEDRRRLCRERKTLVAERVAHVNRIKGLLFAQGIADYEPLHGDRRQRLEALRTGDGRPLPPYLKAQIGRELDRLELLLEQLKAVEAERNAMLEPANDAAPVAVKGLAGLRGIGPEFTAMLWSECLFRSFRNRRQVAAYAGLAPTPWQSGSVQHEQGVSKSGNPRLRSTMIQLAWLWLRHQPTSELSLWFRERVKRNGGRGKKTAIVALARKLLVALWKFSSSGVVIEGAILKAV

SEQ ID NO: 230309 - protein, 374 aa, unidentified
MFERTSVGLDVHARTVVSCALDAQTGEIILHRMTPDHGEILAWILSLPSPVRVVYEAGPTGFGLARFLLASGIDTVVAAPSKLQRPSGDRVKTDAKDALHLARLLKLGEVTGVRIPSTDQEAARDLVRSREDVRGDLMRSRHRISKLLLRQGLVYSGGQAWTGTHELWLAGQRFDNPARQLTYESSLEAMHEISDRRDRLDQAITAMAYSSEYTPVVRALQCLRGISTLTAFGLAVEIGDWDRFTGSTIGAYLGLVPTEHSSGASRSLGSITKTGNSHARRLLVEAAWHHRRPYNNPSRLMRSRWEEATSEARIRGHAGNRRLHERWISYLERRKRPVIANVAIARELSGWCWSLAAGTHPMPATSPESSASPH

SEQ ID NO: 230310 - protein, 443 aa, unidentified
MQEKEKRSVKQILEELKAEIRSSQNTLIIAVDVGKIRHCACFVSSSGKVLRGRFFFTNTIDGFNNLMRQTKFYQNKEKLPHALFGMEPSGYYWIHLYEDLVIREKTVVTVSPLAVNRNRETINVSKDKSDPKDAYNIADLMKQGKFYLPIYRDKEIRELKRFSNIYYRLIGQRASLRCRLRGAVGYIFPELEHYFKDILAKSTMIILKDCPFPSQIKKMRRSRFASLLARENPTLSRKRVAEIYELANQSVGITGEEKATLFEIKLLLDELEALQKNIAEVNARVHNIVRDRDDYHLLITIPGVGPITASSIIAEIGNITNFSSGKQLVKLAGLDLYGSESGISIHSLRHITKRGRKTLRTVLYQAAVSCIRCNAHLKACYLKLLANQPNKKKVKPKALVAIACKLLRMVYRMLTERRPFDSTYDQKLREKASLKMVKSSLLV

SEQ ID NO: 230311 - protein, 332 aa, unidentified
MSMHPQGGVASRDHRPNAGIDVAKQHLDACWAGVELRVANDASGWDELTAKLKAAEVDLVLVEATGGYERGLVCALQGGGITVARVNPRQARDFAKSMGVLAKTDRVDARLLRDFADVVSRHKDRAHYITPLIEVERLELAALTTRRRQLVEMRVAEANRLEQANKLTYRSIKRVIAMLDKQIAQIDKDADDHLDRHFKSQRKLLDSVKGVGPVTILTLIAQLPELGLLNRRQISKLVGLAPLANDSGQRKGPRRIWGGRAPVRAVLYMATLSAIRHNPVIRQFHSRLIAAGKAKKVAIVACMRKLLVILNAMLRDQAQWSAVKQLQMTETG

SEQ ID NO: 230312 - protein, 370 aa, unidentified
MQTVRSFVGMDVHKETISISVAEDGRNGPVRFIGVIPNQPDDIAKMAKRLAKHGELDFCYEAGGCGYNIYRQLTALGHSCTVAATSLIPRKPGERIKTDRRDSQKLAILHRSGDLTRVWVPDATHEALRDLVRARVDASMHLMRARQQLLAFLLRHGRSYPTGKHWTQRHRSWLAGQTFQQEVHRIVFQDYVETVWTAQERRDALIERIGAMTASWSLGPLVEALRGLRGIDLLSAATFICTTGDLSRFESPRMLMGYLGLVPSEHSSGGSVRRGGITKTGNREARRMLIEAAWSYRYPARVAKEKAEILVRLPKNIRDIAWKAQTRLCARYRTMIARGKKPTVVVTALARELAGFIWAIGQEMRTPMTT

SEQ ID NO: 230313 - protein, 334 aa, unidentified
MIDVDLIYVGIDVSKANLDVCVGVMGSVSRLNNDEAGRDALCRMLKPLKVGLVVLEATGGYEFACAAALQSAGVPVAIINPRQARDFARAMGRLAKTDRIDAQGLAHLAQVWSARPDAAHLVKRLPDAQQQRLAALVSRRRQLVQMRTMEGNHLGVAHRSAHKSIKAVIKSLETQIRRIEADLAAHLKLHHADVSKLLSNVKGIGAATVAILMAELPELGTLTGRQVSALAGVAPYNHDSGRLKGKRCISGGRATLRTALYMATLAATRFNPLIRTFYQRLLAAGKPKKVALVACMRKLLTILNAIVKSGSPWNENLHTQEAKNAWLLRQLLIR

SEQ ID NO: 230314 - protein, 347 aa, unidentified
MNFYNSSHPYYCGIDLHARLLYVCIIDLQGEILVHTKIKADKSQLLALLEPYIGNIVVGVECMHCWYWVCDWCQQQGINFVLGHALYMKAIHGGKAKNDKIDSFKIAALLRGGNFPLAYAYPHEMRATRDLLRRRTKIVRHGAMLKGHVVNTNSQYNLPATELNLKNISARQQLRSQFKDPIVQRNIDLDMALLDCYAKELAQVEWFIEQKAKQHNAVFYELLKTVSGIGRILASTILYEIGDIKRFETVQNFASYARLVKCKAESAGKTYGTQGNKIGNAHLKWAFSEAAVLYLRGNDKARNYINKLQKRMSKAKALSALAHKLGRCVFFMLKNKKVFDEERFLKG

SEQ ID NO: 230315 - protein, 322 aa, unidentified
MSVLVLGIDIAKQKFDAALLVDGKTKHKTCKNSTEGFETLTLWLEKQGIRKVHACLEATGNYGEDLAIYLHEAGHIVSIVNPARIKGFGQSELIRTKTDKIDAALIARFCLAMKPGAWIPPSPEIRSLRALVRRVDSLIDMRSQEKNRISTAHESVIFLIKEHIAYLDQEIEKIRRQIADLIGQDPNLKRKNDLLDSIPGIGKATIPHILAELDGLEKFNHVRELVAFIGLAPKETLSGSSIKGKPRLCKIGHARLRKALYMPALVSIQCNPVMIAFYNRLKDKGKNGKVIVCAIMRKLVHVIFGVLKSGKKYDPNYKPIFA

SEQ ID NO: 230316 - protein, 434 aa, unidentified
MPIAGLDIHKKVVQAVLLDEQGGVAHSERFPATREALEDFARRRLTGGHRVALEATFNTWAIAAVLEPFVQEVVVSNPLRTRAIAEAKIKTDRVDARVLAELLRADYLPRVWQPDQETRQMRHETTERANLVADRTRVKNRIHAVLHQRLLQSPVGNLFSPRGRAWLRGLELDDSGRAALDRHLRQLEHAERELQALEKTLAQKAYQQDEVKLLLTLPGVDVAVAQTLLAALGDVRRFPSGERAAAYLGLVPSTRQSAEHCYHGPITKQGRGHARWLLVEAAQHLGKHPGPLGVFFRRIAKKKNRNVAVVAAARKLVVIAWQMLKNGEPYRYAVPKTVQAKLARLRIKAGGRRKKGGIAKGAPRPENYGKGGTRAVPALKDVYAAEQLPPPAALARGERDMLERCGVTPFVRSLQQSRRVPRRPQSKHNGESGA

SEQ ID NO: 230317 - protein, 316 aa, unidentified
MLIGIDVAKAELVIAARPSGERWTVANDERGVRTLLDRLTHERPELIVLEATGGYELLVVAALAAAALPVVVVNPRQVRDFARATGQLAKTDRIDAAILALFADRVRPVVRPIADEAAHELEALLARRRQLLEMLQAEKNRQGQVFGRSQRLVKKSLKAHITYLERELRIADTDLGAMVRESPAWRERDDLLQSVPGVGPVLSLTLLADLPELGRLTRREIAKLVGVAPLNRDSGTFRGRRFVQGGRATVRAVLYMAALVATRRNAVIRAFYQRLIAVGKPKKLALVACMRKLLTMLNVIVRTHTPWRAPESIVSA

SEQ ID NO: 230318 - protein, 344 aa, unidentified
MQITTIGLDLAKNVFQVHGVDATGQVVVRKSLRRAQMLPFFAKLPPCLVGIEACGTSHHWARELIKLGHEVRLMPPAYVKPYVKRGKTDAADAEAVCEAVTRPTMRFVPVKSPEQQAALSMHRTRDLLVKQRTQLINMIRGLLAEFGVDIPKGLERALLMARQIVDGKAPDVPLEAAKIVGTLSQQALDTHVRLREIDRDLAVWLRGNDVARRLTTIPGIGPVGATALAASVTDPHQFRSGRQFAAWLGLTPLQKSSGGKERLGRITKMGDKYLRKLLIVGMTSLVRRAKQNPGKIDPRLADLLARKPARVATVAMANKTARVIWAIMARGETYRTGHQPALAA

SEQ ID NO: 230319 - protein, 347 aa, unidentified
MVTLGADAHKRSHSLVAVDDIGRKLGAHTVAATSTGHLEALRWARRWRPRRWAVEDCRHVTRSLEKDLLRAGEVVVRVPPHVAAEGRRSLRERGKSDPIDALAVARTALREGDMPEAHLDDHCREVKLLLDHREDLVGERTRIQNRLQWLLHELEPEFQVASGALSRRPAIKRVEALLEGRHGVVAELARELTVRTAELSSRIDELEQQLAAMMPALAPSLLALPGCGVLTAAKLLGETAGVRRFRSRAAFAMHNGTAPIPASSGKQQRHRLNRGGNRQLNAALHRIAVSQIRRAGRSHDYFQRRLAAGNTKREAYRALRRRLSDEVFRLMLTDQQTDASGVQAPAA

SEQ ID NO: 230320 - protein, 340 aa, unidentified
MRIIGCDLHAAQQTIAMLDGDTGEVVERTLTHEGEAVRAFYASIPGPAVVGIEATGSMGWFLRLLEELGIPCRVGHPAAVRKAETRRQKHDRRDADLLLRLLVEDRFPAIWLPSTEQRDLRALLLHRHQWVRMRTRVQQALQAIAMSHGLRRGPTLWSRDGQAALAALPLPPHAAHRRSELVALYQHLAAQVDHLDARVEEAVLPRSAATRLMTHPGVGPVTALATEVFLGDPDRFADVKALASYVGMIPSAYSSGSRQRLGALSKQGNPLLRFLWGEAAMHAVRRDTELQRFYRRKLAQKGLGKARIAAARKLGIRLWIMLRDQIGYEEFCCRSPRRPS

SEQ ID NO: 230321 - protein, 426 aa, unidentified
MKSTQNEKISQIKISTLVVGIDVAKETHYARAFDYRGIELSKLLKFSNTAEGFQRLEEWMQNISQQHNKTEIIVGFEPTGHYWFNLGDYLKDQGHKLAMVNPFHVKRTKELDDNSPTKNDRKDPKTIAMLVKDGRYREVYIPEDVYQELREAVSERDRLVQRMSSISNQVTRWLDIHFPEFNTIFKDWRRKAALQVLKNFPTPEKIIAAGAVKIERTWKESMKRTAGLKRAQELVKAAEASIGRKTGLTAAEASLQNLLNEHDLYSQQYQQLEQLMLELLQQVPNAEKMLEIKGVGLVTAATFVGEVGDIRRFQDPRQIQKLAGLNLVENSSGKHKGKTRISRRGRRRLRHGLFMAMITILATNSEFRQLHQKNITRENNPLNKMQSIIALCGKLIRVFYALLRTGTDYSADKMLGDIELGMKAAA

SEQ ID NO: 230322 - protein, 338 aa, unidentified
MVRYIHVVGIDLSKLTFDAAVIVNEQPDNIRHKQFRKTQEGLLQFQDWLQQSGVILNEQTLICMEFTGLYNRMVLNFLEQSSVIVWVEMAAHIKHSLGLQRDKSDKLDAKRIALFAWRNQDEAHVWNTLNNDAQKIKDMLAQRERLVDTKIRLLVPLEEMKREGLSGEAKQLEAYQKPVITQLDNSINKIEKAIKNIINSNEKLKSKAALVQSVKGVGFVICWYLIACTNGFEHLKNGKSLACYCGVVPFQNSSGTSIKSKPRVSHIANKKLKSLLHMGALSAIQHDPELKAYNERKIKTGKNKMCVLNAVKNKLILRIAAVLRDNKEFEENHVYKAA

SEQ ID NO: 230323 - protein, 340 aa, unidentified
MTAYVCGIDLGKTVFHLVGLSKEGHITVKKRCSRKQLLTYAANMPTCLIGMEACPGAHFLARALVAQGHTVKLMPAEYVRPFVKSNKNDYVDAEAIAEAVQRPTMRFVPIKNEAQLDLQALHRVRDRWIGRRTAVINQLRGFLLEHGITVATGPAHLSKQIPSILEDADNLLSPRMRTLMMELRSEWKKLEEQIDAINRELAESAKNEDSCRRLLTIPGIGPLTATALTAAIGNATAFRKSRDLAAWLGLVPRQHSTGGKARLLGISKRGDPYLRRLFIHGARSVLARVKRDKHSFGEWLNKLETRAPQNVAVVAMANKLARIAWAVLTSGKVYSSAVVS

SEQ ID NO: 230324 - protein, 436 aa, unidentified
MSEKKQKDETEFAALVGIDWADQKHAWALQVSGDINVERGELDHKPEAVDDWAAELSRRFADRPIAVALEQARGPLLFMLTKYVHLVIFPVHPATIANYRRGFRPSGAKSDPTDADLLLDLLAHHRDTLRRLDPDTAETRALQFLVEGRRKFVDDKTRYSNRLTAHLKMYFPQVLDWFSVVSSALVCDFLQRWPTLEKLQRARPETLRKFFLGHHIGTSELDRRLKQIRQAVPATQDEAVIRSSSTYALALVRILREVRMAIVGYDEQIDRLARQHPDFAIMDSLPGAGAALVPRLIAAMGTQRDRYQNATELQSYSGIAPVLASSGKQHWVHWRWSCPKFLRQTFHEWATHSIRSSAWAKDYYDRQRGKGKPHHVVIRALAFKWIRILFRCWKDRKPYNDDLFRHTLARRRSFAGPVQLQWKTCAGFSKIDAITP

SEQ ID NO: 230325 - protein, 364 aa, unidentified
MKKHSSKQGSLSPTDVELCTTICVDLAKQVFQLAGEDATGRVIYEDRLKSRQAFHDFLLKLPATVTVLMECGPGAQAWARLLQAKGNAVRILPAQRVAEHRSGAKNDRNDAHAILRAGRDTSIASIPIKSTTALAIQALHRIRRGNIKRHTALGNQMRGLLLEHGVSMPQGDAAISKHVPRALEDASLPLPDLLRELLDELLTDWESLAERISKLSKRLEATAQEDKVAQRLITIRGVGPIIATAIVAKETKPSRFANGRMYSAFFGIVPDQHSSGNKVRLGKMSKRGDGYIRSLMIQGAHAVLSQLRPDSDQPDDRRLLRWLSRLGRKEAAIRLANRNLRIIWALLQNDQVYQRKTDSKSEAA

SEQ ID NO: 230326 - protein, 386 aa, unidentified
MQNDHRPDQSAIRTDLGALFVSLELSRSTWLITSLSPGVGEKLSKHSIPAGDAGALLARLTLLRQKATARTGRAFPIIVIQEAGLDGFWIHRVLETEGVESHVVDAASILTSRRRRQAKTDRIDGETLVRTLLAYKRGEPRVCSMVRVPTPNQEDRRRICRERKALLTERIGHTNRIKGLLCTQGVFNYNPLLRDRRARLEVLQTGDGRPLPERMKAQISRELDRIELIIAQLKAVEVDRDLLLEQEEATPTVPAVMLGRLKGIGPQIATLLWSEALYRHFDNRRQVAAYAGLAPTPWKSGSIDHEQGVSKAGNPRLRTTMIQVAWLWTRHQPGSALTLWFKDRVERNGGRMRKTAIVALARKLLVAFWKYVTSGVVIEGAVMQAA

SEQ ID NO: 230327 - protein, 343 aa, unidentified
MDIIATIGLDLAKSVFQIHGIDSSGDVIVRRALRRSQLLDFFRKLTPCLVGMEACASAHFWARHIRACGHDVRIIPPIYVKAYVKRSKTDAADAEAICEAVTRPTMRFVPIKTPEQQAAGMVLKTRDLLVRQRSQTANAFRAHMSELGVVAAAGMASLAKLAEAIRDPEYRDIPEVARQALLEMVEQIDTLSVRIERLDRDILTCVKEDETARRLTTIPGVGPIIAATVRAAVHDAHGFRTGRDFAAWTGLSPRAHSSGGKERLGSISKRGNRQLRTLLIVGATSIIKLGKRGVKLPQWLTGLILRKPYKLVAVALANKMARIIWALLTKGGVYKKSPVAIAA

SEQ ID NO: 230328 - protein, 428 aa, unidentified
MHSKKVTPMKPWNQITHYAGFDWARDHHLLVILDQQGQIVADFQFEHSVEGWKSFRDKTAAFSNLAVAIETSQGAAVDQLLQYGYTVYPVNPAAAASYRQRKAPSGTKTDHLDGWSLADALRVDGHGWKALQPLDELSCELRLLCRDEVALIEQRTLLVNQLQQALVEYYPAALEAFEDWVNPSTWEFVLQFPTPEALVKAGKRRWEKFLHTHRLWRSETVEKRLAIFSQADQFKASAPITKAKSQLALSLCKLLRALQQQLDQYRQQIEALFTRHPDHDLFGSLPGAKTVLAPRLLAAIGTDPSRYTTFQVLQCFAGTAPVSFESGQIHKAKVRWACDKFLRHTVHLWADCFRRASAWGQTYYRKKRQDGMSHACAIRCLGQRLLKIVFRMISDKKPYDAELHARNQQKHGSWVLALVEKTAAQTGE

SEQ ID NO: 230329 - protein, 361 aa, unidentified
MTTIAEDDRRVIAGVDTHKDFHVVVVLDEQGRKLDTATFPATPRGYRELTRWVTDFGEVLALGVEGTSSWGAGLSRHLRTRGLNVIEVNQPDRHRRRRKGKSDRLDAEWAARAVLAGDATARPKAGDGPVEALRQIRVARTGAMKARTAAANQLHSVCDTAPDAIRAQLRGLSTRRQVTIASRYRPGDVLTPTGAVKRALVAIARRWSALDAEIRELDRAIKTILETIAAPLLARPGLGYETVGALLCTAGDNPDRLGSEASFAALCGTSPVPIATGKSNRKRLNRAGDRNANSALWTVVMVRLRHRHPPTMIYLERRIAEGHSKRDTIRCLKRFIAREVFADIQSITTAHPARQALEIAA

SEQ ID NO: 230330 - protein, 329 aa, unidentified
MEVVYECCCGLDIHKASITACVVAGGKKEIRTFGTMTDELLRMVAFMKERGVQMTAMESTGSFWKPIFNILEVEGVSAILVNAAHAKAVPGRKTDVKDAEWLADLLRHGLLKASFVKPRDQRELCELIRYRGSLIEERAREYNRMGKVLEGANIKLTSVASSLKTASGTDMIRALSEGVAEPELLASMAKGRMRAKTDELKRALDGLVKPHQRMMLKAMLGHIEQLSALIAELDAEIEGRMAQDVELVEAFDEITGVGKTSAQTIIAEIGTDMSMFPSANHLASWACMSPGNNESAGKKKSGKTVKSNSTLKKRWSNAGGRRRIAKTLT

SEQ ID NO: 230331 - protein, 330 aa, unidentified
MENVLHFLGADLSKKSIDLVCHQIKSHLKIENEITGFKQMLKWIHQLKIDPSKMVLVMEHTGLYSFCFEEFLHRQGIVFCKVNSLEIKRSMGLIRGKADKIDAARIAEYGYTKRDKLIPERGVSKVLQRLKMLNTSRELLVRQRTGLKCGIKEFQNIGIPEKDLVLQSQIQVIKALDKQIGKLEIEIKRLIEQEETLTKNFNLLNSIIGVGPVVAVAAIIKTQNFSRFENARKFACYCGTAPFEHTSGTSIRGKTRVSHLADKRMKSLLDLAAKSAINSDKELMAFYRRRLELGKGKTSTINIIRNKIIYRMFAVIKRQTPFVRDYLKAA

SEQ ID NO: 230332 - protein, 344 aa, unidentified
MEIITIGLDLAKSVFQVHGVDAAGQVVVRKSLRRAQMLPFFARLPSCLVGMEACGTSHYWARELIKLGHQVRLMPPAYVKPYVKRGKTDAADAEAVCEAVARPTMRFVPVKSAEQQAALSMHRTRDLLVKQRTQLVNMIRGLLAEFGIDIPKGLERALAMARRIVDGEAPGVPMEAAKMVSTLSQQALDIHIRLREIDRDLLVWQRGNDVSRRLMTIPGIGPVGATALAASITDPHQFRSGRQFAAWLGLTPLQKSSGGKERLGRISKMGDKYLRKLLIVGMTSLVRRARYNPKTVDPRLADLLARKPVRVATVAMANKTARIVWAIMARGETYRAGHRPALTT

SEQ ID NO: 230333 - protein, 316 aa, unidentified
MNKVTETIVGIDISKNKLDIQIQEDGQYYTCGNDIIDIGKLVEKLSKIQPVLIVLEATGGYEKGLVSALIEAKLPVAMVTPSWVRYFVRSTGKLAKTDKIDAKMLVQYGRANHPPVMIVRSELQERLSVLMARRSQVSLALISEKNHLSTISYPDVKVLIEASIENLEQQIMQLEEMIAEIIDQSPELKKNEKIICSVPGAGKITAAILLADLPELGTLDHKKIAALVGVAPYNRDSGYYRGKRRIKGGRQSIRKVLYMAAMTAMRWNPVIKEFYERLLARGKVKNVAIVACMHKLLTFINAMVRAQTFWKPVFSS

SEQ ID NO: 230334 - protein, 338 aa, unidentified
MKTYAGIDLHSSNNYIGVIDAKDKRLYSKRHDNRIEDVLKVLGKFKASLQGIVIESTYNWYWLVDGLMDQGYTVHLANPNAIRTYNGLKHTDDKWDSFWLAHMLRLGILPEGYIYPKHQRPIRDLLRRRLMFVRQRTSQILSLQSMITRNRGLNFSGAQIKRFRDEFIDKLFSDRHLVFTAKKNIATIRFLDQIVSEIEIEVGSQIKLKKEFISLLTTPGIGNILGLTIMLEVGNIGRFPKAGNYSSYSRCVESKKTSNGKKKGENNKKNGNRYLAWAYVEAANHAIRYCPKAQKFFQRKMAKSERVLATKALANKLTKATYYIMRDQVAFDEDMLFG

SEQ ID NO: 230335 - protein, 391 aa, unidentified
MIFIGIDVAKDKHDCFVISSDGEVLFDVFTISNTLYGFNDLLAKIKSVSSDLSKVKVGFEATGHYSYNLLGFLLDNGLPTYVLNPLHTNIYRKSLSLRKTKTDKVDARTITSMLMSCVDLKPYTRALYHNEELKSLTRYRFDKVSERAKLKSSVSRLVTILFPELEKLVPTLHMVSVYALLSEFPSAKHIANASLTRLTNLLYTVSKGHYDKDTAIRFREAARNSIGSVMPAKSLELKHTIKLIGELDYEISEIEAEIELIVDSLGTTILTIPGIGYATAASILAEVGDFSNFETPDKILAFAGMSPSTYQSGQLTNCYAHMEKRGSKYLRFALYNATKYVCKWDSNFAAYLAKKRSEGKHYNVAISHAAKKLVRLIFALEKSRLPYVPAV

SEQ ID NO: 230336 - protein, 389 aa, unidentified
MKIYVGIDIAKLNHFAAAISSDGEIIIEPFKFTNDADGFQLLVSKLESFDKNSLIIGLESTAHYGDNLVRYLVTELYQVCVLNPIKTCQMRKNNVRKTKTDKVDTYVIAKTLMMQDNLRFISFFDLDMMDLKALGRFRQKTIKQRTRLKIQLTTYVDQVFPEIQYFFKSGLHQHAVYALLKEAPSPKEIASMHMTHLANLLKVNSHGHFTKEQAKELRVLAQKSVGANDSAISIQITQTIQQIELLDSQLEKIEAEMTDIMKFNDSVIMTIPGIGYINGGMILGEIGDIHRFSNPNKLLAFAGLDPSVYQSGNFQAKTTRMSKRGSRVLRYALVNAAWNVVRNNATFKAYYDAKRAEGRSHYNALGHCAGKLVRVIWKMLTDEVEFNLE

SEQ ID NO: 230337 - protein, 349 aa, unidentified
MLADRLDYVIGVDTHRDQHTLAVVAAATGAVVAQIVVETSARGYAEAHRFAERHAAGARIWAVEGAGHYGAGLTRFLAARDETVVEVGRQPRGERRLRGKDDALDAIRAARSGLASEAPALPRAGEHQEALRVLLLARRSAVDVRRVALVQLRSVIVTAPEQLREELRRLPLGQLLRRCSRFRRSESRPVDQHAIVLTLRSLARRIDAATTEADELEREILDHVRTLAPDLLEEPGVGPIVAAQLIVTWSHRDRVRSEACFARLAGVAPLPASSGLTTRHRLSRGGDRQLNRALHTIVLHRRQHDPATRDYIARRIAEGKTSRDATRLLKRYLARHLYRVMQNSSLAMT

SEQ ID NO: 230338 - protein, 505 aa, unidentified
MEVVYPRCAGLDVHKDMVVACVRQMQDAKINRDVRTFETTTSGLMALLVWLREMACTHVAMEATGVYWKPVWNILSDGDFEMILANAAHIKNVPGRKTDVNDATWIADLLAHGLIRASFVPDRDIQDMRSLLRTRKQLVREQTRHTQRVQKTLEEANIKLDSVITDILGLSGRTMLEAIIAGETEPTKLAALAHRRIKAPQTKLCEALRGRVTDHHRFLLRLHLDQYAALASAIEKIDQQVSASLARMDELTAANQVMASTLIGLLITIPGIGVLAARMILSEIGRDMGRFPTAGHLVSWAGLCPGNDESAGKRRSTRLRKGAPWLKSLHTHEIIAAAVAAGAEAPFVRAADLATDETGSVPVVLDALDRLPGFDLLVLLQPTSPLRTAEDIDHCLETCLERQSPSVVSIAETPKSPYLAFSTGENGRLARLLDPPEGSTRRQDLPRTHYANGAVYVVRVPWFYQNKKFITRETTGCVMPAERSIDIDTLLDFQMVLMNTENGLN

SEQ ID NO: 230339 - protein, 348 aa, unidentified
MTIVGNNPDAVVGGVDTHADVHVAAAVNHVGGVLGVEAFATTHSGYRQLVSWLRSHGELTLVGVEGTGSYGVGLSRYLARAGVPVVEVDRPNRQTRHRKGKSDPVDALAAARAALSGTATGLPKTRDGNVEAIRVLGIARRSAVDTRIETLNQLRHVIFTATPEIRRKFSGLTAISLANAAAALRPRQGDDPVRYTTLVTARALGQRVQYLREETKRLNRLLRPLIRQTAPTLLEVYGVGFDTAAKLLVAAGDNPQRIRSEAAWAHLCGVAPIPASSGKTTRHRLNRGGNRQANSALFHIVITRMRHDQATRDYVARRLAEGKTMGEIARILKRYAAREVFKHLPRPT

SEQ ID NO: 230340 - protein, 458 aa, unidentified
MMEDAMARRNRAQPTPVRRRGLELTHPNAAGVDIGSASHYVAVPADRDDEPVREFASFTADLNRLADWLTACGVDTVAMESTGVYWIPLFELLDARGFTVLLVNARHVKNVSGRKSDVLDCQWLQQLMSYGLLSGAFRPDDQVCVLRALARQRATLLRTQARSVQHMQKALVQMNIQLANVIADVAGTSGQAILRAIVAGERNPYALARLKDCRVRASDDDIARSLQGNWRVEHLFALRQALDAFDFCGQQLQQCDDEIEAQLARLHITQVEPDKGKKRSKARNAPKFDLRTRLFQMCGVDLTRIDGVDVTTALVVVSETGTDMSKFPSDKHFASWMGLCPGTKITGGKVMSGKTKRCANRAAQALRLAAAALRTSQSALGAYYRRMCARMDKSKAVTAAAHKLARLIYTMLTKGEEYTDQGQAYYEERYQQRVLHNLNRRAQQLGMTLVPATAAQPV

SEQ ID NO: 230341 - protein, 367 aa, unidentified
MKKGSTVAAKQSRNISRQKLTIGLDLGDRTSWYCVLDESGTIQLEQGVATTAKALREVFGGMPRSRIALETGIHSPWVSRLLSELGHEVIVAHARKVRLIGESRKKDDRLDAQALARLARIDPELLCPVKHRSAKAQADLTVIRARAGLVRARTALVNTARGLAKSYGERLRGCNVRNMNPEKAEGLSPELQKALEPLLTALESLSEQIAEYNGRIEKLAERSYPQVELLKQIKGVGTLIALTFVLTLEDPHRFRKSRDVGCYLGLQPGRRNSGQSEPQMHISKEGDPYLRTLLVQGAQHILGPFGVDCDLRRWGLRLAECGGRSGKKRAIIATARKLAVLLHHLWVSGEVYEPLRNSNRMTVAAAA

SEQ ID NO: 230342 - protein, 402 aa, unidentified
MNAVGIDVSKGKSMVAIMRPFGEIVSAPFEIKHTASDINSLVELINSVEGESRIVMEHTGRYYEVLAHQLSAANLFVSAINPKLIKDFDNDSLRKVKSDKADAVKIARYALDKWQNLKQYSVMDELRNQLKTMNRQFGFYMKHKTAMKNNLIGILDQTYPGVNTYFDSPARSDGSQKWVDFASTYWHVDCIRKMSLNAFIDHYQYWCKRKKYNFSQSKAEEIYGKAKELVPVLPKDAITKLIIKQAVDQLNSASTTVESLRTLMNETASKLPEYPVIMAMKGVGTSLGPQLMAEIGDVSRFTHKSAITAFAGVDPGVNESGSYEQKSVPTSKRGSSDLRKTLFQVMDVLIKTHPQDDPVYQFLDKKRAQGKPYYVYMTAGANKFLRIYYGRVKEYLSSLPES

SEQ ID NO: 230343 - protein, 343 aa, unidentified
MRNTDTCGIEISAKEFLVRLRRGGDLQTRRTFSNTPEGCKILVRYLQQKNRVMRVCMESTGLYGLDLALALSEAQGIELMVANPRAVRHFAQALMKRSKNDPIDADVLEEFAARMPFQRWVRPSPTALALRAMTRRLRELVEIQSVEKNRQHAAGLSQTTPAAVRRDLTRSLRAQERAIARLTKQVRKLIARDAQLSERFELLDSIPGVGETSAIQLLGELAVLGPDFSARQWVSFAGLDPREFDSGSSVHKKPRISKAGNKHLRQSLYMPALVAVRHDPHLRGFYQHLQANGKVKMQALVAAMRKLLHAIHGMFRSHQRYDGSKLFRLPSTSLPEVPHASAA

SEQ ID NO: 230344 - protein, 366 aa, unidentified
MKKVSTAARKQGRNFSPQRLTIGLDLGDRASCYCVLDEAGKVQQEQRVSTTAKAMQEVFGGMARGRIALETGMHSPWVSRLLSELGHEVIVAHARNVRLIGESRRKDDRLDAQTLARLARIDPQLLCPVKHRSAQAQADLTVIRARAGLVRARTALVNTARGLAKSYGERLRGCNVRNMNPEKAEGLSPELQTALQPLLAGIESLSERIREYNEQIEKLAQESYPQVALLKQVKGVGTLIALTFLLTLEDALRFHKSRDVGCYLGLQPGRRNSGQSEPQMHISKEGDPYLRTLLVQGTQHILGPFGADCDLRRWGLKLAERGGKNGKKRAIIATARKLAVLLHRLWVSGEVYEPFHNRQPMMMTAA

SEQ ID NO: 230345 - protein, 355 aa, unidentified
MVGLKYIGLDVHQDTVSAAVLDQQGKLMIQSVFATRAAAILDFLHGIKGTLQVTFEEGVHSAWLYDLLERRVARVLVCDPRKNKLLKSGNKGDLIDAWKLAELLRNNSLSPVYHGGMSALEVQHRTRSYTMLTEDTTRVMNRLKAVFRSQAIHCHGRKLFRLDLRESHLTQLSTPGLRQRAESLYRELDALHPLRLRAKREMLAECRKHPAMKWLQSVPFLGKVRTAVLIGRVQTPHRFRTKRQFWSYCGLALETHDSAEYRVVQGQVQRKSRPAQVRGLNWNHNHELKGLFKSAATMAAFREGVFREYYSGLLAKGMRPEMARLTLARKIAAITLKIWKEGETFNAEHIKPQAA

SEQ ID NO: 230346 - protein, 357 aa, unidentified
MKRYSLAVDRGKPQGLSQIFIGIDLHKIQWHITIRTEEVEVFNGSVPGRWEALKKLLDRYPGCQKQAVYEAGYFGFWLYDRLTEYGVDCVVTPPSLVPQEYGNYVKTDRRDSRKLAQLLAKGLLKRVWVPTVEQRYERQVMRRRKQLIGDRVRTQNRIKAELRFYGIDLPAPTGQWSKGYFENLQRLRFGNRWMQESFNRLLEEYEFLTDQIQKQTKVLRSLSETPAYEERMKILRTTPGMGLVSSMEYLLELQDVKRFRRGAQLPAYVGLTPSQYSSGEKLRMGRITGIGKNDLRGTLVEVAWRLIAKDPAMREKYESIKARAGSKRAIIAIARITLLRTRRMLLDRQPYVVGLAA

SEQ ID NO: 230347 - protein, 421 aa, unidentified
MTRLPMDEFAAFVGLDWADAKHDVCLQAAGSQKREFSVLEHQPDTIDAWVSTLRTRFKGQPIAICLELNKGPIVSALGKYDFLVLFPVNPLTLARYREAFTPSHAKDDPSDAELQLELLLTHRDKLKPLNPQSTAIRALEQLVEHRRRLVGDKVRLTNRLTSALKNYFPHVLQWFDDKDTTIFCDFLTQWPTLKAVQLARRSTLERFFRAHHVRYADVIDQRIQAIKSATPLTTDAGVIAPTALLVQALVSQLRVTLQAIDDFDEAIAQRAQSHPDFPLFNSLPGAGAVLAPRLLAAFGEHRDRYTSADELQKYAGIAPVTERSGNKSWVHWRLQCPTFLRQTFVEWAAESIRHSFWARAYYQQQRNKGTSHQAAVRALAFKWIRILFRCWQNRTPYDESVYLNALERRGSPLIHNLVRDS

SEQ ID NO: 230348 - protein, 345 aa, unidentified
MEPMYYIGLDVHKRKLSYCVKDSGGKVYAEGWIPATRIDLDLWMKTLPRPWSAAMEATMFTGWIYDHLKPHAAALKVAHPLMLRAIAAAKKKNDRIDANKICDCLRCDFLPECYMASTAIRERRRTLRYRNLLVRQMVQMKIKISSLLMEAGVSYNKQRLHKAGYFRELLATNPDIDEGLRSLLRQCRETVVRLQKTEGAMVRSLERDSLLIDRVERLMTIPAVGPITALTWALEVGDVQRFSSIKKAISYCGLCGAEKSSGNTVQRTPLSKQRNKHLQTTLIEAAKMAPRYSPTLALLYDREKQKGNANRATLAVARKLVAYLMSVDRGQGHFLVLDQETSTAA

SEQ ID NO: 230349 - protein, 310 aa, unidentified
MKTQVVEFEQIIERGCGIDVHKETVVATVSGIGIKQETRTFSTFTSSLIEFKEWLKSLTITHAAMESTGVYWKPVFNVLEEDFEILLVNARHIKNVPGHKTDKKDSKWIAKLLLSGLLKGSFIPPKEIRELRDLFRYKRKLTGQISSEKNRLQKILEDANIKLSSVVSDTFGVSSTKIIDALINGESDIDELVKLCHGRLNDKKAELKEALVGKLTEHHKFMLRTIKKSIVNIEDIVAEVEKQIDEQTKVYQIEMELLQTIPGVGKGTALGIIAEIGVDMNVFPNEQHLASWAGMSPGNNESAGKKKVQE

SEQ ID NO: 230350 - protein, 500 aa, unidentified
MGKGTGSLLRGPNIEKGEDTMIKSVGIDLAGAGEHKVRCLDERAQMCDGLTFQTTPEGLSKLEERIFRDGSNPVIVFEPTGLAWLIVAIYLKARHPDCHLVRVQARKVVALRKYLRRSSKSDKIDALTLAKMPFIDSEQLEEIYLPPAKIYAIQRLARQRKRLESEIGARKKRIGSIVDGYFPGIRQAFSNPWSAHARAFLGSCLNPLEVVHSGEKALHSFLTKARRHSKADAVESHLVYLACQDAATLYKLSSPVGTIDEDFFAALQDEISRELRLMEMAEAESEAIAKRLEQLYHELHPSDNLRTIPGVGEHTAPILLAVVGDPARFRSQSAFANYTGVVPAAKQSADAEAKGLRMTKAGPAVMKWSLYQSGQIGRRFDPQLAWVYYREMVHYGKNHRQAMGAVMSHIGARVLAVLREDKPYELRDIDGRPITGDEARRLILLNYQVPEEIKRERRRRKQTAGSATKSTRRNREMAAHRTNEAATAPQPVEIMATSRE

SEQ ID NO: 230351 - protein, 322 aa, unidentified
MTSSKLATRIIGVDVSKDKLDVWDPEGKITKVLRNSTSSIVKHIINKIKEVSEAFVVCEATGGYERTLVKALNKAGIRVCVANPFQVRQFGKGLGLLEKTDPIDAKLLCRFGEGVELWPTAPKTTEQDHHEALVRRREQLLKLISQEENRLAQAWDKSVARMVREVINKLKKQQKQIDRLIAAFLKKEAETNKTVDVLQSVPGVGPVTTSTLICDLPELGKLNRGAIAKLVGVAPFANQTGKRDRRRTIFGGRSHVRRVLYMAALVGTRQNSVIKAFYKRLLAAGKEKKVALVACMRKLLTILNAMVRNNEQWRIEKVVTDA

SEQ ID NO: 230352 - protein, 312 aa, unidentified
MFVGIDVSKSRLDMHLRPSGEEWSVSNDEQGHAELVSRLVGDGPELVVVEATGGYQATIVAELTVRDVRVAVVNPRQVRDFAKATGRLAKTDSIDAAALAHFAEAIRPEPRPLLDGHTQELQALVTRRRQLIDMRTGEMNRLETCRVERVRKDIQKTIAWLTRRIGQVDDDTDKMIRNTPLWREREDLLSTVGGVGKTTARTLLTQLPELGQLNRREIAALVGLAPFNNDSGKRTGQRSIRGGRPEIRSMIYMATVSAVRCNPQIRPFYQRLLAAGKRPKVALIACARKLLTVLNAMVKTNTVWSFDAAKAA

SEQ ID NO: 230353 - protein, 355 aa, unidentified
MCGLKHQKEKRSMTYFAGLDVSVKETSVCIVDDAGKIVQEARVASEPEALLQVLTNTICRFKRVGLEAGPLSQWLYSVLAEAGLPVICVETRHMRAMLKAQINKTDRNDARGIAQMMRVGLYRPVHVKTLRSQKLRMLLTHRKLLQSKAIAIENDLRATLRNFGLKVGMVGTVKFEARIKELVENLPDLAVLVEPLLIVRQVVREQLGILHRRLLAIVQDDDVCRRLMTIPGVGPVVALTYRVTVDVPARFRNSKAVGAVFGLTPSKYQSGQNERSGGISRCGDEMMRMMLYEAAQSMLLRSAKWSWLKAWAMKIARHRGIKKAIVALARRLAVIMHRMWVDGTEFRWTREVAAA

SEQ ID NO: 230354 - protein, 414 aa, unidentified
MRAIYERVAGLDVHKKVIVACMQILLPDGNGQVEKRSFGTMTADLLMLSDWLLTHEISHVAMESTGEYWKPVFNILENNFEVIIVNAQHISKVPGRKTDQSDAEWIAELMQYGLLKASFVPPLGQRELRELTRYRSTFVRERATLVNRIQKALESANIKLASVASDVLGVSGRAMLNAIIEGKATPSEMAELAKGRLREKREELNKALEGRVKPHHRFVLTELLCQIDNLDEAIARFDEQIKDYCRPFEEAVTQLDTIPGVARHTAEIIVSEIGVDMSRFPSADHLAAWAGVAPGNNESAGKRRSGKTRPGNKSLRAALNQAAHGATHTKNTYLTAQYQRLAARRGKKKAIVAVMHSILVISYHLIQRNEPYRELGGDYFDKRKPEVTAKRLVKRLERLGFQVSLQNMPVSVAG

SEQ ID NO: 230355 - protein, 368 aa, unidentified
MAPSILTSLPSAAVLIGVDTHKDQHVAVALDRHGAVLGHLQIPATSKGYQTLLEWAVGHGALQPADLLVALEGSGSYGAGLCRHLLAAGCSVREVSRPNRQLRRQHGKDDWIDAEMAARSLLAGTATAEPKASDGQVEMLRLLKSTKDSAVHSRTKAINQLKALLVTVPAALREQLQNLRNKELLQRCAQLRPGAITTPLAAARLALRSLARRIQQLSAEIEALVLQLDAITNELAPQLKAAKGIGTDNASALLIAAGDNPQRLRSEAAFASLCGVAPMPASSGKTHRHRLNRGGNRQANSALYRIALIRLRWDEATRAYAERRTAEGKSKLEIIRCLKRFIARQVYRLLVPTNGQASTCIDGQTQPC

SEQ ID NO: 230356 - protein, 346 aa, unidentified
MEHYAGIDVSLELSSVCVVDAKGKILKEAKVASEPEALVSFFQGLGFPVKRIGLEAGPLSQWLHAGLTQAGFETVLLETRHVKAALSAMTVKTDRKDARGLAQLLRMGWFRPVHAKSIGAQEMRALLVARKQLLGRLIDVELSIRGILRGFGLKVGQVTRKEFEVRIWELVMGQATLERIAGAMLSARATLKAEYEKLHKAVLAIVREDAVCRKLMTVPGVGPLVAVTFKSAVDDPRRITKSKAVGALFGLTPKKYQAGEKDITGEITRAGYEMVRTALYEAANVLLSRITRFSKLKRWGMDVAKRRGSKRAKVALARKIGVILHRMWVDGTTYRWSEAKLIAAQA

SEQ ID NO: 230357 - protein, 402 aa, unidentified
MKYYTSTTEFNCGIDLHAHQMYVCLMDRTGRKLLHTNIKDNDFNHFLKLVEPYRHDLTVCCECMFGWYWLSDACQAAGLTFVLAHALYLKAIHGGKNKNDRIDSEKLAHLLRANLIPPSYVYPSAQRPLRALLRQRLFFVWQRADLLSRIQSHQLAHNRPTLRPTRPNRDPWEAHLLAHEDHPLRQLALKNELAMIRHFDAQIYALEEQLHRLTKENHSRDYALLKTVPGIGEHLGMTILYEVGDIARFPSVKDFVSYCRLVKGTVASAGKFKGLRGAKMGNPYLRWAFGEAAVLAKRDHHIIGPLAVGLETRFGGNKFKANTVVAIKLARAVYFMLKNKTVFDPDRLVAVLSRKSFGPARPQPGRSNWRQRKGEAPTSRSSRSMVPKVPDAALGTPALHAS

SEQ ID NO: 230358 - protein, 356 aa, unidentified
MQLHDALTIPKIFIGLDIHKKSWTVSIQTDLFFHKTYSMPSESEDLYQYVERTFPGHEVHLVYEAGCCGFSVARYFLNLGWHVLVVNPADVKTGDKERYQKTDALDSKNLSHQLKQGVLKGIYIPTEEHEQFMTLARHRTQITKKLRQTKSHIKSMLLFHGIKIPAQFDNSNWSQDFVTWLEELKFSTACGDLALQGKIRLYKFIKSEYLEIANQMRRHCRKNTKKDYYLLKSIPGIGGYLASVIIAECGDLRRFNNERQFSSYIGLVPGIYNSGDSEKCLGITPRSRSQLRSYLIEAAWVAIRKDTEMQHYYRKHHGKNVKSIIVKVAHKMARRILSVIKTETPYQINKNLVLEK

SEQ ID NO: 230359 - protein, 328 aa, unidentified
MDNPLYYVGIDIAKAKFDVAIKLQNGKHKHKVFKNNPEGFQSLMQWLNTFGETFHCVMEATNIYHEALADFLFQQQITVSVINPKCSANFTKTDNLRSKTDKIDAKMLADYADEKRHKLPIYQPISPAQRELLCKNRQLDHLKKQLAQEKTRLTMLLDSDCIASTQQMIAFIKAQIKALEKTIKQCINADNTLKNNVKLLCTIPAIGFATAVQLIAHLGDGNRFKNAKAAATFAGLTPMIKSSGKSLNTVIGISKIGQSDIRKALFCPAMNFAFGSYKNSVYRSFVLRLLECGKPKMVIITALMRKLVTIAQAVLQKQTAFNLDTFMK

SEQ ID NO: 230360 - protein, 349 aa, unidentified
MYYAGVDYHKRYSVVSVEDEKGKRVMEAVVRGNNPFVFRQVFSEVKGPVSVVFEAGWNWSWLYELLEQMPNVEKVVLAHAYKLRLIAETQIKTDKIDARKLALLLRLSVIPECHVPDRETRDRKEVVRQRAYWVRERTRLRNRVHRLVAKQHGLQMPQVTDIFGKRGLAALRKAVLPEPDMTLLRQCLAVLDELEKVIKATEEMIRKDIGDKRVIEILMSVPGIALIIASIIAVETDGIRRFIRPARYVGYCGLSPTTHSSGGHVYNGRMMWMCNKWLRWAYIEAAWIAVGCSAYFGGLYRRERERGKDANVAITIVARRMCRMVYQLLMEDRLYQEVGYHRPAALARV

SEQ ID NO: 230361 - protein, 370 aa, unidentified
MAKRSMFVGMDVHKESIDISLAEEGRDGEVRHYGVISGDLEAVAKIVKALRAPTRRLRFVYEAGPCGFGIHRYLTGQGEDCVVVNPSSMPKRSGDRIKTDRRDGDALARLHRAGELTAIYIPTDTDEALRDLVRAREDAVGLSTQAKHRLKAFLLRQGRRYPGSAGWTVPYRRWLADLSFPLAPQHIALQEYRDTIDETERRVERLTDQLRQLTPAWRWAPVVDALQALRGVSFVTAVGLVTEIGDIRRFDHPRQLMAYLGLVPSEYSSGPSVRRGGITKAGNAHARRLLAEAAWAYQGVPRIGRQMLYRQEALPKTICDIAWKAQLRLTSRFRKLVARGKAKPKVATAIARELTGFIWAIAREVPAPPA

SEQ ID NO: 230362 - protein, 421 aa, unidentified
MKKLQRIVGFDCGEDGHSAVLLDAAGEFEKRYGVDNERGQIQELLAELILAVGREAQLLVVVESKRSHGRIVADVALELGCDLRQVNTVALNHFRDLEGQPRKDDEWDAYLAARMVFLRMKGCRAAIETTEEERALSRLTRTHSRLVEDRKRHVARLRAVLLELAPEMLHSSWEGPQSGSKAMLYLLERWPGFEGLERAQLRSIEKILRRCRYGSRATHVAKLIRKMARGVSIATEERSALTLELDLLAQQIRFCNESVDQVRGKIAHRVEHHPLGKKLLEMHGNGPVITGVLVSELLPVARTSTEPKSATYAGVTPLSRKSGKSLDNDRLTQGANKRVLHALYTSSVVAINNSAVDRAYYNKKLRDYAGHPKPHVAAFIALSRQRHKLVYKLMTTDARYDKEILIATHLARLEQERTAAA

SEQ ID NO: 230363 - protein, 389 aa, unidentified
MLCVGIDVAKRKHDCCIIDSDALKTVESFTFPNSREGFDMLLSKISELGIPKDKIRVGLEATGHYSSNLAHFISEHDLPLLTFNPLLTNRYKQGFSLRKTKTDKVDACAIAQMIVSGKGSQTYSSSLYHNEEMKSLSRYRSQTMQKCSKLKISVSRLVTILFPELEGLTSSIHLASIYALLKAYPGHEQIAHCSMKRLTRLLSDASQGRFDKSKALEIHQAACRSIGTVSLSASMELVHAITDIEVLKQHVAEIDEKIKEMVDQEESSIIDIPGIGYTLCASILGEIGDFKRFPDVDKLLAYAGMSPSKYESGGFHSNHNKMEKRGSPYLRKTLFVAARLVAQNVPKFKEYLEKKLSEHKPYKVALSHVAKKLIRLIYRLGVSRCPYLA

SEQ ID NO: 230364 - protein, 342 aa, unidentified
MKQAQAYHFVGLDIHKRSVVFCEKNVTGQTVAHGTIAARKQELIAFAESHGRPWVGAIEATLFSGWVYDVLAPYAVELHVGHPARLKALSKNKNDRIDAEMLANLLRADLFPSCHMSSPQVRELPRVLRYRNFLVIEATRMKNKASGLLMEVGVEYAKSKLHGKKYFSELLDSLEEVPASVRELLRMTRTNLDVFAGAQRRLLDALTRHAALRERLELLKTVGGVGDVTALTWALEIDDPYRFSSIKDVQSYCGLCSPQHESDGKEWRAPLSKKHNPHLQTILIEAAKLAPSKHRHLREVHEAALERGYNRNRATLSVARKLAAYLLAVDKSGRRFVTPESQ

SEQ ID NO: 230365 - protein, 461 aa, unidentified
MRQKKPTGQPKRSVERKVDWKALAIVHPDAAGIDVGSSEHWVAISPDRDAEPVRRFRCFTADLREMGRWLLEKGVRSVAMQSTGVYWMPVFEVLERQGLEVYLVNAQHTKNVPGRKSDVQECQWLLKLHAFGLLNNSFQPSDEIRIARTLWRHRGNLVAEASSVIQRMQKVLTEMNVQLGDVLSDLSGVSGMNIIQAILKGERDPWQLAALVMPGVKATAEDIAKSLEGNWREELLFVLRQHVELYQIYQKKIQDCDLQLREHLQLLGSKLDPQTQPLGPRPKGKKSSQNAPAFDLRSELYRITGIDWSQVNGIDVLTAQTVIAEAGADLSAFPSEKQFTSWLGLCPTNQQSGKKILNRRTRKVVNRATVAFRNAASSLLRSQSYLGAQYRRLRTRLGAPKAITAMARKLACLFYRLIKHGQPYVDKGTEYYEARYREQQIRSLTKRAQKLGLQLVIPKPA

SEQ ID NO: 230366 - protein, 344 aa, unidentified
MKDSNVIGIDLAKNVIQVCKIDKHGELTSNKAISPSKLKALLANSNPSIVAMEGCGACHYWARLAQTYGHDVRIISPRRVKAFLQGHKTDANDALAIAIASTQFGMVFSQVKKEEQQSLQTLETSRKFLDKELTALNNHIRAYLYEYGITIHRGRKSLRETIVIVLDDLDTRLPMCLKNTLKVLWERYQLTVVQLKETEKCRAALVKQLGPCNRLMELEGIGNVCAAMLYASIGDGREFKNGRQASVYIGLTPKQHSSGGKTYMVGIDKQGGNKALRAALYQGALSVISRLPSEPRTVKEAWLLKLIERAGVKRACIALANKTVRTAWALLATGKSYEPVLLGR

SEQ ID NO: 230367 - protein, 398 aa, unidentified
MSRNVWVGIDAGKISHHCVVINDAGEKLLSRKVSNDETDVLGLVGEVTALADGGRILWATDLNAGGAALLIAVLVEHEQELLYIPGHTVHHASAAYRGDGKTDAKDAAVIADQARMRRDLQPLRHRDETAVALRMLCARRTDLSADRTRAINRLRAQLLEYFPALERAFDYAHRRGALILLTRFHTPGAIRKAGPEMITAWLRKHGAYRPGVIAAQATAAAQSQYTVVPGEQTGAAIVERLAHQVMALDVELDDIEQTITEQFRGHAYAPAIESMPGFGPLLGAEFVAAINGDLANYESPDRLAGIAGLAPVPHDSGRISGNLKRPRRYDRRLLRACYLAAYNSIKTAPASRIFYDRKRAEGKHHNQAVLALARRRINVLWAIIRDETVYQPTELKAA

SEQ ID NO: 230368 - protein, 358 aa, unidentified
MYKFMKKFFIGVDVSKDTVDVSFFDDDRMKSPEYLAQYSNSPKGFREMVKDLRMCCHGVSSGQWLFCCETTGRYDHPLCHWLVDHGMVVWRESALQIKWSSGIQRGKNDRVDSLRIAEYAWRHQDKMQKFVKPSESLSNLKAAFTHRRRLVEKRTATRCQLKSMSSEKGLSASVARMIVRDLSREIERLSASIATMDESIQKIIRSDSELDRNYRHIISVKGVGPITAVALIVCSGNFKAITSAKKMACYCGVASFRSQSGTSINRKASVSNLSNRQIKSLLSMAARSASRSNPVFAEYFNRTLSRGKPVALVYNNLRNKIITVIYKLIERDCDFDVDYKRMHSTGQRANESAIREAV

SEQ ID NO: 230369 - protein, 403 aa, unidentified
MPTTSEIRVSIDVGCHRHSVAIGLPTGEVLEEFDLLHRPEGFDLFFAHVERYQRRYGGEVAVAMEGYNGWARPLDTLVRSHGYRLFNINNLKLARFKEIFPAAAKNDRIDARKGLELFQLCDHLPVARGVLQEVAATPLENDQLKRLTRRRRALVEERSRLLCRMQADLQAACPGLLTITQNADNLWFLNFLTHSQDLSKLARLREATLLGIKGIGRKYAALITAWQKSAHFSHDVAWVGPMIIEDARRILELRAAIKALEAHCAALVAQSEIAQGIDSIPGFGLVCAAEIAGELGTVARFANEGSLAVYMGMATLDNSSGQYRGSKNPKHVNTRAKAAMMVGIDRHRKQVPESQRYYEKKRAQGKTHNQAIRALGRHLCRVIFSMLKQGRCYELREAKENRD

SEQ ID NO: 230370 - protein, 422 aa, unidentified
MLEETKETEELIARVAALDIGKKELVCCIRVPGAGGRGKRLQEVGTYQTMTRSLLVLADRLGELGVTRVVMEATSDYWRPVFYLLEAQGLETWLVNAREVKQLPGRPKTDRLDAVWLAKLAERGMLRPSFVPPAAIRRLRDLTRYRVDLVGVRTAEKQRVEKLLEDAQIKLSVVAADIFGVSGRAMLAALVAGERDPKQLAQLARTRMRAKLGQLQEAFTGQFSDHHAFLLQTMLGRIDQASADIAELEAKIDEMVAPFQAAVDRLDEITGVGRIAAQVIIAEIGLDMCRFASPGHLASWARYAPGVNESAGKARGKNTTGHGNPYLARVLGEAAVVAGRTDTFLGERYRRIARRRGTKKAIVAVGRSILVIVWHLLADPQARYHDLGAGFYDTRVNAERAKRNHVRQLEALGYKVTLEPAA

SEQ ID NO: 230371 - protein, 425 aa, unidentified
MRLVYPVCCGVDVHKTFLVATIITTTNSILPKYQQKRFSTYYSGLLDFKQWLLANNCKDVCMESTGKYWVPVWNVLEAASINVVIANPKWVSAVKGNKDDKKDSKWIGDLFRMGLVPPSYIPVRDIRILREFTRYRSKLVSMRSSEKNRFQNAFTVCNLTLDAVVSDMFGVSATAIENYLLDTDDVDPNHCVYLLRGSLKKKASDVVEAVKGFNMTAEQKERVRIIQGHFDDIDKRIAQIDYVILRLTADYEAQISLLCTIPGIDRRLAITIISEIGTDMSVFGSSKRLCRWAGLTPGNNESAGKKKSVRISRAGVYLKPALVEAAHAAVKATQKSPYFRIKYERIMKRRGKKRAIIATARMMLTAIFAMLQSGEVFHPCDLLKFDMPDELKRKQTLSSAKDAVKLLVSLGLVPEGSISLDPLAG

SEQ ID NO: 230372 - protein, 339 aa, unidentified
MVHVGVDLHKHYSQVAVLEETGEIWERRLSHDGLEVEEFFRGLPRARVAIEATGTWWWLVDLLEGLGHKAMLSHPKRTKAIASARLKNDRVDAEMLAVLGRGNLLPTVWIPPQQVREARELLRHRLGLVWQRTKVKNRLTSLLARRNLRPTRSRTWYSQRGEAELRELGLSPTAERIRDDTLTLLHMLDDRIAEVEQQLFDRWAEDPRVRRLQSIPGIGILTAIGIIVELGEIRRFPSAKHLASYIGLTPRVKASGGRVRTGHISKEGNRLLRWMFVAAATQAVRYRGPLRAWYRRIGRRKGKKIARVGLARKLTEIVYHVWRDEIDYREFHCRTAVRG

SEQ ID NO: 230373 - protein, 441 aa, unidentified
MRKREDEVFPNAAGIDIGASSHWVAVPRHLAEAAGEELVREVGAMTDDLNELAWLVKLGVDTVAVESTGVYWIPVFEVLEQHGLKVWLVDARQLKYVPGRKSDVQDCQWLQKLMSLGLLHAAWRPSAEVCVLRAVARQRETLLTSQASWVQRMQKALVQMNIQLTEVLTDVMGVTGQAIVRDIVAGVRDPEQLARHRQRRVKASQAEIARALQGNWREEHLFVLGQSLAMYDDIGRHLADCDARLDGLLDARARTQIALGKLPRAGSKTRMEHDIRQRLANWAGVDLTRINGLGVTVVMKLLTEIGPDVSRFVSVKHFCSWLGLCPGTKISGGKVLSSGTKRSANRARQALKMAAQSLWRSESALGAFYRRLSARMDKPKANTAAAHKLARMVYFMLTRGEAFVDQGQQRYDEQQRQRSIAALKRRAAALGFQINPVGAAA

SEQ ID NO: 230374 - protein, 435 aa, unidentified
MSWIAFSAEYLTRLYSVKNRGFTTAVNFSKGSDFVFYCGIDIAKYKHEASVIDSDGKALFTSISFANSKEGCEKVLALFEKFGVTSDSVVIGMEATGHYWLSVYEHFSQLGYDVKVINPIQSDAFRKMYIRQTKNDSKDAFIIAQIMRFGQYSSTTLADENIIALRQFSRYRLALVDSCGDCKRRIIALLDQVFPEYDKLFSDTFGSTSTELLLSCPTPEDLLAISSKKLTTLLKKYSHGRFGEAKAVELKAIAKSSFGVSFAKDAFSFQIKQLMEQIVFIEKQIEELESEISSLLHQTNQVITSIAGIGETLGAIILGEIGDIHRFDAPNKLVAFAGLDVKVTQSGEFIGTKNKISKRGSPYLRRAIWLAANRAAFCDPVLSEYYQSLRARGKHHLTAVGAVARKMCNIIFVILRDNRPYEPLPPTKVNSENRC

SEQ ID NO: 230375 - protein, 378 aa, unidentified
MRFYNQSHRFYCGVDLHARTMHLCILDQAGAVVLHQEVSAEPTAFLEAIAPFRDGLVVACECLFCWYWLADLCQAENIAFVLGHALYMKAIHGGKSADDRIDSQKIAQLLRGGNLPIAYVYPKGLRETRDLLRRRMYLVHKRAEVVAHVVNTNSQYNLPPFGKKLIYARNRQALQIADRFADASVRKSIELNLRLLDALDDLIGDVELYLERTVKVDDADTFYRLRSIPGVGKILALVLLYEIHDIQRFASEGMFLSYARLIRPLKTSAGKVKGGGGSKIGNAHLKWAFSEAACLLARESDLAKRFLARQQKKHGKPKALGILAARLGRAVYQMLRQKKAFDPKRFWNGEPGATSAQLKKSAVKRPRRAKGSRCVLEA

SEQ ID NO: 230376 - protein, 344 aa, unidentified
MTIVEAPPRITGGVDTHADVHVAAALDPLGRLIGTESFSVDADGYKALLSWLESFGDIATVGVEGTGSYGTGLARFLRRHDVLVVEVNRPNRQARRNKGKTDSLDAVEAARAALSGRATGAAKSKDGPVEAIRVLIVAKRSARQARVKALIQMRHLGVSAPEEIHQRIKGLSVASLVQESARMRPGRSPDPVSAATKASLAHRIQSLDQELVALDTQIASLVAVAAPELLALFGVGPDTAASLLVAAGDNPERLHSEAAWARMCGVAPVPADSGKVTGHHRLHTGGDRQANSALWRIVMVRIAHDPETRAYFDRRLKEGRTKRDVIRILKRYVAREVYRHLPRS

SEQ ID NO: 230377 - protein, 356 aa, unidentified
MSKYIGFDIDCKKVVACVVENGKRDIYETLGPDVGSMRKFLLKQKHSGDRVELAFEISGEAGFIYDSLFDCTDKINVVNPHKATWIFRTAKKNDRIDARKMAVLMSIGELPTVYMPSPEIRQWRQTILHRKKLVGKAVQAKNRIRAVLKSQGHSKPAHGGGLWKKANRFWMRSFCTGRFIASELWRMQLCNLLDELALAENQINSVTNYLDGYLSKNPGGKLLMSIPGVGPRTAEAVLAYTDDVRRFSNYKQYCSYFGVTPKLDESGSMRRIGHISKHGPSVARWAICESSWIAIRYSKGLRAFYERVMGGQKSRKKIAVVAVARKLLSIMRAMLLSGELFNESMLETDDDIVRAA

SEQ ID NO: 230378 - protein, 339 aa, unidentified
MKYTPVGVDIAKHVIQIHFINEHTGEVVDKQLRRQDFLTFFGNREPCLIGMEACGGSQHWARELTKLGHKVRLLQARFVKAFVMGNKNDVMDARAIWMAVQQPGKEIAVKTEEQQSVLVLHRTRMQLVKFRTAQINALHGTLLEFGETIHKGRAAMEREFPEALERMKERLPPYLIMVLENQYNRLNELDSLIEDIEKQLTSVARQNETGKRLLDIPGVGPLIATAAVATMGEASAFKSGREFAAYVGLVPKQTGSGGKVRLLGISKRGDTYLRTLFIHGARAVALVAKEPGPWITELKKRRPASVAIVAMANKLARTVWAITAHDRKYDRNHVSIRPY

SEQ ID NO: 230379 - protein, 340 aa, unidentified
MKGLYAGSDLHGNNNLVGIVDEQGKRIFKKRLPNEPQLILEVLKPYKEEMVGVVVESTYNWYWLVDALMDEGYKVHLANPSAIEQYSGLKHADDNHDAFWLAEMLRLGILPEGYIYPKQERPIRDLLRKRRHLVRLRTSLVISLQNILSRNLGRKMNVNDVKALKEDRISPLLEMNEDLALAGRVSKEAIDHLTHQIYKIEWVVQKKIALKQEYRYLLSVFGVGKILSLTILLETGPISRFPTVGDYVSYCRKVPSQWTSNGKWKGSGNRKNGNKYLAWAYSKASEFARRLYPEARAYDQRKMHKTNAPVAHSALAHKLARAAYYVMKDQVPFEPEKLFG

SEQ ID NO: 230380 - protein, 426 aa, unidentified
MTYRIAGIDVHKKMLAIVIADVAGHGEYEFQRRKFGTGAGELRVVAEWLREQAVEEVVMESTAQYWRPVWQSLERDWQGERREQGVGKMAGALHLAQAESNRARRGRKSDFEDAERLVKRLVAQELVLSYVPDAEQRLWRTVSRRKYQLTRDRVRMRNQMEGLLEEAQIKLSSLVSDLFGVSGRRMLKGLAEGEKDAAVLAAMADRNLRATQEELRDALGASAELNPIYRELLKMSLEELKLMEEQMEKLDQGLGILLKAHQDAVQRVAEVPGLGADSGQQIVAEVGPRAGAFDTAKRFASWVGVCPGREESAEESKSDRSPKGNHTLRRVLNQAAHAAVRVKGSVFEVIYRRMVGRMGHNKAIWAIAHRLCNLIWKILHEGVRYEERGPSVSARSEKVRMARMIQKLRSWGYEVKRPQPEANGAR

SEQ ID NO: 230381 - protein, 458 aa, unidentified
MPRKSSNKAKSQRRRERALLQKVHLNAAGIDIGANAHWVAVPEDRDASPVRSFGVFTRDLVALCDWLKSCQVETIAMESTGVYWIPLYQMLERKGFEVRLVNAHHVKNVPGRKTDVKDCQWLQQLHTFGMLAGSFRPEAQMCVVRSYLRLRDTLSKDCNSLVQRMQKALTEMNVQIHRVISDITGVTGMSILRAILAGERDCLKLAQLKHPQIKSSAQDIAKALDGDYCQEHLFALGTALEFYDSYQLKIMACDRHVQDALSAFELKGKAPAPDVSRMRCAEKRLEALRRHHLEEMTGADLTKLPGLDLLAVERILSEIGLDMSRWPSEKHFCAWLNVAPNNRVSGGKILSSKPRKNANRAAAALRLAAQSAMQSKSAIGAFIRRIKSRLGAPTAINAGAHKLARLVYRMLKFGKAYVEIGQEAYEKFFKERILRNLQRKAHLLGFQVTPITVTVPVS

SEQ ID NO: 230382 - protein, 396 aa, unidentified
MTSPPATGRMLTIGVDSHKDAHVAAAVDQLGRILATTSIPTTPQGFVQLERWARGLGQIDRFGIEGTGSFAAGLTRWLQERGYQVIEVTRPNRQLRRRRGKSDPVDAEAAARAVLAGEATTAAKTADGAVEMLRVLRVARRSAVKAHTQAANQLASLVITAPEPLRQQLRPLGPAQLVKTAAGLRPGPLTTPAAAAKLALRSLARRAQRLSAEIGRLDAELARLTRTAAPRLLARRGVGADVAGALLVVAGDNPQRLRSEAAFSMLCGASPLPASSGRTIRHRLNRGGDREANNALWRIVLVRMSCDARTRSYVARRTAEGKSKREIIRCLKRYVARELYQELKTVLGDDTQRDSSGSTRAPGRATDAVTTASLPALNGRLPCHPSRSAGDQRPGG

SEQ ID NO: 230383 - protein, 462 aa, unidentified
MRERHARKTSESSRQQLEGLPVLRRNVAGIDLGSEQHWVCAPTLDGNGRERASFGATTPELIGMAEWLKARQVESVAMESTGVYWIAPHEVLEAQGLQLLLVDTRQLARVPGRDKKTDPTDCEWIQRLHSCGLLRGSFRPEEAVCMLRTLVRDKANLVAESGDWLRRMQKSLDQMNVRVHRAVSDIDGVTGMAILRAIVGGERDAQKLAKLRDQRCSKTEQEIAEQLSGHWREDHLFSLQQALKMYDAVQERIAAYEKEILQRLGEMERDEQRGQTAPPLQNTTKAKTIKKRGQEPMRQALYRMSGVDATHIDAIGVETLEVVLSEYGPDLSRFPTEKQFVSHATLSPHVPTSGGKRVRKRKRNSASTRVAAALRMGALSLRHSQTALGAYYRRMAQRLGGDIAVFATARKLATLIYRLLRWGQPYVDEGAKAYETRYRQQRIGRLAATAKELGYQLAPISA

SEQ ID NO: 230384 - protein, 475 aa, unidentified
MPGNPRCCCVRVCQSPVLTGALAGGVPYPCPWGVPLQEVAAQMKVLYERVAGIDVHKEMVKVAIRSPGEKPWTRKTEVLEFRTFYGVLQAMGRELRRRGVTHVVMEASGIYADPVYYALAGQDFEQVAVINPAHAKALKGHKTDARHCARLAELSGCGLLRGSYIPPSELKEVRDLTRYRMKTVQARTSEIQRLGKALESAGIKPGSVASSITCQSATAMIEALIDGERRGGVLADLAIGRMRTAGKLAGLPVALAGRFTGHHALLCRLHLDRIAVFDDAAGGLDKRIAGKAARWQRETGLLTSVPGFGDVVAQAWLGEIGPAPHLHFATHEKLASWVTLCPGNNISARKRKHGRTGDAGTCIKPMLVQAAWAAIRVRGRLQARYNRLVRRFGGAKNPAAKKKAITAIAHTLLKIACQVLKSGVPYQEPGADFYTRRESPQQKQAWLERQLQKLHPGCTVTITITPPEAALLPGA

SEQ ID NO: 230385 - protein, 344 aa, unidentified
MLTTARYDCFTGIDIAAVTLTTSSTTGTTPPSRAVTLTQTPEGYAALIQRLQATGSAPERTLVVMEATGSYWITLATTLHAAGFAISVINPAQAHYFAKALLKRTKTDAIDAQTLARLAAVLQPEPWTPPPDVYYELQQRLVQRDALIQMRQQVRNQLHALIQGPVVVAAVRERMETLIAALTGQIAAVKAELEPTLAMDEAWAAAAERLQSIPGIGLVTVGWLLATTLNFSVCASAEEATAYAGLAPTKYLSGTSVRGQERIGHSGNGRLRTALYMATLRAAQSNPAIKTFYDRLVAAGKLKKVARCAAARKLLHQAFAVVTKERMFDPDYHHHQTPRLNIAA

SEQ ID NO: 230386 - protein, 438 aa, unidentified
MSNKVFFNLDDLFISVGIDVGADFSWMSIALPNQQFVGKPYKILHNSIDSLTTAVSKIKEAEELYSLESRIFLESTGIYHYPLFCYLRDKGFNCSVINPIITKNSTNINIRKVHNDRFDSKKAALVGLKPDLKVSLMPSDLALNCRNLCREYYDLMDNRSAYVNKLQGELRMAFPQYLSIFSKVTINTSLTLLETYTSPSAFLEADKQEIIDIIKSTARFGLTYAQNKYNAIIQAATDANQFGYIIDSNIKRIRLYISFIRKYDEEINNILESLHELVDANEDADFVKQIHLIETFKGAGFLSAVSIMGEIGDFSAFSKPKQLFAYFGLDPAVKQSGKFEGTKVQMSKRGSAIARRVIHTLTLQSISISRNGEAKNPVLREYYLKKCDSKPKLVAMGAVSHKVCNMIFAILRDNKPFKIIAPQEHIKQYNAAKCDIAA

SEQ ID NO: 230387 - protein, 347 aa, unidentified
MMKKTVKQAVGIDVAQQELVITIGKMYDDFTTEQFGYKVFKNTQAGILALVEWVKKLTDNSVSVRYVMEATGVYHQKFAYYLDQNSYEVSIVLPNKISNYIRTLEVKTITDKTCSQAICQFGLERKLDQWHVPNNVYKVLQQLTRERDQLVLERSVIKNQIHAEKTEAETNLNSLRRMVERIKFLNSQEKEIKIEITKIVNNEPNLRAIVDRISTLPGVGELTAVTVLAETNGFELIRNKAQLVSYAGLDVKEKQSGTSVKGKPRISKQGNRNLRKAMHLPALSAVKWNENFKSIYARLVSKHGIKMKALVAIQRKQLELIYILFKNETVYDKDYEDKKNRVLAQKA

SEQ ID NO: 230388 - protein, 320 aa, unidentified
MAMPVQPLWIGVDVSKATLDISTSQAQAVITLPNTATRIRTWLKSLSGPVCLGLEATNTFHLELAMQAHAYGFTVYLLNGYRLSKYRESVGMRAKTDPSDARLIRRYVQNEHEDLYPWTPPPKGYMSVQRLLHRRATLVQARTTLSQSLGGMPELKTSVAAMLRKMDHLDQLICKRLKQALVKLDWYRHARRCQAIEGIGPVNSMALTTLFHRGSFKSADAFIAFIGMDVRVRDSGKCRGRRKLTKRGDPEVRRLLYMAAMTACRSATWKPFYERALARGLTRIQALVALGRKLARIAYALLKTGDSYRPKSREEACTST

SEQ ID NO: 230389 - protein, 317 aa, unidentified
MNNTENQMSLNIGVDVGKAQLDIALHPTNQHFTIPNSAAHIRKAIKILSGYPIQRIVVGATGRYEQPFVNACRDAQLPIIVVNPISVRRYAQAIGVLAKTDKIDAQVIARYAATIQPEIKPIPDNQSQLIKDLLVRRTQLLEMATMEKNRLQILPKALHRSIKTLLKSLQTQIQSITQQIEKEVAKVEQWKTKTEILTSVPGVGKVLAYTLLSDLPELGQLNRKEIAALVGVAPMNRDSGALKGKRRIRGGRHRIRTVMFMAMLSAIQCNPVFKSFYERLKAQGKLPKVALIACMRKMIVVLNTMVKNQVSWQEQLA

SEQ ID NO: 230390 - protein, 386 aa, unidentified
MIYVGIDIAKLNHFASAVSSDGEVMLQPFKFTNDYDGFHKLKSSLDSLDPGQLIIGLESTAHYGNNLVEFLVLSGYKVCVINPIQTSTLRKNNIRKTKTDKVDTLVIAKALMMNPTRFFTKYDISLLHLKELGRFRMKLIKKRTQAKIQLTSYVDQAFPEIQYFFNGVHHKSCYALLKEAPTAGMVASMHMTHLAHLLEVASHGHFKKDTAQEIRVLAQKSVGINDSSVALQITQTIELIELLDKQVTTVESDMESLVESLDSVIMTIPGIGAINGGMILGEIGDISRFSNPSKVLAFAGLDPAVYQSGNFEAGHTKMSKRGSRPLRFALVNAAHNVVKNNKTFNDYYAQKRSEGKSHYNALGHCAGKLVRVIYKMLTDNVAFDLK

SEQ ID NO: 230391 - protein, 410 aa, unidentified
MSRTAAVTADPDYLVAGVDTHADTHTLALVTAQGGVVETATFAADADGYTALAAMLEAAEATIEKVGVEGTNSYGAGLTRALTAAGYTVYEVLRPARRVRRRHGKSDPIDAVAAARTVLSGDGAGEAKDTTGPVEAVRLLLTARTQLVTTMTAISNTINSLLVTADESVRDAYRRRDTPTAIKHLAACRPGNGDSPAAACLYALRSLARTHREASAHADELEKRMHRILAEHYPRLLAIYGAGTIVAAQLAVTAGGNPERIRNEAAFAALCGAAPIPASSGKTTRHRLNRGGDRRGNAALHRIALIRMRFDPATRAYTERRTGEGKTKKEILRCLKRAIAREVYTALQHTAAPAPTTCDELAALRAGKNLTLTDVAAALDTYPARISDIEKHRRPLPELTDRYRQWLHTA

SEQ ID NO: 230392 - protein, 348 aa, unidentified
MSSTILAVDLGKFNSVFCWYEPDTRSAAFRTTTTGPDDLRRELTRRPVAVAVFEACSQAGWVHDLCEELKLPALVASTTGAAWQWKHVKRKTDRDDALKLARLAAVGEVEGVPVPPRAVRQWKSLIGLRKRLVSERVRCQNRIRGLLVCQGLSAPIGAKAWTETGLAATGQFARPLADCGPEELWRGELHLLLDRLGFLEARTRGVEARLDAIAAGDSRVSLLATIPGVGPRTAEVIAVHLYDARRFHSAEEVSAYAGLVPRQYQSGETDRRGRITRRGPKLLRAALVECAWCSLRYNEWARETWLRLQRNGCSKKKAIVALARKLLVRCWAILKTGQPWREPASAAA

SEQ ID NO: 230393 - protein, 333 aa, unidentified
MDPMTTTTTTTTTARLFAGVDVSKDRLDVCLRWSEPERHNEEEAFVVAYDDSGIDALISRLLEESTVLVIVEATGGFERTVVGALAAGGLPVVVVNPRQVRDFARATGTLAKTDRIDAAMLARFAEAVGPAPKPLPDREIRALQAIVARRRQLLGMLTAENNRLSLAPKVVAKRIKAHIRWLQKELSRTERDLQAAIENSPALSENEALLRSVPGVGPVLARTLLAGVPELGTLTHKRLAALVGVAPLNRDSGTLRGRRSVWGGRADVRAALYMGALVGARRNPVVKEFYERLVAAGKPKKVALVACMRKLLSILNAILKHRTPWRSPHYLST

SEQ ID NO: 230394 - protein, 314 aa, unidentified
MTSANFEISVGIDVSKSHLDLAVHQTGAAWSCPNDQSGCAALVSQLKELKPTRIVMEATGGYETLLAASLSVAELPVIVVNPRQVRDFAKATGELAKTDRLDARVLAHFAAAIAPPLRAAKSEEAQHLEALLARRRQIVEMLVAEKNRLAANRDHAVVKDLKVHIAWLDRRLKQSDDELQRALQASPVWRERDDLLRSAPGVGPVLSLTLLAQVPELGTLNRKQIAKLVGVAPFNWDSGQWRGSRHIWGGRATVRAPLFMATLCAIRINPTIKSFYRRLITAGKAPKVAIIACMRKLLTILNFMLKTQTSWRTT

SEQ ID NO: 230395 - protein, 480 aa, unidentified
MREPQEIEDEDHEQVVERVAAVDVAKASGMVCTRVPHESKVGRRVTKVWQVDATTNAIIELGEHLAGLGVQRVTVESTSDYWRPFFYLLEAAGLGVQLVNAHQVKNVPGRPKTDKLDAVWLAKLTERGMLRPSFVPPAEIRQLRDYTRLRVDLTHERTRYWQRLEKLLEDALIKVSSVASTLDTASTRDMLEALIAGERDPRVLAGLARGRMKAKHAALAQALTGRFDAHHAELARLLLAQIDALGAQIGTLTTRIQELIAAIPAAQGVDADGATGPGAGSGADAAVLPAAARLDEVTGIGPGAAQVILAEIGLDMGVFPSPGQLVSWAKLCPRTIQSGAKTRSGATGKGNPYLRGVLSSAAASSRPWSPSPAPSWSSSGTCSPTPLPATPTWAPTTTPAASTRARRPATTSASWRSSASPSPSPRQPDLRPHNPSRNRGAGFAGCCRLPGSGVCHFPVRELPQDVAVTATGARPWGERP

SEQ ID NO: 230396 - protein, 402 aa, unidentified
MTDGPTRFFGLDIHKEYFVAVAVNRERKTVFGPQRVSNYQLDDWAGRVLTPQDAIVLEMTTNTYLFHDTLLPLVHSVIAVHPPNVPLVTNVHVKTDKKAAETLAQLLAAGMLTGVWIPPHEVRDLRSLISRREKMVHLSTMAKNRLHALEHRNHLVLPDNPFSPDQRTWWENLELSTTEKLLVRSDLDMLEFAQKQVERIEECLKQKSIQDERIPLLIQLPGVAMLTATTILAAIGDITRFPTAKNLVGYAGLGTRVHDSGMTHSSGRITKAGRKDLRRAMVNAANHAVLDNSHWKAEMKRLEPHLGRSKAIVAIARRLLVVVWHVLTKQVADCFADPQNVARSFLSHAYQVRVRNLPKGQSAPAFTRQQLDRLGLGKELQKISFGSKLIKLPPSKLLIEKK

SEQ ID NO: 230397 - protein, 341 aa, unidentified
MDHATLVGIDLGKHSFHVHGQDSKGKAVFRRKLGRKQLIEFFATCATCTIVMEACAGAHFMARKLATFGHEVKLISPQFVRPFVKSNKNDFVDAEAICEAASRPAMRFVTPKTESQQTLSVLHRVRESMVRDRTRTINQMHGFLLEFGVSLPVGKTGVVRLPELLSFHSLPPRLVAILQRLHEHFKYLQQQISEIDRDLARQLADDDVGQRLMSIPGIGPITASVLASEMGDGKRFRCSRDFAASLGLVPRQYSTGGRSNLLGISRRGDKHIRSLLVQCARAYMRCLEKRNGHLADWTRTLLTRCHSNVVACALANKLARTAWAIVARHTTFDPGPATAKA

SEQ ID NO: 230398 - protein, 341 aa, unidentified
MRIAVLGIDLGKNSCSVVGLDAAGEVVVRRRMRRETVIAFAHKLPGCVVAMEACCGAHHLGRILTGQGHQVRLMSPEYVRPYVKAQKNDDRDAEAIAEAATRPTMRFVTLKGEEQLDMQTLHRVRDRLVAERTSLMNQIRSVLLERGHIVPQGRARLAARLTEVLDGPVPALSARMTMLVSDMRALWQALDERIAAFDREFAEAAAQDKHARRLLTIPGVGSLNATALVAAVGDARTFARGRDLAAWLGLVPRQATTGGKPRLLGITKRGSRYLRKLLIQGARSAMPTLRKTDTRLGAWLRGLLARAHPNTAVVALAAKLARIVWALLRHERTYEMPALPA

SEQ ID NO: 230399 - protein, 323 aa, unidentified
MQGKVSFEEDAMPVVYAGVDVSKEWLDIHLHPLGESRRFSNDKTGIRQLKRLLARHQPKSIVMEATGKFHRPAHRSLWLDGFAVAVVDPLRARMFARACGYLAKTDRLDARFLALLAESLRPPADTPPSPHVEALQELVNARSAAKCDITALQNRSKTATTALLRGELNRLVRRLEQHVERLDKEIERRVGEDPQLSRRAEILTSIPGIGRVTALALMAGMGELGSCSGKQAAMLAGLAPIANDSGARTGRRSIRAGRPAPRRALYMAALSACRYNPALARFADTLKAAGKPAKVILVAVMRKLLVLANCLLSHDRLWTPNPP

SEQ ID NO: 230400 - protein, 343 aa, unidentified
MQSTIFAVDLAKSVFQIAVSKQPGAVAETHRLPRSRFLRFFAERQPGVVILEACGTAHYWARQIQDLGHTVRLLPPHKVRPYVDRSKTDKADAEALLEAQRNRKIHAVPVKSVPQQTLAALHRLRSTWMTARVARLNLVRALLREFGLPIPVGAHHVVVQALALLDQVPEPLRPPLTEACQEIRDFERRIAGIEQQLRVLAKQLPVAGRLQSIPGVGLLTATALVARVGDVQRFASSRHFASSLGLTPREHSSGLRRYLGSIHKAGDCYLRMLLISGARAVLIAAHRVQSKKEPDRLRRWALQMKALKGHNRAAVALANKLARIVWAVWKHDTPFESRPVVAA

SEQ ID NO: 230401 - protein, 340 aa, unidentified
MHKLSADVFLCCGIDVSAAQLVVALEGEGGRGLRRSFPNRASGHEALILWLQKNGTRVRVCLEATGLYSLDLALALHAVAGIEVAVLNPKKVNRFAATLCRSKTDPADAQVLAEYARRMPFQRWHPPQAAALELRAITRHIAALTQQHTQQSNRLHAVSASRAGARCVQQDLKRSLRDLEHRVEKMRRAALAVIEQDAELRLRFALLLSVPGIGEVSALSLLGELALLAPSLTVRQWVAHSGLDPAHHDSGTSVHKRSRISRAGNRYLRRALYMPALVAVRHDPHLRAFYQALVARHKAKLQALIAAARKMLHAIFGMFRGRTGYDGSRLFPAIELAAAA

SEQ ID NO: 230402 - protein, 355 aa, unidentified
MDSKKYIGMDVHKESISIAVMNGAGKIVMECVIETKASMILQFIDGLRGDLQVTFEEGTSAAWLYDLLKPHVTKLLVCDPRKNASMREGHQSDKIDARRLAELLRLNHLSPVYHGEHGLRTLKELVRSYLTITKDLARIMTRVKAIYRSWAIPCTGKQVYAPRHRAEWLGKIGEPGVRRRAEFYYQQLDALRTVRQEVRRELLAEAKKHPVWKRLCQIPSIGPIRAAVLLGILQTPHRFRTKRQLWSFSGFGIETHSSADYRSVDGRLQRTKKQISIRGLNRNCNRDLKNLFKGAAIVASSKPGPFQEFYNALLTKGIRPEMARLTLARKIATIVLIMWKRGACFDAHHLKPQTA

SEQ ID NO: 230403 - protein, 434 aa, unidentified
MNKKLIYIADDEVNICNIIKSFLVKEGYKAETFTDGHSILEAFAKKPADMLIIDIMMPGMDGYSLCSQVRQISGVPIIIVSAKDTEPDKIAGLTLGCDDYLTKPFSPMELIARIKSIFRRIELDKVISFRNDLNGFKNFKGWIEKVMIENGLDKVIIGFEPTGHYWYNLAEYCRNNDLKYVMVNPFHVKRSKELDDNSQTKNDRKDPKTIAKLVTDGRYFETYVATGIYAELRNVVKVYEHVTGCKSVVDNKITQWLDNYFPEFTTVFGDWEGKTAMITLNSFPLPSMIVELGEIKVLETWKKEIKQGVGKKRAHKLFEMAKDSVGCTEGLKMAVRELKYLLSEYKMYLEQLEEIKVEMEELLNQVSGAKEVLGIKGIGIVSAASIIAEIGDISRFEDARQIQKYAGLNLIENSSGKHKGQTTISKRGRNISCF

SEQ ID NO: 230404 - protein, 429 aa, unidentified
MNYNQNKKIAQITPYTLIIGVDIAKFKHVARAQDFRGIEFGSPCYFENTKEGFEHFLHWISETKKAHSMEKVIVGMEPTGHYWFNLAHILKENEIKAVNPLHVKKSKELDDNSPTKNDVKDAKVIAQLVKDGRYAEPTIPQGVYAELRVAKKIRDLLTEDLQTVQGQVHNWIDRYFPEFLKVFKKWEGKAALQFLRLYALPHEIANFTEDQLLIHLRKSVKRSVGANKVRELKQAASQSIGLRQGSEMAKMELKTLLAKYDLIQKEFEELDGKIDSLLDEIPGVAQMLAIKGVGRDTVAGFFAEVGDLREYTHPRQIIKLAGLSLKENTPGKHKGKTTISKRGRKKLRALLFRVCMILVAKNSAFKALHAYFTQRPDNPLKKMQSLIALCNKLIRIFFSISKKQFEFSEEKMLKDIPHLAGSKKAELAA

SEQ ID NO: 230405 - protein, 344 aa, unidentified
MEYYAGIDVSLERSSVCVVDATGRIIGEGKVASEPEALIAWFVGLGLSLARVGLEAGPLSQWLYAALRKAGLVVELLETRHVRSAFKAMPIKTDRKDARGIAQLLRLGWFRPVHCKSLPAQETRALLTARKLVQSKLHDIEMSLRGILRGFGLKVGATTPRTFGARIDGLVAGHPTLAVIADALLAARTVLARELDGFERRVRQLARANARARLLMSAPGVGAIVALTYVAAIDDPGRFSSSKAAGAHFGLTPKRYQSGERDVTGRISKIGDGGVRTVLYEAANVILTRLVKGSALKSWATRLANRAGMRKAKVALARKLAVILHRMLADGTTFEPGRAATAAG

SEQ ID NO: 230406 - protein, 432 aa, unidentified
MASLYFSERSFAYESCLSNLLCVDVHKSFLVATIIKTTSEVQPSYQKKRFSTFNNSILEFKQWLLDNSCRDVCMESTGKYWVPVFNLLEDELNVTIANPKWVKAVKGNKDDTKDSKWIGDLFRLGLVPGSYIPCKPIRILREFTRYRYKLTSCRSSEKNRFQNALTVCNVALDSVVSDIFGKSATSVIDYLLEQSDNSINHEEISSRLLRSLKKKSESVIESIEGYQMTESQKYRMRLVHAHMDYITSTISDIDSMIDSLVEPYENAVQLLCTIPGVDRNSAITIISEIGTDMTQFSNSKRLCCWAGLTPGNNESAGKKKSVRITRAGVYLKPTLVQVAHAAVKSNKSPYYKAKYERIMKRRGKKRAIIAVARMILTAIYHMLSTGEAWNPTDLYKIDMPEPLKNRQKEKAVTQAMKLLIAEGLIKESQLAS

SEQ ID NO: 230407 - protein, 452 aa, unidentified
MCLEDRPILEPNAAGIDIGAREIFVAVPPDRDEHPVRIFSTFTEDLEKMALWLEECGVTTVAMESTGVYWIPPYNVLEQHGVKPCLVDARGMKNVPGRRTDWHECQWLQFLHSVGLLRAAFRPAGDVCAVRSLMRHRAGLVEMTSQHIQHMHKALTQMNVQIQHVINDITGLTGLAIVDAILEGQRDPATLAKLRDPHIKASEETIRKSLEGNWRQEHLFTLKQSRKSHQHYQGQIAACDEEIEKLLVAFEARVDPVERPLPPNRKKKQSGRKKKNVNPKTGFDVRTESYKLFGVDLTQIPGLMAMILTLFSEVGRDMSRWPTAAHFVSWLGLCPDNDISGGRVLWRGLRRVQNRAGQLFRLAAFALHHDQTPLGDYLRRMKSKLGPAGATTATAQKIAIIFYTMVKNQVEYDATLWAQRDAERDKRYEAKLKRQAQRLGYKLVPIEQKPAA

SEQ ID NO: 230408 - protein, 350 aa, unidentified
MLIIGCDFHPGFQQVAIFDKRTGEIEEKRVQRREEAEPFYQSLSEQQVRVGMEACGHYPWCEQWLAEVGIELWFGDAAKLRAAVVRRQKTDRRDAEHVLQLLLENRFPKIWVPSLEVREVRQLLVHRHKQVQARTRTKNQLQAMALSQGVQKKWKLWTKAGREELEPLPLLPYTAQRRQQLLRALDGLEAEIGELDRRVAEEARQRPEAVRLMTHPGVGPVTALAMVLTLGPAERFGSAKPVGSYFGLIPSEESSGGKQRLGRISQQGSSFLRFLLVEAGQARLDPQLKRFYKRLAMRKNRSIAKVAGARKLATRLYLMLREDWTYAQLSQAVMQVSPNHPVVEQNKPTV

SEQ ID NO: 230409 - protein, 338 aa, unidentified
MKKTVIGIDISKKTMDWCVMDGKEVSGYHKTANDMDAIVDKLAEVLREGGRVVSEVLVCAEFTGRYIHPLVLACHKCGVDLWLESGYNIKCEARKERGKDDRTDARRIADYGRKNQDDARIYRLPSESIATLRDLLSERALYCSQRAAHKGQLRDMRQYMDPKAYTARAVRQRALVMELDRLVDEVDRSMAAIIASDPELRRQKELLLTVPGIGTICAASLIAATAGFSLFGDGRELCCFAGLAPFAYTSGTSILSRKRVSGRADHELKSLLHMCAMVAAIRKKSGFFVDYYNRKIGQGKSKMCVLNAVRAKLTLTAFAVVRDNRPYCENFKNNFVKS

SEQ ID NO: 230410 - protein, 341 aa, unidentified
MRGLYYVGLDIHKKTIAYCVKRADGHIVDEGTVRATRSSLADWVSARRGRWIVGMEATLFTGWVYDFLKPCVSDVKVGHPYMLRAIVAGKKKNDRLDARTLSDLLRCDLFPACYMAPPEVRELRRVLRYRNLLVSEATRMKNKTAGLLMEVGAEYTKSRLHGKRYFNELLHALEEVPSSVLRLLRLSHESMEIFERNQRWLLEELARDPELCSRLQRLMSVAGVGEVTALTWALEIGDPHRFRSVKQAVSYCGLCSRQDESAGVSKRGPLSKQRNKHLQRVLVEAAKLAPRWNPQLAAVYTRERDRGGNHNRATLAVARKLVSYLLCVDKTKKPFELKEAA

SEQ ID NO: 230411 - protein, 422 aa, unidentified
MLEEAADREEIIQRVAALDIGKAELTCCVRVPAEGRPGRRLQEVQAYPAMTGSLLRLAGHLRCLGVTRVVMEATSDYWKPVFYVLEAHGFDTWLVNAKDVKHLPGRPKTGRLDAVWLCTVAERQMIRPGFVPPPEIRRLRDVTRYRIDLVAVRTAEKQRVEKLLEDACIKLGVVASDIFGVSGRAMLDALAAGERNPKALAQFARTRMRGKISVLEEAFTGHFTGHHAFLPAKMLARIDGLNADIAELDARIEEMTAPFASAVQRLDEIPGIGRIAAAVIIAEVGLDMARFPTASHLASWAKFAPGVKESAGKKKGKGSTGHGNRYLARVLGEAAVGAARTDSFLGERYRRIARRRGAQKAVVAVGRSLLVIAWHLLSDPQARYADLGSDFFSQRINPERRKRAHIHQLEALGYKVTLEPAA

SEQ ID NO: 230412 - protein, 354 aa, unidentified
MANTTRTELPAFSSIGIDIGKDVFHLVGFDRSGQIVLRRKIKRLALVSTFEALSPCIVGMEACLSAHFVSRTLRKLGFEPRIIPAKYTKPFVKGQKNDYNDAEAIAEAALRPNLNLVAEKTQAQLDLQALHRVRSRLVSRRTATINQIRAFLIEQGIAVRAGAHALRNSLFAILKNRADEISPRMCGIIMGLYEDLLWLDQRVEGTTSEIEAISQCEGNCQRLMSVPGIGPVISTAVVAAIGTGEAFERGRDFGAWLGLVPRQYSTGGKPILGRISKRGSKYLRTLFVQAAQIILMRPKNWEKFSFGAWLTEAAKRMHKNKLAAALANKLARIAWSILRHGKDFDTHRIEVTAV

SEQ ID NO: 230413 - protein, 391 aa, unidentified
MTSVGIDIAKDLHWASAIDAAGEALLDRKVANTPQDLLRLADELRALPAPLKVGIDVLGGIATLTQAVLLEAGFALVHVSGLAVNRARQGTVGGETKSDPRDARVIADQVRTRRDLRPVVAVSELDIELRLLVSRRRDLSEEQTRRLNRMHDLLAAIFPELERSVDLTTKAALALLSTFVTPKELREATDEALKAPLGARASRGYAAELLAAARGCAQRQPMSLPGEALTARIVKDLAREALRTHEQLAVLDAEIEARLARHPDAALIRSLPGMGALLTAEFIAQVGSIERFKSAHALAAAAGLAPVLRQSGKVRFLRRPSGGNKGLKRVFYQSAFASLRCPQSKAFYARKRQEGKHHHQAVIALARRRVNVLWAMLEQRRPFSPHPSTRS

SEQ ID NO: 230414 - protein, 311 aa, unidentified
MASFLGIDVSSLSLDALVRPQGIKISVRNDPAGFEELVKSLRGLSIKRVLLEATGGYERDVMRFLQDANYKVIRVNPKRARWFADSLGIKAKTDAIDAAVLAHFAEVIPDKPTLKTSPERALLRELLQQRDRLVQQRDDDRRRLKQAQSAMVAIFLKTNLQHFASQIKLVEQAIKRQATVLNDERIAKLDEVKGIGMVTATKLVALLPELGHMESREIASLVGVAPFNHDSGKSVGKRFISGGRFEVRRALYMACLVAVKHNPTLKARYEALRGRGKLAKVALVACMRIFIVRLNAMLRSGTPWRDDLPQP

SEQ ID NO: 230415 - protein, 336 aa, unidentified
MEAMREVLGIDVSKSKLDIELLINGKVRTKVLQNTPAGHKSLLEWIDKSKASRSSLHVCMEATGVYHEALALTLYDAGIKVSIVNPACIKGFGHGENIRNKNDEIDAGLIARYCLAMNPELWTPPPLEQRQLRGWTLRVQALKDIRQQEENRLEAHTIGGMDDVAMNVKTHITWLDIEIKKLEKEIDDHIDRHPGLKNDAQLIASIPGLGTTTIARVLGHIGDIRRFKNAKAFAAFLGVTPKQRTSGSSVKGRTVMSKTGSSSLRAALFMPSMVARRHNPILRQFADRLLATGMAKKAVIGAVTHKLAHLIYGVIRTGKPFDANFLPNRLAIQDGI

SEQ ID NO: 230416 - protein, 335 aa, unidentified
MSRFAGLDLSMETTAICVVDDKSSRITAVKVESTPAAIAEALSDAGPIERAVIETGRMAAAICLGLRELGIPVVCLDAVQAHQSLKAMKANKTDPGDAAGLAQLAQTGFYKEVHVKSAPAQGVRSVITARSHLVEARVRLDNTIRGLCVAFGIKVGPSQGKDFVARAEAAIGVPGLGEAVASLLGVRERLVREIKRLDRMLVVFSRRSSACQILMGIPGVGVQTAAAFAAAIDDAGRFKRPRSVGASFGLVPKRHQSGELDWVGRITKQGDTMVRKLLYEAANSILTRSRRTFGLKTWSLKIARRRGLRKARVALARCLGVIMHAMLRDGTLFEA

SEQ ID NO: 230417 - protein, 403 aa, unidentified
MRKQEMDYGVYCGVDVGKGSHYLVALRPEGDERLASRPLPQDESAIREAFSGLSALGKVLVTVDQPGCIGSLVVAVAQDMGIDVAQLPPRAFRKAADTYGELKTDAFDAFVIADVSRATPRMIELVAPRGEALEAIRALSSFRADAVKERTSCYNRLHDLLNKACPPLEALFAGDALHTALALALLARYGGPLGLRAAGQARVAAWAGAQRYQKSRGPKMAAAVFAALSEVTVALPAAAVMEAEAKRLAARAGELEALVAGFDSEIAALARSVPEAVLLQGMPGMGAVLAPAIAAEVGDVSRFRDADHLSSYAGVAPVKRESGASLKGARGAKGGNRRLKGALFQYARQACLHDPRAKEYYDRKRAQGKTHGQALLALARRRVEVIYAILKSGTPYEAGAQAA

SEQ ID NO: 230418 - protein, 340 aa, unidentified
MNITRLSIDLAKDVFQLYGVDGKQKCVLTKRITSRAKLIEFISQLKTCEIYMEACGSSNYWARTFQGYGHTVKLISPQYVKPYIQRNKNDYRDAQGIMEASFWAGTPYVTPKTVEQQDIQSLLRIRSNYIEIRTTVSNQLRGLMKEYGVFVAAGYHKLKQALPGIFDRSTENGLTPQMKELIEGQYDMLLIFDEKIDKLDIQIEQMSKQNEVCQRLQKIEGIGPITALAIIALVGNGQGFKNGRHFSAYLGLVPRQHSSGQKEKLLGISKRGDVYLRELLIHGGRSVVMHCSQKSDARSIWVNKIKDTGGMNKAAVAVANKNARIVMAMLLSGENYQKAA

SEQ ID NO: 230419 - protein, 395 aa, unidentified
MFIVGIDIAKRSHEAIIIAEDGQVVRKAFRFRNNCTGYNLLLEQVRRLTLVKSQIVFAMESTAHYWLALYARLLKDGYTVMVLNPIQSHSLRELYIRKAKTDARDSLIIADLVRFDRCKASNVPQDKILALRELCRSRAYLVDMAADLKRKLIALLDRIFPEYESLFDSVFSKASIAVLSKYSTPQKVKNANLRKLTDILMESSNGHFGEWKAHQLKEAACSSFGIDDSDGVYSTLLGMFLEQILSLTAQADSLEKQISVFFQEFNNPLTSIPGVGTVLAATILSEIGDITRFSSADKLLAYAGLDPSVKQSGEFKSNQNRMSKRGSPYLRRAIWLASTVAVHRDPMFQTYYEKKLSEGLHYMNVIGHVSRKMTAVIFAVLRDGQPYQPILQSAG

SEQ ID NO: 230420 - protein, 363 aa, unidentified
MKEEKRRYVGIDLGKREYTMAIIGKNGKMSIHQGKTCIYGRQALYKKLETNDKIALEAGNLAFIMAREIMEKTGGEVRVLNSAKLPFIWDAPTKTDKEDAMKLAHLIEERRDEKLPIVPLPSEKELARRKILASYGREMKNRTRHINTLHAIFVHQGHTTIVKKNIATAERRQEAIKILTGTEREEAEWILKYLELHEMRIKELKMKIQKEAKKDEDMKILQTIPGVGPVVAYAFTAHVGDGNRFSKGAQVSNYIGFVPRLDYSGTIQRNGHITKQGNSYLRGLLVQAAWMTVRSKQGGALRARYAHYTLCHGASKKKTVVSIARKLTEHMYSVLRSKTAYEPRRWKGPQNGIIDISSFKNSA

SEQ ID NO: 230421 - protein, 319 aa, unidentified
MKDDAVFVGLDVAKATLDVAVRPTGECWQVPNDEAGVADLTGRLRGLRPALLVCEATGGFERAAVAAVAAAGIPVVVANPRQVRAFAKGTGQLAKTDRLDAGILALFAERVRPTPRPLGDEASQLLDALLTRRRQLLEMVVAEKNRLGFAPRPLHRGIRQHIRWLERQLGDVTDELARVIEASPVWRAKDDLLRSVPGIGPVVSATLLGELPELGRLTHKQIATLVGVAPLARDSGQLRGKRMVYGGRAPVRTALFLAALCGRRWNPQLKVFYERLIAAGKPKKVALIACARKLLTIVNAMLRDNVAWCAPDLALQDSC

SEQ ID NO: 230422 - protein, 312 aa, unidentified
MAMLSFCGIDVSKDRLDVVVLPEGWFFSVSNDTAGWAELVARLRPLTVSAIGLEPSGGYERGIIRALLAAGLSVRRINPNKLRQFARARGVLAKNDRLDARLIAEYVAIMPTRVVQRDAAVEKLAEIVTMRRQLCDEHVAAENQAAHLEDAMLRRLSKRRQMRLEADIRLLDKRLAEMVAANVALAQRYELLTSMPGVGPVLAFTLIALLPELGKMSRKQIAALVGLAPYDFDSGKLKGHRSIYGGRMSVRNVLYMAALSASRYSPALKAFHNRLADADKKSKVIIVAVMRKMITTLNAMLRDNAVWQPRSA

SEQ ID NO: 230423 - protein, 364 aa, unidentified
MFHFTTLFIGMDVHKESFLLCYYDMMANQFKHSTKVGPNVSYIVNYVNELRRLYGQDAEVLCGYEAGCLGFTLYHQLQAHGIPCIVMAPTTVMKEGSKRVKTDKKDAAQLAKALAFRSYRPVHIPTAEDEQVKEYIRMRTDHKVALKKIKQQLLAFCLRHDFRYTEGRNNWTQKHVRWLHSLNPKGLYAEIFTEYLLTYEKLVDQIARYDARIEQLGQSDSYQEEVSQLSCFIGVKTLTALSIVTEIGDFNRFATAQHSASYLGLTPSENSSGDKERRGAITKAGNSHVRRLLIEAAQSLAKGTIGYKSKELKRRQSGNRVEVIAYADKANERLRRRYRTLVLGKNKKQNVAKVAIARELSGFI

SEQ ID NO: 230424 - protein, 341 aa, unidentified
MSKHTVIALDLAKTVIQIAKVSKHGEIEFNKAQSPDKIRKILANSKPCIVAMEGCGSAQYWARYAKEYGHDVRMMSPRKVKPFMTGQKNDANDAIAIAIAAQHPSMSFAPVKTLEQQSIQSINTSRRFLDKSLTALNNHIRAIAYEYGQTIPKGMKGLRLRMAELLEPESTTLTDSVKDLLSSMWEQFKRTQTQLKNVTQQLDGFTKAIEPCQRLQQVEGIGPKSASLLYAAIGNGKAFKNGRDASVYVGVTPRQYSSGGKPVLLGITKHGDATLRATMYQGALAVVSRLSSEPKTQKQQWLLDLVKRAGVKRTCIALVNKNIRTAWAMLKYNTEYQPVYL

SEQ ID NO: 230425 - protein, 358 aa, unidentified
MRIIGCDLHARQQTIAMLDTDTGELEEKTLGHEGETVREFYSALSGPILVGIEATGSMQWFLEMMEELGIEYRVGDPAKIRKAETRKQKHDRRDARLLLTLLAENRFPTIWMPSTEQRDLRTLLRHRHQWVRLRSRVQHTLQSMALNHGLRRGHSLWNQAGQHALRVLPLAPHASERRAALLALYPHLQESIDDLDQQVSQQAQQHPQARRLMTHPGVGPITALATEVFLGDPLRFIDGKALASYIGMIPSEHSSGRRQRLGAMSKQGNALLRYLWCEAALHAVERDPELKRFYRRKLVQKGLGKARVAAARKLGIRLWIMMRDQIDYQEFCRRGKARQENGSVHAGMPDLDSGPAAQ

SEQ ID NO: 230426 - protein, 383 aa, unidentified
MKKTQETLRNDVSTKTAVLHVAFELSNSKWKLGFSDGNKMRFKNIDARNLEQLKEEIQKAKSRFRLDDDVRIVSCYEAGRDGFWLDRYLLSHGIGNVVVDSSSIEVNRRKRRAKTDRIDARKLLNMLMRYHGGERKLWSVVRVPSVEAEDGRQLSRELESLNKERTRHRSRIRGLLILEGLEVKNPSGKRFLEELDSLCTWDGKGLPGDFKARIVREYERLRMVEEQMGSLRKERETRVGSAETLSMRKVAQLRTLYGIGVTSSWDFVMEMFGWREFRNRREVGAFAGLTPTPYDSGGSQREQGISKAGRGRIRALNIQIAWGWLRFQPQSKLSLWYQERFAGGGSRMRRIGIVAVARKLLIDLWRYLEYGVVPEGARLRLVK

SEQ ID NO: 230427 - protein, 339 aa, unidentified
MQTYAGIDLHSSNIYLGISDENDKRLFAKRLPNQLDPIMDALNPYKDSLQAVVVESTYNWYWLVDGLKEKGLPVVLANPSAFKQYEGIKHTDDKWDSFWLAHMARLGILPKGYIYPKKQRAVRDLLRRRALFVKNRTSHLLSLQSMFQRHLGQKVSANVLKRLQPEEAEKLFESPYEIFTAQSQLAIIKDFQRHIKNIEKQALSQVKLKKEFEMLMTITGIGKILALTIMLEVGDIGRFEQVGNYASYCRCVKSQRTSNNKKKGENNRKNGNRHLGWAYVEAANFSRRYCPLAQRFYQRKRDKTNAIVATKALSNKLARASYYIMRDQVAYDADKLFCQ

SEQ ID NO: 230428 - protein, 329 aa, unidentified
MQVLYERCAAVDVGKDVIAVAVRLPGDDRDGQQTVKRTFKTFYGVLAEAARWLVSLGVTHVAMEATGIYSMPVYHALIEHGDFEKVLVCNAGHVKNVPGRKTDLLTDAEWLVQLLECGLLAGSFIPPADIKAARDVIRYRAKIVQSRTSEIQRLGNVLQDAGIKIDSVASSIVTKSGRAMIEALIDGERRPAVLADLAKGRMRPKIPDLAMALEGRFGEHHALMCRLHLDHIDHLEAMTAKLDAQIEAMMAPFRAARDLLTTIPGTGALAAAAVISEIGPDVREFFPDAAHLASWAGMCPGNHESAGKHRSGKRRKGNQHLQPVLVECA

SEQ ID NO: 230429 - protein, 435 aa, unidentified
MEEVTDEPLYRDRVCGIDIGKAGMVATIRVPSDKDPSRRAQETRSFGTTKKQVLALADWLRCWQVPAAVMESTGDYWKGPFYRLEAEGFECVLADAKQVKNLPGRPKRDPSDSRWLAACFERGAVTSCFVATPEFRVIRLHTRYRRDLTGERTREKQRAEKLLESAAIKLSSVVTDLHGVTGRDIMDHLIAGERNPKTLAQLARARARRKIAELEEALEGAEFFADEHAALLKTMLERIDRVNAEIDELTAVIERLLAPYEEQLEQAESMPGWGRRSAQDAVAETGVDMTRFRTGGHLSSWAGKTPLDNQSGKRTGRAKSKKGNRYLAAVTGETAIAAGKTQTREGARYRRLARRRGKAKAQVAVGNTQLKVYHKLLSSPGMRYQDLGADYYERQRDVRRQIAHHVGKLGALGFEVTLCRTPEPQPDGTGQTQAA

SEQ ID NO: 230430 - protein, 342 aa, unidentified
MQVTTIGLDIAKNVFQVHGIDAKERVVVRKQLRRSQVIAFFSALPPCLIGMEACATAHYWARELRKLGHEVRLMPAKDVKAYLKRNKNDAADAEAICEAVRRPTMRFVQIKSAEQQGQLMQHRTRDVLIRQRTQIINALRAHLAELGIVAAQGDAGVNELCAIVADDRDERLPIDARASVIVLAAQLEALQTLIGSIEKRIKMQHRSNETSQRVETIPGIGVLGASAIVATVVDPTIFRSGRDFAAWIGLVPRQDSTGGKQKLGPISKQGDRYLRRILIVGAIAVLRRAQENPGKYPWLTQLLARRPFKVVAVALANKMARTAWALMAYGGTYRAPELAEAA

SEQ ID NO: 230431 - protein, 426 aa, unidentified
MEETDEAVELVERVAALDIGKATLTCCIRIPHEENPARRRQEVDEYPTTTRSLLGMADRLRSHGVTLVAMEATSDYWKPAFYLLEAEGFECWLLNARHVKNVPGRPKTDKLDAVWLAKVVERGMCRPSFVPPKPIRQLRDLTRYRRTLIREQTREKQRLEKILEDAQIKLSATVSDVFGVSGRQMIEAMIAGQRDPKVLAQMARGPMRAKISKLQEALTGHFEDHHAFICQMMLERIDELTTKIEELSRRIDLVIAPFAHQVTQLDEVSGIGQVAAQELIAEIGVDMTVFPSAAHLVSWAKFAPQARQSAGKAKSASTGQGNPWLGGTLGEIVAASSRTDTFLAERYRRLIKHRGKGRAIVAIGNSVLTIVWHLLADPQARYHDLGSDFYESRINQQRHQRNLIHQLERLTGQKVILQPRPEQPAA

SEQ ID NO: 230432 - protein, 482 aa, unidentified
MKKKNIFQNRSQQLLRLFEKAGNRLKMMCVPIDYAKKDHMVMFCNGYGDILRKPFSVKNTLEGVKYLIDQVMRSCRQRHIKKEFVFFGGEDVNSYAENFANALRTKGFLVANVNAHDAKKQRENLQASTDRIDLMGIAMMLLNLRAKCSSAQDGIYRNLRTLVRHRKKLVVMKTEVKNRVHTLVDRLFPGFLNEKNTGINPFSKSSLVLMEDRFSAQQIRRRQQRTLIKMLKRCATPDPESVAAKLHSYAAQVITTPDEYAPTLQLSLQHHIGHYRCLQENIDQLLSEIALLLAQTQGAFLTSIKGVGIVLAAGVSSEIGNPFEQKPLNNLTSYSGIIPRVKQTGGIEGHTHTGRVSKRSNHLLKDYVVQSAFQMGLRGPEPLLQDYKRREAAGQHADFGIARRFLRMAMCLMRSSQVYLPPKLRSPKSQMHERAGYYLTAWPLLRDKWKKAHAHQAAFAKDQPLGQWRQMVQELYDIKLKL

SEQ ID NO: 230433 - protein, 308 aa, unidentified
MTTIYTGLDIAKLNLQLHLLGRRHDLPNTAAGHRRLVKLLAALPGAHVICEATGGYERDLVAALHDARIPVSVLNPARVRHFARATGQRAKTDPLDAAILTAYGQALQPPPTAPRTPQEHHLSELIRRRVQVLALLVAQRQQAQRLTVPALRRQAQSLVRRLERDLEQIETQLTQLQAQAKALGERVQKLIAITGVGTITALGVLAELPELGTLNRRQAAALAGLAPHPRESGQWHGRRRIGGGRAPVRRALYMAALVAARSNRQLKAFYQRLRAAGKPAKVALTAVMRKLIILMNHTLKNPNFVPQN

SEQ ID NO: 230434 - protein, 419 aa, unidentified
MKDIETKKVRVINKETLIVTVDISKVTNFGYCRCPNGKDVKPFSFMNNARGFNTFWDIIMKTKNAHDLKDVVVGFEPTGPYGEPLIHFMRKKKIKVVQINPMHTKRVKELEGNSPNKTDQKDPKVIADIIELGHALTVVQPEGSAAELRRLTHARERAMQRRTAIFNQLQDLVYVIFPEFSQVFKDVKTKSARFILENCPTPEEIVKYKLKKLTTTLRKVSRGKLGEERASELYEAAKTSVSTIEGRQSVLLEVKEILSIIEATDNFVAEVEKEMRRYLEKIPYSRFMLTIKGVGEVTAAGLIGEVGDFREYNTISEMLKFSGLDLFEISSGRHKGQRRISKRGRSLMRKLLFFAAINTVRKGGVMHEYYQGCLARGMLKMKALIAVSRKLLGVIFALVRDHSEYIEDYAEKHKLKKAA

SEQ ID NO: 230435 - protein, 441 aa, unidentified
MSHAILAVGVDPAKRLHRAVAVLLPDEVVFDAELPNALDAVADLDDRLCELARRHGAELVYGLEDHRHYGRLFCQVLTQRGRDVRVVNPLWANRQRAFYGQDKDDAIDGRSIAGVVLRRHHDLPLASDFGEVAQAVREAERSIQDLGRARTRLINRLHLQLNDTYTSVYETFFGKLRSPLALRFFRRFPLPQDLPPRHDEVALASTLLELAGGKVGPHKGEKRLVVMRGKAKTILETGALQRGLPRTPALELKAELIRQLCDEGLAIHDRVRRLERMLRKQLLPTTGQTITTVPGISTILGATIVGETGSVERFRSPAAFAVYNGTAPARHSTGGRERHRARRDCNHRLKRAFYLAARAAVLHDPLAKAYHERCKSRGLDYEEGLKRVARRMSDLVYALLKSGERYNRSAIERAIEKRREQMAHAAVDHAKKPCSLPTNSV

SEQ ID NO: 230436 - protein, 391 aa, unidentified
MDVLYQSCAGIDVHQANIVVCILHGPLTSTRPKREMATFDTTTKGLRACHDFLSQFHVEAVGMESTGVYWRPVWHALCDDFELILAQPAHMKAIPGQKTDKKDAHWIAKLTRIGLLPRSFVPDETIQELRELTRQRKHYVESRNRETNRIHKFLQSGGIKLTTYIEDIMGLSGRNLLQLLVDGTPITPRIVHQSVYTSLKKKVPQLLEALDGYFSDHHRFMLKQSLEIYDFYQKQIELLEERITVYLSQYENHVETLDSIPGIDVITASVIISEVGVDMSQFPTFGHLASWAGLCPGNNESAGKKRSTKIRHGNSYLKKCLCQAAFAARNQKGSTLADRYYQIQSRRGSQKATIALAHQLLKIAYILLKEQMTYPEFLAQKKKTTRDELVA

SEQ ID NO: 230437 - protein, 344 aa, unidentified
MTSIDYIGLDIHKKTISFCAKAQDGTILDQGTIVARRDTLLAWAKARPRPWIGAMEATLFTGWIYDLLKPLAQELKVAHPAMLKAITAAKKKNDKVDARTIADLLRCNLLPECYMAPSAIRDLRRVLRYRNLVVRQATRMKNRIAGLLMETGTPYNKERLHGRAYFSELLGSLREVPRSVVELLQLSRGQLEFFATIQRRLLKGLGQDPDLSARVARLQTIPGVGEIMALSWALEVGEVKRLPSIAQAASYCGLTSAQHNSAGKEQRGPISKQRNKHLQTILIEAAKLAPRHNPQLAVVHQRELQRGDRNQATLAVARKLVAYLMAVDKSGKPFAMRASGEEAA

SEQ ID NO: 230438 - protein, 411 aa, unidentified
MLEVKVEKCAGIDVGKKFLAVCILIGLAKQKPVGEVRRFGTSVKELERLRTWLLESGCTEVVMESTGSYWKPVFNILEGSLKVILANPEQVKALRGKKSDPNDSRWLASLLRHGLVQGSFIAPRDIRELRDWTRRRRRLVGDGAAEKNRVQKILEDANVKIGNVLSDVFGSSGQAMLEALLENKQGPAEIAQLGHWSLAPKIPLIVEALEGHRMSDHHRFMIRQCLGHMRHIEEMIEELDKEIGVRLKPYPQQVKLACTVPGIKPTAAASILAETGMDMSPEGPFPDCHHLASWATVCPGNNESAGKRKNGRTRPGNRWLRATLTPTGWAGAADKKSLFQFRYQRLKLRRGGQRAVMAIAHAQLIAIYWALRNGTPYPEQLQKLEQDRREAQIRYHLQKLNKLGYAPDMHG

SEQ ID NO: 230439 - protein, 396 aa, unidentified
MYWIGVDHHKRNTYVTSLKEDGSVHLQRNLSAQAHVLRAFFRDHPKPYVVGIEATYAWEYVADIVEGLGQEIRVGHPLLLKAFARRHQKNDKIDSRLSAWLLYRGDFPAIRHPDRKARRQRDLYRQRLHLVRRRSGTAARAKAFADRLGFTAEMNLSTRRGVAALAALPVGQAQATVLASHQRLLTFLYQEIEQLDKAIEAVAQCTPEVQWLMSVPGIGPYLALLIASEIFDIARFRRAENLVGYAGVAPGNEASGGKVFASHLAPSVNRYLRWGLCEAVGHYVRACPRLQAKYERLKRAKGWKTARLAIARHIALVVYHLLKERRPYRAEAPPAAAADPRAETTTTTATTTTATATLKGTNKKRRLRTTARPDSPGVCGDRRDARERLARPPAAT

SEQ ID NO: 230440 - protein, 321 aa, unidentified
MQPVTVTVYAGVDVAKASLQLHLQGRQTEFPNQPAGLAKLRQQLQAVPHVHVVCEATGGYERPLVQVLHQAQIPVSVTNPAQVRAAAQAQGKRAKTDRIDAALLTDYGQRYQPKPTTPSSPTQLQLVALTQWLSQLVQVLALAKTQAEHHEAAFVCKQHAKLLAHYQSQIAAVEKQIQALLAQDAVLQQRVQCLDQIEGVGPRTAWLVLAHMPELGQVNRQTVAALAGLAPWTRESGTMKGMRCIGGGRPEVRLALYMAALTAARFNPVLQPFYQRLRSKNKPAKVALTAVMRRLLVHMNHQLKNLATAQAATKIENAKTP

SEQ ID NO: 230441 - protein, 374 aa, unidentified
MSNIASLKTERHQFLYVGMDIHKDNHTAIATNCFGQNLLELAISNSEQDFDDLVARVERLSRTKNLKPVFGLEDSYGYGLRLAKHLYEKGLSVKMVAPVLVDRDRQYETHPEKSDSLDALGVAKVLIQRIDRLPNYSISKNDEISKNIKELTLDREFLVKEQGRLKNHLHRLLHKSHNSEYRTKFKDPFSLKALKYWRGHPVSRKRVDTAGNIFILKNQIRRKVKRLLDIREETKEIEQELNCLIQQTNQKIETLNGCGTVLASQVLAEVRNIDRFHSPHSLAKYAGLCPREKSSGKTFRHIKTKSGNRRLNMAVHRIALSQISKSGNKRAKEYFQKKISEGKTKVQALCCLKRRLIDIIFMMLKHKQAYNYSN

SEQ ID NO: 230442 - protein, 382 aa, unidentified
MDTLSNTVAAIDSEQQTATLFVALELGQATWVVALHSPIADKISIYRIEGGDTDQLMALIEKKRVQAARRLGRAAQIVSCYEAGRDGFWLHRFLIRRGIDNRVLDSASILVDRRARRAKTDRLDARALLRVLMALVRGEEQVCRVVRVPSIAQEDERRLSRERERLLHERNSHIARIKGLLILHGVRDYRFIERDWKERLDAVRTTEGQALPARAKTEIERECRRLWLAKQMLAEVEREIEQMIAHDGAVAGKLIQVRGIGPTFASVLTHEVYYRSFDNRRQVGSYLGLVSIPWQSGSVRRDQGITRSGNARARRCAIELAWLWLRHQPGSALACWYRTRVGTMTGRMRRIALVALARKLIVALWRYLQNGIVPEGAVLKVA

SEQ ID NO: 230443 - protein, 315 aa, unidentified
MTNKITRKSIINVGVDVGKASLDVVIHEKQIHWQEDNTEQGIKRILKRLSHYRVERLVMEATGRYEFELAEAAYHRGLPVCIAKPLSVRRYAGAVEQLAKTDKIDAAIIAEYAAVVKPRISPRKSKNLIAIKNLVARRRQLVNLRTQEMNRKSIMGKMFEVSCRRMIRSFDTEIERMEKQLSKHVEQQAEWTEKQTILKSTPGVGDTLIYTLLSDLPELGTLNNREISALVGVAPVNRDSGKLRRKRRIQGGRASIRSVLYMATLSATQCNPVIKAFYKKLVAQGKHKKVALTACMRKFITILNTMIKNKTEWAF

SEQ ID NO: 230444 - protein, 344 aa, unidentified
MEITTVGIDLAKAVFQIHAVDERGKTVMKKQLKRDQVAASFANLPPCLIGMEACGSAHHWARKLGGFGHTVRLMAPQFVKPYVKTNKNDAADAEAICEAVARPNMRFVPIKNIEQQSVLSLHRVRQGFVKARTAQANQIRGLLGEFGLIIPQGIANLAKRVPELIEEASNELTCAFRLLIQRLMEHLKELDRQVAEMEGQIKAWHHASDHSRKLEKIPGIDPITASALVATLGDAKSFDNARQLAAWLGLVPRQHSSGGKPTLLGISKRGDSYLRTLLIHGARSVIFRAQQKVAMGGWLHKLLERRNPNVAAVALANKNARIVCALLANNREFRADDTPAIAAV

SEQ ID NO: 230445 - protein, 353 aa, unidentified
MHTHQQSTEPVATIGLDIGKNTFHLVGLDRRGAIAMRIKVSRNQLVRRLVNLPPCLIGLEAGSGSHHIARQIQSLGHDVRLIPAQYVKPFLKGHKNDYRDAEAIAEAVQRPTMNFVAIKTPEQSDLLSLHRVRSRLVRQRTAIINQIRGFLIERGITVRQGPGPLRKVLPEVLCSPPEALSPRLLRLISELDQDWRHLDDRLEVLSGEIESLSENDAACQRLMTVPGIGPIISSAVVAAIGTGSGFKQGRDFAAWLGLVPKQESTGDRTKLGRISKRGNKYLRTLFVQAAHVVLERRPAAAMRALWPWIAQASKRLAHRNLLAIALANKLARIAWAVLARGRDYQPRITPNAA

SEQ ID NO: 230446 - protein, 457 aa, unidentified
MVKKAPPKAKDPGFIPMAVVHPNAAGIDVGDTLHAVAVPANRDEQPVRTFGTMSADLEEIVVWLEKCRIDTIAMESTGVYWKPLFNYLIRHGFEVYLVNARHVRNVTGRKTDQSDAQWLQQLHSCGLLKSSYLPDNEQESLRTLVRYRRTLSEESSRFVLRMQKALELMNIKLHTVITDLTGKTGTAIVEAIIAGERNAVNFLPLIDRRIEADHGVIVKSLEGNWRAEQLFTLEENYTCYKFFQERIAKCDQAIEAQLQRYSAIQNEGEASLAQAKNTELAPVKKKKNKGAPAFDIRSFLAGILGVDVLAIYGLSEISALEILAETGTDMSKWGSEKHFASWLNLCPNNKVSGGKLMSSRLLKKKPNAASQAFRMAANSVQRSNHWLGDYFRRMKAKGGNKYAIVATGNKMATIYYKMVRNQVEFSPLDLQQYQEKRQQAKIAYLERKLEQLKKGVA

SEQ ID NO: 230447 - protein, 439 aa, unidentified
MKREAYRAVDVKQVMIESLVTDRAGIAVIVGVDVAKSDFLATVRWSDGRFERPWRAKSPDDISDLVGRFQGLADGRSLTIAMESTGTYGDALRQALTDAKLAVHRVSGKAVHDYAEIFDGVPSQHDGKDAAMMAELAAIGKSSPWPYEPPTEFDQELRYWVDRMDVQQRIRMLWLGRLEALLARHWPEATRNLELSSETLLQALIEYGGPAGLAADANAAKRLKRWGGSFLDSKKIDRLVQVSASSAGVRQTAVDRRRMEECARAALSAKHEIQKASRHLEELATSHAIIARQAAVVGWATACVFWAYLGDPAKYHCAEAYRKAMGLNLKERSSGRYQGLLKITKRGPGAVRRWMYFAAMRLVQRSDVVEWYEVKKGQRPKGGKRALVAVMRKLALGLYAVGVGTEVFDAKRLFSPTVRLSRHAAQRAKKNQKEQRQKV

SEQ ID NO: 230448 - protein, 388 aa, unidentified
MTPQLKETRTFSTMTGDLRKLKEWLKQCAVTNVAMESTGVYWKPIYNLLEDEFSVIVVNARHIKNVPGRKTDVRDAEWIADLLKHGLVKASFIPDRDQRELRELVRYRRGLIQDRSALVNRIQKVLEGANIKLSSVATNVMGVSGRAMLQALIEGNENPEELAELAQGKLRDKHTDLVAALEGLVGAHQRMLLDSLLRHLDFLDSEIKRLDDEVSTRMKPFEDQIQRLDEIHGIGKRSSEEILAEIGTDMKRFPSAAHLASWAKICPGNNESAGKRKSGSTGHGNSWLRSVLVQGAWAASRTKKTYFSALYRRMAGRKGAKRAIVAVAHAILVTIYSMLTDNTHYRDLGANHFDQLNVQYVLKNAINRIERLGFRATLEPIPVQEVSL

SEQ ID NO: 230449 - protein, 422 aa, unidentified
MLEQTQETEEIIQRVAALDIGKAELVCCVRVPSPDAPGKRLQEVATYQTMTRSLLVLADRLGELGVTRVVMEATSDYWKPVFYLLEAQGFETWLVNARDVKHLPGRPKTDRLDAVWLCKVAERQMLRPSFVPPPAIRRLRDLTRYRIDLVGVRTAEKQRVEKLLEDAQIKLSVVASDIFGASGRAMLAALITGTRDPEALAELARGRLRAKRSQLREAFTGHFSDHHGFLLHTMLGRIDQASADIAELEAKIEAEIAPFARAVDRLDEITGVGQTAAQVIIAEIGVDMGRFPTPGHLASWARFAPGVKQSAGKTKGKNATGHGNPYLARVLGEAAVVAGRTDTFLGERYRRIARRRGSKKAIVAVGRSILIIVWHLLADPTARFHDLGAGFYDTRVNAERTKRNHVRQLEALGYKVTLEPAA

SEQ ID NO: 230450 - protein, 315 aa, unidentified
MEAMIERCAGLDVHQETVVACVLYGPLDRRPKKSIESFSTSTKGLLKLNDWLASLEITDVVMESTGVYWKPVWNILESDFRLTLANAKHVKNVPGRKTDVKDAEWLAKLLRSGLIESSFVPPEAIRDLRDLTRYRKKLVSNRTAEQNRIHKILQDANIKLTTVLSNIFGQSGRNILEAVINGEKIEEGDLSDMVHWRTKASLEEISEAINGRIRRHHRDMLRFHWEHMTYLEQTIKNLEEQIDQRLSPYRKEIELLDTIPGVNKDSAAVFLAEMGVDMSVFKTSKRLASWAGVSPGNNESAGKKSPVKRQKGTKL

SEQ ID NO: 230451 - protein, 414 aa, unidentified
MDVIVDRCAGLDVHKKTVMATVRFPDGRGGRGQETKQFGTFTQRLVELGDWLVAHDVAQVAMEATGVYWKPVWYVLETAGFELLLVNPAHFKNLPGRKTDVADSEWLAQLLECGLLRGSFIPPRDIARLRDLTRYRTKIVQERARETQRVQKVLEDAGIKLDSVASDVLGVSGRRMIEALIAGERDPEVLAEMALGRMRPKIEVLREALVGRFDDHHALLLGMHLDHIDELTVIETRLDAAVDELMAPFAEAATGLVSIPGVGKRVAEVIVAEIGTDMSRFPSAGQLASWVGLCPGHHESAGKRRSGKARKGNPALRTAMCEAAWAASHTKDTYLAAQFRRFGRRFGTRGQAKAIFAVAHTMIVIVWHLLANQCTYDELGADYFERHIDTQARQRQLVRQLEALGNKVILEPAA

SEQ ID NO: 230452 - protein, 393 aa, unidentified
MKVTRIGLDIAKQIFELHGVDRHGRMAIRKTLRRERVLEYFSQLPACEVALEACGGAHYWHREISKLGHTVRLLPAHKVKPYLDGNKNNAHDAAAICEASSRPSMRWVEPKTIAQQDLQSLHRVRQVTVRQCTLLANHIRGLLLEYGIAVARGTAALQRALAQLLEPDEQRLSPLLKQLIAGQWRMLKLHEQQVNVHDRRIANIARHDASCQALLKVEGIGPLTATALVATAGNGRQFKNGRHLSAYLGLVPGHSNTGHKTVMLPITKRGSRYLRTLLVHGARSTLYHARRKTDPRSLWLQRLQAKRGHNVAAVALANKNARIAWALLRFGQAYRPNLAHAPTAERGATPAASAPGRRAGLTLKLHRVSAASAESPIFPPRPQRVKGGTEKCS

SEQ ID NO: 230453 - protein, 381 aa, unidentified
MRQVCGLDVHKDSVFACILNEKGVIFQEKFGVLTPELEQLAAALQKHDVSEVCMESTSIYWMPVWRVLEPYVAELKLVNPYFIKQLPGKKSDVKDAEWIATCLLKDLIRGSYVPADIIQQLRQYDRRISDLNAECVRKLGKLDAAMQRCNIRISNYVATTDGKSYKDVVRLISEGIRDPAELLKVIHGRITNRVGKDVILASLTGIISDTDIDVIRQLREEVDLAQRHKDECQSKMDVICQQFFPKQLKNLQTIPGVKGRSATAILAEVGSDVSSFQDAAHLVSWCGLKPRNEESAGKIKARSITHGNRYLRKTLIECAWAASKTQECYLNKFSYYQTVVRRKNKMKVQVAIARKILTAIWYVLHESVAYRDYTPDIAPAA

SEQ ID NO: 230454 - protein, 323 aa, unidentified
MLSARPAGVPSTTRICRAGGTAITTISHTQPARLTVGVDTHKDVHVACAKDQLGRRLATTLVPTTTAGYAELLGWAGALGQVEAFGIEGTGCYGAELARFLRSRGQRVVEVNRPDRAARRRHGKSDPVDAEAAARAVQAGEATGLPKAGDGIVEMLRVLRVARQTAMRARTQTINALKSLVVTAPDTLRRQLRDLPARQLVAAAAAFQPGTPATPTVATMVALGSLARRYQALDGEITMLSKQLHRLVGQAAPALLEVFGVGPETASALLVAAGDNPQRLHSDAAFAALCGASPVEVSSGKTVRHRLMGAARLWEAGFRAASG

SEQ ID NO: 230455 - protein, 337 aa, unidentified
MNNSVIGLDIAKNIFHMYTLIEGKAVKKKLKRKELLAFFANYPVSVIGIEACGSAHHWARELIKLGHEVILLNTRYVKSFVIGNKNDFNDAAGIFDAVTRPNKRQVTIKTIEQQDIQLIHKVRQGLVAKRTALVNQTRGLLSERGIIMLKGVNQVRKQLPLILEDAENDLTSLSREVFSEQYTKLVVLDDEIKKQDQRIVQLCKNNDMAKRFLEVPGVGPMTASIVASDIGGGKGYERSRDYAASLGIVPKQHSSGDKQVYLGISKRGNRYIRTLLIHGARAVLKNCRKKEDKLNLWLQALIERRGFNKAAVALANKNARILWAMASKEKEYDALLV

SEQ ID NO: 230456 - protein, 323 aa, unidentified
MLPTLGIDISKDSFHLELSINDKLRHRKFANRKEGFGELCVWLAKHKATQVHACLEATGPYSEALALYLHQQGHTVSIVNPVQIKAFGQSELLRNKDDRPDAGLIRRFCEKQRPAPWTPPPVHLRELQALTRHLENLIETRQQQVNRLETTNTKQVAKSLRKLVTHLDAEIERTEQQIDDLVDRHPDLKQQSELLDSIPGVGKRTAAKLLAEIPNITQYKSARQVAAYAGLTPRNNRSGTIRGKTRLSKTGNARVRKALFFPAIVAKRHNPIVRAFCERLARNGKNKMQVVGAAMRKLIHIAFGVLKSGRMFDPNHERPNAVA

SEQ ID NO: 230457 - protein, 388 aa, unidentified
MIQVDDLSRSLIAFEQISTLVIVVELSQSSWLAAGVVPGIERRPLKKLDPDPTALLHLVEGWRDRATKAGRAITRTVLAFESGRDGFWLARWLRVRGVETFVMHSASVAVSREPRRAKTDRLDTEMLIRVFLGWLRGEPRHCKMVAIPTLEEEDARRPSREREILVGERTRIINRMKAALVRLGIRGFKPGLLTAPQKLDALRTPEETPIPPNMLDEMRRDMARLAWVREQINAIEQARLERLERAPATGRHAMVRMLARVIGVGVDTADMLVQEVLSRNLRDRRAVARYAGLTGSPDESGSKRREQGLSKSGNARVRRGLIQLAWRFLRFQKESALAQWYRGRTEDAAGKRKRTMIVALARKLLIALWRLVTIGEIPVGVALRPAVA

SEQ ID NO: 230458 - protein, 354 aa, unidentified
MPRTINRLEAVATIGIDIGKNTFHLVGLDRNGAIVLRQKLSRRQVEARLANLPPCLIGMEACVGAHHLSRQLKAHGHDARLMPARYVRPYSKGQKNDFRDAEAIAEAVLRPTMKFVAIKTVEQLDLQALHRVRERLVCQRTSVINQIRAFLLERGIAVRQGLRALRTEMPIILSMTDKLSPRMIHVIEALCTDWRHLDGRIETVSDEIKTLSEQDDGAKRLMTVPGIGPIISTATVAAIGSGDAFSKGRDFGAWLGLVPRQMSTGGRTILGPISKRGNRYLRMLFVQAARAVLLRPQSWEKHGLKSWIEAAARRLNRFKLAIALANKIARIVWGVLHGGRNFEIRPMKPASQAA

SEQ ID NO: 230459 - protein, 369 aa, unidentified
MKIQKYVGLDVHKDDTEIAVAEGDRSGEVRAYGKVSSDLVTTEKALRKIKGEHGVLHVAYEAGPTGFVLYRRLQQLGFECIVVAPSKTPQPKGGRQKTNRRDALQLARLHRAGELTSIHVPDAVDESLRNLTRARSDASRDLKRAKQRLKSFLLRLGFHYQGKANWSEAHQRYLRELTLPLPALKSALEEYLLAITQGTERLTRHEELIAAQVPQWAMYPAVQALMCFRGFDLVAASMLVAELGDVHRFAHPRGLMAFFGLVPKEASTGDTRHLGAITKAGNSQARWILIEVVQHASKPPKVSASLALRQKEQPHVYRALAWKTQVRLHKRHWHLTCRGVMAAKVKVALARELVGFVWDLLRQVPTKKT

SEQ ID NO: 230460 - protein, 404 aa, unidentified
MNAIGIDVSKGKSTVAVIRPFGEIVKMPFDVAHNSKELRELADFILSFEGESRVVMEHTGKYSDPVAEFLYEAGIFVCVVNAKLIHDYGGDTIRRNKTDKVDALKIAGYCLDKWVKLARYTPEDELRKTLKVYNRQLSEYTKIKTMMKNNLISLLDQTFPGANELFSSPARQSDGHEKWIDFVANFWHCECITPLSQRAFTERYEKWCRKNSYNFSTQKAEDVYFSSAGHFCTLPKNDFTKTLILQAVSPLNSLCETIATLKSEMEKLASKLPEYETVLAMHGAGKTLAPQLIAEIGDIRNFPKRSSLARFAGIEPPENQSGTYSQHSRRISKQGSPHLRKTLFQVMCCVLQLGHGDEPTFRFLDRKRAEGKPYKVYMIAGANKFLRIYYARVKECFDELGENV

SEQ ID NO: 230461 - protein, 327 aa, unidentified
MEVYVGLDVSLKETSICVVDGSGKIVSEGTVLSEPLSLAEFIRVKAGSAKRIGLETGPTATWLWHELRALGLPVICIDARHAKAALSLQINKSDRNDAAGLARIMQCGWYKEIRVKSLPCHEVRAVLNSRAQLVKTKCDLENQIRGLLKNHGLVIAKAGSNIFRRRAEELIGEYRLLREAVRPLLAVHEVVRREIAGLTRKLLAMARNNDESRRLMTVPGIGPINALAFCAAIDEPSRFRRSRSVGAYFGLTPRRYASGEVDWTGRISKCGDTMVRTHLFEAAGVLLTRVPRWCKLKAWGHRLWKRIGFKKAKIAVARKLAVILHRM

SEQ ID NO: 230462 - protein, 352 aa, unidentified
MNVPHYIGFDVHKKHINFCIKTADGTIVEEGRVLAQRSALRKWAAGRQPSWHGAMEATLFSAWIYDTLEPYGQALEMAHPAMLKAITAAKKKSDPIDARTISDLLRCNLLPTCYVATPEIRELRRLLRYRNLVVRESVRMQNKIAGLLMETGTPFVKEKLHGKKYFANLLQNLEEVPESVKDLLRLSRGAMEMFQATQKRLIQRLLANPNLGQRVERLASIPGVGEITALTWALEIGDPHRFPSSATAMSYCGLTSALKSSADKQQRGPISKQRNQWLQTVLIEAAKLAPRWNPQLAALHARELERGHRNRATLTVARKLAAYLLAVDKSGQPFQLRAQTTEEVAPLLDRAG

SEQ ID NO: 230463 - protein, 320 aa, unidentified
MSAEPVFVGIDVAKASLEIAVHQSAERWSVPHTDAGVANLVARLRALAPTLIVLEATGGLERPGVAALAAASLPVAVVNPRQVRDFAKATGQLAKTDAIDAAVLAHFAAAVRPPVRPLPDAATQHLAALVTRRRQLVEMLTAERNRLATAPKALRKELAAHIRWLERRLAGLDTDLDQAIRTSACWRAQEDLLRSVPGVGPIVARTLLAELPELGTLSHKAIATLVGLAPLNRDSGLFRGRRMIWGGRATVRAVLYMGALAGVRFNPVLRAFYERLRAAGKLPKVALTACMHKLLTILNAMAKHQQRWIPNYADTRQECR

SEQ ID NO: 230464 - protein, 424 aa, unidentified
MENTAARKRKQVPEGYLVIGVDPHKKRHAAVAITQDFTTQAKFKFDNTREGLEMMLDRARGEMLKSGCRGVMFAIETGGHYWRNIAYYLDERGIPFRFINQYTLKRRREGKDINRRKNDYRDSEVAAQLLCTGEFVESVIPQGVYAELRTSHNAYQRLVKERTRITNLVKGLLDALFPEFTRVFKDPGGLTALSVLSTCPIPRVIAGMTEDVFVATIEARHKGRRLMRKKLKALHYSAKTSIGIDAGARSLSYEIAFLVDKLELIRRHIRFMEGTLVRLVDETEEGKYLLSIRGLNYIAVAGLLAELGCFKLYRSAKQMIKMAGSNPTESESAGKKRSKTPMSKQGRPLLRYCAWTSVIPMLRFNPDFRAWAKQRRERPVHANPLSGREVVGAALNRLLRLAFALVKNQTYYQDVKPALIPVAV

SEQ ID NO: 230465 - protein, 409 aa, unidentified
MRIIGLDIHRAFAEAVAWEDGKLNRLGRVDMRRDLLSAFAARLSPEDVVVVEATGNAASVVAVIAPHVKKVVIANPMQVRIIAHAKIKTDTIDARVLAQLYASGFLPEVWIPDEPTQALRRQVTRRNQIVRQRSRLKNIIQSILHAHLIPSCPHQDLCGPRGRDWLAVQVVPEDERLAIERHLREFDRLGEDLKVIERDLARSALADDGVKRLMTIPGVDMVVALAMAAAIGEARRFDKPQKLVSYLGLNPSVRQSGPGPAYHGRITKRGRGHARGMLVEAAWAAARAPGPLRAFFLRVRARRGQHVAAVATARKLTIIIWHLLIKGESYTWARPSLHAKKLRDLELKAGHKAARGQKGEAHAYNVKSHRDEERRWVEQAETAYTRFVAGWNRRGPKKVRTGAAKEERL

SEQ ID NO: 230466 - protein, 370 aa, unidentified
MNEITGVRIARVGVDLAKQVIQVHAVDASGRRVVARAFKREQFFAWCTQLPAGCVVAMEACSSAHHWARKLRAQGLEPRLIAAHFVTPYRMEGKGGKNDATDAAAICEAASRPSMRFVPIKTCEQQGVMSLHRVREGLKEERTACINQIRGVLTEFGLVFGKSPKVLRAVLADIIEDASNELSTTARLVVQRAFEHWRELDDHLRWCDRQVGQHVRASPAAKRAAKVIGIGELGASALTAGVGDFTQFKSGHQFGAWLGVVPRQASSGGTIRLGRITKRGDDYLRTLLIQGAKAAVMSADKRDDPISRWLVQLTARVGWQKACVAMANKNARILWAVMTREDGFDSKHVSVKPQAKQPDQQRSIPAACVA

SEQ ID NO: 230467 - protein, 372 aa, unidentified
MPQRSRVFVGLDTSKLKISVALAEEGRQGEVRFLGEIDNTPEAVRRLVGKLASRYSEVLFCYEAGPTGYGLQRQIAALGHECDVIAPSLIPKRPGERVKTNRRDALTLARLHRAGELTAIWVPDPGHEAVRELVRARDAAMADLRAKRQHLQSFLLRHGRLFPGRKPWTRAHARWLSELAFEHPAQYLVLREYRQGLEDAQARLERLTQQIAEVLTTWSMAPVVEAYQALRGVALLTAVTFVAEIGDVRRFESPRQLMAYLGLVPCESSTGERVRRGSITKAGNTRVRRVLIEGAWTYRFPARMSRLLQERQANLPQIVRTIAWKAQVRLCARYRRLMAAGKRQTVVTTAIAREMAAFLWAIGHAIEPRSAA

SEQ ID NO: 230468 - protein, 282 aa, unidentified
MLEITRIGVDTSKAVFTVHGIDATGRPVLRTNVRRGQMIQFFRKLPPTIVAMEACGSSHYWARELAALGHTVRLIPPPYVKPYVKRGKNDRNDAEAICEAAGRPGMHFVPAKTVQQQADGMVLKARDTLVCQRTALINTVRGHAAEFGVIAAKGAAKVDVLLAAIEQQPDIPPVAKEMFALFRQQINDINARIAELDARLHTAHKANPVSQRLATIPGVGPITALTLAIEIDAAQFESGRHLAAWAGLTPKEHSTGGKQRLSGISLAGNERLRPCWSPAPPR

SEQ ID NO: 230469 - protein, 381 aa, unidentified
MTTAVTHKTNVHTTEATLFVAFELSEKTWKLGFTMGHGQKPRERNVTARHQERVLDEISLAKHRLGLPETAPVVSCYEAGREGFWLHRFLLAHGITNHVVDSSAIEVSRRQRRAKSDGLDVRKLLSMLIRYEQGEHQVWQVVKVPSVEAEDQRHLHRDLETLKRERASTTTRIQGLLSSQGIQVSTLAKLPEQLDTLRLWDGTPIPPGLRRRVLRVYAHHTFLTEQIAAIEAERRAQLQTSSDASIDQIRQLMMLKGIGINGSWLLVMEFFGWRAFKNRREVGGLAGLTPTPYQSGESAREQGITKSGNPHVRWMITELAWSWLRFQPESALSVWFRERFGDGGKRLRRIGIVAVSRKLLIALWRFLETGVLPEGAVLKEG

SEQ ID NO: 230470 - protein, 347 aa, unidentified
MSKIKLVAIDLAKRCYQIGALDEHGKILYNRKLSPTKFAEALQQLEPTIVAMEACSAAHYWGRRLIALGHEVRLVPPQHAKAFRRVHKSDAHDVVSIAEAAQRPNVHFVPVKSIAQQDLQLLGRIRERLVAQRTAVINQIRGLAREYGVNFAKSREALLEQLPVALADAQNDLSPIAREELRNLLQEVRCITEEHVEIMKRITALASEDPAYDRLRTIPGIGPTIAPALLASIGHAQQFASARQCSAWAGLVPRQNSTGGRVQLGSITKNGDRSLRVLLIHGARTVVRWADKHSHPQSRWIKDLVARRGKNKAIVALANKIMRIVWVVLTQGVEYDMHKAFRAQPAS

SEQ ID NO: 230471 - protein, 369 aa, unidentified
MTHATSALTSTNLTSVQLPTTVGLDLSDRVSHFHVMRGDGVTLSTGKVATERAELAALFIRWKGCRLVIEAGGHSPWISRLGKSCGMEVVVANPRRVELISKSDKKSDRTDAESLARLGKSDVELLAPITHRSKEAQEHLAVQRARNALVASRTGLINHVRGVLKSHGYRGPRCGAERFAAQALRGLPKELEPALAPLLGLLLRTNAEIKALDKKLERIAREHYPVTELLQGPKGVGPIISLSFVLTLDDPNRFKGRDVGAYLGLVPSLNASGLGNPQLHITKAGDREMRRLLVLAANYILGRFGPDCDLRRFGLRIAGDGSDKNAKKRARVAVARKLAVLLHHLWKTGAVYDPFYLAKKRGEPVPAGA

SEQ ID NO: 230472 - protein, 341 aa, unidentified
MGNISIIGLDLAKNTFQVHGAHADGSVGFRKKLSRNKVLMFFAAQPRCMVAMEACASSHFWAREIGRLGHDVRMIPPIYVKPFVKRQKNDAADAEAISEAASRPAMRFVAVKSRETQALGMAFRTRDPFVRQKTHTINAVRGHLAEYGVIAPKGTAHLERLKRVVADPDGGLPVEVVSLARLLLDQIAALKEKIDVLEMEIRARVRHDDVASRLTTIPGIGPICAAAMEAFAPPPETFAKGRDFAAWLGITPRQHSSGGKERLGKTSKMGQRDLRRLLIVGAMAVVRWAVRKGAAEGSWLARMRQRKPRMLVAVALANKMARICWALMAKGGIYRDPAAAA

SEQ ID NO: 230473 - protein, 356 aa, unidentified
MSNITRVGVDLAKNLIQVHAVDAAGKVVTNRALKRDKFLTWCADLPPGCLVAMEACSGAHHWCRQLRERGFDARMIPAQFVAPYRIQGKSGKNDANDAAAVCEAASRPHMNFVPPKTLAQQGMLCVHRLREALKEERTACMNRIRGLLAEFGVVLPQKPAVLRQHLNDVLEDASNDIAGMARLVLQRAQEHWRELEVHIKWCDERIAAHQKDDEQVQRAAELKGVGPITASAVVATVGDFKQFKNGAQFGAWLGLTPKQNSSGGKTSLGSITKRGSNYLRNLLIQGAKSVVLVGKHNDDPISQWAQRLRERGGWQKAVVALANKNARILWAVMTGNKRYDACHVSVLPAGAMPAAA

SEQ ID NO: 230474 - protein, 311 aa, unidentified
MSTSAIYYVGVDVAQDFLALCGAPTASVENTPKALRSWLRQLKTKHPTAHLVCEATGRHHHYLQGTAATAAVPLSVVNPRQMRDFARSVGRLEKTDQVDARVIQYYGQVLSPDPTPLLPTILRELQDLLVVRQALVEEHTAWQHRDNLLCPAAHRLCQRRLRVIDTEVGKVEAQVTALLDRPEATNLQDRVQTMCLVCGVGPRTAWVLAAWLCELGQCNHRQIAKLSGLAPMNCDSGRFRGERHIAHGRTPVRRALYLAAVVAAQHNEALKPYYQRLRAAGKPAKVAYIAVARKLVVFLNRILTEAPVMTN

SEQ ID NO: 230475 - protein, 448 aa, unidentified
MLRRACRRHHLSIPMKIDRILSGYAAIDIGKEDIFIACHGADQARRFGTFSADFETAATYLKEHGIQKVAMEATGVYWIPLHDLLQARGFEVTMFNGANARNMPGRKSDVADCQWHAMLHSHGLLVPGFIPPEDIRQLRCFYRLREDHIGLAAMHTQHMQRALDLMNVRLHHVISQIHGVSGLRVIRAILAGERNPQALAAHCDVQILKKKREEVLQSLAGQWQEHHLFALRQGLEGYEFCLAQAAACDAQIAAHFERINQNRPPQAPQAKAKRVRHNAPQIDGLHQHLVTLTQGRDATVLPGISPLGFMKLLGETGCDLGGHWATEKHFTSWAGLAPNSHQSGKRRRRVPRKKTVTGQIFREAVLSLAKSKHLALGAAYRRLKRLRGAAVAATAVARKLAVLYYNLMTKGLQYVEKGIAAYEAKYRAQRLKALQKSAAELGFTLKAA

SEQ ID NO: 230476 - protein, 359 aa, unidentified
MKKSTTGDRRDVCGLDLGDRHSRLCILDAETGEVVEEGRVPTTEPGLRRRFASVPSMRVAIEVGTHSPWVSRVLADCGHEVIVANPRKVRLISKSRRKNDAMDALRLARLARTDPALLSPIRHRGPEAQVNLALLRSRDAVVKARTQLINHVRGAVKSTGKRLPRWGAEAFASKAGAAVAPELLPAVGPLLEVIAALTTQIRSFDRKVEELASAYPETGRLRLIRGVGPITAVAYVLTLEDPARFAKSRAVGPYLGLVPAQRDSGDAKPEMRISKEGDAFLRRLLVGSAQYILGPFGEDCDLRRQGFKLGAGGSKKEKKRAVVAVARKLAVLLHRLWTSEEPYEPLYNAQRAGRAKIAA

SEQ ID NO: 230477 - protein, 408 aa, unidentified
MGWTAEVVSPSSFIRTDGGCPVAQVNDLSRCLTAFDPNSTLVVVVEMSKASWLVSGAVPGVERQPLKKLEPDATELLRLIERWRNEAVRAGRPISRIALAYEAGRDGFWLARWLIARGIEAHVIHSASVAVSRERKRAKTDRLDAAMLLRVFLGWLRGERGHCGMVAIPTMEEEDARRPSRERESLVNERSRITNRMKSALARLGVRGFKPHLRRAPERLAGLRTAEGTGLPTNIIEEFRRDMARLALVREQISSIEKTRAERLEQAPDTGPHAMVRLLARVIGIGIETADMLVREILSRKLRDRRAVARYAGLTGSPDESGLKRREKGLAKAGNARVRRGLIQLAWRFLIFQKDSALARWYRTRTEGPSGARKTTMIVALARKLLIALWRLVTTGEVPDGVELRPAA

SEQ ID NO: 230478 - protein, 318 aa, unidentified
MTDHRFATFIGFDVSGNTIAVFNGSNGQTGEIANTAAAIEAYAATLDAGCYCICENTGGHEAVLLSVLYARNIPVHRADAAKVKAFVQSFGTRGKTDALDARALAAYGRERHAGLTLWRPEDRNVMTLRQLVLRREELVTMRTAEKNRLKAPCTKQTPWLQETITVVLEALQTQISSLEARIAALLKDSEHLKQAQRILLSVPGIGKTLAPVILASLPELGTLSRRQVASLAGVAPHPKDSGKSKGYRRMNGGRPLIKRALFIAALTAARNKKSSLGAYYNRLIQNGKKPIKAIGALMRKIIVVLNAKMRDHYAQQLS

SEQ ID NO: 230479 - protein, 324 aa, unidentified
MKLKKSVYHRYIGVDVSKAVLAIDDSCGAIPKSVDNDEKAITKQLVSQIDDPERTLVICEGTGGYERKLVAAMHAAAVPIVVANPRQVRDFASGHGILEKSDPIDASVIRCFGEDVRNLKLATPKSDEQESHAAMARRRKQLVDMINQEKNRLAQTADADVAELIREHLQTLQKQLKLVDQKIAKMISRESKTNRTVQVLQSVPGVGKVTTSTMLCDLPELGKLSRGEISKLVGVAPMVRQSGKHKGKRMILGGRGHVRHVLYMAALVATRCNPVIQSFYQRLVAKGKEKKVALVASMRKLLIILNDMVRNGECWRHANLSESK

SEQ ID NO: 230480 - protein, 349 aa, unidentified
MKKIVKQVLGIDVAQKELVVCLGRMYDDWTPELYSYGTFVNSKKGFDAMVKWVKKLTVENTPVRYAMEATGVYHEALAYYLEGKGYEVSVVLPNKISNYFRTLEVKTLTDRTASEAITRFGLERKLDPWKRPKQIFKSLKQLTRERDQVVEMRTIAKNQLHAEKAEAFPNPSSVTRIKSLITFLDKQVAAILKEITGTINQDKEVNSSIEIICSIPGVGRLTAATVLAETNGFELIRNKRQLTSYAGLDVREKQSGTSVKGKPRISKKGNRHLRKAMHLPALAAIRHEKRFKAVFVRLVSKHGIKMKAAVAVQRKLLEMIYTVYSQSTPYDKNYLKMDLVEMEKHSAAA

SEQ ID NO: 230481 - protein, 449 aa, unidentified
MSRPQVIDDQEHERVHERVAAVDVAKDTGMVCTRIPNPSRPGARRATVWTVKARMNAIRALGRQLKRDGVEIVTLESTSDYWRIWFFVLEACGLAVQLVHAAQAKNLPGRPKTDKLDAMWLARLTELGLLRASFVPPKAIRDLRDYTRARTRLVQERTRCWQRMEKLLESALVKVSSVASKLTTLSAQDMIKAMIAGERDPEVLAALARTRMKAKHDDLVAALDGMFDDHHGELAGLLLDQIAFLDARIAQLTTRAGQLAAAMPAAWGIDPDGTTGPGAGTGPGAPVLPAVARLAEIPGVSENLARSIIAETGLDMTRFPTAGHLVSWAGLCPSARQSGPRSRPGKKGQGDTWLRGALGQAAVGASGTATFLGERYHRIVRRRGKAKAQVAVARSILVIIWHLLANPETRYTDLGYGYYQARTDTDRKLRNHIRQIQALGFAVTVTKAG

SEQ ID NO: 230482 - protein, 459 aa, unidentified
MVIRPKTNPKKSDQSLPLIHPDAAGIDIGASSHFVAIPADRCEDSVQEFQCFTHDLHRLKNWLIKHHIKTIAMESTGIYWIPLFEILEEAGFEVKLINARHVSNVPGRKTDVLDCQWIQRLHSYGLLQGAFQPAKDMAPLRAYTRHRENWVRHAGTHIQHMQKALRLMNLNLDQVVSDITGATGMKIIHAIIKGEHDPFTLARFRDVRCKKTDDEIAQALDGHYREEHLFSLKQACDLYAFYQQQIRECDHQLEAYLESLNMNTSPELMGQVLSKVPKPRGNAPAFDLRTDLFHLTGVDLTSIDGINSHTALKVLSETGIDMSRWGNSKQFCSWLGLSPGSKISGGKNMSGKTKRTANRAAAALRISAQSLSNSKSALGAFYRKKRYHLGAAKAITATAHKLARIIYSLLTQGTTYEDPGENAYEEKYQQRIRQNLKQKAKKLGCILVSIETGEEITIQ

SEQ ID NO: 230483 - protein, 352 aa, unidentified
MRKYYVGMDVHKLSIAIAILDAYGKLVSRTVIETTTEAVRDFFRNLRGEIHVTFEEGNHAAWLYDIVEPLVKRVVACNPKHNRIEGSRSDRVDALKLAELLRLNALKPVYHGEHGTRTLKHLMRCYECLVKDITRVKNRLKALYNSQAIKQRGRELYHVSKRESWLQKLPNLGQRTRAELFFQQLDELKVIKRAAQKAMVAESKRHPAYKVLSTVAELGPVRIAQIIPTVETPWRFRSKRPFWNYSGLAVVTRSTADHEFEDGRVRKRQKQVIQTRGLNPDYNRRLKAIFKSAATHASHGGAYREYYEGLLKTGMRAEMARLAVARKLSATVLAVWKSGENFDAGRILRKAV

SEQ ID NO: 230484 - protein, 391 aa, unidentified
MYYVGIDIAKNNHQSSIIDTNGEMVCESLSLSNTIKGFEKLIKYLNSYEVTPENCIIGMEATGHYWLSIYSYLLELGYQCVVINPIQSEAFRRMEIRRSKTDIIDSKCIAEVMRFGKYSSSNISDEATYGLRNLSRYRYSLVDECSDWKRRLISILDQVFPEYSKLFSDVYGVSSKNILSKYPLPEDMLKVSATELGKLLSKCSNGYFGKDKAEEIQQAALSSVGIKFAQKTFSFEIKQIIEKINFLENQIKEIEKEMSSMLQEQCPIITSITGIGDTLGAVIYSEIGDIKRFERPNQLVAYAGIDSTVNQSGEYKGNQNKMSKRGSPYLRRALWMAATVASQKDPALSKYYESLRARGKVHGVAIGAVSRKLCNIIYAVLRDNKEYIPNI

SEQ ID NO: 230485 - protein, 343 aa, unidentified
MLMVRSVVGGVDTHADTHVAAAVDGNGGLLGIESFPASETGFEELVGWLVGFGPVTQVGVEGTGSWGVGLTRFLHDQEVVVVDRPNRQKRRKVGKSDPTDALAAARAALSGEATVTPKARNGPVEQIRVLMVARRSARQQRIQTLNQLRHLVFCAPELIRDRFKDRPKTGLVSEAANMRPRKGSDLITYRTNLVIKSLAQRIKSLDTEMRTIDQTLRSLINETAPALLEMYGVGVDTAATLLVTAGDNPERLHSERSWAHLCGVTPLPANSGKVTTRFRLSRGGDRQANTALYRIVLTRMSSDEETRTYVTRRRDEGLNTAEIMRCLKRYVARQTYKHLPHMI

SEQ ID NO: 230486 - protein, 407 aa, unidentified
MDSLKTVFGIDVSSRKSNVCIMVNGRKVNDYAISNDMVGFNQLLDDLKQVTNPQIIFEATGVYSRRLQAFLDMHDLRYVMMNPLEAKRKTKDDLHQNKTDKLDAMYLAKMQSEHPQRLAYVQSEEYQELMANNRIYEQASHDLITNKNRLHKAIQLTFPEIEHLLANPRGKNYWSIVLKFPHPNIVLETKEADIIDFLKSLSGIGEKRANDLAQRLIRLAKLACPAVKKSSAHIRGLEMAINNILSAEETCQTALKEMAKLAPKRDLEILKSIPGIAENTALRIISELGDIRRFNNPNQLNAFVGVDPQVYESGNLTAHLSISKRGTAIGRKVLYLAINQIQSAKKAGNPCHIADYYEKRKRSSETASHKKAAIASIHKLLRTIFALITNDQLYSYDIAKHNQRLLS

SEQ ID NO: 230487 - protein, 340 aa, unidentified
MTTPLYCGIDLHSNNSVISIQDKSSKQVYEKRLLNDLPTILKALKPYQQDLRGCVVESTYNWYWLVDDLMEAGHRVHLANPAAIQQYNGIKYTNDFTEARFLAHLLSLDILPTGYIYPKATRGIRDVLRRRLLLVDQRASQRTSLQSLLARHTGKRLSEGQLKKLDSEGLRHLLPIPCASLIAEALLSMIQSMTEVIEQLERAVSTHCVKQKDYELVTGIGGIGKILGATIALETGTIERFADAGHYLSYARCVNTKKISNGKNKGHNNRKNGNRYLALAFMQAAHLAAIWEPQVKRFYQKKQSKSHIMVAKKAVAAKLARAVYHMLNNQEPFDVERAFG

SEQ ID NO: 230488 - protein, 389 aa, unidentified
MRARCFVGQRNYKLILFYHMQTIHRSQTLFVGVDVHKDTHTAVALSPFGEKVFEMKIGNETEDFISLIEKTKVEAEKTGLIPSFGLEDVHSWGERLSSFLVEEGLPVRAVAPVLVDHRRSKMTHPEKSDSLDAQGVAEVMIQKIDTLPVYTVSETAEKAKQIRELSLEREWLVKERARIKNQLHIFLHRIHNTGYRAKFKDPFSKKALRYWMRSVPKDTDTILAGRAKRAVRRLIDLREEIQEIEKELVVTMNESGQTIATASGCGVVIAAEIIGEIGDINRFHAPGALAKYAGCAPREHSSGKTIRWRKTRSGNRRLNRAFHRMALSQISRSGNNAARAYFKKKISEGKTKAQALVCLRRQLVNVIWMMLKHKTEYRYPQDKLIDFFS

SEQ ID NO: 230489 - protein, 344 aa, unidentified
MSKVTTVGIDLAKNTFVLFGLGPKGHSGWKRKVRRKQLLEQLVRLEPCTVAVEACGSSHYWARQIQALGHHVELLPPQHVKGYLRGQKNDYNDAQAIAEASEHGRIRPVPIKDIEQQDDQMLHKLRQGVSKDRVRISNQLRGLLAEYGVIIPQGIAALRRELPLALEDADNGLSERARQLLCRQYQRFLEVEQELAWYDQQVKQRSRQDETCRRLQAIPGIGEVVASLLKGWMGDGRQFRRGRDAAAALGLIPRQNSTGGKDVLLGISKRGDPYVRAQLVHGARAVVARADGKTDRLSLWLRRLKAERGFNKATVALANKLVRIAWVVIARGEHYQPSEQRLAK

SEQ ID NO: 230490 - protein, 455 aa, unidentified
MPKQKRTRNARTLPVARVLEPNAAGIDIAATEVYVAVPTGRDPQPVRRFSTFTDDLHRLADWLQACRVQSVAMESTGVFWIPLFQILEDHGFRVCLVNARHVKNVPGRKTDVSDCQWLQYLHSVGLLRASHRPTQTICAVRSIWRHRESLVQMAAVHIQHMQKALDQMNLQLHHVISDITGTTGLAIISAVLDGERNPENLATLRDPRIVASRETIARALVGDYRVEHLFTLRQSLQAYRQYQQWIAACDSEIERQLQVLPSNLPDDPKPLSKPRDHHKPRRNEPRFDLRSQLYRVFGVDLTAVPGVSSLTAHTLLTEVGPDLRRFPNAAAFASWLGLCPDNRISGGRVLSVVTRKVKNRLTIALRMAAQSLHRSQSYLGQYFRRMRIRLGTPPAITAAAHKLARVLYHLITTRQPYEESTFAVMEERSRHRQLLRLKKQAASFGFQLVPGSSVP

SEQ ID NO: 230491 - protein, 340 aa, unidentified
MQVNTIGLDIAKNVFQVHGIDGEGRTVLCRKVRRDRLVKLFESIEPCLIGMEACATAHHWARQLTALGHQVKLMPPAYVKAYVKRNKNDAADAEAICEAVRRPTMRFVPVKSADAQSALMLHRARHLLVRQRTAQVSALRAHLAEYGIIAPKGIAHVRDLLTVLESGASMLPDLARQTLMMIAQMVDALSQQIRKIEVELLAWHRASAVSQRLESIPGIGFITASALAATVGDARAFRSGRQFAAWLGLVPRQNSSGGKDRMGGISKMGDRYLRHLLVVGATAIVRYTKRKATAVSVWANRLLERKPTRLVTVAVANKMARIAWAVMARQEAYRVAPIAA

SEQ ID NO: 230492 - protein, 332 aa, unidentified
MSAVVCGLDVHKETTYATILDTRGQVLVQRKMMNEDIPAFLEMTKPEKLAMEASTYIIPLYRKLTEQGYNVTVSHPRKTRLIAEARIKSDRVDSRALAELLRLDSLPTSYIPPRDIAAIREKVRRRAFMVRQVTKLKVKIRDVLAAEGVKTPEGFGLFTAKGVEWLRSLKLEPVDCYLRLIEPLKDEVKLVSGDLKRSAGKDAEVQLLMTIPGVGYYIALLVKSEIGDIRRFSSGDHLASYAGLVPSTRSSGGVERHGGITREGSRWLRWAMVEAAMVHIRCDTPVTRFYHGVAERRGKRAALVAAARKLTEVCFSVLVHGRPYWNPLDAQA

SEQ ID NO: 230493 - protein, 349 aa, unidentified
MKTYYVAMDVHSASIVIAVLNGAGKVVMESVVETGAERVRGFLKQLRGKVYVTFEEGTQANWLHDVVRPLVTEVVVCDPRHNKLLQSGNKNDRVDAKKLAELLRLGSLKGVYHGDNGVRTLKELVRTYDCLVSDTTRVMNRLKAIFRGRAIACAGHDIYRQDRRAQWLAQLREPGAKQRAGFLYDQLAALKPLRRKAKLAMVKEARRQTAYLWLMSVPKLGSVSVAQLIAVVGTPHRFRSKHQFWTYVGLAVVTRSTADHEVVNGVLRRSQRPVSTRGLNRNHNHLLKRVFKNAATSACHSGPFKAGYEVRVARGMAPSLARLTIARQLAATTLALWKRGEQFDPERKK

SEQ ID NO: 230494 - protein, 349 aa, unidentified
MTKVTIGVDLGDQYSQLYVVDAAGTCVETGRVRTTRAGLERWFAGQAPARVVLEAGTHSPWASRALQALGHEVLVANPRKLRGLYENDSKDDRVDAEYLARVGRLDPALLKPITHRGAAAQADLAVLHARDALVRTRTQLISHTRGVVKALGGRLPRCSAEAFARRASGDVPAELQPALAPVLAQVQQVTAAIRAFDRELERRCAEQYPATARLRQVSGVGPVTALAYVLVLEDPRRFARSRAVGAYLGLRPRRSQSGERDPQLGITKGGNPFLRRLLVQGAQYILGPRGPDCDLRRHGERIATRGGKNAKKRAVIAVARKLAVLLHRLWISGAVYEPLRHSTALAQAS

SEQ ID NO: 230495 - protein, 401 aa, unidentified
MKRLSGGIDIGGNFHHMIILDEKEQVLYQKRIPHQLKEMKQIMKELKYLEKKEKAQLSFALEGKNGYSNPLDRLLLLQGFALYNVDNYKLKRFREAFSGEWRDDKRDALMLSKMLNLKEHINTSQEKVFVPIVKPSLITESLKLLSRHQQLLIDEKVRLTNRLGKKLLEVCPELLTLGKLKYQKLIAILAKYPDFSRYHRITLDSLLKIPGIGKKQAPPLLTGLHDLAYMPELTSIYKTIISSHAKRISQLQKEIKQIDKKMDQIGAQDDSIRHLKSIPGVSTRLSSRFIGEIGHINRFPSEKNLAIYCGIACVNNASGKTNKTKAVYKANKMAKQALIMMAGGSIRVNPQCREYYLKKRTEGKAHNHALRCLARQMIKVIYRMLIEDRDYRIKKESMKVA

SEQ ID NO: 230496 - protein, 338 aa, unidentified
MNYHNLIAIDLAKNVFQVCTMSTNNHVLMNKSFNRQGLTEFMLNQPTSVVAMEACYSSHYWARLFKSFGHQVKLLPAQHVKPFVRGNKNDHNDALAIAEASQRPGIKAVPIKTVAQQDIQSLHRLRERCVSQRTSLSNQTRGLLSEYGIVFPAGFKSFKQTLAVLIDPSNTQLTEPLKQQLRYVADEFDRMSARLTELNQVLAQIAQTNPHCQRLMSIPGIGYINATALYSAIGNGGQFNNARELSVWLGITPKQYASGNKQVMAGITKRGNRYLRKQLIHGARALMRYCKKRDDQLSQWLQAVEQRRGKNKACVALANKMARLCWTLLQTNQMYRSR

SEQ ID NO: 230497 - protein, 411 aa, unidentified
MRLCVGDDWAEDHHDIEVMDEAGKVLARKRVPEGVAGIGQLHELIGRFLPEDAGSAEVIIGIETDRGPWAAALAAAGYQVLPVNPLQASRYRGRHGVSGAKSDAGDAHVLADVVRTDAHQLRPAAGDSAAAGAVKVLARAHKTLIWERSAMVLRLRAQLLGYFPAAVAAFADLDAPDALELLGRAPDPARAAKLTRAQVTAVLRRAGRYKVTERADAILAALRSPQLAQPPELTAAYAATVRSLAAVIATLNEQVTSLQGQVEAHFGRHPDAEVYLSQPGMGAITGARVLGELGDDPHRYASAKARRNYAGTSPVTRASGRKKIVAARFIRNDRLTDALMIQAFASLRVSPGARAFYDACRAKGHGHNDALRRLASRHVGILHGCLKTRTLYDEDTAWGHRENIPQSDVAA

SEQ ID NO: 230498 - protein, 330 aa, unidentified
MGACAHQEHENKEQFTIFVTKTDIMEFDSSIEKGFGIDVHQKMIMVNVQGKGIKKETREFTTFTEGIETCREWLKSLGLEYGAMESTGVYWKPVFNILGEDFKLILVNARHIKNVPGRKTDVKDAEWICKLLIGGLLRASFVPPEVIRNARDLFRYKTKMVEEVAREKNRVQRILEDANIKLSSVVSDVFGASGQKILKMFLQGENDIDQIVRESYHGKLKVSREDLKKALKGRLTEHHKFMIQQMFKHIEWLESQIKEIELQLDSILVEYKTEIELLHDVPGIDKTAAVGLISEMGGNMDVFKDEHHLSSWAGMSPGNNESAGKKKVQE

SEQ ID NO: 230499 - protein, 399 aa, unidentified
MKQHASLELRVSIDIGCRHHNVAIGLSSGEILDEFSIAHVPEGFRQFFARVEKQARRFDCPVAVAMEGYNGYARPLDTLVRAREYRLFNINNLKLARFKEIFPGAAKTDALDARKGLELFQLRDHLPMARDVLQEVRATPRENDILKRLSRRRRRLVDERTRVLNNLQADLQAVCPGLLEITGRADNLWFLRLLTSTRDLRKLACMRKSTLCKIAGIGNKYASVVCDWQKRAQFSDEVEWVGEMIQEDAARVLELHDRIRSLEARMETVAKDSSIAKTLSTIPGFGTVCTAELAGEIGTIERFGSEESLALYVGMANLDNSSGNQKGSKPPRQVNTRAKAAMMIAVDRHRKQVPQSQRYYEKKRGEGKKHNQTIRALGRHLCRIIFKMLKDNRGYRLLQ

SEQ ID NO: 230500 - protein, 412 aa, unidentified
MKVAGIDVHKKVLMVVVVDARMPEEKPARRRFVTMPSELHHLLTWLREQGVEEAVMESTAQYWRSVWMELEPHLRLHLAQAFSNRAPRGRKHDFKDAERLVRRLIANELILSFVPGGEQRIWRSMTRMKLQLTRDRVRLQNQIECLLEEMRIKLSIVVSNLLGASGLRILHALANGETDPKKLAQLGGGRLQCTEEQPVDALTGRAQPVHGEMLALQLQRLQLIDQQMARLNSMIAAAMKAHQDAVIRLAEVPGLGVDSAQQIIAEVGAQASTFPSAAELTSWVGTCPGKEESAEQNHSSRSAKGNKYLRRVLNQAAHAAVAKKGSHFQVVFRRLLPRLGYKSAIWAVAHRLCRLVWKILHEGVRFIEQGCEPDPRAKKERARMLARALRKLGYEVAIKPINQVAATNGIRI

SEQ ID NO: 230501 - protein, 423 aa, unidentified
MSEPLTTLYVGIDVSKNSNQVCALNFESKKLINSSFKNNQEGAQELESKLVELCIKNDLKDIIIVLESTGVFSYHIANYLSTSHALLKFNVIVYVVNAKMVKNYAKSYIDTSKTDPKDAFILADFARVGRCKELTPYRGSQRLALQRLTRHRKHIVDMLNKEKQYVISNIFIKFSEFNNKDHDYDTFLNCFTNTAVEVILKYKTIEQIVKTPIDKLTDFIIKSSKNRFTDSKEVATTLKSAARASYRLDKVAYKPVNLAIASSLRLIDAFEKEIDDIDKQIEYLILGLDNSNEYKSLLSIPGIGPTYASGILAEIGSFKDFDDDSALAKYIGLSWKKDQSGKFDSENTPMQKAGNTYLRYYVIEAANMVKLCVPEYKEYYQKKYAEVKIHKHPRALVLTARKLVRLIYTLASKEQLFNPNKSN

SEQ ID NO: 230502 - protein, 363 aa, unidentified
MEYIAFDAHKHYTLASVARADGRLVREQRLAHERGALQQFLAHCEPGSPVALETVGNWYWIVDEIEGAGCIPKLVHARKAKLMMGQINKTDKLDARGLNTLQRNGTLPTVWIPPGELRDQRELPRTRMALVRQRTQLKNRLHATLAKYALHDVEVTDLFGVRGRQLLRQRCELLPPHTAYATRQLLDQVESLDHQVTGFEHRIKSVFKPTLAIQLLTTVPGIGLTLAVVIALEIGDVTRFPTAEKLASYAGCTCRVHASGDKMRYGRLRPDVNRYLKWAFIEAANAICLMRRRHPHRHVSRLYERIARRKGHPKAIGAVARHLAEATYWLLSKQEAYREPQSSAVSSTGDKRDFAMSSRKLEF

SEQ ID NO: 230503 - protein, 412 aa, unidentified
METIVERPAALDVHKASVMACVRVPGAGGGRDEHVEQFPTTVRGLLTLADWLEAHGVTQVAMEATGVYWKPVWAVLEDRFACMLVNARHVKQVPGRKTDVLDAQWLCRLLEAGLLRPSLVPPKPIRTLRNLTRYRKSNIRDRQREANRLHKMLEDTGIKLDCVATDLLGKSGRAMLDALVSGTTDPQLLADLARGQLRRKLPALREALEGRFDSEHALVVGQILAHIDFLDESIDRLSAAIEEQIAPFAAAVELLCTIPGVQRRAAEVIIAETGGDMTAFATSGHLASWAGVCPGNDESAGKRRSGRTRKGSKWLRGTLIEAARAAARTRDTYLNAQYQRVRARRGANKASLAVAHSLLVAVWHMLQTGETYLDPGGDYYTRRDPARTTRRLVTQLERLGYSVTLQEQQVAT

SEQ ID NO: 230504 - protein, 342 aa, unidentified
MTLDSFSYYVGLEVHRKTISYCCKQMDGKIVREGKLAATRPALQEWAKSLDRPWYGGLEATICSHWIYYLLKEYATDLKMGQPAKLKAISTAQRKNDSLDARTLADLLRCHLFPACYVPPAEYEALRRQLRERALLVRMRVMLKNKIAGLLIQSGISYETPRLHRKGYFSELLATDENISADLKQLLILNRQQLERLEALEKSLVEQLKQDPLLAGRLEQLCTIRGVGEITALTWALETGEPSRFPNARHAISYCGLCAAQRESAGSVKRGPLSKQRNRFLQTMLIETAHLAVHFNPALRALYERMCGVGPKNRATLEVARRLVRYLLAVDRQYFARLSGAV

SEQ ID NO: 230505 - protein, 318 aa, unidentified
MGTISKVFVGVDVSKKYLDVCLLPINKHFRVSNNKKGFMLILKRLNLLQVEQVVCEASGGYEQKFIRFLDDAKYKTWIVDPKRIKFLAKAEDIKAKTDKIDAKTIAIFASRVRKQYDKNTTSQEERKLKELVLRRTELVAMLAKEKTRLKGPTREFYKEMIESLIDFLEGQLEDIEIQIAEIINNNYKLKKQSEILETVPGVGKATSATLLATLSELGTLNSKQIASLVGVAPITKESGNRIGQAHISGGRVIARKAIYMAALTAIRSNPVLKIFYNQLISRGKKAKVALVAVMRKLVVILNAMLRDGIVWAPKMCEN

SEQ ID NO: 230506 - protein, 344 aa, unidentified
MQIVRIGLDLAKYVFEIHGVDAHGKTVVRKTLRRHAVSTFFANLPPCLVGMEASNGAHFWAKALSDLGHDVRLISPQFVTPYVKSNKNDRNDAEAICEAVGRPNMRFVPVKSAEQLAVQAVHRIRSRLVADRVRLVNQVRGLLGEHGIVVAKDIGNLRQALARIVGDDEDRVLNPLVRALMAELREELTELDARIAGYDRKIRELYRNSEICQRLGKVEGIGPVTATALVAAVGDRSSFKNGRQFAAWLGLVPKQRSSGGRARLFGISKRGDRYLRTLLIHGARSALGRVRDKQDPRSLWLGRMRQRRHPNVVAVALANKNARIAWSLLASDSAYDASLSVGAA

SEQ ID NO: 230507 - protein, 419 aa, unidentified
MGEPRRKLFQEVKIMEVIYERCCGLDIHKASITACVIVGREKEVRTFNTMTDDLLQLTAYLRERGVQMTAMESTGSFWKPIFNIMEVEGIPAILVNAAHIKNVPGRKTDVKDAEWIADCLKHGLLKASFVKPRDQRELCELIRYRGSMIEERAREYNRMGKVLEGANIKLTSVISKMDTVSGMNMVRALSEGVVDPVLLAQMAKGTLRSKTDELERALNGLIQPHQQMILKAMLDHIENLSKLIEGLDAEIVERMSQDVELIEALDEVTGVGKISAQTIIAEIGTDMSRFATAENLASWACMCPETKESAGKKKPGKTKKANSTLKKTLIQSGRSAANSKDTYLNAQYRRIAARRGANRAAVAVGHSILVICYHMIKNRTQYNDLGADFFQNRNKESIVRQNVKRLQSLGYKVILEEVA

SEQ ID NO: 230508 - protein, 343 aa, unidentified
MGEVITIGLDIAKSVFQIHGVDGDGAVVIRKRVSRGKVLEFFADLSPCLVGIEACPTAHHWSRELQSLGHTVKLMPPSYVKAYLKRAKNDANDAAAICEAVTRPSMRFVATKSKEQQGALMLHRTRQLFVRQRTMLSNAIRGQLAEFGIIAPVGRLGFARLLEMMDGPEELGVPKTAWVCLMGLAEQYQRIQGEIGKLEQFIQAWHRSSELSRRLEEIPGVGPIVATALVGTITDPHAFASGRHMAAWIGLVPQQNSTGGKDRLGGITKQGNRYLRWLLVAGAMAVIRYAQKHGTAKRPWLARLIERKPTKVAAVALANKIARIAWVIMARGERYRGPAPLAA

SEQ ID NO: 230509 - protein, 268 aa, unidentified
MSEPLCVGIDVAKGHVDVATDFGGQAQRYGNDVDGHTALVAALSARLVALIVMEATGGYEAELACALQAAGLPVAVINPRQARDFAKAMGRLAKTDRLDAMMLAELASVLRRRPDTARFLRPLPDADQQRLAALVARRRQLLSMLTAERLRIGPTTAATLIAQLPELGRLNRRQISALVGVAPMNRDSGQMRGRRAITGGRGQVRHTLYMAALTATRYNPVIQVFYQRLLAAGKLKKVALGACMRKLLTIVNAMVRDNETFDPDHVRT

SEQ ID NO: 230510 - protein, 351 aa, unidentified
MKYYAGLDVSMKTTSICIVNQEKKIVFESEVETDPKAIFSAIQQTKLDIENSAVESGSISHWLVQELSKKKMPIVCVDARKMSRVLSININKNDKNDARLIAEALRCGFYSEVHQKPQEDVEMKILMGSRRSLIETHTKLKNTIRGHLKAFGIRLGTANNNKFEGLVQEKIKDKPEVVQVGIKGLLEAFKCVNKEIALLEKKMEEMAAEDEDVKLLTTIPGVGIVTAYTFKTHLGDPSRFKSSRAVGAYFGMTPTQYSSGEVQKQGRVSKCGSKEVRSLLNEAAFSILYSSKSWSRIKVWGQKIKKKKGHKKATMAVGRKLCVLMHRILITRKPFEYGVPKEAEKRMQAAS

SEQ ID NO: 230511 - protein, 403 aa, unidentified
MNAVGIDVSKGKSTVAIIRPFGEIVSSPFDINHTPKELAELANFILSLEGESRVVLENTGKYSDPVIKVLSEAGVFVCPVNAKLIHDYGGDTIRRARTDKIDSLKIAGFCLDKWIKLERYSPVDELRRTLKTFNRQLDEYMKVKVMLKNNLISLTDQTFPGINNLFSSPARESDGHEKWIDFLARFWHCECATSLSEEAFSERYKKWCKKHGYNFTSAKAKQIYEAAENQQASLSKNDFTKTLILQAVEQMNSLCASIAKLKAEMTKIAKTLPEYETVLAMHGVGKTLAPQLIAEIGDIRRYPKRASLARFAGIEPPENQSGTYNQHSRRISKQGSPQLRKALFQVMRCVLQNSNPDEDIFRFISRKRSEGKPFKVYMIAGANKFLRIYYARVKECFDAPATA

SEQ ID NO: 230512 - protein, 408 aa, unidentified
MVIFVGDDWAEAHHDIYICDEAGTRLAGRRFSEGIEGVGALHELIATHAEDPAEVNVGIETDRGLWVQSLVEAGYRVHAINPRAASRYRDRHSLSGAKSDPGDAKMLAELVRTDRHNHRLIAGDSDLAEGLKVLARAHQNLIWERTRHTNRLRCALREYFPAALATFESLADRDTLAVLGRAPTPADAARLAPGQVRTVLRAGGRTRNIEARAQAIVEGLRTEALAAPAEVVTAFAATTRAQVAIIGALNTQIAALDSELAAHFEQHPDADIYLSLPGIGVILGARVLAEFGDDPNRYDNAKSRKNYAGTSPITRASGTRSVALARFVRPARLADAIDQWAFCSLQNSPGSRAYYDHRRTQGDSHHKALRALGNRLVGILHGCLHTHTTYDETTAWAHRNDQTLKIAS

SEQ ID NO: 230513 - protein, 360 aa, unidentified
MQHIAIDLGGQKSQVCVRDAGGEILSETQVQTNRLGSFLSRQAHSRVILETCSEAFRVADQAQEYQHEVRVVPATLVKTLGVGARGVKTDRRDAQILSEVSCRIDLPSVHVPSELARERRSVCGMRNQLVCSLTGLINCVRGWARTQLLRIRTGEVTTFPQRVRDAAAKHPDGLPEHVEWLLTSIDSLNEQIKLADKALAKLVKEDPICQRLMSAPGVGPVTVMRFTAAIDDLRRFPSAHAVQSYLGLTPGENSSSTRQQRTGITKAGPPAVRTALVQAAWNFRRLRPSDPISIWAQGIEHRRGKCIATVAVARKLAGVLYALWRDASTYEPHHEKRKQTQDREKQNQDCAKQDHASSAG

SEQ ID NO: 230514 - protein, 375 aa, unidentified
MTADLQAKEYESAAVLYMAMELSNKSWRLAFGDGKRTRQVSIEAGDIAALGAQVAKAKEKWGLAKEVTVVSCYEAGRDGFWLHRQLAALGIKNQVVDAASIEVSRRARRAKTDRLDAQALLEKLMRYAQGERRVWRVVRVPSLEWEDLRQLHREREQLVKERTRHRNRLTSKLVAQGLRIRVDGVFLRRLEEARLFDGRPLPAHLRAGLVREWERLQLVQAQLKALEAHIGGLIKESEPLKAVRALMLFAGVGWVGAWTLVLELFGWREIANRRQLGGLAGLVPAPYNSGTLVREQGISKAGNRRVRALMIQLAWLWLRHQPASKHSRWFQARFGGGSKRQRRIGIVALARRLLVDLWRFVDAGVVPEGAHMKVS

SEQ ID NO: 230515 - protein, 406 aa, unidentified
MELTAIYKRVIGLDVHQAKISACSLMQQPDGTTIVEQREFGAFKRDRRALAQWAGSLAPDVVVMESTGIYWKSPYAALEAQGIAAWVVNARHVKNVPGRKTDVGDAHWLATLARAGLLRGSFIPQADIRHLRLIARQRQKLGGMLASEKNRLHKVLADSGIRLNVLVSDIHGQSAREMIKALIAGRPMTEILDLAGRLRAGREQLFEALQPEELSASHVFVLNEIMLHIEELEARIARFEQALIQGLEAWAPQLVLLQTIPGIDRMGAAMLLVEISAEMHNFGSAERLASWVGICPGNNESAGKRKSGKARKGNAWVRRLLCEFAQAASRSRCALKDKFAALSIRKGHKKSIVALAHKMLRIIFAMLKTNQPYRERVVDYEALSVQRNAPRWIKMLVKHGFMPAAA

SEQ ID NO: 230516 - protein, 395 aa, unidentified
MLFLGIDIGKNNHVASMLDDCGKPVFKAFSFANTTDGGESLMSKLEKHSADCETLVVGLESTGHYWLSVYSFLRDKNFKLHVINPIQTDGWRKGVEIRKRKTDTIDSLLIADLVRYGDFIETRLPDESVLSLKNLTRFRSYLIDSISDLKRKVICVLDQVFPEYQRIFSDVFGATSKEVLLQFGSPSELESLSADSLAELLAKFSCKKLGVDKADELSNAAKISFGVTFCRDSFTFQLRMMIEQIKYIESQVKDTETEIKRIMLHLSSPITSIPGIGKTLGAVILGEIGDISKFDNPKKLVAFAGIDAIVRQSGEFEGTQNRMSKRGSPYLRRALFQAALVACVGKRPDPVLSAFYQKKIAEAKHHSTAVGAVARKMCNIIYYVLIENRPYEVRK

SEQ ID NO: 230517 - protein, 333 aa, unidentified
MYYIGIDISKFKHDCAVIDDSGEIVTPSWSFTNDAEGFSQLKLLLNSLDTETRIGLESTGHYGMNLKLFLESNNFSFMEFNPLLINRFVKSKSLRKTKSDSIDCMMIAHYLMTVEYKPYPSSFYHTEKLKSLTRFRDSLIRLRSRQLVELTNILDKVFPEFKPFFGSRFSVTALYILSNYSSPEKIANMNSKSYEALRKLSRGRFSTVDFAKLKQLAKNTIGTTEDYLLLQMQIVLDIYRQLDSKVDETEVSIKECVSDMNPPMLSVPGIGIESAAVILAEFGDFSKFKNASQMLSFAGLEPGYFQSGTSETTGKMVKHGSCLLYTSPSPRDS

SEQ ID NO: 230518 - protein, 365 aa, unidentified
MQFVGVDIHTNRFTCCYRSEVKEKKETATFELSAIGVADFIRTLTKETYVLVEATITTFAFVRLIQPFVKEAIIANTYELKQISLARKNTDKIDADILCRVLKMQVLSGEQTISPVTVPPVEIQELRGLFTTYRLYRKQTTQMKNRIHSLLKEKLYGFTQEEIFSQKSRKMIRELEKNTVMSFQINELMDLLENMETRVETLEDKVKEHAEPYMREIEILTSMKGIGIFTAIAIIADIISVTRFKNSKSFTSYLRSAPKVSNSNTSEKTKGTNKKGRKLGATLITQSLNHVLDASLKLRKWYNDLAEFKKAGLVRTALRRRVLAEMYQMLKKGEYHYGRNERLHETKIFQYKKFLEKRKNLLKIA

SEQ ID NO: 230519 - protein, 402 aa, unidentified
MKDDTFRFGGVDWATDAHAVAVVDQGGALVDEFEIEHSASGLEELCGRLKGHHVGRVAIERPDGPVVEALLGVDLEVVVVPSRSVKARRERYGLAGNKSDRSDAYVLADCLRTDRHRWRSLAPDSPATVTLRATVRTRRDLVETRVALANQLRALLRVVFPGAVGLFSDIDSPVSLRFLERFPSATKAAWLSEKRLGAWLKANGYCGRKDPAELYGRLRQAPAGLRDDGGATAAVTLALVEVLKSIRTQIDELNTRIAEQLETHPDGKIFTSLPRAGVVRAATLLAEIGDRREQFPDAEGLSGLAGVVPSTRRSGRLRVVEFRWSADKKLRDALCDFAGDSGQGNAWAERRHRELRKTKSHPHATRILARSWTQVIWRCWQDRVPYDPTFHGGYRRLVAEAA

SEQ ID NO: 230520 - protein, 326 aa, unidentified
MATIGIDVSKKKLDLCWLRDAQAGKVKTRVFPNAHDHYPALLSWLLKQTGASPGELQVYLEATGIYHEPLAHWLHQAGVTVYVLNPARVRYYARSLGDQGKSDKKDSKRIAHFALANPELTPWQPEPEEVRTLKQLAKRLETVQKDIQREQNRLEKAQFNRDTQAEHSITHVLALLRREAKRLVKEVDEHIDRHDGLKRDRGLLESIPGIGEVLSVHLLVALRSRRFKSGRQVAAFMGLVPVEWTSGSSVRHAPRLSKNGDPALRQKLYMGAVVAMRHNPSIRRQYQRLCAAGKRKMSALGAAMRKLVHIAYGVLAHQKEYEPQPV

SEQ ID NO: 230521 - protein, 363 aa, unidentified
MKKLQLVAMGDQEAEAARKPPAGTAVKIAIDLSRTKWVYAIRWGGQERRRLTTPAQLKHLQALVAQYPNCPVRIAYEACGFGYDIAWWAQEQNLDITVIAPSRMERTPGLQVKTDRLDASKMARKLELGELRSIYIPRRTAHNERQVARSYGQVLKERKRAQTRIRSLMQEHGRLGPPPQAHWKTYNDWLQAQVLDEHLGLCVGAMLAIRSMADIQARALKARMLAIAGSERYARCVEALCTQPGIGPLSAIRFILEIGDVRRFANADSIAHYLGLTPSEYSSGPTVQRGPILKCGPGTLRACMVQCAWVAVRSKGGDPPLREMYERLVERTGKKRAIVAVTRRLVRRCRARWLELEEGAAAA

SEQ ID NO: 230522 - protein, 341 aa, unidentified
MEHILGIDLHSDNGYYGIIEPDGKRVFKKRLPNDLQTVLTALEPYKGTITSIVVESTYNWYWLVDGLMENGYNNRVRLANPAGFSPYKGLKHADDKTDAFFLTELERLGILPVGHIYPKEERPVRDLLRRRMMLVQQKTSHILSFQSLITRQTGTSMSSNNIKKFEEDYVKEILDEEYLILAGETNISIIRFLTKKIQLLERAVLKRIKLKLEYEKLLTVPGIGKILGLVIMLETGDIRRRFASAGNYTSYCRCVKSKRISNSKKKGEGNRKNGNKYLEWAYVEAANFAKRFSPEAKKYYQRKMSKTNQIVATKSLASKISKACYFIMRDQEVFKTEKIFG

SEQ ID NO: 230523 - protein, 451 aa, unidentified
MSRRRPAPPRAAAQPCVNPNAAGLDIGSEEIWACVPEDRDPQPVRVFDTFTPDLYALADWLAACRIETVAMESTGVYWIPVYEVLEARGFRVHLVNARHLKHVPGRKSDLKDCQWLQYLHTCGLLRGSFRPEAELCALRAYLRHRATLLEHRAAHIQHMQKALQQMNVQLTQVLSDITGATGLAMLRAIVAGERDPVTLARFRDPRCARSPAEIRKALTGHYQPEHVFALKQALALYECYTTQLRECDAAIEQQFQALKPAWEDELPPLDPTDKRDSHSKNAPTYDARSLLYEVTGVDLVAIPGLNTGTVQTIVAEVGTDMTPWPSEKQFCSWLTLAPHHDISGGKVLRRYTLKTGNRAGQAFRLAAQSLSRSHSALGAYYRRMRARLGPKAAIVATAHKLARIVYHMLKHRTPYRDLSAEAYEQRARAREIATLRKKAAKLGLTLVESPA

SEQ ID NO: 230524 - protein, 374 aa, unidentified
MREPITFVGMDVHKKDIAVAMLVEGRTEPLEWRVANEPTTVKRLAKKLQREGGGPAHCVYEAGPCGYTLQRQLRGLGLECDVVAPSLIPIRPGERIKTDRRDARKLAELARAGMLTVVHPPTEDEEAVRDLCRGRDDARLDLMRARHRLGKFLLRRGLVFGQGNQKAWSQAHRWWLGCQTFTRIAERVMFEDYMLAVEQTETRRRSLEQHLEDLSHEAPYAEAGGGLRCFRGIATITAITLLAELHDFRRFRSPSQLMAYLGLVPSENSSGPRQRRGGITRTGNRHVRRLLIEAAWHYRHKPHIGTALAQRRHGQPAKIVALADKAQLRLCRRYRRMERRGKHPTKIVVAVARELVGYLWAALTPTAQTVATTN

SEQ ID NO: 230525 - protein, 355 aa, unidentified
MMNDKQVKVYGGIDTHADTHHLAVIDQAGRRLADAQIPTTATGYQAALRFLGSWPGLVSVGIECTGSYGAAVTRAVREAGITVFEVNRPNRFDRRLHGKSDPFDAYSAAEAVLGGRASAAPKGGDGLVESLRVLRTSRSSALQARTATINQIKGMLITAPEDLRTRYKGLSTPKLIAALAASRPTPTPVTAAEATAYSLRLLARRWQALTGQIEDLAGHLQRLLDDHAPDLMRVFGCGQDTIAQLLITAGDNPDRLRSEAAFAALAGVCPIPASSGKTKRHRLNRAGDRQANSALYHIVMVRLRYNQETQDYVARRTAEGKTKMEIIRCLKRYLVRQLYPLIVETLHPRKEVAAA

SEQ ID NO: 230526 - protein, 405 aa, unidentified
MKVYIGIDWSENKHDVCFLHGTGDVLLVQQIPHTIAGFRQLDQARQSLGLGRQEVVIGLETAHNLLVDYLWDQGYEQIYVLPPSAVKSAQKRYRQSGARDDSWDARLIADLLRTDQKRYTVWKPDQPLTRQIRAEVRFAHQLGRELVRDGNRLRSILLRYFPAALEAFPHLDSVVFLAFLQAYPTPRQAQALDFEQLKIFLREHHHTQTRSWPTLYAALHADHPQANLELEAAYSPLAVAAARILETLVRSRSQCLARLGKLYLLHPDREIYDSLPKAGALLAPALLAKLGDDRERFPNPAVLQAVAGTCPVTNRSGKHIRIYFRSACDHEFRHITQQWARLTLDASPWAATYYRSVRPHCKTDSDAIRRLANRWLEILWRLWIDRKPYDEAFHLKQHAMRMQAN

SEQ ID NO: 230527 - protein, 458 aa, unidentified
MNRKRSKPKSDRSMPMVHPNAAAIDIGATMQMAAVRADRTPEPVRSFGTFTTDLHRLVDWFTECGVETVVMESTSVYWIPIFELLDARGFAVFLVNARDAKHVPGRKTDVSDAQWLQRLHSYGLLRASFRPKGQIAELRAYVRQRERLLEYAASHIQHMQKALTEMNLQLHHVVADVTGATGLRIIRAILGGERDSKVLARLRDYRCHSGVETIEKALTGNYRAEHLFALEQALALYNAYQEKASACDARIESVLKELSISRGRNAGPLPSPRRRLHRKANGPDFDVRTALFNLLGKDLTQIDGLGSYLSLKLIAECGDDLSAWPTAKHFTSWLCLAPSNKISGGKVLSSRTRRSGSRSAALLRLAAVTVGRTDTALGAFYRRLSARIGKAKAVTATARKIAVLFYNAVCHGMEYVDPGSSYYETRYRTRVVENLHRRAKAFGFALLPLESKAGAVVS

SEQ ID NO: 230528 - protein, 327 aa, unidentified
MIYLGIDISKARLDCTLLDPVTDKRKTKAVSNDPKGFEALSTWLDKQGIAPGDVHGVMEATGVYHEQAALWLTDAGMRVSVVNPAQVRDFARGLAMRTKTDGTDSVALARYGALIQPDLWEAPPPEIRELKALITRLEAMETDARRELNRREKALVARAPVLVRESLDNHLAALKQEIARLQQAIDDHINRHPGLKADRERLLSIPAVGDKTANRMLAVLHSRKFRSADQVAAFLGLVPVEHQSGSSVLKRPRLGKNGDARTRAVLYMAAIVAAHYNPHVKALYTRLCAKGKTKMAALGAAMRKLVHLCFGVIKHQTVYQPNWQPRT

SEQ ID NO: 230529 - protein, 348 aa, unidentified
MAIVGGFDVHRKQITFDYVDNDGLVQWGQIRPATRKTLRSWLAKHCPEGAGEFALEGCTGWRYVTEEVASAGVGVHLGDPAEIAVARGPKKRAKTDRADARLLRTLLLEGRFPESWIPPVHVLEIRTLGRLYCTLMDERRAWQQRIHAQLFHQGCPPIRALLSAAGRDALARVDLSAAGRQYVDTALRRIDELSTEIGPLRTQLVNFARRQVGCQALQAHYGIGWLCAAIIWAEIGDARRFTSSDQLVRFAGLDVTVYSSDGKRSPGHLSRQGSPELRWAAFEAAKCAARRGSPDYAYYHQLAAKRDGHNGKNPTLAVERKILRRCYHTLRELGDAALALPIPEEVAA

SEQ ID NO: 230530 - protein, 392 aa, unidentified
MEIQDETGRRLAKARLPEGISGIARLHALVGRFLPEDGDAAEVKIGIETDRGPWVAALVASGYQVYAINPLQSARARQGNGVSGAKSDAGDAHVLADLVRTHSHQLRTVAGDSKEAGAVKVLTRMHQSLIWDRTRQVLRLRSSLREFFPAALEAYEDLACPDVLELLAKAPEPSSAARLTRAQIAAALKRAHRRDRDTKTTAIMAALRTEHLTQPPLIAAAYGATVRALAALIATSNEQITALEGPVEACFGRHPDAEIYLSQPGLGPVLGARVLAEFGDDPTRYEGARARKNYAGTSPITRASGKKKVVLARYVRNKRLTNALHQQAFSALSGSPGARAYYDALRDRDISYNAALRQLGNRLVGILHGCLKTRTRYDEATAWNQHTQRVAA

SEQ ID NO: 230531 - protein, 341 aa, unidentified
MGQAHTIGLDIAKRVFQAHGADASGRVVFRKRLVRAKVLAFFAAQPPCTVAMEACAGAHHWARELGKLGHTVRLIPPAYVKPYVKRQKNDRADAEAICEAAQRPSMRFVPVKTEEQQANGVVFRARDLLVRQRTQCINALRGHLSEYGYVFPQGITHAEAVIAHVEDPDSAVPESARAVLKVLIGTFQALEAQIQALDAEITQRAKADPVARRLMTIPGIGPIAATAITALVPAPEGFRAGRDFAAWLGLTPLQTSTGGKQKLGAISKMGERTIRRLLILGASAVVRWAGQRGTPAGSWLARMLARKPKMLVTVALANKTARIVWALLVKGGGYRAPAPAA

SEQ ID NO: 230532 - protein, 410 aa, unidentified
MEVLHQRCAGLDVHKKTVVACVRLASEGKVVTEVKTFATTTQGLLALSDWLSENGCSHIAMEATGVYWKPVWHVLSDGEFELILTNAAHVKNLPGRKTDVSDAAWLAELLAHGLIRASFVPDGQTQELRALLRTRKQLIRERTRHIQRIHKTLEDANIKLDAQLSDVLGKSGRAILNAMVAGETDPIRLAALAHANVKSTQAELREALRGRVTSHHRFLLQLHLGQIDSLDAAIAKIDREVDDNLAPFRTAVDLVRTIPGVGALSAEVIVAEIGTDMSRFPTAGHLLSWAGLCPRNDESAGKRRSSRLRKGAQWLKTTLVECAWAAKNKKGSYLQAQFLRLRSRRGPQKAICAVAASILTAIYHMLKDGTVYQDLGSEHFNRRSKMTKTQRLVRHLEHMGYAVKIQPIAA

SEQ ID NO: 230533 - protein, 355 aa, unidentified
MNSKKYIGMDVHQASICVAVRDEGGKIVMESILETKGATILAFLQGIRGSVWVTFEEGTSAAWLCDLVRPHVAKVIVCDPRKNALLNAGNKNDRVDARKLSHLLRAGLLTPVYHGETGLRTLRELSRSYLTVNKDLTRVMNRLKGLYRSWAIPCAGEKVYGRRHRSAWLGKLSEVGVRRRAEQLYQQLDALAEIRKQARRELLAESQKDPAHALLRQIPRLGPIRVALLIALIQTPHRFRSKRQLWAYCGLALQTRASGEYRFAAGQLQPSKKSPALRGLNVNHNHDLKSVFKSAATQVSSSTDPLGDFYRSLLAKGMKPAMARLTLARKMAAIVLRIWKKGVRYDPGELKRQPA

SEQ ID NO: 230534 - protein, 414 aa, unidentified
MNTWKDLTHYVGFDWAKDHHLVVIVDREGKILNDFQFEHTAEGWKSFVQKISAYPKAGVATETSQGATVDQLLQQQCTVFPVHPVAAQRYRERKVPSGTKTDHLDAWALADALRLDGHGWKALEPMDPLTQELRLLCRDEVALIEQRTAMVNQLQQALLEYYPAALEAFDDWTRPSSWEFVLPGPQALTMAGKRRWEKFLHTHRLWRPETAEKRLEIFGRADQFKASEAIEQAKRQLAISLCKVLVTLGKQLESYRKQIEELFAKHPDHDLFGGLPGAKKVLAPRLLAAVGSDPKRYGAPEVLQCIAGTAPVSYQSGKLDKVRIRWACDKFMRSTVHLWADCFRHASAWGQTYYQQKRSQGMSHACALRCLGYRLLKIVFRIISDKTPYDAELHARNQQKHGSWVLKLVNKPAA

SEQ ID NO: 230535 - protein, 402 aa, unidentified
MNAVGIDVSKGKSMVAIMRPFGEIVSTPFEIKHTASDIHSLVELINSVEGESRIVMEHTGRYYEVLAHQLSEANLFVSAINPKLIKDFDNDSLRKVKSDKADAVKIARYALDKWQNLKQYNVMDELRNQLKTMNRQFGFYMKHKTAMKNNLIGILDQTYPGVNTYFDSPARSDGSQKWVDFASTYWHVDCVRKMSLNAFIDHYQNWCKRKKYNFSQSKAEEIYGKAKELVPVLPKDAITKLIIKQAVDQLNSASTTVESLRTLMNETASKLPEYPVVMAMKGVGTSLGSQLMAEIGDVSRFTHKSAITAFAGVDPGVNESGTYEQKSVPTSKRGSADLRKTLFQVMDVLIKTHPQDDPVYQFLDKKRAQGKPYYVYMTAGANKFLRIYYGRVKEYLSSLPES

SEQ ID NO: 230536 - protein, 346 aa, unidentified
MQHYVGLDVSLKQTAVCVVDQAGKIRREGMVVSEPKAIADFIAANAPQVIRIGFESGATSTWLWTELKKLGLPVICIDARHAKAALKMQINKSDRNDAVGIARIMQCGWYKEVRVKDLDSHAIRALLGSRALLVELKRDLENQIRGLLKNLGLVIGRCKLNTFTARANELIDGKPALTAAVEPLLKAREAIARQIADLDRKVLRLARSVPQVRRFMTVPGVGPITALCYLATIDDPTRFKKSRSVGAYVGLTTRRYASGETDRTGRISKCGDGMLRSYLYEAANVLLTRVAKWSALKAWGMRIAKRRSLSKARVAVARKLAVILHRMWIDGTEFSWSSEDTAMNPA

SEQ ID NO: 230537 - protein, 354 aa, unidentified
MPQKLSSAIAVIGIDIGKNSFHIVGHDQRGAIVLRQKWSRGQVEARLANLPPCLIGMEACVGAHHLSRKLQMLGHDARLMPAKYVRPYSKGQKNDFRDAEAIAEAVQRPTMKFVATKTADQLDLQALHRVRERLVGQRTGVINQIRAFLLERGIAVRQGLRSLRSELPGILATRTDVLAPRMLRIIEDLAGDWRRLDARIEDLSSEIEALARQDKGCERLMTVPGIGPIISSAMVAAIGTGDVFSKGRDFGAWLGLVPKQISTGDRTILGKISRRGNRYLRVLFVQAAWVVLVKVKCWERYGLKSWIEAAKKRLHHKVLAIALANKLARIAWAVLNKGRAFECVKTDEMASRPA

SEQ ID NO: 230538 - protein, 403 aa, unidentified
MNAVGIDVSKGKSMVTILRPFGEIVSSPFEIKHTSSDIHSLIKLIHSIEGESRVVMEHTGRYYEALAHQLSAADLFVSAVNPKLVKDFNIDSLRKIKSDKADSVKIARYALDKWQSLEPYSITDELRAQLKVMNRQFHFYVKQKTAMKNNLIGLIDQTYPNANTYFNSPTRSDGSQKWVDFVSTYWHVDCIRKMSLNAFVEHYQNWCKRKKYAFNKSKAEEIYTKTKELVPVFPKNEITKHIIRQAIDQLNSTSVTVETIRTLMNETASKLPEYSIVMQFKGIGPSLGPQLMAEIGDVTRFTHKGALTAFAGVDPGVNESGSYAQKSVPTSKRGSSNLRKTLFQVMDVLIKTMPQDDPVYQFMDRKRTQGKPYYVYMTAGANKFLRIYYGRVKEYLSVLPDPS

SEQ ID NO: 230539 - protein, 350 aa, unidentified
MIIIGCDYHPAFQQIAFVDIETGELQERRLQHREEAEKFYRDLAAQEMKVRVGMEASGHARWFERLLAELQFELWIGDAAEIRTKRVRKQKTDRQDAQLILKLMLKDDFPRIWVPSWENRDLRQLLWHRHRMVQARTRMMNQLQAVALNEGLRCKKRLWREQGRKQLESFRLAPWASRRRRDLLEMLDRLNPTIAELSQAVEQEAEKCPEAKRLMTHPGVGPLTALAFVLIIGGAERFQCGKQIASYLGLVPLEDSSGNRRRLGHITKQGNSLLRFLLVEAAQVTVRSLPEWRSKYFHLAMRRGRKIAKVAMARRLAVRMYWMMRKGWDYEQLNKFGSHAGQPGHRDGVQ

SEQ ID NO: 230540 - protein, 307 aa, unidentified
MHYLYYVGLDVSKETFDASLVAFEDANEMAHRKFANSRKGICSCLHWVEKRHGIRLDDVIFCAEDMGSYISEMAVCASDRTLNFNFSLISPLVIKYSMGIARGKTDRVDARRIAEYAITHYRKIALYLPAEKELCQLRTWLILRAHLAKQRVAKLVLLEKLDYKEKFADVSIQRSMLQEEIAYAETHMKTIEREMKELIAADSNICRNYKLLTSIKGVGPITAIVMLCSTLNFTKITDHRKFACYCGLAPFEHSSGTSVRGGCHTSSMANRDIKVQLNRSALIAIRCDPQLKAYYERKVAELSLIHI

SEQ ID NO: 230541 - protein, 355 aa, unidentified
MNSEKYIGLDVHQATISVAVLDSTGKLVMESILETKAATILEFFAGLRGTLSVTFEEGTWAAWLYDLLKPHVAKLVVCNPRKNALLKDGNKSDRIDAHKLAELLYLNKLSSVYHGETGVRMLRELARSYLTIVKDLTRVMSRLKAVYRSWAIPCAGRDVYYRRHRSEWLGKIKEAGVRRRAERLYQQLDMLQYLRQQARRELLAESRKHAITVKLRQIPSLGPIRSALAVALIQTPHRFRTKRQLWAYSGLALETRTSAEYCYVKGGLRRSKKQISIRGLNKDHNHDLKGLFKGAATRASVLPGPFQDFYQRSLAKGIKPTMARLTLARKIAAITLTLWKKGENFDADKLKSQAA

SEQ ID NO: 230542 - protein, 331 aa, unidentified
MADAKRFVGIDVAKMQLDVALGPNGERLAVANDERGIGALLKRLEPADLVIIEATGGLEVPVASALATAGIGVAVVNPRQVRDFARATGQLAKTDALDAQVLARFGEAIKPQVRALPDAQAQALEALVNRRRQLVEMLTAEKNRRANSPKVIHKSIDEHIRWLEKRLSGLDDELAGLVRETPIWRERDELLRSVPGVGKVLSTTLLAHLPELGALNRKQIAALAGLAPFNRDSGSLRGSRCIWGGRAQVRRVLYMAAVAAVRSNPVIKNFYAQLRARGKYPKSALTACMRKLLVILNAMLRSKISWQTPALTASTATFSPLTGAVPEHGCC

SEQ ID NO: 230543 - protein, 319 aa, unidentified
MTASPVVVGVDVAKDRLDVAVRPSGEAWSTANDDAGVRALVARLRPLAPTLVLCEATGGFERAAIAALAAAGFPVVVANPRQVRDFARATGQLAKTDQLDAGILALFAERVRPTPRPLPDAAAQLLDAVLTRRRQLLEMLVAEKNRLGFAPQPLHRGIQAHIRWLERQLDDVTKELAGLIEASPVWRAKDDLLQSVPGVGPIVSSTLLGELPELGTLSHKQIAALVGVAPMARDSGTLRGKRMVWGGRASVRTALFMAAMCGRRWNPALKVFYDRLKAAGKPTKVALIACARKLLTILNAMVRDGKRWAVPAPRVQYSC

SEQ ID NO: 230544 - protein, 347 aa, unidentified
MRFYTGQHRYYCGIDLHARTMYLCILDHEGGKVVLHRNLRCEPDAFLRAIEPYRDDLVVGVECIFCWYWLADLCAQHDIPFVIGHALYMKAIHGGKAKNDKIDSHKIAVLLRAGAMPVGYVYPQGMRATRDLLRRRLFFVRKRSELYTHIRITFHQLNLHPPSGQFRYPGNRVGVGELIPDPVVRASVEADLALAAHLDEVIRALEGTISDQAKVEDPDTLERLQTIPGVGRILSLTLLYELHDVARFPRVQDFLSYARLVKSQTSSAGKITGISGAKIGNAHLKWAYSEAAVHFLKKNPPGQRLLHRIRSKHGKGKALGILAARLGRASYYMLRRCTAFDMDRFMN

SEQ ID NO: 230545 - protein, 385 aa, unidentified
MIYVGIDIAKLNHFASAISSDGEELIKPFKFTNDNDGFQLLISKLDSLDKDNLIIGLESTTHYDDNLVRYLVAKNYKVCVLNPIKTSTMRKNNIRKTKTDKVDTYIICKTLMMQESLRFVTFYDLDLMDLRALGRFRQKTIKQRTLLKIQLTSYVDEIFPELQYFFKSGLHQKSVYALLKEAPTPEAIASMHMTHLLKVNSHGRFDKKMAQQLRVLAQKSIGASDSSLSIQVTHTIQQIELLDSQLERVEAEMTEIMKFNDSVIMTIPGIGYINGGMILGEIGDIHRFSSPNKLLAYAGLDPSVYQSRNFQAKKTRMSKRGSKVLRYALVNAAHNVVKSNATFKTYYNAKMAEGRTHYNALGHCAGKLVRIIWKMMTDNLEFNLE

SEQ ID NO: 230546 - protein, 342 aa, unidentified
MESAVTIGLDLGKSVFQVHGVNAGGAVVVQRRLTRGRLLAFFAKQPACLVGMEACAAAHHWGRELQKLGHRVRLMPPRYVKPYVKRQKNDAADAEAICEAVTRPNMRFVEVKTCEQQGILVLHRVRLMLTRQRVQLSNAIRGHMAEYGLVAPVGRNGLQRLIAIIEDPEDARVPAVARASLEPLIRQLGLVSDQVLENDRLVRASARSTELGHRLMEVPGVGPVLASAMVATVPNPAAFKSGRDLAAWIGLVPRQNSSGGKEKLGGITKQGDRYLRQLLVIGALAVIRYAQRHGTKRPWLVRLLARRSPKIAAVALANKMARMIWAMMMTGEHYKESAAVPA

SEQ ID NO: 230547 - protein, 382 aa, unidentified
MKLVGIDIAKYKHAAFIMDASTGESLCEPFFFKNNKEGFQKLYMELNKYAKDELLIGMEDTGHYNFTIESSLLAEGYKVALINPITTKNLRKASLKSVKSDKEDALLITKALLDKDYYRIISIQDEKLNEAKQLTRYRIQLTIEMNRKKNILQRHMDIVFPEFNTLFKNGYTITYLNILRKYGDAYTIAHTDIRSLRKCFKYCSSFTAEELKELASNSVGIHDVSISFIIQSIVSSIDLINSQIEELDKKIEELAITQDSSITSIPGISKISGTSILAELGDISKYSNAGKVIKFAGVNPYISESGEFSADKTAITKKGSKYLRTTLYRVIIPVIRHNPAFNNYYHLKRSQGKGHLCALGHCVRKLLRIIYHLETNLSLIHI

SEQ ID NO: 230548 - protein, 323 aa, unidentified
MSQTVFQITIGVDIAKKKFDVASLIDGKYKHKTFTNDELGFMAFIAWFSLLCGDSKPLVCMESTGAYSLPLADFLTSQGYAVSLVNPAKIHAFAKSELSRAKTDKADAKLIARYALMMQPSLWTPPPANIRELQALVRRVEHLLEMIQMEQNRSETANTSTQLSITNVLNTLETELKSTRKAIKDHIDNNPDLKQRSNLLETIPGIGEACIAHLLLALSEHHGFTDAKQVVAFAGLAPMLRESGQWRGNTHISKTGDSTLRKVLYMPALCAKRHNPIIQVFWDRLKGNGKNGKAIACAAMRKLIHIAFGVIKSGKPFDPNYAV

SEQ ID NO: 230549 - protein, 357 aa, unidentified
MLALGDSAPRKGADAMTFVGCDLHTRMQQVAVLDTGSGEVRERQLAHDGSAIEEFYAALPGPVTIGIESTGYATWFHTLIQRLGHTLLVGDAAKIRAMVVRKTKTDRRDALHILDLLRHDRFPTIWVPDPATRDLRALLTHRMRLVRIRTMVKNGLHAIALNYRLARGSKLLRQAGLVQLHALALPPHTAQRRDQSLELLAGLTTQIRTLDDAITTAALAHPDGPRLITHPGVGALTALATIVVLGPVARFHDSKHVVSYVGLAPALNASADKHHFGHITKQGSPLLRFALGQAAAHAARMDADLERTYFTLVHRRGRPKAKVAVARKLLVRLFIMLRDQIDYDEFCRRGRPAPVSA

SEQ ID NO: 230550 - protein, 339 aa, unidentified
MQVTTTGVDLAKNVIQVHGISGDESVAFNKPLRRAQVLPFFAKLEPCLIGMESCSTAHHWARELTALGHDVRLIPPMYVKPYVKRGKSDAIDAEAICEAVTRPTMRFVAIKTVEQQSLLSLHRARDLLVRQRTQLINGLRGLVAEFGIYIPRGLARVIGFAEDITLGEVLDVPDIANEVIRNLSEQLKALHKRVRWYEERLKQVAREDERVRLLRTIPGVGAVTASGIIASIGDGHQFRNGREFAAWLGLTPANRSSGGKEKLGRITKMGDQYLRSLLVVGMTSLVRQTRSHPERASKWLTSLLERKPARLAAVAMANKTARIVWAVLTRSAPYNPHLA

SEQ ID NO: 230551 - protein, 370 aa, unidentified
MDQRLFVGLDVHKRNVSVGLAEDGRTGEVRFLGDIENTPVAVETLMRRLAERGRVLDFCYEAGPCGYGIYRQITGAGHECSVVAPTKIAVAPGDKVKTDRRDAQRLAVLHRAGELTPVWVPDGRHEAMRDLIRARMDAVRQVTTARHQLTSFLLRHGRIYPPNRKPWTKIHSRWLGTQSFVEPAQQIVFQDYVQTVWTAVERRDNMVKRIEELVPDWSLCEFVYALRCLRGLDLVSAATLAATIGDISRFDKPCQLMNYLGLTPSEYSSGGTIRRGGITKTGNREARRMLIEAAWSYRFPAKVAQHKARVLETQPQCVRDLAWKTQERLCKRYRSLQARGKKSTVIVAAIARELAGFIWALGQEMQPSSG

SEQ ID NO: 230552 - protein, 371 aa, unidentified
MQENVIYVGVDVDDNSFHVTALMPETGEVIETKTKPNLKGLVNKLEDFKKKFPNHALKICYEATYIGFTLQRDLASKGYDCVVVAPSSIPRVHGNQVKTDRVDAGKLAQFLSAGILTFVSVPDKETESDRDLLRSRQFMLHQLAEVRTHIQSLLRRNGIHYKSETKNISHWTKHHLSWLDTKADEAVGSFKQNLKLLVQQMKWLNHSLSEYGKAVDELATTEKYKKQVSALVCYKGIKNIFAMVMITEIGNVKRFAHPRQLVSWMGMDVREYSSGGKSHRFGITGHGNRYLRTAFVEANQRAIGGTRLSDDLKQRRKNIDPDLIHIADRCMARIRKKGMRLLHAGKHSNKVKVACAREMVGFVWESLNKVA

SEQ ID NO: 230553 - protein, 353 aa, unidentified
MKPKTDFSTASLAVIGVDIGKEVFHIVGLAVDGKIAFRKKVRRLGFEDAFEKLPPSIVGMEACLSAHFVSRVLRRLGHEPRIIPAIYVRPFVKGQKNDYNDAEAIAEAALRPNLRAVQEKSQDQLDLQACHRVRSRLVSRRTATINQIRAFLIEQGITVRSGARALRNSLFAILENRRDEISPRMASLILGLYEDWCQLDKRIETITSPIEELSQVEPKCQRLMSVPGIGPIIATGIVAAVSMGEAFERGRDFAARLGLVPRQHSTGGRSVLGRISKRGSKYLRTLFIQAAKVLLMRPHNWPRYSFGAWLTAAASRLHKNKLAVALANKLARIAWSVLRNEKAFDTHLEVAAI

SEQ ID NO: 230554 - protein, 410 aa, unidentified
MEENRKRYIGLDVHKHYLIALGVDADLNVVLPARRVELSRLEGWMKKSLTKQDEVVLEMTTNTWQLYDELVEYAGTVMVVHPPHVALITRSQVMNDKIAASILARLLAKGLLVGIWIPPQEIREARGLVAQRQKMVRLATQAKNRLHAVIQRHHLKPPAGNPFGKSNNGWWQALSLGKLEKMNLQSDLETLQFAEKQVKRMTEIMEGMAAEQDAIGGLLPLAGFGVVTAVTVWAAIGDIQRFAEPRYLVGYAGLGTRVHDSGMTMRSGKITKAGRRDLRTVLIEAANVAANSHPHWKAELARLEPRLGRNKAIVAIARKLLIAVWFVLQGKTDKYAEPEAVAQKMLRFAYTVGKANRPKGQTAAQFARVRMDALGLGRELTSIPWGSKKPIPLPPSKLLEKKGSDVPNTK

SEQ ID NO: 230555 - protein, 473 aa, unidentified
MTTRQEGKAEPKPNRKQRREQHRRIWTDNPGLDVVHADAAGIDIGNREHYVAIAPSKSEQPVRKFSCFTQDLRELAQFLKEHGIRSVAMQSTGVYWIPLYDVLEEWGFEVYLVNARDTKNLPGRKSDVQESQWLLKLHTYGLLRNSFRPTSEIRVLRTYWRQRGEHVQTAGECVQRMQKSLTQMNLQLANVISDIMGVTGQKILRAILAGERNADKLAEMRHERIQASREEIAASLTGNWRPELLFGLKQEIDRYDFCQRQIAECDEKTKQHLGALPERAKEPGTPGEPSPQKKKRAGGNSPAFALDQELVRITGVDFTRIDGINVMTAQTILSEVGLDMSKWKTEAHFASWLGLCPNNSVTGGKVLRRGTRNIVNRAATAFRIAASTLRRSDSYLGAQFRRFRTRLGAPKAITAMAHKLAVLFYRMLRHGQEYVDRGQQFYQDKYRQQQIAHLNKQAAQLGLVVTPVSAGIK

SEQ ID NO: 230556 - protein, 384 aa, unidentified
MHKDTLIFIGLDTHKESTEVAYVDDDRTSSCQHYGKIQTTKPALAKLARQFVSKYPDATLHFVYEAGPCGYWVYRLLTSLGHCCYVVAPSLIAKKPGDRVKTDKRDAIMLAERLKQSDLTPIYVPEPEDEAVRDLSRARETAMHDLNDARYQFKAFLLRNNIRYEGPANWSLKHLRWLTELVLPHPCQQIVLQEHLQIIMERQGRLERLDNELIHHVKNWRYYPVVKAIQALRGVRLRVAVGVIAELGDLTRFDHPRKLMAYLGLVPSEHSSGNRRRQGAITKCGNGRARRLLIEGAHSYRYSAKVSTELQKRQEGIPKEIVDLAWQSQLRLCRRYARLMHRGKHRSIVVTAIAREMIAYIWAISRETVLTPVDPRQRLSRVPA

SEQ ID NO: 230557 - protein, 315 aa, unidentified
MAMLVAQTKPVVGVDVAKNELVIYQDQSDRLEAIPNNKASISKWLRTLAGTVSIAVEATNTYHVLFADMAYEAGCTIYMIDGYQLSHYRKGVNVRAKTDALDARLLARYLKKEADELHPWVPPCPLYRQLLSLFRRRAALVQARTGLVQSWSNEPLLKTAFAAQINSMKRLEALVEKKIKDVLQRAGLMGQVSRCMKVEGIGFLTAARLVTTFQRGEFSNANAFIAFLGLDLRVSKSGQSDGPRRLTKRGDPEARRLLHNAAMSGSRTGAWKPFYEEQRKRGFSTTQTLVMLARKMARVVFALLKTQSEYQSKAA

SEQ ID NO: 230558 - protein, 341 aa, unidentified
MKKFIRIGVDLAKNYFQIHALESEGGSAVTRKLTRLKMREFFSRIEPCLVGMEACGSAHYWARELESMGHEVLLMPPSYTKPYVKRGKNDAVDAAACCEAMSRPGMRFVPIKSAEQQAILMLHKTRELLVKQRTMSVNALRAHLSEFGIIVAKGIGRVDQLLELAENDATLPDAARAVVKVLAQQFEGLDKSIDDMEGEIACAHEQSEMSQLLDAVPGIGKIIASVIAASVPDPNIFKSGRDFAAWLGLTPRQNSSGGKQTLGAITKQGNRYIRKLLVLAATSLLHIVGKRKGALCDWIVALRAKKPARLVTVALANKLARIIWAMMKTGEGFRTEMFAKA

SEQ ID NO: 230559 - protein, 368 aa, unidentified
MPRIAEQVLPVTGGVDTHADMHVAAAVDQVGRVLGTQAFPATAAGYRAALAWMRAHGELVKVGVEGTGSYGAGLARYLAACGVEVAEVMRPNRQARRQRGKSDAADAVAAALAALSGEASGVPKSRDGLVESVRALRVARAGAVKARTQAGNQLRDLILTAPEQVRQQLAGLPCQRQVDLAARFRPHDLAGPAEGAKAAMASVARRHQELAAEIARLDAALGELLTRAAPPELLAKQGVATVVAATLLTTAGDNPGRVRKEASFAALCGASPVDASSGKQLRHRLNRGGDRQANSALWTIAMTRLAHDPRTKAYAARRTTEGKTSKEIIRCLKRYIAREIYKALCQPKPPATTSAPQVKQDLSAPVLT

SEQ ID NO: 230560 - protein, 415 aa, unidentified
MIYVGIDWADESHRVFITDDSAQRLDSFSIENSRSGVEELFERVRHFAKDPKQVLFALETSKGLLISSILDAGYTVYPINPKSVDRYRDRYKVSGHKTDDFDAMVLANILRSDRHNHREILPDSPLTTELKILTREYSQLVRIKTIFINQLTSCLKEYYPVAVELFCKLDQHLTLAFLRTFPTVEDAKKASLQKLCKFLSKNHYPGVAEKANEIHQKLKEPQFQVEPYIANAKSQFMLTLVNQLQLLLPQIESFKKKIEQLLTQHPDREIFNSLPGAGVILSAKMISEFGDNRQRYKNVSSVQAEAGTAPVTESSGNTKFVHFRKGCRKSFRNTLHQFAVCSIKESSWAHQRYQQYIASGKKHTHAIRCLANAWLEIIFPMWKNHTPYSEQQHLLKYVKEQKSVEYRRDFNYLAA

SEQ ID NO: 230561 - protein, 355 aa, unidentified
MSQEKYIGMDVHQATISVAVMDTHGKLIMECLLETKAATIVEFIQGLHGTLSVTFEEGTSAAWLHDLLKPHVSRLVVCDPRKNALLKDGNKSDRIDARKLAELLRTNQLKPVYHREHGVRTLKELGRSYLTITKDVTRVMNRIKALYRSWAIPCSGSSVYAPRHRAEWLAKIAEPGVRVRAERLYQQLDGLQPVRLEARRELLLESHKHPAVKLLRQIPSIGPIRAALLVALLQTPHRFRTKRQLWAYSGFAVETHDSGEYRYVRGKLQRNRERITVRGLSDNHNKDLKNLFKGAAISASTRPGPLHEFYIGLVNKGMRPTMARLTLARKIATITLTMWKKGVGFDPQQLHRQAA

SEQ ID NO: 230562 - protein, 406 aa, unidentified
MALNSIKYFAKEFIMIYVGIDVAKDKHDCFITNSDGEVLFNAFAIPNSREGFNALFQKIQSVTNDLSKVKVGLEATGHYSYNLLGFLFSKGLPTYVINPLHTNLYRKSLSLRKTKTDKVDAHTIASMIMSDVNLKSYSDTSYHNEELKSLTRYRFDKVRERAKLKSSVSRLICILFPELEKLVPTIHMACVYALLSEFPSASAVASAHLTRLSNLLSKSSKGRYAKDAAVIFRQAARSSIGSHMPAKSLELKHTIRLIRELDAEIDEIENDIRRIMDEDIRSPILTIPGISYRMGAMIIAEIGDFKRFDSPDRILAYAGMSPSTYQSGQLDNCYSHMEKRGSKYLRYALFNATKYVCLWDESFAAYLAKKRAEGKHYNVALSHAAKKLVRLIYAMERSGLSYSKAV

SEQ ID NO: 230563 - protein, 351 aa, unidentified
MLIIGCDFHARYQQMAMLDDATGEVVERRLDHLNGEAEVFYRGLPRPVRVGIEATGPIRWFQQLLTELGHQLWVGHAAEIRARAVRQQKTDTRDARHLLELLVSGRFPRIWVPSPQERDVRQLLRHRFQLVGFRTSVKNQLHALAMGQGVCRRKKLWSTQGRVELEQLPLDPWAHRRRQELLEIHDRLQATIQELDLAVKQEAQNRAAALRLMQQPGVGPVTALAFVLTIGPVERFRKSKQVVSYLGLNPSEHSSGGHQRLGSISKQGNSMMRWLLNEAAQTAARYDEDLRRDYQRLKFRRGAAVAKIAIARKLAVRLYWKLREAAQPVPPARMQGSPTCPLMDAGGPSRR

SEQ ID NO: 230564 - protein, 357 aa, unidentified
MTCGCSFSELTYDNSEKLGEITFENKPSEFHKLTRKVSRFLTEEKTAAYGLENAYGYGCALAVWLIEKGCMVKDVNTALSYAQRKSVPKYQKNDSYDAEAVALVLINMLDKLPDAVPADAYWTLSQLVNRRDNICSHQQRLKNQLYEQLCVAYPSYKQFFGDISRRTALYFWLRYPSQEHLKGKTAEELVAELRPISHNNCSIKRAGKILELVRMDGQTTREHQESRDAITRNITGDLEHYREQLEIVETAIETMLPSFNCTLMTMPGVDVTTAANMLSEIGDINRFPNANKLAKFAGICPINFSSAGKGKDMYPKQGNRRLQAIFYFLAIQMIQISTNGTPRNKVFREYYLKRVAE

SEQ ID NO: 230565 - protein, 400 aa, unidentified
MNAVGIDVSKGKSMVAIMRPFGEVVATPFEIKHTEIELKKLVCILEKLPGETRIVMEHTGIYWQPIAKALHDAGLWVSVVNALLIHKYGNNSIRKGKTDKLDAVKIANYCLDHWLDLDRFTLIDPIRQELKTCHRQYDQYIKLKVNLKNNLITLLDGTFPGLNTLFKSAPRDVDGHEKWIDFAIKFWHRECVCGCTEKSFTNQYRKWCTKAGYRFNEAKAASIYAHAAAQVNTLPMSDAIKRLVILAASQLNTIIETLSVIQNEMLTLASKLPEFPVVMKMFGVGPVLGPQLIAEIGDVRRFHHKQSLVAFAGVDAPPCQSGTFESKNRHISKRGSPRLRKTLFQIMYTIIQHAPADNPVFQFLDRKRQEGKHYYVYMTAAANKFLRIYYGTVRAYLEDT

SEQ ID NO: 230566 - protein, 361 aa, unidentified
MVRRRTLAGIECGARGHLMKIYALGIDLGKTVFHLIGLDSSGQVVVRKRCSRTQLLAFTGNLQVQLIGMEACSGAHFLGKALRAQGHDVRLMPAQYVKPYVKTNKSDYIDAEAIAEAVQRLRMRFVPIKTEEQLDLQALHRVRERWVMRRTAVVNQIRSLLLERGLTLPKGRSHLGQMLPRILEDAELKLSGAFRVLLAQLKLELEQLAARIEQMDMVIQQEARENESCQRLTTIPGVGPVTATALIAAVGNGSAFGKGRDLSAWMGIVPGEYSTGGKQKLLGISKRGNKYLRRLFVQGARSVLQRRDKQAPGLSCWLAQLLARTHQNVVVVALANKLVRIAWAVLCKNENYRAPVLAATT

SEQ ID NO: 230567 - protein, 319 aa, unidentified
MAQNEVVVVGIDVAKDKVDACIRSLSQRQTFPSTAEGQRALIRWLRKHKVGKAVMEASGGYERDWAKALRDARIEVRIVDPKRVRSFAQSAGRLAKNDAIDAEMIAWFAETFDEARGQAYDAAREELVQIVNARQALLEQQTQMQNRCEHTVPIPVRKMHERLLKAIALEVTKLEAVIAALTKASPHFAETAEIIESVPGLGKITSAGLIAAMPELGQVSNEAISALLGVAPYDDDSGKRQGERQIKGGRRKVRNLFYMACMGAATRHNPVLKTFYRRLIAKGKKPKVALVACMRKLIVILNIMITRREKWDASRHAVG

SEQ ID NO: 230568 - protein, 448 aa, unidentified
MASSRCHENKNIIPATGRFHLSRPERSASRAFRACVRSAQSSLRRTYVANFTQALRSRQYLVLRVNAAEAAENRENLIASTDLLDLLGIAKTLLSRRARATGPAASASSKGGKPAEDIYFQIRELTRCRRTLVRQQTAASNRIHAMVDQLFPGFLDNAKSGLTAFCEASMALMKERFSAREIARRRPRTLAAFLARHGVRAPDEIAAKLIALASGALPPAPHRLAALQRTLASTVDLRECLARNASGLREHAAILLASTPYSMLTSISGIGFTLAAGMAGELGNPIRLSPVDSLCAFAGIVPHTFQSGGPDQPACQGRTPARCNHILKDWTVQSAQKIHLYGPPELKDRISRWNANGQHGIFAGARRFLRLLRSLVLNQVPYLDPRSRASTASDQDRADAALHAWLILLSKWRTIPDGIALISKETNPLGFWRRLVMESRSVHLPMRP

SEQ ID NO: 230569 - protein, 377 aa, unidentified
MKAPSTRPAAVLGLDVGKSSHWACLIDRDGEVLDSAPVRNREAELDALFASAPAGTLVVVDQFRNIGSLAVRRARAAGLGVAYLPGLAASRAAGLFAGEAKTDERDAAVIARTALGVPDSLSGVPGRGEALEAARALSSQRDHVVACATRDKNRLRAVLLESCPALEAAVDLSDRRWLELLAGFGGAWGIARSGAEGPRAEAAGEAAAASTAPPPALVEAENRQVRFLAARISEALDEAGALEAETAALLEGDETYACLLTVPGIGPRTAAQLAVSVDIGRFPDHDHLASYCGIAPRVRSSGTSVRSVRASRRGDARLKSLLIFSCNSLVRSSGRYGEYYRACRARGMGHGRALKAVARKRLRAIYAVVRDRVPYRE

SEQ ID NO: 230570 - protein, 412 aa, unidentified
MSLLQVALEPSTLVVAVDPGKVMNRVWVSDGSGLLVDPVSLPVSRDGIARLERLLVPDSGGHSGVVFAIEATGSLHRAWANELERRHPGAVRLFAPSQTKAARVQLGSGRFKTDDRDCAALTYLARQGAGRLLVEEVGVEALRAVVRHRRGLVADRKVAQQRLHDQLNCLVPGLSAPAGHGRRLRIEQVSGQAVLACAATFAGRPPSVRSLLARAPGRLTTTDAQYWADRWRGCLAPPHDAEPRAQRLTMDLERYRALCADIAALNNEITQQLAGTDGQILTSLPGVAAPRAAAFAAHSLPIDRFPDADHLYSATGLAPALYQSATLHRRGRISRQGLAEHRDALMAIAWGLSTFCPSFAERDHDYRARGMNPIQARVALARHACRLTYRMLKTQQPFDEQAYRQGRHSRGR

SEQ ID NO: 230571 - protein, 365 aa, unidentified
MEQITREQIVRVGVDLAKHVVQVHAVDGAGRMVVAKALARDRFMAWCAQLSPGCVVAMESCGGAHHWARKLATLGLAPRLIGGHFVGPYRMQGKRGKNDANDAAAVCEAASRPSMRFVPVKTAAQQGQLAVHRLREGYKQERTACINRIRGLLTEFGVVIAQSPEALRRVLPEVLEDASNELSALARMALQRAQLQWVELDCHIAWCDERIVAHVRSDAQAKAATRLCGIGPVTASALVASVGDFKQFKTGAQFGSWLGLVPSQNSSGGRTSLGGITKRGDDYLRTLLIQGAKSAVMTAHKRRDRISQWLVQLLARVGWQKAAVALANKNARILWAVLAKGRSFDANHVSAKPEGPAMVVPTMAG

SEQ ID NO: 230572 - protein, 365 aa, unidentified
MIANHSEDEEKSVTKITRAGVDIAKSVFHIHAVDRHDQPKWQGKLKRGEWLDVLCGRLAPGAEVGMEACASSHHWGRELEKRGFRVKLIAAQFVKPYVKSNKNDRVDAEAICEAMGRPGMRFVSLKSVWQQDRQAAHRIREELVGQRTAKANQIRGLAGEYGLIAPVGILHLRRALPEWLEDAENGLTDEFRILLNDLAEDLRQLDDRVVGLGEWISECVRKDPVAQRLMKLRGIGPLTASALSGALGDGRGFARGREFAASIGLTPRQHSTGGKDRLLGISKRGDAYLRKLLVHGARAVIRHAKNRDDELSQWINELMRRKHANIVAVALANKTARVAWAIVCGETDYDPMQIARRQAVSAITA

SEQ ID NO: 230573 - protein, 370 aa, unidentified
MSVRRILAKTIDTDLEYEAIGIDLAKNCVSAALLTTDGEVVCIDRLDYSELEKSAQALSPTTFAMEPCTEMNYLVQKLEAWGHRCLVIGGKNVQNYVENHFSGQKTDLNDAQALAFLAQDTQLRTIKAKDMEQQKYASLTTLREQYIKQYRQTIVSLKGICQAWGLNISKGISGKARLKDLIENHAAFPEELKESLVDMVTHAQTAQKALNKITKTLEELAKSDKVCQLIQTIPGLGSICSCRLRATVGDIKRFKSPKDFPAYYGLVPRSIATGHNERKGKITHRGDRTMRSLMVQAAGSLVNMATKGKLKSKQLTKWILKKQKEKMPWGKLVCAVAAKLLRIVRAVLISNKPYNSKIAGVAKCSLPKGS

SEQ ID NO: 230574 - protein, 455 aa, unidentified
MAKRKTGDHPDLKLVNPNAAAIDIGSTMHMAAVNPDVHASPVRAFGTFTQDLHDLADWFQSCGVTTVAMESTGVYWIPSFEILEAHGFDVILVNARYAKNVPGRKTDVSDASWLRQLLSFGLLRGSFRPEAEVATLRAYMRQRERLTEYAAAHIQHMQKALMEMNLQLHHVVSDIKGITGMKIIRAIVAGERDLDVLASYRDVRCKASVETIKAAVNGNDRAEHVFALTQSVELYDFYQSKMLECDRHLEATLATLGADTEHDPSQLPGPRTKTKQVSTPSFDVRAALFGVLGVDLTEIHGMGPPLSLKLVGECGTDLRAWPSAKHFTSWLCLAPGNKISGGKVLSSRTRRSSSRAAALLRLAAITIGRSDTALGAFYRRLAARAGKAKAVTATARKIAVLFYNTLRHGMTYKDPGASHYEERYRNRVLSNLKRRAKSYGFDLQKLPTEADMAVS

SEQ ID NO: 230575 - protein, 292 aa, unidentified
MAVTRWVGRAVGLDVHREFCELAICEDGRVRSGGRVASTPEGLGVLARSLLPSDRVALEVTGSCWEVARILEPRVDRVVVVSPDDTGIASARAKTDRLDARQLASLLWKGELEAVWVPDERCRILRRRLARRGQLMRARTRSKNEIHASLQRRLQAKPPCSDLFGVKGRAWLAALQLPAEERESVDAAMRHIEFLDQELAAVDRLIAQQALSWPEIRRLMSVPGVNLICAASFIAAVGNANRFLTSRKLVAYLGLDPRVKQSGEGPARWSWTIRLYDASAWSASVTPERAQV

SEQ ID NO: 230576 - protein, 345 aa, unidentified
MLIIGCDFHPGFQQVAIFDKQTGEISGKRLQHPQEARAFYAGLAGRARVGMEACGYTQWFERLLDELGHELWLGDAAQIRASVVRRQKTDRRDAEHLLELLLEERFPRLWVPTAEQRDVRQLLLHRHHLVRSRTQVKNQLQALALNQGVQKKRQLWSKAGRAELEKLALPAYTAGRRDECLQRLDYLDGQIRQLSQKVVAEAEKGEAARLLMTHPGVGPQTALAFVLTIGEVERFPNAKCVASYVGLIPTEYSSGGKQRLGRISKQGSPLLRFLLVEAAQSAARYDASLKRVYVRLCMRRSRGQAKVAVARRLATRLYWMLRSGKNYAQLTASGAGKPVSSRGAA

SEQ ID NO: 230577 - protein, 429 aa, unidentified
MDCMADVYQPIAGIDVHKKILVVVVRLMEEGKVIYQKRKFGATRQEIDHVAAWLQHWKATVVVMESTAQYWRPLWYGLERYTEGPFQLHLCNPLKVKAPRGKKRDYRDAQRLADRWAAGDLEDSFVPGQEQREWRSMTRARVHMKRKIGINRCQVEGLLEHGTIKLSSVVSDLFGATGWAILKLIASGVTDVEVLVKQARGSLRSKESKLREALAGKLDPTHRLLLKQHMEQVELLRKQVEELNQALAVAMKEHVPALTRLCQIPGVDLYSAQELLAEIGPKAAAFPSADQFAGWVGICPGSKESGGVNYSSRSPKGNRYLRRLLCQVAWGAVHNKESFFAALFGRLKPRIQGRGAAWAVAHRIGKVIWLILHEEVEYKEMGPGKVGIQTLNRKFRRLMKEFARHGVDPRTILAEILPVPSPLLETVNE

SEQ ID NO: 230578 - protein, 358 aa, unidentified
MVQSKGINFDGQNIYIGIDVHLKTWSVTILTQSGYKKKHSQKSSAKELFEHLKKHYPNGNYQAVYESGFSGFSTYYALQEYGISCMVIHAADVPTTQYENVMKSDPVDSEKLAKALKAGTLKGIYIRRKENLDNRSVVRIRKTLKQQLGGYKSRVKHLLYNNGVQLPDCFASPNTHWSKRFMSWLREDVVLLSSSRIGLDLLLEQVDLFRQSLLKANRLLRDLAGSPLYAGRYSLLISIPGIGVNTAMCLLTEIDDISRFNNQREFASYLGLIPTMHSSGEKSCNGEKTFRGNKKIGPMLVESSWIIIRHDSVMAAAYGEYCKRMKPQEAIIRIARKLSSRILNVLKKGKKYEYDRCC

SEQ ID NO: 230579 - protein, 354 aa, unidentified
MLTEMVDHVVGIDPDRDWITAAVLEAGTAGVVATARFPANATGYRDVVAWADEYSTDTERAWAIEGTASYGRGLTAALGRCGEWVIEFDRAKEKPAKDGSKTDELDAIRAGRETLGRAKLASPRAYQGLREALRVHAVARDTAVRARTAAINELKAFVVTADDTLRSELRGLRTPALVKRCAGFRHSTNRSVDQACTRAAMRAVAQRITHLNEEITTHEQALTSLVDQAAPQLVAEIGIGPITAAAFYIAWSHPGRCRNEAAYARLAGASPIPVTSGQTQQRHRLNRRGDRQLNKALHQVAVTRLRCHPPTQAYKKRRSSEGKTDREIRRCLKRYIARKVWRLLEHQTPPETAT

SEQ ID NO: 230580 - protein, 379 aa, unidentified
MKKDIRFVGLDVHAETISVAVADPSGEVRSIGIIPNRPEAIRKLVKRLGPPDTLRACYEAGPTGYVLYWQLTELGVRCDVVAPTLVPVKAGDRVKTDRRDAEKLARSYRSGDLTPVWVPDAAHEALRDLVRAREAAKKDQMRARHRLGKFLLRHGRRPPNGIKPWTVKHLEWVKKEVDFDQQAQRAVLLDYISEVDHARDRIQRLERAIDEAVETAPERMRAVIEALQALRGVAQVSAVTIVAEVGELSRFARPRQLMGYSGAVSSEHSSGERTRRGAISKAGNSHLRRIVVEAAWAYRHKPSLGGALRSRQDGLSEEVKAIAWKAQHRLHSRYRRLAAKGKVRQQVVTAVARELLGFIWAIGVTVEMNTKAAGKQPAR

SEQ ID NO: 230581 - protein, 417 aa, unidentified
MIRKVMEVIHQRVGGLDVHKKTVMACRRRLLAEGQVESEVQEFGTSTAQLRSLAAWLAMWGCTHVAMEATGVLWVPVWNVLEDQYQLLLANARHLKKVPGRKRDVSDSEWIAQLMQCGLLKPSFVPSREVRHWRVLTRQRMKLNDQHTGVVNRLHKVLQQGNIKLSSVATDVMGVSGRAIIEAMIAGESDAEVLAAKAKGRLKATHEQLVESLEGRLNQAQRWVMNEMWEQLEFLELEITRYDEQIRDEMQPYEELITRLITIDLVKRRSAENILAEIGPDMSFFPSDDHLVSWSGLCPGADESAGKNRSGKTPKGNQWLRRALLEPAWCASRRRDGYMAALYRRLAVRRGKKRAAVAVARTILQAAWHVLKEGVDYKELGGDHYDRLHGDKTRNNLVARLEKLGYQVELKPKQAAR

SEQ ID NO: 230582 - protein, 365 aa, unidentified
MRKISTMQRNGEKIFKGQLTIGLDLGDRSSAYCVLNEAGEIVLEHKLATTPEAMKQVFGSVPRCRIAMETGTHSPWVSRVLTALGHEVIVGHAQKVRLITKSRRKDDRLDARTLARLARIDPELLSPVKHRSAQAQLHLTEIRARAVLVSARTALVNAARGLVKSYGERLPKCGTQQFSRETTKGSSAGLREALDPLLREIESLNDRIKEYDRRIEQMAKQTYPETALLKQVKGVGDIIATAYVLTIEDAHRFRKSRDAGCFVGLQPGRRNSGESEPQMRISKEGDEYLRTLLVQGAHYILGPFGEDSDLRRWGLKLSARGGKNAKKRAVVAVARKLAVLLHRLWVSGEVYEPLRNSQKPMSAAA

SEQ ID NO: 230583 - protein, 372 aa, unidentified
MTQHTTNTIWVGLDVHQASITAAILYGDNPEPEVVRLPGDLNATRKLFRRLAKKGMPRGCYEASGAGYVLQRTLDHDGFHCEVIAPSLIPSLPGDHRKTDRLDAVHLARMFRSGHLTQVTVPGMDQEAVRHLVRARLFLRRQITRSKHRIMGILRTTDYRFTETKSNWTKKHRAWLAKLLREITGPLQIVLSSEMQLLEYLESSQIALDARISEVAQQHPWRVQVEALCCFRGIKTLTAMTIVSEIGDIKRFRSPRQLMGYTGLVPSERSSGERQRRGPITRSGNRYLRRVLIESAWHYSKRACSTLRLQRQRMGQDPGVVGIAVKAQHRLQRRYQHLARTKHTNKAVTAVARELSGFVWSMLWEISGADRV

SEQ ID NO: 230584 - protein, 389 aa, unidentified
MKIFVGIDIAKLNHFAAAISSDGEIILEPFKFTNDADGFQLLVSKLESFDKNSIIIGLESTAHYGDNLVRYLVAELYQVCVLNPIKTCQMRKNNIRKTKTDKIDTYVIAKTLMMQDDLRFVSFYDLDMMDLKALGRFRQKTIKQRTRLKIQLTTYVDQVFPEIQYFFKSGLHQNAVYALLKEAPSPKEIASMHMTHLANLLKVNSHGHFTKEQAKELRVLAQKSVGANDSAISIQITQTIQQIELLDSQLEKIEAEMTDIMKFNDSVIMTIPGIGYINGGMILGEIGDIHRFSNPSKLLAFAGLDPSVYQSGNFQAKTTRMSKRGSRVLRYALVNAAWNVVRNNATFKAYYDAKRAEGRSHYNALGHCAGKLVRVIWKMLTDEVEFNLE

SEQ ID NO: 230585 - protein, 317 aa, unidentified
MYHEKKEVKKIESITRINQRHNKDYIKDIGNNENKRETNAHYYVSIDIGKKNCVVCISDKDGLIIEETKYGNTFSEACFFAQHIDRQYDSSNCIAVVESTANMWIKTYKALEQAGIQTKLANPFKTRVIAEARIKTDKLDARILCHLLRSNLIPESYVAPDSIREDRSILRLRINLVQDRTRVVNRVHSLLDKYDMDQACNHLVGKKGLNWLKSLKLEGNNDQFQLNNHINNIEFLNNEIMQIDKKVSSQAVKNKDVKILMSMTGIDYFSAMLITSEIGDITRFSDPSKLVSWAGGAMSNHTSIRKHVIHGKDERWK

SEQ ID NO: 230586 - protein, 367 aa, unidentified
MSKAETGRLCVGVDLHKTQFTICALNEDGEYLLEKQYPTKEEGYREFAREMHRFEEQGCSIELAVETTGNARFFKNRMESEYFAVKVVNTNRFKVITMSTKKTDANDAATLAFYLMKDMLPEAHLCSQTSEEIRRLLKTRSVLVQSMVKIKNQIHGMMLGYGIETKAAQLQSKRKRQELINDLEDHNFSAYTAPSLKVMLKILDDLSAEIKGIEKLLEEMVASNEDVALLMTVPGIGINTATVIAAYTAELERFDGNYKKFASYVGIIPSVHNSNETTHYGRITKHGPQELRTAFVQAALGMIRLTNVSSDWRIIKEYQRRKGDKGSGRAIIALARKITRIVFVMLSKREGFNPEMMRCEEAIQQTA

SEQ ID NO: 230587 - protein, 387 aa, unidentified
MIYIGIDIAKFTHFASAVNSDGEVLVKPFSFENSRKGFDLFLSKIKNFDKNNCLIGLESTGHYGDNLIYFLFNENYKIGLINAIQTNSLRNTNIRKTKNDKVDTFLIAKCISLGNYSLIKQKDIEIIKLRTLCRFREDIIANQTKLKIQYVTCLDQIFPELYSFFKGNLHLKTCYELLKKYSSPKIISSTRIDALTNILHKNSKGHYSYDEAVILKNLAKNSIGVDNPAISIQIKYLIEQLDLLREQLNGIDNDIKEIMDKLNTPILSIPGIGYILGAMIISEIGDIKRFSNPHKLIAYAGIDPSVRQSGNFNASTTRISKRGSSHLRYAIYRASFLLVYNNDVIYKYYTTKRSQGKSHTNALGHVAGKLTRIIFKILTDNIVFNLS

SEQ ID NO: 230588 - protein, 337 aa, unidentified
MNQVYDHYVAVDWSERNMAIARMTRKAPGVKVIDVPSDVGELKLYLRNLAGSKILVIEETTTAQWLYTELIGEVNRLVVCDPYRNRLLSEGPKNDSIDAEKLVKLLRSGMVKEVYHGQGAFVELRRLVSGYEDVIRAGVRLQNQRSAFLRACGRIGASQERLGESEVFVLEGLERRICDYEADKEAYKRKFAELARKHSEIRHQMGIPGIALIGGVIVVSRVIAAKRFPNRGHYWSYCGLIKHEKMSGGRSYGKRQPRYCRALKSAYKTAAFAAIKGNNEMREHYDYLVQEKGLSDEHARNAVARRIAQISLGVLKSGKEYRPLLRRKIEEKEQPGS

SEQ ID NO: 230589 - protein, 428 aa, unidentified
MTVRNCTSAKDFLQFKKEIRGSRTHLIVGVDIAKDEHRAFFGTAYGKTLLRRFTFKNDIEGFGKLLESVRLVKETHRLSEVVFGMEPTANYHKPLGDYLIGCGHRVVLVSGVAVKRNRELLDGRWDKNDTKDAANVADLISQGKCLFYDYTPVLIRDLRNLLSLKRRLKKQEHGLRIRIRNCLLAQYFPELDRYYSKWEPEILSVVRWCLDPSVIAGLEYDQFVKLVCPGSNGVRKQGRLEWIWKKAVDSIGCAAGEASEFEAEVLVEELRHIREVIKETDAKIKDVCKRCPGYDYLLTIPGFGPDVSSKVLAAIGDPFRFNSASQVLKMAGMDLNAERSGKSSDTAVPIISKKGSGHLRYALYQAAFIASTRNKLFKKYYAHILTGREKEKGIKTKMRVKLAAKLLVIAWTLMKKREPFVLEYLQIV

SEQ ID NO: 230590 - protein, 468 aa, unidentified
MTPRHQKKLRQPRSAEPLHVTHRHAAGIDVHSAVHWVAVPPEDAPPPPADHPANLPAHVRSFGTCTADLIALADWLQQCGVKTIAMESTGIYWIPLFELLESRGFEVYLVEPRQSRHAPGRPKSDVLDCQWLQRLHSYGLLTGSFRPVEQVVVLRSYLRQRQMLIRYAGQHVQHMQKALEQMNVKLAEVVSDVTGVTGMAIIQAILRGERNPLELAKLRNDKCKRTEAEIARALYGNWRAEHLFALRQAVELHAFYRQQLHKCDEQLQACLASFADQSKGQPQPRRQRRHVKRVNEPTFDVSGALYRMAGVDLTVLEGVDPNTALVLLSEVGPDVSRFPTVKHFTSWLGLSPQHQGSAGKIRSRRVRHGACRAGRALRLAVQGCYHAKNALGAFYRRIQARAGAPKAIVATARKLAERVYRLLKYGAEYVCQKIEVYEAAYRARVVKGLARKAAELGYRLEPAAATAT

SEQ ID NO: 230591 - protein, 438 aa, unidentified
MEEAGDEPLFCERAAGIDIGKQVVSVTIRVPSDTRRGGRQQETREFGTTRRQLLEMADWLRCWQVERAGMEATSDYWKPVYFLLEREGFDCLLYQASQVKALPGRPKTDKLDSVWLARITEQGSLAGSFVPPEDIRRLRTHTRYRRRLTQARTAEKDRCEKLLEDAHLKLSSVISDIHGVSGRDMLRAIIAGERDPEALAQKARTRMRRKIAQLREALDCSFFTPDHAFVLQMMLDNIDQLTAQIAVLDERIAILCEPYERQVAQLDGIPGFGVRTAQDLIGEIGVDMTAFPTAGHLCSWARLAPRVRESAGRRKGKNATGRGNPYIGGTLGEAAAGAGRTQTFPGAKYRRLCTRMPKKKAQGAIMRDQLVITHALLSDPDAGYRDLGTGYYEQRERTRRRASTHVRSLERLGYKVTIEPLAPDADPETGELITRTAS

SEQ ID NO: 230592 - protein, 346 aa, unidentified
MTIYCGVDFHARQQTVCYCDAADGEIHLRELQHEQDDIRSFYAGFAGEVVVGLEASGYSGWFVELIESLGHRVFIGDAAEIRRFAKRRQKNDRRDAGLILELLLKGEFPQVHRPTFESREVLRLLRYRHKLVQIRTRAKNSLQALAFSVGSAGRSKLLSRQGREQFVRLPMSAAMGRQRSEWLSLVDELNTRIKSLDGWLEQQAQQDERVLRLQTHPGIGLLTSLALVHSLEPVTRFAGGRKVAAYVGFDPMEYSSGDKQRFGSISKGGSRLLRYLLVEAAQIAVRRDEELKRFYLRLLHQRGAQKAKVAAGRKLLVRGYILLRDKIDYAEFLSRGVEARLARLAT

SEQ ID NO: 230593 - protein, 369 aa, unidentified
MNTTTFVGLDVHARSIKAVALDAMTGEVRSATFGYDAAAVAEWVGSLDPAAKCVYESGVTGFDLQKKLTALGVDCVVGAVSKMIKPSADRKRKNDRNDAEFLARMLSVGNVVEVWVPDDECEAARDLVRALDDAREDLKRCKQRLSKFLMRHGYAFSETTPTGRRKGNWTAAHWAWIKSISFPEKADDDVLAYYVDAARQATEDKARLERLVEAEASKPRWKRRFDSVRCLKGIDVTSAADLVFEAGEFSRFKSARSFAAWLGLTPSEHSSGESVRQGGITKAGNKHLRRVLVESAWHYLGCSPHSKDLAKGQAPDPGARRHAAKGVRRLVGRRAAMLERGVHKNKANVATARELACWCWAVGRMIENG

SEQ ID NO: 230594 - protein, 349 aa, unidentified
MNTIARIGVDLAKNVMQIHAVDRSDHIVTRKAISRADFLNWFANLPPCLVAMEACSAAHYWARRLRSLGHDVRLIPPQFVAPYRKGGSRMKNDALDAEAVCEAASRPQMRFVPVKSPAQQSVLVLHRLRTGYVEERTALVNRLRGLLAEFGVFLPQGIDQLHAHFVEHIEDGTNGLTGTAREALMRGWAQWQALDQEIAWFDRQIATHARQDPHAKRCMDMCGVGPLTASATVATIVDARQFKNGRQMAAWLGTVPRQKSSGGKQRLGRITKQGNEYLRMLLFLGARAALNTAHRRNDRLSRWIVQLRARVGYNKTLIAVANKHARILWAILAKGEKFDPAHVRPSTAT

SEQ ID NO: 230595 - protein, 367 aa, unidentified
MSESKYIWVGLDVHMDSITAAVLEDDSNDAQVLKMSGDLMKVRRLFRRLSEKAPVRACYEASCAGYVLHRVLKRDGFHCDIIAPSLIPRKLGDHRKTDRLDAVMLVKLYRSGHLTPIHVPAEDHEAVRQLLRLRYSYQEQCKSTKRRICSILLAQGLIYRDGKSLWTKKHRLWLTELRHRLEGPLKTALTAELEHFEYLEMQRNALDRDIDMFSQQPPYSKYVDALCCLRGVKTLTAMTLLCEIDDIHRFRSPRALMAYFGLVPSEHSSGSRERKGPITKAGNGYARRILVEAAWNNRHNAGADLILNRRRQGQPPEIVAIALKAQHRLSRRFYYLSHKKHLHVAITAVARELCGFVWAIMKAAPQH

SEQ ID NO: 230596 - protein, 337 aa, unidentified
MIQFRYFVGIDIASSTFTASVGTMPWKIVLKPQEFENTEDGFQAWLGWLASRPILPQQTIICMEATGVYGEGLAYFAYAKGYQVAVQPPLEVKRAFKPNIRKTDAVDSLQIAEYAGRYADKLSFWQPRNEVLEQIKVLLATREQFVAQNTAHKNSLRAIQRKSVKTPVAEQVHMQMIEFFKKQVQAIDLEIQRLIENDPTFKQMLLLLLSVPGVGLLLAAHMILLTQMSFDYKQLNSFLGIAPNEYSSGSSVYGHPTSRHFGPAAIRKLLYLAACSVVAHREIFRTYFLRKTHEGKPARLVLNNIENKLIKIICAVLRTHSPYNPNYSSVQPSLTGS

SEQ ID NO: 230597 - protein, 300 aa, unidentified
MAIVGGFDLHRRQITFEYLDTASGEVSRGRVAPADREHLRAWLRRLEGQEAAFAVEACTGWRFVVEELERAGAQAHLAEPADTAALRGPKRRAKTDRADARHLRELLMAARLPESWIPPAHVSDARTQIRLYKALVDERTAWLQRVHAILFQLGAPAVPALARPSGRGRLDLAVLPPAARSAVKVALRSVDRVNDELDTLRPALTRLARAQSGCRALQAHYGIGPLTSVAIWAELGDCGRFSSSSDAVRHSGLDVTVPPTADAPAATSPAKALASCAGPCSRPPFAPPDPPPPTTPTTFK

SEQ ID NO: 230598 - protein, 351 aa, unidentified
MPATAQTAVAVIGIDIGKNSFHIFGHDSRGAIVLRQKWSRGQVEARLANMSPCLIGMEACVGAHHLSRKLKALGHDARLMPAKYVRPYSKGQKNDFRDAEAIAEAVQRPTMKFVATKTAEQLDLQALHRVRERLVSQRTGVVNQIRAFLLERGVAVRQGLRFLRAELPRLLATPPDVLSPRMVRVIESLAEDWHRLDERIDHLSDEITALARQDAGCERLVSVPGIGPIISSAMVAAIGNGDAFSKGRDFAAWLGLVPKQISTGDRTILGKISKRGNRYLRVLFVQAAWVVLIKPQSWERHGLKPWIEAAKKRLHRNVLAIALANKLARIAWSVLARGRSFEARPAMASAA

SEQ ID NO: 230599 - protein, 321 aa, unidentified
MTYIGIDVSKATFVVAYSSAKNSKTRTFKNTAKGVHEFIQTISAGRHHCVLEATGNYSSLLVYLLSEAGITVSLENPLKIKHFSRAMLAVVKTDEIDAHLIALYGEKMQPAPYKLRSETILLLKQKRTVLRQLKKQLTATQNLKGSLEVLPKFDPKCKRTIEKTIEFLNKQIKSMEEELASLAQDEFKKQMSLLTSIKGIGVTLAAALIVATGGFTYFDNAKQLTRYLGLSPTYQQSGMSVNVKGHINRNGDPHLRSQLYIAAVSSIRCNTECQACFSRLQSNGKPGKVAIIAVANKLIRQAFAVVKQEKPYVDGFKSAKP

SEQ ID NO: 230600 - protein, 414 aa, unidentified
MSDVNTTQHTAVALVAIDIAKRNHDVAILWPNGKTATMKIANSKDGFQRLMEVVQRYGDPVHVAFEPTADYHRNLAYWLQNAGATCFLVSSLMSARARELLFKTCDKNDRKDAQVILYLMRQNMMKPFYDPLVEGTIDIQELSNTYHQISLARTRCQHSLMNHYLTLYFPEMERFYHASRSEWFCCFLSKFPTPQSITRYKVATFVKRAWVIVGRKVAKQRFLEEVHETACRSIGLPVELQGQAVKTFRIQLQRIIDLNQLRQQLEKTSETILSAREDYQQLRSVPGIGPICAMMIIAESGDLNRFGHYRQYLNFCGFNLCSTQSGQRQSKHKISKRGNSRLRYAYWLAATIAIRQRENSFREKYERHIKSSPNNPDLKRKAVVAIACKLARVCHSLVKQNTPYRGYYEFNHGT

SEQ ID NO: 230601 - protein, 468 aa, unidentified
MRLVSKTNTLEAVWTTRLYYKAFAETRSCLPCALTRLKEAELNIMSTRETGQTQPAVAPPAFAAHIGLDWADQKHFWTMLVDGKKTRGQLDNTPEAIEVWAAELAQRFGGRPVALALEQARGAVIVVLSKYAHLVLFPVHPTSLANYRKSFSPSGAKSDPVDGDLILDYLVKHPEQLRGLQPDTVATRSLQFLTSERRALVDQHTAVVQSLTHWLKQVFPQVVRWFGDLSTPLVADLLLRWPTLQELQKAKPKTLLRFLHQHNCRSAERNQERLEEFRQAVPATDDPALLQTGILSIHNAVRILAIMRQGIAEFDRQIALTYQDHPDRFITESLPGAGPVLEPRLIAAAGSLRERFESAHNMECCFGIAPVTEASGKSVWIHWRWSCSKFVRQTFHEWAACSIRSCDWARQHYAGQRDRGKGHHAAVRSLAYKWIRIFFRCWRDRVAYYENRYLEARRVAAAAAGGKP

SEQ ID NO: 230602 - protein, 346 aa, unidentified
MTIVEATRTVTGGIDTHSEVHVAAALDEVGGLLGAESFEANPDGYSALFTWLSAFGDVTKVGVEGTGSYGAGVARFLARAGVEVIEVDRQNRQARRQSGKSDPLDAVEAARAALSGKARGHAKSRDGSVEAIRVLVVAKRSARASRTKALTQMRQLTYSAPDQLQSRLKGLPIPQFVAVAQGLRPTRSADPVTAATKASLSSLAHRVADLEEEIGELDARITPLLQATAPELLAVYGVGIDTAAALLVAAGDNPERLHSEAAWAHLCGVSPLQASSGKVTRHRLNRGGDRQANSALWRIVISRLASDPRTQAYMERRVKDGRSKPEVIRVLKRYVAREVYRYLPRG

SEQ ID NO: 230603 - protein, 338 aa, unidentified
MKAVARIGLDIAKNTFQVHGVNAHGAVVMRKQLSRGEVLRFFANVPACVVGIEACAGSHYWARELKGLGHDARLMAGQFVAPYRKSGKNDANDAEAICEAVGRPNMRFVPIKNEEAQAVLTVHRARQLLVSERTALANQIRGLLGEFGIVRAAGLAPLRRRLAQIGAGQQTLPVLARETVGELHDRLRLFDACISQYDRKIEVIARGSEPARRLMRVEGIGPVTSTALVASIGDARAFTNGRQFAAWLGLTPSQHSSGGKSRLGHIKKRGNVDLRTLLIHGARSVLQFTSKKTDRKSVWVEALKARSGTNVAAVALAAKQARIIWALLARGTEYQPAT

SEQ ID NO: 230604 - protein, 313 aa, unidentified
MSDNLPQTIGIDISKASLDCHAYPVGAERQFANTAKGHKALIAWLRQWPIERIAYEATGTYHRALEAALTNWPCVKLNPERARRFAQATGTLAKTDRIDAILLARMAATLQPAVRPARSAQQTQMAELINARDGLVRDRTALKNREKNLTIAFLKRQCRQRLEQIDRHIAALDAEISNLIAADAVLARRHQILTSIAGVGTLTANQLIATMPELGSLENKQAASLAGLAPIARQSGQWKGKSFIRGGRANVRQALYMPALVAARYNPDLKAKYQQLVTAGKPAKIAITAVMRKLVVTANALLKADRCWAQSQA

SEQ ID NO: 230605 - protein, 355 aa, unidentified
MSQNLDVSPAAIGIDIGKNSFHIVGQNQRGAIVLRQKWSRGQVEARLANLPPCRIGMEACVGAHHLSRTLKALGHDARLMPAKYVRPYSKGQKNDYRDAEAIAEAVQRPTMKFVATKTADQLDLQALHRVRERFVGQRTGIINQIRAFMLERGIAVRQGLRFLRAELPSILATRTDALSPRMLRILEDLSADWRRLDARIEDLSSEIEALARQDKGCERLMTVPGIGPIISSAMVAAIGTGDAFSKGRDFGAWLGLVPKQLSTGDRTILGSISRRGNRYLRTLFVQAAWVVLVKVGPKHWDRYGLKSWIEAAKKRLHHNVLAIALANKLARIAWAVLHKGRAFECVKTNEAYRPA

SEQ ID NO: 230606 - protein, 365 aa, unidentified
MKKVSTTTGKALRKMQKLTIGLDLGDRSSWYCVLDERGEIVLEQKVSTTPKAMEEVFGGMPRSRIALETGTHSPWVSRLLSKLGHEVIVAHARNVRLIGESRRKDDRLDAKTLARLARIDPQLLCPVKHRSAKAQAHLTVIRARAGLVRARTALINVARGLTKSYGERLRGCSPRNLNSKKAEGLSVELQTALGPLLEEIESLGGRIREYNQQIESIAQAHYPETTLLKQVKGVGTLVALTYMLTLEDPHRFSKSRDAGCYAGLQPGRRNSGQSQPQMRISKEGDAYLRGLLVQSAHHILGPFGADSDLRRWGLKLAERGGKNGKKRAIVATARKLAVLLHRLWVNGEVYEPFHSSSRRVLVAAA

SEQ ID NO: 230607 - protein, 349 aa, unidentified
MTPLGGASVAEASTIGLDIAKHVFQAHGADSSGRVVFRKRITRAKLMQFFASQPRCLVALEACGGAHYWGREIGKLGHTVRLIPPAYVKPFVKRQKNDAADAEAICEAAQRPSMRFVPVKDEAQQANSVVFRARDLLVRQRTQCINALRGHLTEYGHVVPQGTAHVDTLVALVEDATSSVPESARTILTVLIGTFRALQTQITQLDAEIARRAKADPVARRLMTIPGIGPIAATAITALVPAPEGFRTGRDFAAWLGLTPLQKSTGGKQKLGAISKMGERTIRRLLILGASAVVRWATQRGAAEGSWLARMLGRKPRMLVTVALANKMARIVWALLVKGGTYRVPAAAA

SEQ ID NO: 230608 - protein, 364 aa, unidentified
MRILALDLGKSKSVAYTVDTDTGECGFKTVRTEPAVLGRLFAEGRPDRLVFEIGPLAGWVHDAARQAGVRQIEVANVAHEAWRWRHTRRKTDRVDAVRLADLSAAGQLPTVHVPQAATRQWRGLIAYRARLVARRTAIKNRIRAILASVGEPGMPRGAGAWTHEARAALAALARPLADVGPEDLWRGELALELEALAHLESQVATVEAKLDTLAEADERVARLRTIPGVGPRLAELLVALFDDPHRFRRGKQVGSYLGLVPRQFQSGAMDRHGRITHHGNPLARALLVEVAWLGLRWNGRLRAIYQRVHRGSRARRKVAIVAVARRLAVFAWAMLRDGTTWRPERPTETTAQPRRAGVEAGVLA

SEQ ID NO: 230609 - protein, 370 aa, unidentified
MHKPTTLFVGLDVHKDSISIAHACEDRDAEVTFVGPIGTRQCDIDQLVRRLHSKASRLVFAYEAGPCGYVLHRYLTGKGLDCLVVAPSLIPKKPGDRIKTDRRDAVELARLLRSGDLTPVYVPSIEDEAIRDLSRAREDAMKDLKAARLRLKSFLLRLGLTYEGRADWNDAHQRYLARVVCPTPAQQIVFQEYLHAVTEIAARLQRLASELREHSSSWRLSPLVEALQALRGVQDTVAITTVAELGDITRFDSPRQLAAFVGLIPSVHATGTARRLGSITKAGNSHARRVLVEGAWAYRHPAKVSESIRKRLERLPKSIQDIAWKAQVRLCKRFRRLSARGKHPNIIVTAIARELIAFMWAIAREVRLSA

SEQ ID NO: 230610 - protein, 411 aa, unidentified
MSAGVITAVGIDVSKYKSTVAARRPGGEVVLLPFDVSHDVAGIKKLLEKLHGLEDEDGEIRVVMEHTGMYWRPVALALQQAGFFVSVVNAILIHNFSDNSLRKIKTDKADALKIANYGLTFWMDLREYSTEDETRQMLKIQSRLYERTTTTGTMLRNGLISLLDQTFPGANKLFLNEGRNTKGHVKWVDFVIRFWHKECVATLSLHTFADTFQKWCKRTGYRFSTSDAERIHTAARNAVATLPKNDSTKLLITQAAISLNTVYDSLHALRTEMNRLASLLPEYELVMTMEGVGKITGPQLMAEIGDVRRFSHKGALVAYAGVDAPPYQSGTFDAKNRHVSKRGSPHLRKVLFEIASMILVHGNPDNSVFCFMDKKRAEGKHFYVYTVAGAAKFLRIYYAKVKEYLNSQEAA

SEQ ID NO: 230611 - protein, 418 aa, unidentified
MESVRGTVAGLDVHKKTVVVVVLQSAQPDEDYASAIFGTTRFGLHELVAFLRQHGVRHAAMESTAQYWRPVWMALESEFTLTLAQARSTRARRGRKWDRADARRIAKRLLSGDLTVSYVPPPEQRDWRLLSRTQVAMRESIVRLRNQMEVLLEQAQIKLSSVVTDILGKSGRRMLDALIRGISDPVELAGLGDRRLQASKEQLADALSGQLTEAQRIVLELYLEQIDQIEQQVGELDEALARALAPHQNAIERLCDMPGVSVRTAQHIIAETGPRADAFNSAGKLASWAAMCPGQQESAGVSVSSRSAKGNWMLRRTLCQTAWAAIATKGSEAQRRFRAWRPRLGTQKAAWAVAHYQIRIVWKVLHDGVPYRRSDAEAVTERARVARAKRGVAVVREVGYAVSITAPPPGQAFPPTTG

SEQ ID NO: 230612 - protein, 327 aa, unidentified
MQVIGVDVSKEKLHCAWLRDAVRRQSRPKSVANTADGHAALLAWTTRVTGAAAADVHIILEATGVYHEAAATFLHDAGCRVSVVNPLQVKRFAESLGVRTKTDRHDGLILALFGDALQPPAWAPPPADVRQLKALLGRLAALEQDHARELNRLEKARAEPAPDAVLVSLQTMLDALAAEIGRLRQQVDDHLDSHPQLKEQRVLLESIPGIGSKLSLWFLTLFCGRSFASARQAAAFLGLVPVEFQSGSSVLKRPRLSKAGDARWRARLFLPAMVATRCNPLIRAQYQRLLDAGKSKMSALGAAMRKLVHIAFGVLKHQKPFDPNLAA

SEQ ID NO: 230613 - protein, 327 aa, unidentified
MHGVDSAGKVVITRQLRRKQVIEFFSKIPPCLVGMEACGTAHHWAREVSKLGHTVRLMPPSYVKGYVKRSKNDSADAAATCEAVTRPSMRFVPIKSTDQQALLMLHRTRDLLIRQRTQLINALRAHLAEFGLVAETGREGLAQLAEIVTDEGNRGALPSAMKQALQAIIDQLAALELQVGTLDRAIHAHHRANDMSCRLETVPGIGVIGATAIASTVTDPSNFKSGRDFAAWIGLVPRQHSTGGKERLGDISKQGDRYLRRLLVIGATAVVQHARRHPQKHPWIMRLLAKKPAKLVAVAVANKMARIAWAIMAKGGYYRAPALAAAA

SEQ ID NO: 230614 - protein, 343 aa, unidentified
MQDVTLIGIDLGKHSFHVHGQDRHGKALLRKKFSRKQLIEFFATFHTCTVVMEACAGAHHMARQLAGYGHNVKLISPQFVRPFVKSNKNDFVDAEAICEAASRPSMRFVTPKNEAQQVLSALHRVRESLIRERTKASNQIHGFLLEFGISLPIGRAALRRLPAILAQQSLPPRLVQVLDRLQAHFKYLDEQIADIDKELTAQLADDDLGQRLMTVPGIGPITASVLASEMGDGKQYRRGRDFAAALGLVPRQYSTGGRNNLLGISKRGDKNLRRLLVQCARAYMSRLTYQSGQLARWVSTMLTRRHSNVVACALANKMARIAWAIAAHHTTFEKKEALTPMPA

SEQ ID NO: 230615 - protein, 340 aa, unidentified
MSYYAGIDVSLEASHVCVIDGSGKIVREARVASEPEALIACLGSVALELTRIGLEAGPLSQWLYAAMRDAGLAVELLETRHVRNAFKIMPVKTDRKDAQGIAELMRLGWFRPVHCKSIEAQETRAMLTARKLVQKALHEVEMSLRGVLRGFGLKIGKVAPTQFEARIRELVEGHPSLEVIATAMLAVRATLRREFNGFEKRLRAMARCDMRARLLMSVPGVGTIVALTYAAAIDDPARFTSSKTVGAHFGLTPTRYQSGETDRVGRISKIGDASVRATLYESAHIIITRPIKGCTALKSWAMRIAKRAGMNKAKVALARKLAVIMHRMLVDGTTFTTQPA

SEQ ID NO: 230616 - protein, 462 aa, unidentified
MQDNRSQEPTGIEGLPVLRRNVAGIDIGSQVHWVCAPTVDGSGVEEETFGATTPELERMAAWLRQRQVESVALESTGVYWIAPHEVLERHGLEVLLVSTRELAHVPGRNKSDRIDCRWIRRLHSCGLLRGSFRPPEQICMLRTLVRDKGRLVEQRGDWIRRMQKSLDQMNVRVHRAVSDLQGATGMAILRAIVAGERDPRELAKLRDPACRKSQEDMAEHLSGHWRADYLFSLEQSLKMHDAIAETIAAYEHEILRQLSKLEPPDSQGQSAPELKNKNKAKKIRDRGEEPLRQALYRVSSVDLTSIDAVGAGAAQAILSEYGPDLSRFASEKEFVSPLTLAPKRGITGGKPIKKKRGTASSRVSEVLRNAALSLQHSQTALGAYYRRLAQRLGADVAAFATARKLATWIYRLLRWGQTYVDEGAAAYEKRYHEARLNRLRTTAVELGFQLLPQPSTPELSHT

SEQ ID NO: 230617 - protein, 409 aa, unidentified
MLFIGDDWAEDHHDIEVEDEQGRRLARRRLPEGVAGIEALHALVADHLPDDAEANQVLVGIETDRGPWVQALIAAGYTVYAVNPLQAARYRDRHGVSGAKSDAGDAHVLAELVRLDRAHHRPVAGDSAIAEHVRVLARAHQSLVWSRQRQTNMLRSMLREFYPGALDAFAGELDGRDALAVLAIAPTPADGRRLSRARVETALRRAGRQRYVATRAAEIVAALRADQLPARDGVEDAYGASVRALVAVISELRRQTLALAGAVEAGFGRHPDVEIYLSQPGLGPVLGARVLAEFGDDPGRYADAKARRNYAGTSPITRASGKSSAVLARHVRNRRLADALDQQAFAALQASPGARAYYDARRARGATHHQALRALGNRLVGVLHGCLRRHQRYDEARAWQQHAVVPRAA

SEQ ID NO: 230618 - protein, 354 aa, unidentified
MADETAVVGGIDTHTDLHQVAVIDHIGRHLATERFETTPEGYRRLLDWLRSHGEVLAVGIEGTGAYGAGIARFLTANEITVVEVDRPDRKAMRDHGKSDPIDAYGAATAVLSGRAAGTPKTRNGTVEAIRALRVVRKSAVKARTQTINQIRTLIVTAPSEVRDKLRGLSTPELTDTLARSRPAGRLDDPARAVKTALRRLARRYRALDEEIKEADKEIGPLVTKAAPRLIALPGLGPETAGQLLTSAGDNPDRLRSEAAFAHLCGAAPVPASSGRTNRHRLNRGGDRQANNALHTIVLVRMKYDQRTRDYVARRTAEGMTKKDVIRCLKRFVAREVYRHLPHMIHTTKPLPQTA

SEQ ID NO: 230619 - protein, 320 aa, unidentified
MPAVFIGIDVARDTLDAHILPLQQTAHADNTPAGHRQLVAAFLPLAQRPADIRVVLEATGGFELPVALALEAAGFEVAVIKPERARYFAKAGGQLAKTDAIDAEVLARFGQAVPLAIQPLPDEDTRRFRDLLDRRNQLVDMRTMETNRLATAADKPTQKSLKAHLAWIRREIDRLEAELDRRIADNDRWRELDRILQSIPGLGPQSARTLIGQLPELGRVDRKVIGQLVGLAPVAHDSGKTSGPRHIVGGRQQVRNVLYMAAVCASRCNPVAKALYARLRGKGKSAKVALVAVAHKLLTIANAMVHNQTTWQHSDVEVSY

SEQ ID NO: 230620 - protein, 422 aa, unidentified
MAADEQIQAWIGIDWANDKHDMSLYDVATGRRQHLEVEQSPEALAEWIGQLRLRYGNRGKVAVILEQGKGPLLNVLMGCEFLVLYVINPKSLSRYREAFYGSGAKSDPVDAELMGEMVRQNPDRFRAWRADDAQTRSLRLMTEGRRNLVNQATALTNQLTALLKSYYPQALLWSSALDTQWACDFLEQWPTLQALQQSSRRQILRFYEKHPRPYLDLEQQLQQFHQALPLTADEAVLEYSTLMVQALIPQLRALLHSIEEFDRKIAEVFRKHPDRPIFESFPGAGAALAPRLLAAFGADRDRYQAASEMQQFSGIAPVTEKSGKQHWVHWRMACPKFIRQTFHEFADHSRRWCGWAKAYYQIQIERGKKHNAAVRSLAYKWIRLLFRCWKQRLPYQEEIYLRSLAKQQSPLVQKIAIAVEKL

SEQ ID NO: 230621 - protein, 400 aa, unidentified
MKQSNATQRAVVDRTVTERINAASYVHAAYIGLDVHKASISVAVAEAGRQTPEFRGEIPNEPKAIDKLIRQMNERFDGQPLLFSYEAGPCGYGVYHQVQASGHDCEVVAPTLIPRRAGDRVKTDRRDAQMLARLSRSGELTPVWVPTPEQEAIRDLTRAREDMKAIELKARQRLNAFLLRHGKAYPGKSKWIPAHFRWLETVRFDTPVQQIVLQEYIEAVREAQRRVAGLERQMEAALPDWSLAPVVEAIQAMRGVSLITAMTVMAELGDISRFDSPCQLMAYLGLVPSEHSSGGSRRQGGITKTGNGHVRRVLVEAAWSYRFPARKTRIIEQRAERTSPTVQAIAWAAQKRLCGRYRRLAATGKAKQQVVTAVARELTGFLWAIACEAMGKPHGSRATA

SEQ ID NO: 230622 - protein, 338 aa, unidentified
MPLYGGIDLHANNSVVVLLNEQDHVVYYQRLNNHLPTLLEQLTPYRDDLEGVVVESTYNWYWLVDGLMEADYRVHLANPSAIQQYSGLKYTNDHSDARWLAHLLRLGLLPEGHIYPKAERALRDILRKRSHLVRQQTANILSVQNILMRNTGVRFNAQRMRALSPPDLMRLLPEPAQVLAVRSGLAVLHTLGEQITTLEKTVSTSLKHTPAYEQLLTVDGIGTILAQTIVLETGDIGRFATVGHYASYCRCVPSTKVSHGKRKGQGNVKNGNKYLRWAYMEAAQFAMRYSPKVQQFYQRKQAKTQGVLARSAVAHKLARACFYIMRDLVPFEVTKAFG

SEQ ID NO: 230623 - protein, 387 aa, unidentified
MHTPNDMSRSRTALAQNSTLIAVVEMSLSSWLVAGIVPGLDRQPTKKLTIDHDALLDLLHRWRNEAVRAGCQIDRIVVAYESGRDGFWLARWLRAQGVEAYVIHASSVPVSREHRRAKTDRLDTELLKRAFLGWLRGEANHCSMAAIPTPEDEDAKRPSRERENLIRECTRIVNRIKSNLARLGIRGFKMSMAKSAETLETLRMPEGAAIPANTLAELSREIDRLRFLRQQIKQVEATRADRLRRTPDESDTAMIRELTRVVGVGVETADMLVHEVFSRPLRDRKAVARYAGLTGAPDESGQKRRERGLAKSGKARVRRGMIQLAWGHLLHQKDSVLAVWYRKRTADGRGGLRKTMIVALARKLLIVLWRIATTGVTPEGMAIRPAA

SEQ ID NO: 230624 - protein, 421 aa, unidentified
MKQEAPEEFAAFIGLDWADSKHDVCLQAAGSAKREYFILTHTPEAIDAWVSTLRTRCNGHPIAVCLELNKGPMVSALRTYDFLVLFPINLLTLARYREAFTPSRAKDAPTDAALQLALLLTHRDKLPPLKPQSPAMRALAPLVAHRRRVVNDRVRITNRLTSTLKNYFPHVLQWFQDKDTSVFCDFLSRWPTLKAAQLARRSTLETFFRDHHVRSADIIGKRLQAIKTATPLTSDAGVIAPHVLFVQTLVSQLRVTLDAIETFDHAIAQRAQSHPDFPLFQALPGAGPVFAPRLLVAFGEQRARYASAAALQPYAGIAPVTERRGKKSWVHWRLQWPQCVRHTFVEWAAESIRHSFWAQLYYQQQRDKGKAHQAAVRALAFKWIRILYRCWQERTPYDEATSLQALTRRGSSLLQNLAKVS

SEQ ID NO: 230625 - protein, 338 aa, unidentified
MDVAVGVDAHKASLAVAVVDLVGTILGIREFANDPKGHRALRRWVTRWCGSKVIGIEGSGSYGAGLCRLLIAEGEDVREVPANLTFVERKRRPSGGKSDPSDAVAIARIVLREAELPRAVKLLSAVELKALVDHRDQLIQARTQHINRIHKRLVTIHPGYQDRIPKLTTRKGLTGALNMMRGDHGVLAELVRFEVGEVRRLDRLVSETDDKVSALSGASLTSLSGCGELTAAKILGEVGDPRRLRSKAAFAMLNASAPVPASSGQTNRYRLNRGGNRQLNRALYTIAITRMRTDADTRAYVQRKRAEGNSNKDVMRCLKRCISDLIYRQLQSDLHRLI

SEQ ID NO: 230626 - protein, 355 aa, unidentified
MMETVYCGVDFHARMQTIAYCDSANGEIQLAQLDHRKDDVRGFYSQFTGQVIVGMESGGYSSWFEALLEELGHTVWIGHATEIRRRANWRQKNDRRDAELILEIMLRGDFPRIHCHSRESVEVLRMLRYRARLIKMRTMICNNLQAIAINCGLSERSRMLSRAGQERLKSARMTPVIKQQSEDLLTLLVPINERIGRVDRWLKQQASTDDRVKLLTLGVVHTLEPFNRFSKQRSVVAYVGLEPMERSSAERKRYIGISKAGSRLLRFLLGEAAHVAVRFDPELKQFHERIGKRRGKAKATVAVARKLLIRCWIMLRENIDYAEFRGRGVEARLARLGHRPSMPEVVIERPASSDR

SEQ ID NO: 230627 - protein, 483 aa, unidentified
MSAGKKNAKNNNAGDGARGTMPVHGGEGAEVAEESTQVVEYAAAIDVAKGFGMVCTRVPGSRPDRRRQKVWRVEAAFKEVTALMDHLRCEGIQRLVLESTSDYWRIFYYLAEAAGLEVWLVNARDVKHLPGRGKSDRLDCVWHCKLNERGMLMRSFVPPEPVRDLRALTRTRARLAQDQTRHQSRVEKILEDALVKVSAVISDLFGTSGRRFLDALVAGQRSPKALAALGDYRLKASTAELEAALTGRFRDIHATEIAVHLRLIDAINAEIALLDEQIEQHLPSVPRTAPVCTACGEIGGCHAPGCGSHGTAPLSLAGRLDEVTGIGPVNAPAIIAELGTDPSQFPTPGHAAAWARLTSRSRQSGESAKPGRTGKGNRYLRGALGQAAMTAANTDTRLGAMYRRIARKRGKQKAIVAVSRVICEIARILICDPGARYEELGADYYHPRSPARQTRDKIREIERLNPGKKVILADAGPQADAAA

SEQ ID NO: 230628 - protein, 348 aa, unidentified
MLTIGIDPHKHTHSGVAVDPLGVQIAQRTVTARREGFGHLLEWARKLDRERVWVLEDVRHVSGSLERFLIDRGETVVRLPPRLMANARRGVRERGKSDPIDALAIARAALREGIDTLPTARLAGTELEIRLLALHRERLVDTRTRLINELRWQLHDLWPDWELPKRVLIHPAWQTKVSERLDQAEAGVRGQIARDMIDRIRELTGTITQLYEQLATLVKQAAPQLVTERGLGVLIAAKLIGEIAGIDRFTSDAQLARISGCAPIPVSSGRTDRHRLDPGGNRQLNHAFHMLALTKLLHDPRTAVYIAKQRQNGKTNREAIRSLKRHLVRRVYYLLSNPDRVPTTICLT

SEQ ID NO: 230629 - protein, 413 aa, unidentified
MVKREKIELVKRQRIFVGIDIAGSKHRARFIDNMGEEQIKPLSFFNDREGLEKLERRVNEIPRIGDDIIFGLEPTGDYWKPVAQYLREKGYPVVLINPYHLKRTKEIIDNSQDKTDDKDSYLIADLTKQSKYFFPVIPEGVYAELREVSINWKRTSQQVARLKCHLSNFLAKYFPEYKGIFSDILGKTSLYILKHFPLPEDIERLGINKLYRVMKKVSKGSIKEGKIQLLYEKARTSIGLKGGSQTAKVLLKEVLSDIEILKKRKEKLTKMMDELLYQSGYLKNLLSIPGVGIVAGSLFLGEIGDPDNYERASQIEKMAGLNLVENSSGAMKGEKKISKRGRSTLRYVGHLVATVAIGKSPEIKALYRYKVEECKKEKMKALTGLSAKMLRIMFAVCKNKTFYKHEEITRYFR

SEQ ID NO: 230630 - protein, 462 aa, unidentified
MKRVKVSALRERGLRPVVRVAEPQVVGLAPQTTKERKADTMKTYILRENKTVEPQKSNPHLPPPRPEPGLTALVNVICGPPLPPPPLLAWRVLFIGLDVHNDSIAVSLAPSDSTEVRRYGIIGGEHDDVLKLVKKLQAAHPGTLLKFCYEAGPRGFALCRCLRAHGLDCIMVCPSKVPRKPGERVKTDRRDADGLARLYRAGELTGIYVPEPEDEAMRDLIRARYQVGKAQHRARQQLKMYLLRHNLRYGGKSSWTPVHLRYLAKIKMPFPVQQIVFQEMLEVISEATARLERYDQEIERAVPGWSRMARVVRALMSLRGMALLHAATLVAELGDFNRFDHPGQLMGYLGLVPSEHTTGTDRQQGGITKMGNGPARRALVEAAWQYRAPARLSPHLKKRQEGLPKAITDIAWEAQRRLHHRYNHLTRVGKKKSQVAVTAVARELSGFVWAIARQVKPHPAKP

SEQ ID NO: 230631 - protein, 364 aa, unidentified
MHYVNNTELSSHEETRSQFNGGTGAIKLGIDVHQDFYVVVEQEGGINPKPPQRFGKEAFLHWAAKLARSVAEVHAVYEACGFGFALQRKLSTLGIRCYVVCPQKLDEQNKRVKTDGLDAKALCLKLDRFVQGNRDALAIVRVPTEKEEQLRAIHRQREQLVKVRKQLEAQGRSLMVNHGIEPVKSCWWKRRNFAALPVPAWIKELLGNTQPVLLALHEKIGALTRQLQEAAQPKQPRGLGAMSSVIIDREIGDWKRFNNRRQVASYTGLCPGEYSSGNTRLQSCVTKHGNPRLRAALVELAWRLVRFQPNYKPIVKWRQILAKGALATGAARKKAIVAVARQLAVDLWRIRTGRLSAATLGLIN

SEQ ID NO: 230632 - protein, 360 aa, unidentified
MRAVTTHRKGTAPMSVSMIGLDTAKSVFQVHAVDQAGKPEIKRKLRRNEVIPFFEKQDACTVVLEACGAAHHWARMLVGLGHEVKLIAPEAVRPFVKKGKKNDAADAAALCAAASRPDVKFVPAKSLEQQGVLALHSARTLLVKQQTMLVNAMRGLATEFGLTIPQGIGKLGELMTLVNRDETFPEKARQAIGELFDHCGALAESIEAFEATIVAHARNDATARRLATIPGVGPITASLIAVTVADIGVFKSARHFAAWLGLVPRQHSTGGKTRLGRITKTGNREIRRLLVLGATSMVYRAPHWNSAAGIWTRMMLERRPTRLVTVALANKMARIAWALMTRNEVYHAKGRVAAAAEAAA

SEQ ID NO: 230633 - protein, 316 aa, unidentified
MNIPDKSEINIGIDTGQTILDIHVRPQGHFQSFENNPEGIRAAIRFIKPFKPTRILIEATGRLEMAFFCAAHKAGLPVCVCNPIKVRKFAEMTGILAKTDKLDAQVIAYYGETMKPALTELKPEKLRLLSDLLAVRSQCLDMSTMQKNRLIRMPKTVQKPIRNILKKITEEIAVIDRKLDQVIAEIPQFQARVDQLISAKGVGKVLAYTLLSELPELGSMNRKQIAAIVGVAPMNRDSGKHKGKRKIRGGRSKIRTILFVSMLSAIQCHPKLKPMYQRLVAAGKPKKVAIVACMRKQLIILNTMVKNGTMWDENMI

SEQ ID NO: 230634 - protein, 342 aa, unidentified
MQVTTIGLDVAKRVFQIHGVEAAGAVVIRRKLRRSELLQFFAHLAPCLVGIEACATAHFWARELGAFGHQVRLVPPSYVKAYLKRGKNDAADAEAICEAVTRPNMRFVPVKTVEQQGLLVLHRARELLVRQRTMLVNGLRAHMAEFGIVVPQGIQRLPELVALLEDEKTGIPQIAHEVLAAMVVQINNLTTSIRQMEKRIVAWCRTNAAARRLSTIPGVGPITASALAATITDPTLFRSGRHLAAWLGLVPRQHSTGGKAKLGRITKMGDQYLRKLLIVGMTAVIRSARRTKAPAFAWVNALLERRPARLVSVALANKAARIAWALLIRGETYRAPAITAAA

SEQ ID NO: 230635 - protein, 302 aa, unidentified
MNGIGIDVCKAMLDVAVHHGPCAQFHNTPADHRKLLAWLANQEVGQIVLEASGGYEHPVLDVLFDAGYRIVRANAHRCHAFAAATGLPAKTDRLDAMNLACMAATLELLAYQPMEPWRRRLREFVRARRQLVALATSADHQLEQVTDKPLRRVLQANINQIKKTCARLEQQIAEQVRQQPQLEALRSLKGVGATLQAVLASYLPELGTLDGKAIARLVGVAPIAHDSGRMRGVRRIQGGRAEVRNVLYMACLSAIQHEQRIWEFYRSLRARGKPGKVAVVATMRKMLVILNARARDAQAAPT

SEQ ID NO: 230636 - protein, 351 aa, unidentified
MSHTLNSTVTVIGIDIGKNWFHVVGLDVRGGIVLRQKWSRSQVEVRLANMPACLIGMEACVGAHHLSRKLKALGHDARLMPARYVRPYSKGQKNDFRDAEAIAEAVQRPTMKFVATKTVDQLDLQALHRVRERLVSQRTSIMNQIRAFLLERGIAVRQGQWFLRAELPRILAMPPDVLSPRMARIISGLAADWRLLDERIEQLSGEINELAKQDSGCERLMSIPGIGPLISSAMVAAIGTGDVFSKGRDFAAWLGLVPKQISTGDRTILGKISKRGNRYLRTLLVQAAWVVLVKIKPSRWEGHGLKHWIEAAKKRLHRNVLAIALANKLARIAWSVLARGRAFEASKLQAA

SEQ ID NO: 230637 - protein, 398 aa, unidentified
MYQQFCGIDVSKDSFDITLLESSGEVKLQEKLTMDRDGFNALLEHLSSYSKEKLLVSMEATGIYHLPLLSFLLENSFKSVVINPILIKSFIGSTTLRKTKNDKKDATSIALFSLKSYQSLHLATTDAIENIKPLIRERETLSKEIARLKTEIKAILTQLFPELSKNTNIFTRSILNLLLKAPSRKAIRNLKKQRIQKILDDTSGNKVRISADEILSLAKNSIAISDKYLEKVLTSKIRRLIYIQDELSFLDTELQNSLEDTDINNDIEILQSIPGIGSVTSKNFMVEVSSVEKFKSVKQLCAFIGIDPSVKQSGTSINYRGKISKRGNANLRRTIWQMAIGVIRSCDKFNTYFSKKREEGKKFKQAVIAVANKLLRTIFVLLKNKTKFDENLASGVSK

SEQ ID NO: 230638 - protein, 336 aa, unidentified
MFQLGIDVSKKTLDLCLLREGVKGSVKTRKLQNDINAVNAVIAWLSKQHCKPEDVHIIMEATGVYHESLAYGLHKAGGRISLANPHRAREFARGMGMLTKNDRVDAYMLACYGALKAPEPWLPPPEEVRHLSALLRRRDALVADSTREKNRLEKYLATDTPSVIAESVEAMIGQLNAEIKRLDRLIRSHLNQHPELKKDFDLLTSIKSVGYQLGLNMLVILRSHDFATAEQAAAFLGVVPVEKYSGTSVRGCPKLSKIGPPEIRAKLYLASLCGLRFNPLMKVMYERLCLRGKGKMCAIGALMRKLVHWCYGVLKTQKPFDVGYLSSYARSACKAA

SEQ ID NO: 230639 - protein, 387 aa, unidentified
MPQPNDLSRSLVTLEQDSTLIAVIEMGQSSWLVAGIVPGIERQPLKKLAADQDGLLQLLHRWRKEAAQAGHPIKRIAVAYEAGRDGFWLARWLRAREIEAYVIHPSSVPVSREHRRAKTDRLDTELLKRAFLGWLRGEPKHCSMAAIPTVEDEDARRPSRERESLVGECTRIVNRVKANLARLGIRGFRPRLAHAPKRLETLRTPEGTAVPANTLAELQRDMVHLRFVKQQIKEIETARAKRLEQASEGGRDAMVRLLARVVGIGIETADMLVQEVFSRKLRDRKAVARYAGLTGAPDESGQKRRERGLAKAGNARVRHAMIELAWGHLLHQKDSALAEWYERRTVDARGGTRKTMIVALARKLLIALWRLVTTGEAPAGLLLRPAA

SEQ ID NO: 230640 - protein, 392 aa, unidentified
MIVSVGIDVAKDKHDCFIQSSEGEVLADVFTISNNMDGFNILLEKIRICTSPQDKIKVGLEATGHYSYNLLGFLLDNGLATYVLNPLRTNLYRKSLSLRKTKTDRVDARTIAAMLLSDAGLKPYTDTAYHNEELKSLTRYRFDKVKERAKLKSSVSRLVCILFPELEKLVPMLHMVSVYALLEEFPGAKQIAGAHLTRLKSLLANASKGRYKRDMAVSIRDAARNSIGSKMPAKSLELQHTIRLIRELDAEIDEIEAEIETMMEEIHSPITTIPGIGCRMGAMILAEAGDLSRFDSPDKLLAYAGMSPSTYQSGQLKNCYPHMEKRGSRYLRYALFNATKYVCLWDPTFSTYLAKKRAEGKHYNVAISHAAKKLVRLIFAMEKSRQPYRSVT

SEQ ID NO: 230641 - protein, 347 aa, unidentified
MEKVIRIGMDTSKSVFQLHGVNAAEEVVLHKQLRRRKVLEFFARLAPTKVGMEACGGAHYWARELRALGHEVFLLPPQYVKAYVKRGKNDRADAEAICEAMSRPTMRFVPVKSAEEQAALMLAGLRDQMVRRRTQLTNAIRGYAGEFGLVAARGLSKIEPLLVRIAEDESVPELAKDIFAAYGQEYAELERRIAKVETRLMAWFRQSEPSQRLTQVPGIGPIIASMLVMKVPDPGAFHSARHFAAWLGLTPTDHSTAGKHRLGVITRAGDEDLRRLLVGGAMSVIQQADRGRGSPSPWLLGLLKRKELKLAAVALANKMARIAWKLLVSGENYDPRRSKVRALDKAA

SEQ ID NO: 230642 - protein, 429 aa, unidentified
MRTESTPGARGPVFCGVDTHADSHWLCVLDWRGRRVLSRRFPADAAGYEALAGAIAAAGEPACVAMERTSSYGAGLTRHLASLGMPVREALSPARTQRRRPGQGKCDESDAERAARAAMSGSKLGTPKSQDGWVDGVRCMLAARSGAVKARTSAINTARSLLTTAPEGLRSRFRGMGGPRLMEELPSVRSEGALGAALGALADLWAAARDAALDMERAIEASLEENCPALLAMYGCGPVSAAKLAVAAGDNPGRLRSEASFAAICGACPIPASSGKTVRHRLNRGGDRQANSALHEIARQRVMRDPETAEYAERARARGKSDREVMRCLKRYVAREAYRALMHPHEIRRPADASELVAARRAAKVSQVRAASILGTSEKYISMLERGQRELKPIRRAYEAWVEAGLPLNWDRQAFEAERKMDSKKHLAK

SEQ ID NO: 230643 - protein, 332 aa, unidentified
MYLGIDVHKRYAQVAVMDEAGKIVEEVRVENANLDDLAQRYAGAQAVLEATSNYYHIHDTLSEHLDVTVAHPKKINQIADTDKKTDRVDAKELARMLRLNSVPESYVPSEEVREARALVRGRQTLVENRTKYANKVHGLLSDHGITEDVKPLSVEGREFLRELSIPTPWDELLGSYLDLIESLTEEIQKLEETIEQRAGSLKETQLLMSIPGVSYFTALTIYAEVGDIRRFDRDKEVVSYVGLNPVIRESGDSRIEGSISKRGSGRVRWLLVQAANTAVHTCNDEYLSRFYDRLASRKNSQKAIVATARKMLVSIYHMLDRGEVYDPPGVSA

SEQ ID NO: 230644 - protein, 381 aa, unidentified
METLHSHCAGLDIHQKEIVVCTYIGSSDEELTKEIRTFPTMTKNLYDMLQWLEELNITHLAMESTGIYWKPVFNILEDYFDITLANAQRIKNVPGRKTDVADAEWIAKLLRYGLIEKSFVPPVDIRELRDLTRLRKKMVGNMTAEKNRIQKTLECSNIKLGSVISDVFGVSGRKLLTHLVEQGYVNPNEVEEHIHVRMMPKASQIAESLFGTLNPHQIFLIRQSWNHILFFEESIQQLEAKIDEILLPYQEQVELLLTIPGVKKHSVASIIAEIGVEMNQFPSAHHLASWAGLSPGNHESAGKKKSTRTTKGNPHIQSTLCEVAWAISRTRDTWLSGKYWSLAARRGKKKALVAIAHKTIKIIYHILDQRSGFIEYSKMLA

SEQ ID NO: 230645 - protein, 411 aa, unidentified
MNAVGIDVSKGRSTVAILRPMGEVVQTPIDVMHNAVSLERLAHQILALGEDTRVVMEATGRYHEPVARELHHHGIFVSVINPIAIHGYCTSGTVRKVKNDRKDALKIARFALDRWTELREYTPMDALRQQLKIFSRQYDLYMKSCVALQSNLISLTDKVFPGVNELFKSPPRADGHEKWVDFVTTFWHCECISMVSEKAFTERYQKWCKRMGYNFSRTKAADIYIGSLGHIVTLPKNSNTKLLIQTAAKELTAMNELIAVVRSEMTRLAKELPEYKTVHAMYGVGDTTAAQLMAEIGDIRNFPRRSSLVGFAGVDPAINDSGKSVGNSMAATKRGSPHLRKTLFQIMTIYLRLAPQDEPVYQFLDKKRSEGKPYYVYMTAGANKFLRIYYARVKECMANLDASAEDSETAE

SEQ ID NO: 230646 - protein, 461 aa, unidentified
MAKKAKKVKSAKGAELRIVNPDAAGIDIADGIMQVCIPADRSKDNNRAFGAYTSDLHAISAWLRECGIKTVAMESTGVYWIPLFCRLQEDGLDVVLTNARDVKNITERKTDESDAEWLMLLHQYGLLKASFQPHNEAKRMRTLTRHRDTLSREASSMVLRMQKAMQQMNIKLTLVLSDITGKSGIRIIEAILAGERDPKKLAELADIQCKTPKEEIAKALEGNWEEDLMFVLRQNYDTFKHYCTQLGECDAELEKLMENYRAEVAKVEDTSYSPAKKRRDYKKTRHTVSFDVERKAYEMWGVNVFEIPGISHLTALELMSELGHDFTRKFPSSKQFCCWCNISPNTKISGGKRISSHVPHRRNNVGLIFRSIASSLANAKNQLGNFYRRIRSRAGGKAAVIATAHKVAEIFFAMVANQTTYNPERVGIDEKVLLEKRITRYKRELERITGTHIEIGNACVP

SEQ ID NO: 230647 - protein, 441 aa, unidentified
MKSEPEEIDAEDHDEVLDRVAAIDVAKASGKVCTRLPREEAPAKRVTKVWDVASTTNAIIELADQLAVLGIERVVVESTSDYWRPFVYLLQARGLRVWLVNATQVKNVPGRPKTDKLDAVWLAKLNERGMLRPSFVPPAEIRALRDYTRLRADLVEERSRHKQRVEKLLEDALIKISCVATDIFGVSGRAMIAALIAGERDPEVLAGLAKGRMRPKHAALVEALTGRFDSHHAELVRLLVDQVDVLSAKVDVLTLRIEELIAKIPAAQAPPVAPGGTVPLHAVARLDEVDGIGVLAAQTIIAEVGLNMAQFPTAGHLVSWAKYSPCTVQSGPRSRSAKTGKGNPYLKAVLGEAAAAAAKTDTFLGERYRRLVKRRGKLKALVAVARSILVIVWHLLADPTARFHDLGSDYYDTIFNKDRRTRNLVHQLEVLGHQVTLSPAA

SEQ ID NO: 230648 - protein, 346 aa, unidentified
MRFYTQQHKHYCGIDLHARKMYVSIVDNKGKTKFHRNLKTDPELLFEVLFEYLEDIVVGVECMFSWYWIADLCTDHNIPFVLGHALYMKAIHGGKTKNDKIDSYKIARLIRGGNFPLAYPYPARMRATRDLLRRRMYLSRRCSELVAHIQNTNTQYNMPAFVKKISRKYNRDGVAERFEDPSVRKSVEVDLAVIDSLNNILSKLEWHIEKTARNHDYKTLMLLRSVPGVGSILGLVILYEIHDIRRFPSVQDFSSYARLIKPVKESDGKWAGKSNKKIGNHHLKYAVKEATILLLRSSEQAKSYVEKLERKYNKGKALGILTHKLGRAIYFMLKNDEAFNVNKFFG

SEQ ID NO: 230649 - protein, 397 aa, unidentified
MIAVGIDISKAKSTVAVIDSDGTVLASPFTMAHTQPEMEAFVTYLKGLGEPTTILMEYTGHYHYPVLKKLQDEGFPVCIVNPYQMKKYGDVEIHKAKTDKKDALRIAAYALEKSYKLVPYSSMEQKYEDLKFLSRQYSQRITYVAKLKVQLIALLDQTMPGITRILPLNSRNPEKCALLLFIKRFKSFDEIQRIGKARFLASYDVLAKKASERSASSKGLSIYELAVDSITTRGEDPYIWLSQNQCVDLLSATQNAADEIISQMRNIAETIPEYKVLRAMHGVGDRLGPIILAEIGDVHRFHSGKALNSYAGNDAPPYQSGQFESRNRHISKRGSSALRKACYEVMQALKLIKPQDDPVYLFMLKKEQEGKPFNVAKMAGVNKFLRIYYARAMELYK

SEQ ID NO: 230650 - protein, 346 aa, unidentified
MNQEQFVGFDVSQAETSVCVVDGSGKVVWQGKCASTPEAMAATVRRRAPHVTRIALETGPMSAWHYRSLTALGLPVVCIDARHAKAALAMQLNKTDANDAVGLAQIVRTGWYREVAVKSEQSHRTRGLLAARAKLVGMRKEIANQLRGLLKVFGHVIGAVGGEKFDARARELAAGDATLTITAEALLAARAALAVQIARLDKLLLSQARQDPACQRLMTVPGVGAITATAFIATIDDPARFKHSASVGAYLGLTPRRYQSGTMDVSGHISKAGDALLRCYLFEAATTLLSRVQRTSALKEWGTRLAKRIGHKKARVAIARKLAVILHRMWADKVEFSAMPRVAAAA

SEQ ID NO: 230651 - protein, 408 aa, unidentified
MSKRCIGVDVHRDFCEIAIWEQGRVRAAGRVESRPSSLAAYAQTMLKPTDEVALEATTGAGQVAEIIRPHVSRVVVANTHRLAAISDSKKKTDREDAKTLAQLLAAGVMESSWLPAEQTRALRRRVSRRHGLVTARTRAKNEVSAVLGRNLSQRPPMSDPFSEKGRRWLGSLALPDDEVETMSAALRQIDFFTGEIAVIERELARFGSGSAEVRRLMTVPGVAMLTAVTFIAQVGEIGRFASARQLVGYFGLDPRVRQSGNGPTHAGRISKEGSTLVRHVMVEAATAAVRTPGPLRAFYQRLRSRRGHQVAVVATARKMVTILWHVLHRGEDYRHQIELPTKKKLRKMELIAGAEPRRGGDGRPRNLNREQRRAADLARAREAEEGYRRLVARNRGSAEQAAGPDRGT

SEQ ID NO: 230652 - protein, 340 aa, unidentified
MQITVLGIDLGKNSCSIVGLDGGGAVVLRRRMRREGVIKLGAKLKRCVVGMEACCGAHHLGRVLRAQGHEVRLMSPEYVRPYVKSQKNDDRDAEAIAEAATRPTMRFVDLKSEEQLDMQTLHRARDRLVGERTALINQLRAILLERGITVAQGRRRLERHLAGMDAQGDLSERIRLLIEDMRAQWCELDRRIAELDAELAEWARNEETARRLMTIPGIGVLNATALVAAIGRGESFARGRDLAAWLGLVPRQVTTGGRPRLLGISKRGNKYLRKLLIHGARAALPTLLESPTPLGAWLRGLMARMHKNAAVVALANKLARMAWAVLRHDDTFHIDASAVA

SEQ ID NO: 230653 - protein, 370 aa, unidentified
MLDTTTFVGLDVHARSIKAVSLDVMTGEVRCATFGYDAGAVAEWVRSVDPKARCVYESGVTGFDLQKRLSGLGVDCVVGAVSKMIKPSADRRRKNDRNDAEFLARMLSVGNVVEVWVPDDECEAARDLTRALEDARDDLSRSKQRLSKFLLRHGLVFDERTPTGRRKGNWTRAHWSWIESIRFAEGADNDALAYYVDAVRRAAEEKARLEGLVEAEARKPRWRRRVDSLRCLKGVDTASAADLVFEAGEFSRFRNARSFAAWVGLTPSEHSSGESDRRGAITKAGNKHLRKALVEAAWHYLTCSGRPKDLAKGQAPDRVARRHAAKGVRRLVERREALLARGVHNNKANVATARELACWVWAVGLMAEEA

SEQ ID NO: 230654 - protein, 482 aa, unidentified
MDSSLGKTPSEGTPTSQSCAPRFVGCDLHKQQITFCILDGEGTVRQRGRIASTRQAIQAFARNELRLTDEVSMEATTNTWAVVDLIEPHVARIVVSNPMTTQAIAAAKIKTDRIDANVLADLLRCRYLPEVWQPDPATRKLRRLTNRRAGLVGDRTAIKNRLHAVLAMRLMEVPVKDLFSPAGLAWLRSTPDFDEETRCAVNSDLRLLDTTEAELKALDLTLAQLGYSEARVKLLMTLPGVDLPVALSLLAAWGDESRFIDAEHAVSYLGLVPRTYQSDRRCYRGPITKQGNTNARWMLVQAAQHLDAHPGPLGVFFRRLLNRKNRNVAVVAAARKLATVAWHMLRNNEPYRYAQSDTTAAKLARLRVKATGERRKPATVKGQACVSKSATGGRTRTVKPLAKVYEEEGLPLPTGLKSGEVRMIEETGVRPFVETLGHEQIKRKGHRRKKPVEDAQSGARKEIGSADRRAVESTAASDEQRA

SEQ ID NO: 230655 - protein, 401 aa, unidentified
MNAVGIDVSKGKSMVCVMRPFGEVVLEPFEVLHTAQSLNNLAGKLKALDGETRVVMEATGNYHKPVAFVLHDAGLFVSVVNPVLIHDYDNNSLRRVKTDRKDAVKIANYTLDKWTRLRQYLPEDDTRLALKNCYRQYQQAVAVRTMLKNNLISSLDLTFPDANKLFSSPAKSNGCEKWVDFIGDFWHSECVSSLSSDAFAKKYLKWCQKHGYNFTRSKSDTIYACAVNAASLPKSPTSKLLIQQQVAQLKAVSQSVAAFQQEMLRLSQQLPEFDTVMEMYGVGPSLGPQLMAEIGDVRRFSSKKSLIAFAGIEPQPNDSGKIVGNDSGISKVGSAVLRRTLFLIMTVILKTQPQDEPVFQFMNKKRSEGKPYKVYMMASANKFLRIYYARVKAVMDSKHSK

SEQ ID NO: 230656 - protein, 405 aa, unidentified
MRYYIGVDWADTAHTIWVEDADGAKVLTRMIPHTAEGLADWGRWLDEQRAQGVELWAAIERPDGRVVDFLLDHGVVVYPINPKALDRARDRYRVSSSKSDPFDARVLASFLRTDHVHLHPLEPSSAAAQELKLLTRDYTRLVREQTRLVNQLTATLKEYYPRALEVCPDVTAKRAAAFLRTCPTPAAVAALTGEAWQAFATGHRWSAEQAAALWPMLQRPQIPVPAHVVRAKQRLVEVLLRQLEPVVEAVDAYRKDIMDFFAALPAAEWASTLPASQGTLVPTIWAELGDALGRWRSWQHLQGHSGVVPVTRSSGKSQSIAFRFACNLHLRRALQQFAFCSLKSSEWARAYYDRQRTRGHRHQAALRALAAKWVKIIFVLWSRHIPYDENVHLAMMARQHLRQAA

SEQ ID NO: 230657 - protein, 391 aa, unidentified
MRKPKKQKKPLNDLSRSLTPFDPNRTLITVVELSKESWLVGGIIPGVERQPLKKLKPDENELLKLLERWRKEAEKAGHKIDRIAVAFEAGRDGFWLARWLRAHGIEAHVIHAASVAVSREHRRPKSDRLDTKGLKRVFLGWLRGEREHCKMCAIPTAAEEDAKRPHRERETLVGEQTTIINRIKATLARLGIRSFNSKLKKAPERLEHLRTPEGEPIPPNTLAELQRDMARKQFVAEQIRQIEKVRLEQLKEAPKTGPNLMVLVLMRVIGIGIETADMLVNEILSRNMRDRRALARYGGLTGSPHESGSKSREKGLARSGNARVRRGMIQLAWRFLDYQKDSALAKWFEARTKNGSRKKMIVALARKLLIALWHFVRDGVVPEGVVLRPAH

SEQ ID NO: 230658 - protein, 331 aa, unidentified
MNTLMMPAAAARFNHVIAFDVAKATLSLHILPTGESLCLENDGAAIRRLLKREQKRNRKQGLGPMLVICEATGGYEDAVLKAASELGLECHLAHGSSVRAYAKFRGRHAKSDPIDAFLIAEYGRDKPDLRLYKPPRPEESALRALMGRRAELKEMILAETSRLEHASLNAVRLSLESHFAALKEQLALIEKEIRALTRRDEAFTHKSRLMQTLAGIGAIAAQTLLAFLPELGQIPSSAAVALVGLAPYDRDSGKERGKRRIFAGRSQIRRCLYMAALAAIRSHAVFRDFAERLSRRGKPFKVAVTAVMRKLIVILSAMLRHNQPWKHAQTA

SEQ ID NO: 230659 - protein, 343 aa, unidentified
MQAITTIGLDIAKSVFQVHGIDAEGHVVIRRQFKRRYVLAFFQKLPPCLIGIEACASSHYWSRELKTLGHTVRLMPPAYVKPYVKRQKNDAADAEAISEAVTRANMRFVETKTPEQQSCLMLHRTRHLFIRQQTAVINAIRAHLAEFGIVAPVGRNGVEELLNVVVDSNDKRVPDVARACLAALGVQLRALKAQILEFDRRIMAWHRSNETSKRLDDIPGVGPVLATALVASVADPKAFRSGRNFSAWIGLVPKQHSSGGKDRLGSISKQGDRYLRSMLMIGALAVIRYAKIHGTKHRPWLTALLARRPVKIAAIALANKIARMAWAMMVKGERYKEPVALAA

SEQ ID NO: 230660 - protein, 420 aa, unidentified
MELHHARCAGLDVHKETVVACLRTQVDGVVSHEVRTFGTTTGALLELGEWLTQNRCEEAVVESTGVYWKPVWHVLVGQGLKLVLANAEHVRNVPGRKTDVKDAVWLADLLAHGLVTASFVPPEPILELRDLTRTRRQLVRQRVRHVQRLQKTLEDANIKLDSEISNIVGSSGRAMVEALIAGETDPVKLAKLAHRRIKASQQELIEALRGRVTSHHRVMLRLHLEQVDATDKTIEALDKEVERVIAPFRPQVALLTSMPGVGDLVARTVIAEIGADMAQFPTAGQLVSWAGLCPQLRESAGKRKNTRVRKGAPWLKPVLVQAAWAAVRKKDSHLRANYYRLKARRGPKKAIVAVAASMLTAIFHMLSRGTFFEDRGPVPLDPPAKKKATHRLVRRLAELGYVVELKPVPAIDPGLPVVSF

SEQ ID NO: 230661 - protein, 360 aa, unidentified
MGNERTFVGLDVHAWSVTGHGLDMVTGEVWQRKLTPDPADILAWVLTLPGPVKVTYEAGPTGYGLYRHLHDHGVACVVAAPSKLHRPSGDRVKTDARDAELLARLLKLDEIVTVTVPSVEQEAARDLVRAREDVRGDLMRARHRLSKMLLRQGIVYTGGSPWTGVHDVWLRSQHFDLPGRQLAYESAHETVVLTTDRRDRLDDAITTMAANSEFTSLTRRLCCLRGISTLTGFGLAVEIGDWTRFSGATIGAFVGLVPTEHSSGGSRSQGSITKTGNTHARRLLVEAAWHHAKPYRTPGKTMRDRWELAPAAARLRGHEGNRRLNQRWQAFTARKKKPVIANVAVARELAGWAWSLAVLE

SEQ ID NO: 230662 - protein, 347 aa, unidentified
MNISIVGIDLAKNVFQVCALSVDGTIAWNRKVSRAKLAGVLAELPKSALIAMEACSSSNFWGRYLLERGFRVAVIPAQHVKPFAKHQKNDSNDALAICEAAMRPGIHRVAVKTLDQQDIKTLRTVRRRLVQQRTATGNQIRAIAGEYGVIFPIGLRRLIVALPDALEEAQNGLSHVARTTLAQSLGRLQEMDRVIDELTKQITQICKKTPRYADLQSIPGMGPLVSAALISEIGDGRQFSNGRQMAAWLGLVPRQHSSGGKQVLGSITKHGNNDLRVLLVHGARAVVRFAQRRLDPLGEWVRALIARRGRHRAIVALANKLARIAWSVLVKDQRFDAALAFAPARTA

SEQ ID NO: 230663 - protein, 413 aa, unidentified
MSAVVEQVEYYVGLDWASELHAVCVLDSTGKMVASFPVEHSAEGIAALITRLARLAAPETIPVGIERPNGRLVDLLLEAGHPVVPVSPNAIKTWRDGEVLSGAKSDAGDAAVIAEYLRLRAHRLRVVPGYSAETKALRTVVRTRDDLVDMRVTAANQLAALLDTFWPGAKAVFADIASPIALAFLTRYPTAASARHLGEKRMAAFLVKHGYSGRRPAAELLTRLRRAPTGTVDDTLTEAVRDAVLAMVAVLSALVAATKDIDRSVTAHLGEHPDGPIFTSLPRSGQINAAQVLAEWGDVREAYEHPDAVAALAGVTPVTKESGKHRAVHFRWACNKRFRRAITIYADNSRHTSPWAAKIYNDARAAGKDHPHAVRILARAWIRVIWRCWHDGVAYDPTRHGGATKINHPPIAA

SEQ ID NO: 230664 - protein, 345 aa, unidentified
MPIVGGLDIHRKQITFDYLDTATGEVRRGQIAPADRAHLRAWLARFAGRDDAAFALEGCTGWRYVAEELAAAGVAAHVAEPADTAFARGRKRHAKTDRTDSRHLRVLLEQGRLPECWIPPAQILECRALLEAYHDLRREHTAWIERIHAVFFHQGAPRLGEGALRTEHGLAALREAAAIHLSPAGQLQVATALDMLAAIEARTDTLRQQLLHAARHLAGARALQARLYGVGPLAGLAMTCWLGGAGRFSSSRKAVRFAGLDVTVYSSDGKRSPGHLSRQGPEILRWVAYEAGKTHGRGLAPGHDYYAAVKDRTDGKIAALSQARRLIRQACHILAELGDDALTAA

SEQ ID NO: 230665 - protein, 371 aa, unidentified
MKKQTKTTPSVVTTPTPAAATASGFTLGLDLGDRSHYVCVLDNTGQILHEGPLVNDRVALTLLLTQYPAATVALEAGTHSPWISRYLTGLGATVIVANPRKLHAISRHERKCDRRDAVMLARLARADVALLHPLQHGSAQAQHDLLGLKLRDSLVRTRVNLINTVRFTLKSLGHTVSNPSSEAFHKNIVTAVPADCLPVVKPVLAVLAVLTEKIKRLERDLVRRSKKDYPVTQRLQQIAGVGPLTALCFVLKIGEPNRFGRSRDVGPYLGLCPGRDQSGGTDKQLRISKCGDGLLRRLLVSAAHYILGPFGPACALRAYGQHLVGTSVREKKRAVVAVARKLAVLLVSLWKHGTDYEPRVPAVPVLVLTPA

SEQ ID NO: 230666 - protein, 415 aa, unidentified
MKVVFPTCCGVDVHKSFLVATIIKTPKDSLQPSYQKRRFTTFNSDLKRFAKWLHENDCLDVCMESTGKYWVPVFNILEKRDIRVVIANPKWVKAVKGNKDDTKDSKWIGDLFRLGLVKSSFIPSKDIRVLRELTRYRYKLTSMKSSEKNRFQNAFTVCNVALDSVVSDMFGKSATAITDYLTSNEDFDPQHCVSLLHRSLKKKAEDVLASIEGYEISPEQKCRIGIVRNHLHYIDKLIERMNACINTMVEKYDGAISLFCTIPGIDRSSAITIVSEIGVDMAQFGSSKRLCCWAGLTPGNNESAGKKKSVRISRAGVYLKPALVQVAHAAVKDKLNPYYAVKYERIAKRRGKKRAIIAIARMILTAIFSMLSTGEVWNPVDLFRVDMPEHIKEQHRAKAVKQAIRFLKAQGLEVS

SEQ ID NO: 230667 - protein, 376 aa, unidentified
MERIIYIGIDVHKDTNTAHMFGRLDDVVLDYDIGTIVAGADHLIKAIRKTLKEFNLGDCAVQAGYEAGPTGYGLCKALQKAGYMCDVMAPTTIKRAPGERTKTDRRDARMLAIALATDTYKSVHILDDKDISTREFTRTRNTRKNELKKAKQYLLSFLLRLGKTYPDSGNYWTRKHWNWLETLDLQDAYLNYSLKSYMQDIKDLENKIQMMDSMIEQIATTDERYKDKVGKLMCFTGVETYTALSIVCEIGDFDRFPDAKSFSSYIGLVPGQDSSGQRQRYTAITKTGNSRVRKLLVEATKGIKRASVYNKSARILERQTGQSPEVIAYADKCRQRIKHKMTNLETRSGKNVNVATVAGARELACFVWGMMTGNIA

SEQ ID NO: 230668 - protein, 354 aa, unidentified
MRVLYERCCGLDVHKQSITACALTPEGKEIRTFGTLTDDLEELVDWLKEKKVTHVAMESTGVYWKPVYNLLEAEPIEVLVVNAQHIKAVPGRKTDVKDAEWIADLLRHGLLKGSYIPHRAQRELRELVRYRRSLIEERARELNRIQKVLEGANIKLSSVVSDINGMSARLIIRALIEGKDDPAALAQLAKGRLKQKTEELRRALKGMIGPHQRMMLAEQWRHVEYLDEAIARLDREIEERTSPFHEALELIDTIPGVGRQSAEQIVAEIGTDMSRFPTAAHLASWAGMAPGNHESAGKRLSGRTRKGNKKLRSCSWNAPVPPPERRTRTYRPSIIGSPNEEEQIERVSRSGERF

SEQ ID NO: 230669 - protein, 361 aa, unidentified
MRIIGCDLHARQQSLAMLDTETGEVVNLTLMHEGNKVREFYSQLPRPVLVGIEATGSMHWFLNLMEELGIECRVGHPATIRAAAPRRQKNDRLDADLILKLVAENRFPAIWLPTKELLDLRALLLHRHQWVRIRTRFQNALQAIALANGLRRGPSLWSYDGQAKIAFLPLLPHASYRRSMLQEMYKKMEEEIESLTQRVAEQAELRSGARRLMTHPGVGPVTALATDVFLGDPKRFVDGKALASYVGIIPREYSSGGKQRLGGVTKQGSPLLRFLWCEAGAHAVRRDPELKRFYRRKLIQKGLGKARVAVARKLGIRLWIMLRDEIDYQEFCRRGQKQHSGAACAGMLEVGYGANSHRPVD

SEQ ID NO: 230670 - protein, 344 aa, unidentified
MQIAVIGLDLAKNVFQVHGIDDSGQAVLKRKLRRSEVPPFFAGLAPALVGIEACHTAHYWGREIAALGHDVRLMPPQFVKPYVKSQKNDAADAEAIAEAVQRPTMRFVPIKSADQQAVLMLHRTRDLLIRQRSSLISAIRAHFAEFGIVVGQGIRNVERLLALLETAGDQRLPGLAAEMLSILAAQLRYVAAQVKEVEVKLLAWHRANETSRRLQSVPGLGPITASAIVATVGDPKQFKSGRQFAAWLGLVPQQRSSGSKERLGGISKRGDGYIRRLLVHGARAIVGWRKRSATHKTPWIERLLARRPTNVATVAYANKLARIAWAIMMHGNRYNPALAFATIP

SEQ ID NO: 230671 - protein, 350 aa, unidentified
MSEIIRFGIDTSKAVFTVHGVYASSDQPPLRVNLRRAQLLRFFARRPRTVVALEACGGSHYWARKLSALGHEVRVVPPQYVKPYVKRGKNDRNDAEAICEAAGRPGMRFVMIKTEDQQARAMVLKVRETLVAHRTDLVNTVRGHAAEFGMVAAKGRGNVVALLEAVAANPEIPPLAQEMLALLGKRIDDLNGQIKELEARLGAMHRADALSRLLAGIPGVGEIIALSFATEIDPAAFASARDLAAWLGLTPKDHSTGGRQRLGRITRAGNERLRALLVSGATSVIQAASRPGGRLMTEWLRQLLARKPRKLAAVALANKMARIIWAMMTTGEAYRAPGPVAAGRAAAAIS

SEQ ID NO: 230672 - protein, 367 aa, unidentified
MFDYVTAIGLDVHARSISACAFDPMTGEVTRARFGYDPASVAEWVLGFESPKAVYESGPTGFHLCRALRALGVDCAVGAVSKMHRPAADRGRKNDRRDAEWLARLLACRNVVEVWVPDDLTEAARDLSRALEDARDDLQRARQRMSKFLLRHGLVFDETTPGGRRRGNWTEAYWRWARSIEFGEADDAAAYEHYMDAVERCAEAKRELERKVEEAAARPEWAPVVDALCLVKGIDVATAFLLAAEAGDFSRFPTAPSFASWCGLAPSERSSGETESRGGITRAGNSHVRRALVEASWHVPMSTRHPKKPRPGHGVAPAVSRHAAKCNRRLQDRRDAMSQAGKRPCVANCATAREMACWVWAIALMAR

SEQ ID NO: 230673 - protein, 340 aa, unidentified
MEPIIGIDLAKRVFQLHIATLQGQIKANKLIIREKLMVFIVQQPPSRIVMEACGSVNYWARQFRKYGHDVKQISPQHVAPFRMGNKNDKNDAIAIVEADSRPGMRYVPEKNLEQQDMQCLHRVRQSLMKNRTALINQIRGLGLEYGITIPEGPHKIALCLPDYLEDAKNELTAMSRQLFHELLQELREYQQRLKERDKRLEHIGSLNEDTTRLQSLPGIGVLGASALTVALGDSSDFKNDRHFASYQGLVPKEHSSGGKVKPLGITKRGDAYLRGLLIHGARSVVYRTGNLPDERCNDLQRWLKGIIARSGVNKAVVALANKNTRMAWALVNQQTIYVSK

SEQ ID NO: 230674 - protein, 346 aa, unidentified
MMIIGCDFHPSWQQVSWLDTETGETGGQKLVHASGDAKKFYEQLAAPALIGVEATGNSQWFIEMVQDLGHEIWIGDAAQIRASYVRQQKTDKRDAAHILKLVVEGRFPRLWTPDREQRDLRQLVLHRHKLVEVRSRVKNELQHLSLNKGMQRKQKLWSQAGQKLLRELPLKPWAACRREDLLGLLAMLDQQIGKLDSAVQQAADEHPQAQLLMTQPGVGPNTALAYVLTIGDVSRFPRGKQVASYLGLIPREYSSGGRQMLGSISKQGNRLLRALLVEAAQIAVRYDPGFRKQYLHRCHQKPKGVAKVAAARKLAVRLYWMLRTNTGYPEIVRIESSPRVPLVGAS

SEQ ID NO: 230675 - protein, 340 aa, unidentified
MPLYGGIDLHANNSVVALMNEQDEVIYQKRLPNDLPTILEQLAPYHADIEGLVVESTYNWYWLVDGLMDADYRVHLANPAAIQQYNGLKYSDDHSDARWLGPLLRLGILPEGHIYPKADRAVRDLLRKRAHFVRQHTANVLSVQNIMVRNTGSRFSVKRIRELTAKELKHLLPEAYQVLAITSSLAILDCLSQQIKTLEKAVSKRLKHTPSYEQLLTVDGIGTILAQTIALETGQIGRFPTVGDYASYCRCVNSTKLSNGKRKGQGNVKNGNLYLGWAYMEAAQFAIRFNPQAQRFYQRKLAKSTNNTVLARKSVAHKLSRACYYIMRDLVPFEATKAFG

SEQ ID NO: 230676 - protein, 379 aa, unidentified
MEVFIEKCAGLDVHSETIVACVIKGNREDDLYTEIETFPTLTKDLFRLLKWLEGHEVTHIAMESTGVYWKPVFNILEDFFDITLANAQRIKNVPGRKTDVSDAEWIAKLLRHGLIEKSFVPPLDIRELRDLTRLRKKWISHLVSEKNRIQKVLESSNVKLSTVISDVFGVSGRKLLNRLIEQGYVDEVDVEKDIHGKLIPKKQRITDSLFGTINEHQIFLIRQSWQHIQYLETLISEIEERIDQLLQNYQEELQLLITIPGISKDTAAVIIAEIGVDMGQFPTSQHLASWAGVSPGNHESAGKRKSTRTVKGNPHIKSALCEAAWAVSRSRNRWLANKYWSLASRRGKKKALVAISHRMLRAIYSMLMNKEPYKEPQLV

SEQ ID NO: 230677 - protein, 345 aa, unidentified
MEPMYYIGLDVHKRKISYCVKDSGGKVYSEGSLSATRLDLDVWMKTLPQPWSAAMEATMFTGWIYDHLKPHAAALKVAHPLMLRAIAAAKKKNDRIDANKICDCLRCDFLPECYMAPTAIRERRRTLRYRNLLVRQMVQMKIKISSLLMEAGVSYNKQRLHKAGYFRELLATNPDIDEGLRSLLRLCRETVVRLQKTESALVRSLESDSLLMDRVQRLMTIPAVGPITALTWALEVGDVQRFSSIKKAISYCGLCGAEKSSGNTVQRTPLSKQRNKHLQTTLIEAAKMAPRNSPELAMLYDKEKQKGNANRATLAVARKLVAYLVAVDCRQKEFLTVQRENRTAA

SEQ ID NO: 230678 - protein, 424 aa, unidentified
MNLTQNDRLKQVTSDTLIVGVDVGSQTHFCRAFDWRGFELSRRVFKFSNTGMGFLTFLRWAEELMNKTEMKKVIVGCEPTGCYWLTFQKFLQDHDIQLVTVNPFTVNRSMELDDNSPEKSDLKDPKTIALLVKDGRFSTSYLPSGVYAEIREASVCRDQIMKQHVRLSNQIQGWLQKFFPEYFECYTDWDSTSGLMLLKKAPLPQDILRIGAGGINQIWRDAKVRAAGIKRAQTLVEAAQNSVGLEAGEAARLEIWVLVNDYILKAEQLKRLDEYLEEKVKEVPNVEKLLAIKGVGMSTVIGFIAEVGDIGRFTDPKQIQKLAGLEIVKKSSGKKKGQPRISKRGRRKLRRTMYESAKALMLWNPAFQDVFLYYRNRTKNPLGGMQAKIAVACKAIRIFYAVLQTGCDFDEEKFRKDIIRPKAA

SEQ ID NO: 230679 - protein, 367 aa, unidentified
MKQQSSATTETGIKGSNRVDFRGRTIFVGIDIHQKDWQVAKVIDGICLGNHRMKASYKALIDHLQSRYPGAVFKCVYESCAWGFTLQRQLQQAGIDCIVVHAADVSTTDKEKRRKSDKVDALKLARDHESKQLKAIHIPDENTQKDRNLIRLRKKLTGDLNRSRNRLKSLLKYQGIDIPDQFGKACWSYNFMSWVEQQAAKDMLMKDTLLLMLEEVKLLRQLLLKTERKIRELMKHKYQQQATLLISTPGIGQTTAMLFLLEVGDPKRFGSFDKLNDFVGFCPDTDSSGDTHRDTGITTRRHKQLRSALLEAAWRAIRIDPALLEAYQQLTKRMKVHQAIIRIARKLLRRMRAVLLSGIPYQKGMAA

SEQ ID NO: 230680 - protein, 358 aa, unidentified
MRYRIQGFQASMCKVGTGLCCVAYLIIVGENTMKAVTWIGVDIAKKSFVAAQRTFEGFQTEPFALDPKGLKAFANWLPDEPQLQIVLEATGPYWRAFTEGLNSVAPQIAIAVVNPRRVRDFAKASPHASKTDVLDAQVLVHFAETFTPDVLNPSGDRACRQLRALTRHALQLTQQRDQVRDQHEKAAADPDTPKFVLRSLKQHQKHLDQALKRCWAQARESLHRDPHLQESFRLMLSIPGIGDKTALTLISEYGASLGQTGPKQLTRYAGLDIVFFLSGTSVYRLPHISKQGNWRIRRALYMAALSAIRHNPAVRSYYLKLVAKGRPKKSALVAAMRKLLHQCYGVLKNQIPFDPAYA

SEQ ID NO: 230681 - protein, 379 aa, unidentified
MSKIRFVGLDVHADTIAVAVAEPDGEVRSLGLIPNRLESIRKLVAKLGPVKQLKACYEAGPTGYVLYWQLTALGVACEVVAPSLVPVKPGDRVKTDRRDATKLARSYRAGDLTAVWVPDAAHEALRDLVRAREDARQDQHRARHRLSKFLLRHGQRPPGDVKKTWTLKYMTWIQEHVHFDQPALEATLLDYIHEVEHMAERILRLEKAIAEAIQKTPSEIRAVIEALQALRGVAQLTAVTVVAELGSLSRFPSPRQLMGYSGLVSSEFSSGNKIQRGPITKTGNAHLRRVVIESAWAYQHRPWIGGFLLRRQRDLQLTPEVKEIAWKAQWRLHTRYKKLAAAGKKKPQIVTAVGRELLGFIWAIAVQTEATFPTDRKAA

SEQ ID NO: 230682 - protein, 362 aa, unidentified
MHDSITWVGMDVHKESIVATAVGHDSGEVRTRFELPNTDKGVHRLVQHLRGLGEVRCVYEAGPCGYHLRRVLEERGIVCDVVAPSLIPTKPGDRVKTDRRDALKLARMHRAGELTTILVPTPVQEALRDLLRTREDAQEDLVRRRHRVLKLMLRHGRRFEGTSWTKAHWRWIRSQRFEEENVNVVLSEYLLALDQELERIQRLDERIEEQSKTPELARQVGRLRTLRGVDTLTAMTLLSELIDLKRFATPREMMAFVGLVPREHSSGGRERRGSITKTGNAHVRRVLLEAAWHYRHAPRSDSRKIRKRREGHSPEIVEKARKAELRLHRKYIRMVLRGKRSSVAAVAVARELVGFVWDIGRS

SEQ ID NO: 230683 - protein, 298 aa, unidentified
MTTIAQPELPCRVTGGVDTHKDQHVAAALDQVGRLLGIAEFPATATGYEQLHEWLTNHGEIVAVGIEGCGSWGAGLARHLTASEIAVVEVNRPNRQTRRRRGKTDSIDAEAAARAVLNGDATTTPKSGDGPVEALRQLRVARAGAVKARTAAANQFHSLLDTAPDQLRAQMAELTFKDKIAAAERFRPGVASDTTTSTRRALRSVARRWRFLNDEAKQLRAETKKIIDDTAPDLVARHGVGYETAGQLLVTAGDNPERLRSEGSFAALCASTPVQASSGRTTRHRLNRGGDRQANSAL

SEQ ID NO: 230684 - protein, 301 aa, unidentified
MEEVTTVGIDLAKNVFSLHGVDEAGKTVLRRTVRRERLVETVAALSPCLIGMEACSGAHEWGRRFQQHGHTVKLMAPKFVAPYRKSDKNDGNDAEAVCEAVSRPSMRFVPVKSTEQQALLAVHRVRQGFVVERTALINRLRGLMSEFGVVLALGSVTVRRQAAQAAEQLPELARGAIGDLLEQLRVLDERIAKYDKQIEAQAGLSEPARRLMQIRGVGPTTALAIVATVGDAREFKNGRQFAAWIGLVPAQHSTGGKSRLGHISKRGDAYLRNLLVQGARSVLQVAGAHQDRISRWALELQ

SEQ ID NO: 230685 - protein, 429 aa, unidentified
MRTESTPGARGPVFCGVDTHADSHWLCVLDWRGRKVLSRQFPADAAGYEALAGAIAAAGEPACVAMEGTSSYGAGLTRHLASLGMPVREALSPAGMQRRRPGQGKCDEADAERAARAAMSGSKLGTPKSQDGWVDGVRCMLAARSGAVKARTSAINTARSLLTTAPEGLRSRLRGMGGPRLMEELPSVRAEGALGAALGALADLWAAARDAALDMELAIEASLEENCPALLAMYGCGPVSAAKLAVAAGDNPGRLRSEASFAAICGACPVPASSGKTVRHRLNRGGDRQANSALHEIARQRVMRDPETAEYAERARGRGKSDREVMRCLKRYVAREAYRALMRPHEIRRPEDASELVAARRAAKVSQVRAASILGTSEKYISMLERGQRELKPIRRAYEAWVEAGLPLDWDRQAFEAERKMDSKKHLAK

SEQ ID NO: 230686 - protein, 505 aa, unidentified
MERLCKGRRPGRAELNSPWKISMKPKQQEKNKKAICRPTQNNRHAMNRKQRRELTRKLQSEDLSLEVVHPDAAGIDIGNESHYVAVPPTRDSQSVRRFGCTTSELKEMAVWLKQCAIRTIALQSTGVYWIAVYDILEESGFEVYLVNARETKNLPGRKSDVQESQWLMKLHTYGLLRNSFRPSQAIRTMRTYWRQRNDLVRAAGRHIQRMQKALTQMNIQLANVLSDVSGMTGQAIVKAILAGERDPYELAALRNWRVKASEEEIARSLEGNWQEDLLFVLQQEQDGYEFCQRQMAECDQRLQQYLQQLEDRSHGAGLPEEKRKERLRKKKKGNAPQFDLRAELFRMTGTDLTQIDGIDVTTTMTILSEAGWDMSKWKTEHHFVSWLRLCPDNRISGDKIIGKGRLPTNNRVTNALRMAASTLRLSNTYLGAQFRRLRTKLGAPVAIKAMAAKLARLVYRMLRYGMTFIDRGAQFYDAQHRKLQINYLKRKAANFGFQIIEVPAA

SEQ ID NO: 230687 - protein, 430 aa, unidentified
MKSNTQNAKIEAITEKTLVLGIDVGSETHYARAFDYRGIEYSKKPFKFSNTEVGFATFKEWILDLKERHEKDKVVPGMEPTGHYWFNLGKFLQDNEMKPVLVNPHHVKKSKELDDNNPTKNDRKDPKVIAGLVREGRYMIPYLPDGVYADLRTASNIRFQLQAELTRIQNRISRWFNIYFPEYKTVYGKPDAKSGMLILKAAPLPEDILTLGIDGVNQIWRDAKLRAVGKARAKTLIEAAGHSVGSKEGAVSARMEIRMLLEDYESRNMRLQEVMVLIEELVKGIPMAEKLLEIKGVGIRTVSGFLAEVGDISRFNNPKELQKLAGLALVENSSGKHKGGTTISRRGRKRLRYLLFEAAMSLVAKNPEFRELHNYYTTRRRNPLKKMQSLMAVATKLIRVFYAMLTKGVDYDPKKMVSDIRRPEAYLQAA

SEQ ID NO: 230688 - protein, 372 aa, unidentified
MTEFSVYVGLDVHKATIAVAVAVAGRAEPQYRGEIANTPTAIKRLLHKLSPDGEVLGMCYEAGPCGYGIHRQITAVGHDCIVVAPGLIPRKATDRVKTDRRDALSLARLHRAGELTAVWVPDADQEAMRDLTRAREDLKAIERTARQRLGAFLLRHGQVYPGKSRWTQAHFRWLERVKMPMPVQQIVLTEYVDTVLAAQRRVAALVEQMRLALADWSLRPVVEALMALRGVSLITAMTVLAELGDITRFDSPSQLMAYLGLVPSEHSSGGNRRQGGITKTGNSHVRRVLVEAAWAYRFPARKSYAIQRRAERTSADVQAIAWQAQTRLCGRYRHLIHAGKTTPLATTAVARELAGFIWAIACEVPVNAAKAA

SEQ ID NO: 230689 - protein, 359 aa, unidentified
MDDGSKGTPRITVGVDLGDRYSYLCFLDTESGEVIGESRLPTNPETFRRRFSSKRPLKIAIEVGTHSPWVSRILEECGHEVLVANARKVRLIYGDKRKNDKLDAQNLARLARLDPKLLYPLKHRGEDSQAHLAIIRSREALVGSRTQLINHVRGAVKSFGHRLPKCPAVSFHKKAGAHIPEALWAALGPILETIGSLTQRIRGYDRQLETVCQEHYPETDLLRQVEGVGALTALTFTLTLEDPYRFEKSRAVGAYLGLVPARDQSGDRDPQRRISREGDEMLRRLLVGSAHYILGPFGSDSDLRRHGEKIASRGGKNAKKRAAVAVARKLSVLLHRLWVTGEVYDPLYNTHRRQEQEVA

SEQ ID NO: 230690 - protein, 344 aa, unidentified
MLFYCGIDLHARESVLCIIDAQDTIHFRDKVPNQLSHIFEILHSFTPKPKVALEATLNWYWLVDGLQEACFEVKLAHPFGLQVIKKAKVKTDNRDAFHLARLLRLDALPESYIYPKETRPLRDLLRKRQKIVSLRAAEYTSLHRTLLQHGIVDIPATQAKEFNSRDIEHYFEHPVIQCRCAMELERMQFYTRQIKILEEIILGNATEEPDFLLLQTIPGIGKLLAAIILYETGDVNRFPTAKQYCSYSRVVPGIAQSSNTVRRGKGSKQGNPYLKYAFMRAAALAVRFDGPIRRFRLKHLNRRRSKARKLISVSIVAHKLAVAAYQILKDKKTFQVENMFGPYI

SEQ ID NO: 230691 - protein, 449 aa, unidentified
MGKGSGVTRGDRRRNERLAELRALLPPGNAIAGLDLGEKKQALAVIDHDGRVLARRSPRVRVHDLGVHLDWALGRARAAGFGGLSVACEPTGSRWMYVQQMCAGRGLPMVCIQPLVSHIAREQQDLTGDKTGEGDCVLVARLAGELHCYVPEELGGVWAVLRDEGRRRAQLITNGTAARQLIRDKLGLACPALLEACAAPFKSLTWLAALEVVLGQGGGNPLRLAGQGYEHFAGLVRAALGGWGGRRLGPACAAVFAALADERGVARMRRAALRRARHALGDLKYARARRAETEAEMIALLDELGIDTARVCQIPGLTPAGLAAILAETGDLHQYSSSSPVVKHAGMSPARNESGAFRGQSRVSRRGRPGLRLAVWRATWAVLRHCDVLAARHAALTSRGGTGKLAPAQAHVACAASLLRWIYALTVHRTRWDPRIAAGALGHHHAMAA

SEQ ID NO: 230692 - protein, 387 aa, unidentified
MLPERTQVAWMSLVMGIDQHRAQITAEWLDTETGEVSRARVRPADRAGVRRFLARFAGQQLEVALEATTGWRFLVEELRAVGAVVHLAEPAETAALRGNKRRAKSDRADARHHRELLLAERLPESWIPPDHILDVRARVRLRHTLIEQHTEWQQRIQAVLYHHGCRQRRRLMEGDGREWLASQALSETAREQITVAMAIIDALDVQLAPLTKELCAWARRQAGCKALIDAYYGIGELCAVTVIAELGDCRRFQNSRDAVRYSGLDVTVYQSDRRRAPGHLSRQGPPALRWALYEAAQVARRPGSPDRGYYEQAAERLGGNRACLALARKLLKRCYHTLRELGDDALTPPVERPQPGPGSAAARRASSGSPRSLEPTTTNQRADVLAA

SEQ ID NO: 230693 - protein, 436 aa, unidentified
MELKECAAFVGIDWGDRCHAIHVIDGRTQKGKSQMLDQDPESIDQWVAKLRMLFPDQKIAVCLEQKRGPLINALLKFDNLILVPVNPSQLASFRDTFGPAGAKNDPNDAQLLAELLHKHSDRLRPWYPDGGWIRKLRVVVEDRRLFVNERTRLTNRLKSTLKQYFPLALEVTGDCIYSYMACQLLARYSTFEALQAVSDEELLQFYRDQGCYYESVNNKRLKAVRKSMPLTTDQAIIESYSLRVRSIVSTIETLNSAIDNYDSQINAIMESHHDEADIFESFPGAGKVMAPRLLGAFGSDRDRLSSANEIQQLAGVAPVTKQSGKSKVTHRRWACNKFLLQTFHEFAALSIKHSIWAEAYYEHATKNQGMKHQAAIRSLAFKWVRILFRCWKNKVSYDELKYCDALRKRNSDLLPIITGKITAKRKESADQDQQLT

SEQ ID NO: 230694 - protein, 472 aa, unidentified
MARAPRRQGGGQPRQRRSSRGRPAQLEQLNLNAAGIDVGATEHWVAVPADRDAQPVQRFGAFTADLYALAEWLRQCQIDTVVMESTGVYWIALFAVLEERGFDVKLVDAHYARQVPGRKTDVKDCQWLQELHTYGLLRGAFRPEDEVCVLRRYLRQRSMLVAMASRTVQHMQKALEQMNLKLTEVVSDITGKTGMTIIRAMLAGERAPQLLATYRDKRCKHDQATIAKALTGHWRAEHLFALQQAVEQYDFIAQQLRACDGHIEGCLQAFVPDVEIDAPQAPSARPWRSSRSNPLSFEVQAYLEAMTGVDLTQIDGIESLTALKVLSEIGRDMTRWPTSKHFAAWLGLCPGNKLSGGKRYRMRSKPSANRAATALRLAAQGVANSHSALGAYYRRRRARLGAPKAITATAHKLARLVYSMLRYGTAYVDAGQQAYEQKYRDRVLTNLQRKAKAFGYKLVHVEDIDSGVASTL

SEQ ID NO: 230695 - protein, 315 aa, unidentified
MEAMIERCAGLDVHQETVVACVLFGPLDKKPKTSIETFSTTTTGLLALSDWLTTLQVSDVVMESTGVYWKPIWNIPEDSFHLVLANARHVKNVPGRKTDVKDAEWLAKLLRCGLIESNFVPPEDIRDLRDLTRYRKKLIHHRTSEQNRIHKNLQDANIKLTSVLSDIFGVSGRRILEAILNGEKIETDGLRKMVDWRTKASIIDIANAMNGRIRRHHRDMLRYHWEHMSYLEKAIEELEKQIDQLLSPYRKEVELLDGIPGVNKAAAATFIAEMGVDMSVFKSAKHLASWAGVSPGNYESAGKKKRVKPHKVTKL

SEQ ID NO: 230696 - protein, 420 aa, unidentified
MSVQEAAVSLLQRVLFYVGIDWAAETHAVCVLDATGRIRAQFTIGHTAAGFADLLRRLARLAGDPAEVAVGIERPDGRLVDVLLEAGYLVVPVSPNAIKTWRDGEVLSGAKSDAGDAAVIAEYLRLRAHRLQPATPYTAETKALRTVVRTREDIVDMRVAAANQLSALLDAHWPGAKAIFADVESAIALAFLTRYPTYPSAQHLGEKRLRAFCVKHGYSGRRTAAELLTRLRSAPAGSTDEALTDAVRDAVLAQVAVLTALTAAEKNLSRSVIAHLGEHPDAAIFTSLPRSGQINAAQVLAEWGDSRAAYDSPDAVAALAGVTPVTKASGKYRAVHFRWACNKHFRKAITCFADNSRHASPWAAGVYNRAIARGHDHPHAVRVLARAWIRVIYRCWIDGVPYDPNKHGSAGKLRQTAAAA

SEQ ID NO: 230697 - protein, 348 aa, unidentified
MLVTQYYLGIDLHKRTSFLTVLNKDGEVLAEKNLHNEKVRSWVKENVPYESIAVIEATGNWSYLYDELENIIQQVVLVHPKKVKAIASAAVKTDRIDAGVLATLARLNYLPQAYAAPKELRNLRSLTRFRETRVRTKTKLKNGVHAILMKHNLHLSAADLFSPKGRGLLQEATDELEATEQIILEYSLQEIEQLEEFAQKMMEQGIALLNPEQMELFTLFQTAPGIGPVHALTILAEVGTITRFSSHKAFANWTGLVPRVRNSGGKQHHGHISKQGSRYIRAAFTRAASSAKLSSPALRKKYNQYLERMSKVQATVALGHKLAIILYFMWKRQEPFDETKVLAPLRKS

SEQ ID NO: 230698 - protein, 471 aa, unidentified
MSCFRGAIQNRLRKEDFMKKQDSYDYYVGIDCAQNKHDFAMKNNQDKFLIKKGHFSNTLQGYEKFLNTVLSKCLDKDKILFGMEVTGIYGTNLYERLKSDGYHVVMIFPDSVKNYRDYKRLNKTDKIDSACIAELLLNGDAQIVHAEKNGYTDLKAYIRRRNALKVTCIQETNRFLAKVCLYFPDLLKVFPSGRATLKAIFSIYPTPYSIIEADFNELVSVLQKASKNKFGVDKANELIHAARNSIVVRKSISDGELYNIHSLIDSIDSLESEIRNLEKIIDSKAEEFPAYHVLLTLTGCGKITAATIVAEIGDISRFHKASQIVSLAGLYGDNSKSGSSVNKRGKISKKGSRYLRHAIYMVAEFARRNNPIFKAYFTKKKNGDRTKHILAVNAVANKLCKVIYSLMKNQSTYIIQYRDLAKLSESTQNEFFQNAETDFSAKTRRKKYLYEDEYGELHEFVFKSIKTALIE

SEQ ID NO: 230699 - protein, 417 aa, unidentified
MNEKTDFAATIGLDWADQKHDLWIQPAEGSKAEHLRLDQTPEALHEWVAKLRERFGNRPVAIGIETSRGPVISAFLAYDFIVLFPVNPKALKDYRAAFSVSGAKNDRTDSMLLEEFIRLHRHQLIAIKPDTELTRKLAGLVQNRRRLVDERTRIVNQLHSTLKTYYPLSETLLGGQLNSPMAAEFLARWPDLETLQKAQVKTLRSFFYQHNSRSAQLVEERLQAVAKAKALTLDEAIIAPARLLVSAWAAMLKPLHKAVARLDKEIEQAMDQHPDAAIFRSLPGAGPALAPRLLVAFGTHRDRFDSAAEVAQFYGLAPVVKQSGNSKTTHMRQRCPKFGRQTFHENAGCAIKKEPWARCYYDQHKQRHDKKHHQACRALAYRLIRIYFACWKHRKPYDPDRYILALQKAAQPTAPKT

SEQ ID NO: 230700 - protein, 404 aa, unidentified
MYNAVGIDVSKGKSTIAVLQPGGTVIRKPFDVSHTSQNLNELADYLGSLEGPSKIVMECTGRYHEPMLKVLYEAGLFVSVVNPHLIKNFGNNSLRKVKSDPADARKIARYTLDNWAELRQYSDMDDTRTQLKTLNSQFSFFMKQKVAAKANLIALLDNTYPGVNKLFDSPTREDGSEKWVDYAYSFWHVDCVRKIGLKTFTERYKAFCKKHHYIFQQDKPEKLFNASKELVAVFPKEKTYKLLIQQSIQQLNLASGHVERLRQEMNALASTLPEYNTVMGIYGVGKTYGPLLIAEIGNVSRFTHREALTAFAGVDPGVDESGQHKSKSNRASKVGSARLRKTLFQIMTTLLQNAPVDDPVYRFLDKKRAQGKPYYVYMTAGANKFLRIYYGKVKECLRNLEQAE

SEQ ID NO: 230701 - protein, 344 aa, unidentified
MERTTVAVDLAKSVFQIAVSRRPGKTAQTRRLRRSQLPAFFAQYPSSVVVMEACGTSSFWGRKFEAMGHDVVLLPPSQVRPYVPRNKTDSADAKALLEAHRNEAIRPVPVKSVGQQILAALHRFRSGWMAERTARINGLRGVLREQGVVIPVGAVRVVPAVTALVEDADSEVPDGLRHTLWEVCQEIGDLERRIKNVEKQLEAMASQIPAYERLRTIPGVGLLTATALLAFVGDVRRFTTGRHFSSYLGLTPNEHSSGLTRHLGGISKRGDCYLRMLLVHGARSVLFASRRQEDPERLRAWAMAIEKRSGFNKAAVALANKLARIIWAVWREDEAVYVSHPHAA

SEQ ID NO: 230702 - protein, 343 aa, unidentified
MKLQALGVDLGKTVFHLVGLDSTGRVVIRKRCSRTQLLAFTANLQVQLIGMEACSGAHFLGRALREQGHEVRLMPAQYVKPYVQTNKSDYLDAEAIAEAVQRPRMRFVPIKTDEQLDLQALHRVRERWVMRRTAVVNQIRSLLLERGLTLPKGRSHLDEQLPRILEDAELNLSDSFRVLLAQLKLELEQLAARIEEMDRVIQKTARENEACQRLTEIPGVGPVTATALIAAVGNGSTFKKGRNLSAWMGIVPGEYSTGGKQKLLGISKRGNKYLRRLFVQGARSVLQQRHKQSPGLSSWLAQLLGRTHQNVVVVALANKLVRMAWAVLCKNERYRAPVFAVTT

SEQ ID NO: 230703 - protein, 482 aa, unidentified
MKKSNIYQDRSQELSKLFEQAGSNSNIMCIPIDYAKKDHVVMFCNGYGDILRKPFNVKNTPEGVKYLIEQATRSCRHRHVRKEHVFFGGEDVNSYAQNFVHALRSKGWLVASVNAHDAKIQRESIQASTDQLDLLGIATMLLNRRANCSPAQSGVYRNLRTIVRHRRKVVKMKTEVRNRIHTVVDQLFPGFLSEKKSSITPFSPSSLYLMEDRFSARQIRRRKRSTLVKRLKQHGTKNPEQTAAKLQIYAGQVLAPADEYTATLQVSLSSHVNHLRCLIDSAEMLEREMAILLGQTTGAFLTSVKGIGIVLASGVTAEIGDPASQKSANNLVSYAGVVPRVKQSGGVEGQPRIGRVSKRSNHILKDQVVQSAHHIGRYGPEDLLADHKRREANGQHADFGMGRRFVRMALCLMRTEQIYLPSRLREADTDPQERGEYYLSLWPYLRDKWDKLGATKVAFSKDRPLGQWRHIVQDLYGVRLKL

SEQ ID NO: 230704 - protein, 316 aa, unidentified
MVPSPLFVGIDVAKATLDIAVRPTAETWRAPNDAPGIDALVMRLGALAPTLIVLEATGGYQGPLVAALVAAALPVVVVNPRHIRAFAQAVGILAKTDRIDARVIAHFAEAVKPAPRPLPDAETQELRALLVRRRQLVEMVSAERTRLDTAPPSIQDAIQAHIAWLTTQITGLDDTLTHASQTHPAWQAKDDVLQSIPGVGPVLARTMLGQVPELGTLGAKPLAALIGVAPFNRDSGTLRGRRTVYGGRAEVRAVLYMGALVATRHNPVIKAFYERLLAAGKAKKVALTACMHKLLTIMNAMVRDLKRWQPREVPIA

SEQ ID NO: 230705 - protein, 355 aa, unidentified
MDSKKYIGMDVHKESISIAVMNGAGKIVMECVIETKASMILQFIDGLRGDVHVTFEEGTSAAWLYDLLKPHVTKLLVCDPRKNASMREGNQSDKIDARRLAELLRLNHLNPVYHGEHGLRSLKELVRSYLTITKDLGRVMSRVKAIYRSWAIPCTGKQVYAPRHRAEWLGKIGEPGVRRRAEFYYQQLDALRTVRQEVRRELLAEGKKHKAWKQLCQIPSIGPIRSAVLLGILQTPHRFRTKRQLWTYSGFGIETHSSADHRSVNGQLQRVKKQISIRGLNRNCNHDLKNLFKGAAIVASSKPGPFQEFYTALLTKGTRPEMARLTLARKIATIVLIVWKRGACFDAQHLKPQTA

SEQ ID NO: 230706 - protein, 358 aa, unidentified
MKSQDSNYVGIDCGKKSLEVIRINSEGSYERQQFSTTEIGISKLINWLNPNDVVGLEAGSQSFRIAKSILNKGIQVIVLNPGDLATIYQSLKKTDKEDSLKIARLIQRFPIEELPVVPVPTDEEEDNRRLCSEQENWTRQLTQGKNRLHSLFTQAGLTHITKKHLRTKANRETSVALLPSRYHKEAERILQVLDLVEQNLKLIEEEIKEALRKNQTYTQTIMSMPGIGMITSLAILSYMGDCKRFSSAKQAAYYVGLVPRVDISGDSAYYGRIVNRGCHSIRRVIVQAAWSLVRCQHGGKLKEFYERLYSKKGAKKSIIAVSRKMIEVLYSMIRTGTLFDSMPEEVLNRKECLYKIQK

SEQ ID NO: 230707 - protein, 311 aa, unidentified
MLIIGCDFHTRYQQIAMAREETGELLVERRLDHASGEAHAFYRSLQSSQEPVRVGIEATGPIHWFERLLADLGHELWIGDSAKIRASEVRKQKTDERDAALILDLLLAKRFPRIWVPTPAQRDLRQLLWHRHKLVSMRTMLGNQLHALAMSQGLCRKKKLFTKKGRVELVSLGLAPWASRRREELLKLLDQLEPPIAELDRAVLEEAKHHADAVRLMTHPGIGPVTALAFVLAIGPITRFRRSKKIASYLGLNPSEESSGGRRRLGAISKRGNTMVRWLLIETVHHAVRQDPELRQDYQRLKFREDTRWPR

SEQ ID NO: 230708 - protein, 357 aa, unidentified
MSIVGGLDVHRKQLTFDYVDVETGRLERGRIAPADREHLAGWLTRFEGQTPVAFALEAGTGWRYVVEEMRHAGVEPHLAEPADTSALRGPKRRAKTDKADAKLLRELLTAGRVPECYIPPSQVLEWRAALGLYHDLRLEHTAWAQRVHATCFHQGTTSLGVAGVVRGSRERLDHIVEEQLSAVGRLQVNTALAIMDTLAVHLDRLRRSLVATARHVNGARALRDAIYGVGPMNSLALCAWLGGTERFSSSRKAVRFVGLDITVHSSDTKRSPGRLSRQGPEMLRWLLFEAAKTSARSCAPGYRYYTDVKQRYDANRAALSQARRIVRQAMHILTDLGDDAFTIIAVPRTSPSTVVTR

SEQ ID NO: 230709 - protein, 397 aa, unidentified
MYIVGIDIAKRKHEAAVIDGEGTVIIKPFSFTNNCSGYNRLLAMLAKAKLPLDEVSFAMEATGHYWLALFTRLQKEGFRVQVINPVQTNSIRSFYIRQAKTDPRDALLIAEVIRFGHFSESTLHPENIYELRELCRGRHAIVSMQADVKRKVVALLDQVFPEYETAFTNMFGDTSMAILQTCPTPKELSEMRLEELCHLIEVSSHKRFRMAKAQELQALARNSFGFAMAGDVFSTMIRLYAKHLDFLKQQVREMDRKIAEIMETLDTPITTITGIGLTLGAYILSEIGDISRFSSAAKLAAYAGIDPTMRQSGEYNGVRNRMSKRGSPYLRHAIWLAASSAVLHDPALKLYFQKKRDEGKPYMASVGHACRKMVSIIYAVMRDNKAYTPCIPNEISV

SEQ ID NO: 230710 - protein, 351 aa, unidentified
MPKARMESKPSSMIVVGGVDTHADTHTVAALDQVGRRLGCAVFPAHRAGYRALADWLAGHGEISAVGVEGTGSYGAGLTRWLSAHQITVVEVNRPNRAERRRRGKSDPVDAEHAAAEVLANTATAVPKARTGLVESIRLIHATRAGAVKARTAARNTFTNTLRTSPDAVREQLQPLTRARQLTAATGYRATGDDPDSTVKRCLRRLAVRISQLSEEINAADHELDRLTRELAPTMRSRPGFGPETTAQLLITAGDNPDRIGSEAALAGLCGVSPVSASSGRTRYHRLNRGGDRQANRALHMIILNRLRHHPPTRAYLASHSLQGQATPHLRRVLKRYLVREVYQLLSQLQR

SEQ ID NO: 230711 - protein, 353 aa, unidentified
MSCYYVGLDVHKASICIAVLNAEGKLVMESVVETSAATVLGFLKGLRGQVEVTCEEGTHAAWLYDLLRKTKARVIVCDPRKNRLLQDGTKSDKVDARKLAQLLRAGLLSPVYHGEQGVRDLKELVRSYEYLVEDATRTMNRIKALYRSRAIPCAGTDVYKPRQREAWLAKLPEPGARVRAERLYSELDHLAGLRREARKSLIVECRRHPSAKVLLGVPTLGIVRIAQLLASVVTPHRFRSKRQFWAYCGLAVVTRSSADYQRDGTQLRRVKRAPSTRGLTRSHNRTLKHVFKSAALTASRCEPFKTSYAEMLARGLRPELARVTMARKIAAITLAVWKAGADFEGSKLLGQAA

SEQ ID NO: 230712 - protein, 321 aa, unidentified
MSATIIGVDPHKRSHTAVVLDDCEEIAAQLRVTASPHQVDQLLGWAPATVQRLWAIENANGLGRLLAQQLVARGEVVIDVPATLSSRARKLSGHSGRKTDEHDARSVAIAAGHNHGLRRVSIENVTVAIGLLLDHRWQLVAQRQPTICQLHALLTELVPAGAATHLTSTKAAALLRKITPSSIVELERKLVARELLEDWRWLDRRIPAAKQRLSDALTAYGTTLTDIHGIGEIGAATVLSIVHDPARFPSRGHFAAFNGTAPLEASSGDVRRHRLSRRGNRQLTRSSTSRPERRSAAMAPAAPTTNANSPKATAAGRRYAR

SEQ ID NO: 230713 - protein, 355 aa, unidentified
MSQEKYIGMDVHQATVSAAVRDRNGNLLMECILETKADTLLEFVQGLHGTLSLAFEEGTLAAWLHDLLKPHVNRVVVCDSRKAALLRDGNKSDRIDARNLSELLRTNQLKPVYHGEHGLRTLKELGRSYLTVSKEMTRTMNRIKSLYRSWAIPCAGTTVYAPRHRRQWLAKIAEPGARVRAEHLYEQLDHLQPIRVRARRELLQESNQHDAVKRLRQIPSIGQIRAALLVALLQTPHRFRSKRQIWAYSGFAIETHDSGEYRYVRGKLQRNRERITVRGLNRNHNPDLKNIFKGAAISASSRPGPLQDFYETRVAMGMRPTMARLTLARKIAAITLTLWKKGANFDPQQLSRQAA

SEQ ID NO: 230714 - protein, 358 aa, unidentified
MIIIGCDYHPGFQQIAFVDTETGDYGEQRLEHSEGAEKFYRDLAAQGKKVRVGMEASGHARWFERLLAELNFELWIGDASEIARKRERKQKTDRQDAQHILQLLMENRFPKIWIPSGENRDLRQLLWHRHRMVQMRTRIMNQLQAVALNEGLRCKKRLWRQHGREQLESFRLAPWASRRREDLLQLLDRLNPTIADLTQVIEQEVEKCPEARRLRTHPGVGALTALAFVLIIGRTERFQCGKQIAAYLGLVPLEDSSGNRRRLGHITKQGSSMLRFLLVEAAQVTARSNPEWRNKYFHLAMRRGRKIAKVAMARRLAIALYWMWRKGWDYEQLRKFGSQGRKLSFHSYSVDQGFDSIA

SEQ ID NO: 230715 - protein, 612 aa, unidentified
MGIVALGIDLAKNVFALHGVDETGKVVLRKPNVKREKLLEELANIPPCLVGMEACSGAHDWARKLRAMGHDARMMAPKLVAPYRDGGKRKKNDAVDAEAICEAVQRKKMRFVPIKSEEQQSRLAVHTARDGYVAQRTATINRIRGLLTEIGIVMPKKAETIKKLAQQHLEDLPGYYNRVINDLLDELGKLDERVDSYDVLIREMARQDSRSKRLMQIKGIAEVTASAIVALVGNGHDFKNSRQFAAWIGLVPRQFGTGGKVQLGRITKVGDPYLRKLLVMGARAVLNAAEGNDTMQGGLGNDTYIVDNLGDQVIEAVGAGTDTVRTTLLSYGLGENVEHLTFVGSGNFTGYGNALANTITGGAGNDVLDGGAGVDRLVGGAGNDSYYVDNPGDVVVEAAGAGVDTVYSTSASFTLGANVENYVHLGAGAANASGNGLANQMTGGAAADTLRGLGGDDVLSGLGGNDTLYGGAGADSLLGGEGADTLFGEGGNDILDGGDGDDILDGGAGNDIMIGGAGNDTLYADQGNDILVFGPNFGSDTIIGFDANPAGGQDLLNIAAFNLTAATFASRVSIADAGNDVLVTVNGADGGNIRLVGVTDHTSVTITDFQLA

SEQ ID NO: 230716 - protein, 339 aa, unidentified
MNVRTLGIDLAKNVFRVHGVDENGKILIARQLRRRQLLPFIAQLKPCLVGMEACGGAHHFAREIVKHGHEVRLMSPRFVRPYVKSNKNDARDAEAICEAVTRPSMRFVVVKSQAQQDVLALHRVRALLIRERTALMNQMRGLLAESGIVIAQGSATLRRAVAELRDNENGPTPILREILVEMSERLRLFEERLKGYDSRITGLARDDQQVARLMAVEGVGPITATALVATVGDARQFRTGRELSAWLGLTPRQHSSGERTVLLGISKRGDRYLRTPLIHGARSALYNAVRRQSQRSKWLEGVRKRRGNNIAAVALANKNARILWALLRRGEDYRVRLAA

SEQ ID NO: 230717 - protein, 478 aa, unidentified
MKADRRWHTRKEKKEWARRLQSNDPGLDVIHPQAAGIDVGNASHYVAVRPDRDEEPVRQFECFTADLHRLADWLKSCGVRTVAMQSTGVYWIPLYDILEERGFEVYLVNARHTKNLPGRKSDVQECQWLLKLHTYGLLNNSFQPASQIRVLRTYWRQRAEHVQAAASCIQRMQKALTQMNVQLANVISDLGGLTGQLIVRAIVRGERDPQKLAALRDRRIQASPEEVAKSLEGNWRPELLFLVKQEVDTYDTYQKRIAECDEQLQQQLASLASVAPGVATPPVTQLQGDEQPKKSKAKRRKLAKNAPQFNLQQELQRVAGVDLTRIDSIDVMVAQTILAEVGLDMGRWETEGNFVSWLGLCPDNRITGNKVVGRGTRHVVNRAATSLRMAANALLRSQTYLGAQYRGLRTKLGAPKAITAMAHRIARLVYRMLKYGQRYVDKGAEYYEQRFRNQQLQFLRKKAAQLGFQLTEHEARTA

SEQ ID NO: 230718 - protein, 350 aa, unidentified
MIIIGADYHPGFQQIAFVDTETGELEERRLEHPEEAEKFYRDLGAQRACVRVGMEASGHARWFERLLSELRFELWIGDAAKIRAKRVRKQKTDRQDAELILQLLMENRFPQIWVPSVENRDLRQLLWHRHRMVQARTRIMNQLQAVALNEGLLCKKRLWRETGRKQLESFPLGPWASRRRQDLLELLDRLTPTIAELTQAIEREVENSPEAQRLRTHPGVGPLTALAFVLVIGGADRFQCGKQVASYLGLVPLEDSSGNRRRLGHITKQGNSLLRFLLVEAAQVTVRSLPEWRSKYVHLTMRRGRKIAKVAMARKLAVRLYWMMRKEWDYEQVKKFGSHAGQPGHRHGVK

SEQ ID NO: 230719 - protein, 371 aa, unidentified
MTAHHSRWLKHPINKKWYKDMKKVFVGIDVSKKTLDASVIAPSLTEDKPVIISYGKFDNRPCGYRKIVSMARKAAKAVDDAEILFCCETTGGYDHALCDYMSDKHLDIWREHAARIAKTRPDHGKDDRKDSMLIAEYAWRNRDRAQMYVPSSRSVRDLRQLLLYRRQLVEMRKQLNVRMTDLKATVQSDPTMSFIYSESEKQVKRLTDCIEKCEKMIRETIDSDNEMLKNFGHIMTVKGIGLVSAVAIIAYTGNFKTIDVYKSFACYCGTVPFYEDSGTSIHKREYIGHKSNRMVRSYLIQAAHIATIYNEEMVAYKQRMQSKGKPAGIIVNNVANKLLRLVFSLVANDCDYERGHEFKREERLKKKTMSA

SEQ ID NO: 230720 - protein, 357 aa, unidentified
MSYIGVDLHSDKFTAAFRDKMNNDTLKSYYLDKYEIDNFKRNLKKDDYIFIEASTPTFAFTDLLKDTVKKTIVIDPFKFRAIADSRKKTDKIDARQLARMGKYHIEGDKKFLPEVYVVEKRIRKLRSLFTTYRLLNKEITMIKNRIHSLFKQNLKPYSKSHIFNDIMTGLKPIDLDEEYKIQVEVLFDVLSKLEEKKSEIKEKILLTGEPFLADIDILVSISGISVFVALGLISDYATIERFKNAKQFSKYLRSTPKSEESNKKVKTGKTQKNGRKLSIELMLQSINHFRRESLFIDKFYRRLKKGKGGCKARIAVVRKMFVAIYFMLREREYYRYMNKKLHDKKMREYKRFLVKNK

SEQ ID NO: 230721 - protein, 314 aa, unidentified
MKKAVEIFVGIDISKAWLDIAVHEREETFRVSNDETGISSLVKRLKKSKATLIVLEPTGGFEMLVVAELTQAGLPAAVVNAKRVRDFARATGQLAKTDKLDAKVLAHFAAAVRPAVRNLRSEEEEQLAALLTRRRQIIDMLTVEKNRLVTVRAKMRSDIQAHIQWLSSSLKELDQEIEDFIESTPAWKDKDALLQSVPGVGPVTSATMLGMLPELGLLNRQEIAALVGVAPVNKDSGKKHGRRRVYGGRADVRSVLYMAALAAKKFNPVIRKFYERLIQQGKEKKVALTACMRKLLVILNAMMHSNQPWRPQPA

SEQ ID NO: 230722 - protein, 315 aa, unidentified
MSETPVWMGIDVAKAWLDMARSDETAVRRFSNDDEGIAALVATLPTPAPQLVVLEATGGLETAVTAALVAAGVPVAVVNPRQVRDFAHAAGTWAKSDALDAGILALFAERMQPPARPLPDVVAQDLAALLARRRQLLEMRTAEQNRRAMLAPRLRPRLDAHVVWLSQQIAELDRELDQTLRESPIWREKEQVLRSIPGIGPVVARTLLGELPELGTLERGELAALAGVAPLNADSGQRQGRRRTWGGRAAVRAALYMAVVSAIRCNPTIKPFYARLRAAGKPVKVAMVACMRKLLIIANAMLRDGVLWAPPGATA

SEQ ID NO: 230723 - protein, 348 aa, unidentified
MIAIGADVHKQQCTLAVQRPNGKLSMLPSMDNTRENWLDLLTQLPPEAQIALEVSTSGHFVMSVLEEAGWRDRAHWVHTAGIDSLRKQKTDRLDAQRLARKLSVMEQDPLPEAWFPPRPIRELRLRARQRCWVAVLRTRVKNRVRSLLQMSGRCAGTNPFTASGRTWLKEQKLSEATRESVEQLLRFHDFLTTEREKSETSLRGMEKDFPEIARLQTLPGLGHILSAVIWSEIGELKRFDSPRALVNYTGLAPSLYESGERSVRGGITRQGPVWLRWALITAVNAATRGDNAFARRYRRLRRHKLPNVAKTAVARSIARCAYGVLKHGVDYQEQRWGRKAGIEMEQEA

SEQ ID NO: 230724 - protein, 391 aa, unidentified
MSLYFVGIDISKYKHDCCIISATTQKVISKFTIKNDKAGFEELITTFNSLSSPEDIRIGFESTAHYALNLELFLENANHSFMEVNPVFIKEYKKSTTLRRTKTDSVDCESIARWLMTVEYKPHSKGFYHAYSLKSLTRLRDRLIRQRSFYLVKITNVLDHTFPEFKPFFNERLSKTALYLLENYGSAEKMARMNSVSYEKLRSISRGKFSPQQFIALKELAANTVGVNNSIFDIELNSLLTLYKTLVTEIDTLEKEIYRLIEEVHPHYLSVPGIGPISAAIIYSEYGDISNFDNPGQMLAFAGIEPGINDSGTESHGGRMVKRGSSQLRYALINCCLPLIRFDMTFATYYAKKRAEGKPHRVAITHVAKKLIRVIYALERQDTDFCVQKLR

SEQ ID NO: 230725 - protein, 345 aa, unidentified
MMIIGCDYHPSWQQIAWVETETGEMGERKLMHADGEAERFYRQLGPALIGMEATGNSHWFVDLVAEMGHQVLIGDAAAIRAKQVRKQKTDRRDAAHILDLVLKNDFPKIWTPSIAQRDQRQLLIHRWGLVRLRARAKNELQHLAMNKGVQKKARLWSKTGQKLLRELPLQYWAGQRRENLLRLMTIFDEQIAVLDLAVEKAAQESEMARLLMTQPGVGPITSLAFVLTMGDVTRFQRGKQVASYLGLIPCEYTTGGRQRLGAISKQGNRFLRMLLVEAAHSVIRCDPGFRKQYLHHCHKKPKNVAKVAVARKLAVRLYWMLRTNTAYPEIVRMESSSRVALVGAS

SEQ ID NO: 230726 - protein, 411 aa, unidentified
MEVLHPRCAGLDVHKDSVVACVRLAEGGRVERHVETFATTTSDLERLSAWLAGHGVTHVAMEATGVYWKPVWAVLCEGDFALVLANAHHVKAVPGRKTDVNDATWLADLIAHGLIRPSFVPPRAVQALRELTRTRKQLTREKASHVQRIDKLLQAANLKLGSVLSDIMGQSGRAILDALAAGAEDPGQLADLVRPSVRASRTQLIEALRGRLADHQRLLLGLHLAQADAITAAIARIDAEVNARLEPFRDTVTRLSRMPGLSEVSASVILSEIGFDMSRFPTPAHLVSWAGLCPRNDESAGKRRSTRLRHGAPWLKTLLVQVAWAAVRAKATYPQALFHKLKARRGPKKAIVAVAASMLTAIHVMLQRGIPYRDLGADHFERVQNDRLAQRLTRKLQQLGFEVALTQRAAA

SEQ ID NO: 230727 - protein, 455 aa, unidentified
MCVPIDYAKKDHVVMFCNGYGDILRKPFSVKNSPQGVDYLTDQVMRSCRQRAISEKHVFFGGEDVGSFADNFVSTLRCQGWLVAGVNAHEAKTQRENLQASTDRLDLMGIAKSLLNRRANCSPAQSGIYLNLRTVVRHRRKLVDITTEVKNRIHAVVDRLFPGFLNESKSGITPFSKSSLWLMKERFSAGQIRRRRRPTLIEALRRLGTKKPECTADQLQQYATQVLKPPQDYVHMLQLSLAQHVTHFCCLQESIGQLEKEIAVNLAQTQGAFLTSVRGIGIVLAAGVSAEIGNPFEQKPLNNLVSYCGIIPRVKQTGGPQGETKTGKVAKRCNRILKDYAVQSASHLGLHGPADLMSDYKRRDAAGQHADFGMTRRYLRMAMCLMRTSQIYLPSGLRKAQGQMDERADYYLITWPYLRDKWQKSGALEIAFKADQPLGQWRKIVQQFYGIKLTL

SEQ ID NO: 230728 - protein, 408 aa, unidentified
MEVLHGKCVGLDVHKDSVVACIRIQEGPQASYWIQTFGTTTQELLKLSEWLIEYSVTHVAMEATGVYWKPVWHILDGEFELVLANAMHIKNVPGRKTDVKDAQWIADLLAHGLIRSSFVPPTEIQDMRMLMRTRKQLVRERSQHVQRIQKALEDANIKIASVVSDITGVSGQAILRAIIDGQTDPDQLIAVTTGRLKASAATLREALRGRIRKPHRLLLKLHLDQIGGIEKSIADVDREVGALLDPFRAKSKRLTTIPGVSDVVAQVIVSEIGTDMSRFPTSAHLISWAGLCPRNDESAGRRRSKRLRSGAPWLKTTLIQAGWAAARGKTGYLPAQFRRIQSRRGPRKAVVAVAASILTAAYYILRNDVDYRDLGATHFDSADREKVAARLIKRLATLGVNVQILEAA

SEQ ID NO: 230729 - protein, 342 aa, unidentified
MTKDTMIGVDLAKAVFQLHGALMTGEVLFRKKLSRQGFAKFMTEQRPSVVVMEACGSAHYWAREMVRLGHEVKLIAAQYVKPFVKRQKNDAADAEAIVIAAQRPEMRFVEPKSAEQQSRAILFRARDRLVHQRTELVNALRACLYEYGYAVSQGLHQLKRIAEILDEPNSDLPKLVREECRDLLEQIAAKTARIDARTAKIKALAAKADTARRLQTIPGVGPLTALAVEAFAPPMENFRCGRDFAAWLGLVPRQFSSGGKERLGRISKAGQSDIRRLLIIGAMSRLNWLGRKSMVEGSWLACMAARKPRMLVAIALANKMARTIWALLTKHEDYRVPAQATA

SEQ ID NO: 230730 - protein, 399 aa, unidentified
MLAVGIDISKSKSVAAILNQDGSMHTSPFEFHHTQPELDAFIKYILNSNQSATILMENTGHYHYPVLKAFQEAGLPVCIVNAYQIKKFGDMDLRKAKTDKKDAVRIARYALEKSYSLVPYTSMEQKYEDLRFLARQYNQRMLTLKTNKVFLLNLLDETMPGITNILPLTTRTPETSLSVLFINRFKSYDRIKKMGKNRFLDAFEKIARKSRNRQTKTYGLAIYEAALRNITTRGENEYILAAQDQCLELVCESQKAADSIILKMQTLAETLPEYAVLRSMAGVGDRLGPLILAEIGDIRRFHSGKALNAYAGNDAPPYQSGTFESHNRHISKRGNAALRKYCFEVMQALKLTQPQDDPVYLFLLKKEQEGKPYNVAKMAGVNKFLRIYYARAMETLKQQ

SEQ ID NO: 230731 - protein, 353 aa, unidentified
MNDTSSIAWLGLDAHSKNCVLGQLDDHGTEVKWWQFATQPQLLIKHVQAIPATDKRLMLEESNLARWLSQLLKPHVQQLVVCDARRNRLISQDHHKHDKRDAFALARLLRLNEFKPVWQPAEDQRVLFKRIAKSYENAVQRQTRLKLQLKSLFQHWGLFPVGSTVFTKSGRNDWLKKLPHDTLRSQALLLYELLDQALVGQAQFRRLMCQTGRQFPEVQRLSTTPGVGVVGSHLFVAYLQDPKRFAKFSRLSRYCRLGIRDRTSDDKPLGHEQLDRQGIGTLKAISYRAYLQAAKRRTGPVWDFYQASLRHTGSTTHARLNTQRKILLTLWTLWLTGREFDPKQFFRAQPVDV

SEQ ID NO: 230732 - protein, 409 aa, unidentified
MRIIGLDIHRAFAEAVAWDDGKLKRLGRVDMRRHLLEAFAKKLAKEDIVVVEATGNAASVAAVIAPHVKQVVIANPKQVRVIAHAKIKTDTIDASVLAQLYASGFLPEVWIPDEPTQALRRQVTRRNQIVRQRSRLKNIIQSILHSHLIPSCPHADLCGASGRAWLFHQVLPEDERLAVERHLREFDRLGDDLKVIERDLARSALGDEGVKRLMTIPGVDMVVALAIVAAIGDVGRFEQSQKLVSYLGLNPSVRQSGPGPAYHGRITKQGRGHARGMLVEAAWAAARAPGPLRAFFLRVRARRGQHVAAVATARKLAVLIWHLLSKGESYVWARPALHARKLRDLELKAGYKAARGQRGAAHAYNIKSHRDQERRWVEQAETAYARFVSGWNPRGPKRVRTGAATEVRR

SEQ ID NO: 230733 - protein, 332 aa, unidentified
MQSTTIIAFDQHAATTVAAVLLPGQRTPALHSLTPDTGTILRFVRKVRRDSGVQCCYEAGPCGFELHRAMTADGIRCDVIAPALIPRRAGARIKTDRRDAAQLAILYRAGALTAIHVPTDQEEAVRDLLRCREDIRQDLLRARNRLSKFLLRHGRRFTATKNAWSRKHDIWLRAQTWPLPALDQTHRAYVRTVDEAVARLHTVEVELRELTTLEPLRERVERLRCFRGMDDITALTIAAELGDPRRFPSPRGLMAYVGLIPSEHSSGPSRARGAITKTGNAHIRRVLVEAAWHYRHHPFIGKQLLHRGAVPAASGRNQYWRYRVACQAWAGS

SEQ ID NO: 230734 - protein, 341 aa, unidentified
MHPIYYIGFDIHKRTIAYCVKRFDGVLIQQGTVSAERKALLQWLSRIPGSWIGAMEATMFTGWVYDFLKPHAVELKVAHPEMLKAITAAKKKNDRADAERIADLLRVNLLPECYMAPEELRELRRILRYRNMIVRTATSMKNKISGLLMEVGATYDKRRLHGKAYFNSLLERVEDVPESVKELLKLSKGSLDMFTAVQKKLIKALKENMLIRRRIKRLMSIQGVGEVLALTWVLEIGEVSRFSSSRQAISYCGLCSAQHESAGREHRGPISKKRNKHLQTMLIEAAKLAPRWNAELALLHAKELARGNCNQATLAVARKLVKYLLAVDRRESDFETLQKAV

SEQ ID NO: 230735 - protein, 438 aa, unidentified
MSHEYARLLDPQFPGGDHAWDGYDPAGEPLEDRLYLPCGVDPHGDICGVCFVHPYPQCKEVLCQKIIQNNDLKDMLWLIATGDRLAARYGAVPVYVFESTSVFWRAQRNYLYRAGYATATVCGRQTNHARGTVTRKTHNDLKDAYNIAKVFKQGESHATRILPEPLASLREDCRLHQFFTSYSVAIQNRMHCIRYAVFPEFDGLFSKPMCATTLALMQHELLLPYNLLQADLEDLTQLIRFASHGKLGREKADALRLAAQATFPPPYASAGQSASLSLLAQAYQHLHTQLLPPLHERIQATLSAPDFPIHHHLDEIRFFGPLVIGTFLSELGLPEWFRSVDSVVAWFGFDPAVSESANKPTGLTHLTKRGTKYGRRMMWLVANNWCKYIPEGRILFQKERQQHKRSFDAAVCILAAKLVRIAFAMLRDGSHFDIAKAF

SEQ ID NO: 230736 - protein, 355 aa, unidentified
MNSSKYIAMDVHTATISVAVRDAAGKLIMESVIETKTSTILQFIQGLRGDLHVTFEEGTWAAWLYDLLKPYVTKVVVCNPRRNALLKEGSRNDRIDARKLAELLRTNLLRPVYHGEKGLRTLKELARAYLTISKDLTRVMNRVKAIYRSWGIPCGGQSVYNPRHRKEWLSKITQASVRRRAELYYEQLDALVLLRKQARQELLAEGKKHQAWKLLRSIPALGPIRAAVLMAIVQTPHRFRTKRLLWKYSGFGVVTHSSADHRYVKGQLERSKKPVSVRGLDRDHNHQLKDLFKGAAIQASTRKGPFREFYEALVAKGMRPEMARLTLARKIAVIALTVWKKGGAFDAKYLKPQTA

SEQ ID NO: 230737 - protein, 344 aa, unidentified
MGEVSTIGLDIAKLVFQVHGVDDAGAVTIRKRVSRSKMLEFFADLAPCLVGIEACPSAHHWGRELQGLGHTVKLMPPSYVKAYRKRSKNDANDAAAICEAVTRPSMRFVPIKTKEQQTALMLHRTRQLLVRQRTMLSNALRGHLAELGIVSAKGRNGMGELLRIIADGAANRLPAAVRGILDVLARQYSAIGTEVGSIDKSILALHRSCEASRRLAEIPGIGPIVATALVAEIGDWKAFSSGRSLAAWIGLVPKQHTTGGKGRLGGITKQGNRYLRWLLVVGAMAVIRYARKHGTKSRPWLARLLERRPTKVAAVALANKIARIAWAIMVRGERYKEPKLLLAA

SEQ ID NO: 230738 - protein, 431 aa, unidentified
MTNRLQVGIDFSQKKADFCLLFPDGQPLESHVSFANSRPGCSLAKQLLLDTLDTYSFDGIDVSGEATGYLWLPFFLQLSADPDLALRDMDLFLLNPRWVKWFKKCFAQDHKCDAKDPYYIAERTRTHRPDVAWSPADCLPLRFYTRLRFHIVQSLAREKCYFSAFLFLRASSYRCIKPFSDIFGVTSRLVLTQQPSLDELAQLPVQDLAMHLHELSGHHLPDPSNNARKLKQVAQERFPLDETLALPVQRILDLTLEHIRFLESQVEQVDDWIATELESYSVIAQLATIPGVGPVFSSGIGAEIGGIRRFLQGQKWDRKRKRYRPRNLRDAEDAVAKIAGLWWPRFSSGDFEAEDRRMAKTGNRYLRYYLIQAANLMRKYIPEYMAYYARKYKESAKHHHKRALVMTARKGVGLVVGLLHRDEPYRPREQR

SEQ ID NO: 230739 - protein, 340 aa, unidentified
MTITTVGIDLAKNVFAVHCVDQNGKTVLVKPKVSRAALPELIASLPPCVIGMEACSGAHYWARVFRQYGHEPRLMAAKFVSPYRMAGKSGKNDAADAQAICEAVRRPHMRFVPVKDESQQAMQCLHRTRQGFIEEKTATYNRLRGLISEFGVIAPQSTDALRHIVSEQKNSLPLQVQQCVDDLLEHINRIEDNIAEYDRILSRMAKTDHRSQRLMELKGIGPTTACALVASIGNAHDFKNGRQLAAWLGLTPSQYSSGGKSKLGRITKAGDSYLRTLLVQGARSVLIGAEKRTDSFSRWVCKLVERRGYWRAVVAIAAKNARLCWASLHYGDDFRLYSAS

SEQ ID NO: 230740 - protein, 343 aa, unidentified
MGEISMIGLDLAKNVFQVHGIDASGAVVVRRQLRRGQVEKFFAQLPACTVGLEACGSAHHWARVIGGYGHQVRLMPPAYVKPYVKRNKNDGRDAEAICEAVNRPTMRFVPVKSVEQQATLAVHTARALLVRQRTMLANSLRAALSELGIVAAQGIKGLRELMVKLEAPNQEIPEMMRGALLMLAQHWQALDVDERALEKQVAKAARGDGEARRLMEVPCVGPIIASVVLAKVPDARVFRSGRDFAAWIGLTGRDHGTGGKHRPGRISKQGDRMLRALLISGASAYLRHQRTRGVSDPWLRDLLGRRPYKVVMVALAAKTARILWAMLVKGEPYRDRASASAAA

SEQ ID NO: 230741 - protein, 362 aa, unidentified
MKSMEITAVGIDVSKRKSTVAIRRPGGVIVACPFDISHSSHDLEKLVSILKTTGGDIRVVMEHTSNYWKPIALTLKNAGFYVSVVNAMLIHDFSDNSIRKLKTDRADSLKIANYALTFWNQLPPFNDEDETRLVLKEQSRMYERLASTATSLRNGLIALADQTFPSIDQAFGHAIKNADGHEKWVDFFSIYWHRDCVLRLSIEKFTESYRKWCLRRNYKFRTNTAHKLYALAQDAVPTLPKNNGTKALVLQACKSLNAVCEAKQSTQEEMNRLASLLPEYEVVMQMEGTGPITGPALMAEIGDVRRFKNKKALVAFAGIDAPPFQSGNFESKSRHVSKRGSTSFEAHCIPCSKYYSNLIPQR

SEQ ID NO: 230742 - protein, 390 aa, unidentified
MIYVGIDVAKDKHDCFITNSDGEVLYKPFTIQNNGEGFDKLYERIRSVSNDFSKVKVGLESTGHYSYNIQGYLVKRGLTIYPLNPLHTNLFRKSQSLRQTKTDKVDARTIAYLLMSNVNLKSYSETSYHNEELKSLTRYRFDKVRERAKLKVAVSRLVCILFPELEKLVPSLHLPSVQALLYEFPGAAHVANAHLTRLTNILKEASRGRYDKNTALTIKAAAKSSIGLNMPAKSLELKHTLALMKELDKEIQEIENEIKLIMDKLESPILSVPGIKYRMGAMIIAEIGDFARFENADKILAYAGLSPSTYQSGKLDSCYSHMEKRGSRYLRYALFNATKLVCMYDPKFREYLNKKRAEGKHYNVAISHATKKLVRLIYALETSGRQYITA

SEQ ID NO: 230743 - protein, 331 aa, unidentified
MKIKEALGIDVSKKTIDVVLYLNNSSSEFENSVKGYKAMLLWTKKHSELSINQIIICFEHTGLYSLPLSVFLSKQEILFSMMPALEIKRSLGIVRGKNDQIDAKRIAEYAYLRREKLKAFELPSENILKLQKLLALRERMVKQRAGYKGSMKEYKCMLKQKDCESLFTIHNKMIHYLSKQIDALEKEMTDLIKTDKKMIKLYNLIISVKGVGFVVASNILVMTNCFTSFKDSRKFACFAGIAPFDKQSGTSLKMKSKVSHYANKKMKSLLNLSASSAILADPELKAYYQRRVEEGKSKMSTLNIVRNKIVHRIFAVVQRGTPYVPLYKHAV

SEQ ID NO: 230744 - protein, 465 aa, unidentified
MSTDKKLWRNRKAKKELARRLQSENPGLEVVHPHAAGIDVGNGSHYVAVRPDRDPHPVRRFECFTADLYRLAEWLQSCGVQTVAMQSTGVYWIPLYDILEERGFEVYLVNAQHTKNLPGRKSDVQESQWLLKLHTYGLLNNSFQPPSKIRILRTYWRQRLQHVTGAATCVQRMQKALTQMNIQLANVISDLSGVTGQLIVRAIVAGERDPWKLAELSHPRIQASRTEIAKSLEGTWRPELIFIVQQELEMYDNYQRRVAECDEQLQKHLAGFADTVPPPVKEDLPPKKKKKQNKNNPHFHLADELQRITGVDLTRIDGVDVIVAQTVISEVGLDMSPWKTEAHFASWLGVCPDNRISGDKVLARRTRHVLNRAATALRLGASTLLKSQTYLGAQYRRLRSKLGAPKAITAMAHRLARLVYRMLKYGQQYVDNGAEYYERRNRQQQIEFLRKKAARFGLQLTPAQS

SEQ ID NO: 230745 - protein, 425 aa, unidentified
MNHSTNHKINQVTEKTLVIGIDIAKKKHYACGIDERGRVLQKSFPFLQNIEGFMEFLQKVLKVQSDHEKKDILVGFEPTGHYWMNLAAFLTKHDIRFVLVNPLHVKRAKELDDNLQTKNDAKDALVIARLMKDGRFSFPRILEGVEAELRNGASFRIKLQEDIAALKNRIIRWTDRYFPEFQYIFKDLGKNALAALEKTPLPIDIQGKDIDELRTLYREVEGLKCVSTPKVRQLQYYADISIGLTEGMMMARLEIASLLEQYKVLRNHYEAVTEELNKLAKEMTDYEFLHSIPGIGENTVAELLSEVGPFTKYVHPRQLIKLAGLTLRENSSGAQKGQKKISKRGRKKLRGILFRAILPMIRYNSAFQSLYEYYISRPLNPLRKKEAMVVLCGKLLKIAHALCHKKCHFNAQHMMKDLYCLEAVA

SEQ ID NO: 230746 - protein, 310 aa, unidentified
MDRIIVGIDVSKDRLDVAVRPSGEAFAVSRNAAGIEQLVARLRKLSPHIVALEATGGFETVVVAALGAAGLPGAVVNPAQVRAFAKALGQRAKTDPIDAGVIAHFAEATNLEPRPLPDEQTRLLADLVARRRQIVAMIGAERQRQQRLTAPRLSKSIARLIKALEKELASLDADIGDAVQGSPAWRAKEELVTSVPGIGPVISRTLVADLPELGQIGHKQITALVGYAPFTRQSGKWRGKSFIGGGRTAVRAAIFMGAMVAEKHNPVLKAFFDRLVAAGKPKLVALIAVARKLLIILNAIVRDNRPWQNA

SEQ ID NO: 230747 - protein, 450 aa, unidentified
MSRPQVIDDEDHERVHDRVAAVDVAKDSGMVCTRTPHPSRPGARRSTVWTVKARMKAVRGLGRQLKRDGIELVTLESTSDYWRIWFFVLEACGLEVQLVNAAQAKNLPGRPKTDKLDAQWLARLTEMGLLRASFVPPKAIRDLRDYTRARTRLIHERTRCWQRLEKLLESALVKVSSVASKLTTISAQDMVKAMIAGQRDPKVLAGLARGRMKARHDDLVEALDGMFDDHHGELAQLLLDQIAFLDGPIAALTARAAALTAAMPEAWGVDADGTTGPGAGTAPGAPVLNAVTRLAEIPGISEDLARAIIAETGLDMSRFPTAARLVSWAGLCPSARQSGPRTRAGKKGQGNGYLRGSLGQAAIGAARTDTFLSERYHRIARRRGKAKAQVAVARSILIIIWHLLADPAARFTDLGPGYYQARTDKDKKIKNHIRQIEALLGHPITITNAA

SEQ ID NO: 230748 - protein, 410 aa, unidentified
MPVQHAVQVSPLTVVVAIDVGKNEFAMSVTDASRNRLLKPLLGCPMTASSVRDVVAKITGLLPVGAAVKIGIEAAGHYHLPLLAPLVWPCGWELLELNPGHVSEQRKVLGKRTIKTDAIDLEAMTELLLAGRGLPVGHREAVLVELAAWAGHRSRRVQIRTATKNQLLGQLDRTFPGLTRALPDVLATKVGRLVAAEFADPTRLAALGVNRFIRFGATRGLQIRKPLAGKLIAAARDTLPMPDAAVARQVLAADLVLLADLDTQIEAAATELARLLPLSPFRTLSTVPGWGPVRAGNYAAAVGDPGRWPGPKQLYRAAGLNPIQYESAGKRRDFTISREGSVELRRALIDLGLGLWLNDPAAKQRAAGLRARGKKGGVIACAMAHRANRIAFALVRDQTNYDPKEWITHD

SEQ ID NO: 230749 - protein, 360 aa, unidentified
MSFNGTSVGLDVHALSVVAHAVDESDGSTSRARLCPDHGEILGWLGQLRGPVRVTYEAGPTGFGLARALADAQIECVVAAPSKLIRPAGDRIKTDARDAAHLTRLLRLGAITAVSVPERDVEAVRDLVRAREDARADLMRVRHRLSKLLLRQGRVYSGGQGWTGLHEIWLRRQRFDDVHTTSAFEHHFDAVLNATTARDRLDEQIVAVAASPRWADAVDRLGCLRGISALTGLALSVEIGDWSRFTGASIGAYVGLVPTEYSSGASRVQGAITKAGNAHVRRLLIEAAWHHRAAYRNPGPTMRARWVKVDPALKARGHAGNRRLHQQWCRFLERKKNPLVANVAIARELAGWCWSLATLN

SEQ ID NO: 230750 - protein, 479 aa, unidentified
MIKSVGIDLAVTGEHKVRCLDERAQPCDGFSFQATSEGLAKLEERIFGHGSNPVIIFEPTGLAWLIVAIYLKARHPDCRLVRVQGRKVVALRKYLRRSSKSDKIDALTLAKMSFIDSEQLEEVYLPPAKIYAMHRLARQRKRLESEIAARKTRIGSIVDGYFPGIRQAFSDPWSAHARAFLRSRLNPVSVVHASEKTLHAFLTKERRHGKADAAESHMVYLSCKDAATIYELSRPVGTIDDDFFADLQEEISRELRIMEMEEAESDAIAKRLEQLYLELHPSDNLRTIPGVGEHTAPIFLATVGDPARFRSQSAFANYSGVVPAAKQSSNAEAKGLRMTKAGPATLKWALYQSGQIGRRCDPQLACVYYREMVHHGKNHKQAMGAVMSHMGARVLAVLREDKPYELRDMQGKPITREEARKLILSNFQVPEEIKRERRRRKATSSSTKPRRKNQEMAAHRTNEAAVAPQPVVTVAISRT

SEQ ID NO: 230751 - protein, 315 aa, unidentified
MNEKVEKFVGIDVSKATLDVCIDPLGQTLQVAYDEAGVTQLVGHLERIKPALIVMEATGGLEVRIAAELAGKGLPVAVINPRQARDFAKATGRLAKTDQVDAAVLAAFARAIRPQARALKDADTRALDELVTRRRQLIDMRVQETLRLGTAASKPLQNSLRRHIAWLDEQITDVDRDLTQRLRGSDAWRAKDDLLRSIPGVGAVTALTLLAKCPELGALSRREIAALVGVAPLANDSGKHRGRRLVWGGRAEVRAVLYMATVSAMRCNETIKAFAKRLKKAGKAPKVVIVACMRKLLTIMNAMLKNNTPWNPQIA

SEQ ID NO: 230752 - protein, 393 aa, unidentified
MIEQYDAAHSGRGLEALVDRLRKTCRCLPEEVGIAIEVSWGAVVETLAEAGFSVFSMNPKQVDRFRDRYTVAGAKDDSRDALVLASALRTDRKSFKTVQADDPEIIRLRELSRLEEELKNELRPATNQLWEQLHRYFPQILKLSSGADDLFVWDLLSKAPTPAKAAKLTSTRIGQILARHRISRFTTEQVVAILMEPSLQLAPGAAEAASEHILFLLPRIILLDQQVRDVERRIAGLLKALPENVDGSSGKSRDVDLLLSLPGLGTIIAATILSEASGPVRERDCHALRCYAGTAPVTKQSAKRRMVSMRHACSARIRQAVFHWSSRSIMFDSQSRQHYDRLRAAGHTHSRALRGVTDRLLPVLIAILKSGIPYDAGRRRMSNRQTNRALAMT

SEQ ID NO: 230753 - protein, 388 aa, unidentified
MIYVGIDIAKLNHFAAAISSDGEILIEPFKFTNDYDGFYLLLSKLAPLDQNSIIIGLESTAHYGDNLVRFLISKDFKVCVLNPIQTSSMRKNNVRKTKTDKVDTFVIAKTLMMQDSLRFMTLDDLDYIELKELGRFRQKLVKQRTRLKIQLTSYVDQVFPELQYFFKSGLHQNSVYALLKEAPTPTAIASMHMTHLAHLLEVASHGHFGKEKARELRVLAQKSVGVNDSSLSIQITHTIEQIELLDSQLFHTELEMANLVTCLHSVIMTIPGIGFINGGMILGEIGDIHRFSEPKKLLAFAGLDPSVHQSGNFQAQRTRMSKRGSRVLRYALINAAHNVVKNNSTFKAYYDAKRAEGRTHYNALGHCAGKLVRVIWKMLTDEVEFNLE

SEQ ID NO: 230754 - protein, 405 aa, unidentified
MNRFAGLDWASRTHAVCVIDDGGAVFDRFEVAHDAAGLRELLARLHRCAALPAHLPIAIERPSGLIVDTLLEAGYPVVPIHPNIVKATRPRYRSHGAKSDASDAYLLADLLRTDGTRFHPLQPQSDAIRALRALVRGRDDLVATRVQLANQLRSLLESFWPGAAGIFAEIDSPIALAFVQRYPTPASAARCGEKRLAAFLAQHRYCGRRTPAALLERLRAAPPAHTDELETDAKRTLVQALAASLTTIVEQIAQLTARIEHTVADSDDGQLIMSLPRSGQVCAAQILAELGDVRDRFPTDAQLAAEAGVAPLTYESGKSRSVTFRWACNHRLRRAITCFADNSRHASQWAANVYAKARARGCDHPHAIRILARAWTRVLWRMWTDRCTYDPTRHRAALALNTAGG

SEQ ID NO: 230755 - protein, 395 aa, unidentified
MFIVGIDIAKRSHEAIIIAEDGQVVRKAFSFRNNCTGYNLLLEQVRRLTLVKSQIVFAMESTAHYWLALYARLLKDGYTVMVLNPIQSHSLRELYIRKTKTDARDSLIIADLVRFGRCKASNVPQDKILALRELCRSRAYLVDMAADLKRKLIALLDKIFPEYESLFDSVFSKASIAVLSKYSTPPKVKNANLRKLTDILMESSNGHFGEWKAHQLKEAACSSFGIDDSGGVYSTLLGMFLEQILSLTAQADSLEKQISVFFQEFNNPLTSIPGVGTVLAATILSEIGDITRFSSADKLLAYAGLDPSVKQSGEFKSNQNRMSKRGSPYLRRAIWLASTVAVHRDPMFQTYYEKKISEGLHYMNVIGHVSRKMTAVIFAVLRDGQPYQPVLQTAD

SEQ ID NO: 230756 - protein, 357 aa, unidentified
MTKLQQFADFSGQTIYVGIDVHLKNWDVSVFFNREYIRSFHQEADSDRLAKTLKRDYPKAAIVCAYEAGFSGFWLQRDLTATGIKCIVVNPGDVPQTDKDKKTKTDRRDSKRIAQSLEAGQLQAIYIPEALSEGDRRLVRYRQQVLNDLTRNKNRIKHFLYQKGVKFPSQFKKNNWSKMFFQWLKELNLEFEYERYSLDMMVANVEIQRSQLISLNKKIYTMIKNDRYAKTAGRILSVPGIGPLTTATLLAEINDISRFKAFVNFNSYIGFYPGEHTSGESERKGHIIGRHHTSLRALFIEAAWRAVKIDPALTLVFSELKKRMTGNRAIIRIARKLLSRVYHVWTKEEQYEKGIMI

SEQ ID NO: 230757 - protein, 411 aa, unidentified
MEVIHARCAGLDISKKDAKVCVRVAGAGRRKTVETVTTWGSMTSQILALREHLIAERITCAVMEATGDYWKPFYYLLEGAGFEVLLVNARHVKNLPGRKTNVADATWLAQLGAHGLVRGSLVPPEPIRQLRDLTRARTAITRERSREVQRLEKLLEDAGIKLSAVASDILGVSGRAMLESLIAGNRDPAALADLAKRRLRSKIPALTEALTGRFTDHHAFLARVHLNLIDQHTAAVADITARIEATIKPFHWFRDLICTIPGISTLTADVIIAETGADMTRFPTAGHLASWAGTTPGNNESAGKVKSSRTRPGNPYLQGALGAAAMACAQNPVTYLGARYRRIAARRGPQKANVAIQHSMLIATWHMATNGCLYHDPGADYFNQLHPERAAKRAISQLEAMGYHVTLTRAS

SEQ ID NO: 230758 - protein, 375 aa, unidentified
MTFKEWILDIKERHEKDKVVLGMEPTGHYWFNLGKFLQDNEMKPVLVNPHHVKKSKELDDNNPTKNDRKDPKVIAGLVREGRYMIPYLPDGVYADLRTASNIRFQLQAELTRIQNRISRWFNIYFPEYKTVYGKPDAKSGILILKAAPLPEDILTLGIDGVNQIWRDAKLRAVGKARAKTLIEAAEHSVGSKEGAVAARMEIRMLLEDYESRSIRLQEVMTLIEGLVKQIPMAEKLLEIKGVGIRTVSGFLAEVGDISRFNNPKELQKLAGLALVENSSGKHKGETTISRRGRKRLRYLLFEVAMSLVAKNPEFRELHNYYTTRRLNPLKKMQSLMAIAAKLIRVFYAMLTKGVDYDPKKMVSDIKRPAVYLQAA

SEQ ID NO: 230759 - protein, 345 aa, unidentified
MPIVGGLDIHRKQITFDYLDTGTGELRRGQIAPADREHLAGWLAGRFTGQDAHFAVEGCTGWRYVAEELAAAGAVAHVAEPADTAALRGRKRHAKTDKTDSRHLRVLLADGRLPECWVPPPHILECRALLELYHDLRTGHTAWVQRIHAVLFHQGARQLGEQRLRTGEGLAALRAAAAQLSPAGQLQITVALDMLQVLEGHLDALRRRLIEAARRLAGARELHARLYGVGPVTALALCCWLGGAGRFSSARKAVRFTGLDVTVYSSAGKRSPGHLSRQGPEVLRWCVYEAGKTHARRCAPDHAYYQQVKDRIDGKRAAISEARKIIRQAVHILGELGDDALTMDP

SEQ ID NO: 230760 - protein, 417 aa, unidentified
MFKIFRKNCCGLDVHKTWIFACIGITDTNGRTEYKQARFSSFSKGLKELSDWLAKYSCIEVCMESAGKYWIPVFNVLEKNYLVTLAHPKYTKPQRGNKTDRKDAKWICDLFMCDMIKPSFIPSPQIRHLRDLIRYRSKLTNMLTGEKNRTHNCLTVSNLKLDDVFSDIFGKSSRSITNYLLDHPGETFDVALFVDGRCKTPIEEIQAAVDGAISPEQAIKLRECLSHIDELDAHKEKIEQEILLVVKPFSAALDLLRTVPGLDSNPMTAITVMSEIGPDMSAFPSSKNLVSWAGCCPRNDKSGGKVKSTRISRAGCYLKPLLVQVANALIKSKKHPEFKERYHRIKTRRGHKKAIIAVCKMLLTAIWNILSKLEPYTQKGFLEHRPVNESKILTKVQALHLLRKRGYTIIDDSVVTT

SEQ ID NO: 230761 - protein, 370 aa, unidentified
MTEVKGEQTSVLRNRPWIGMDVDKERFAAALYADPRPGTPDLRSMPTKIFTRDAEGVAACVEWAGKTLAKIRPGSPAPRVCMEATGRYSIDLAREILRQRPEWEPAIANPRFVKKHGESMGQRCKSDKADARVCACYGADRQPRPYQAPQPAFEQLQELARERRAIVEQRAALKNRMADTPTSKIARRTREQLMKQYDKLVEKLDAAIARTFEEIPQLRADAQAVAQIPGVAEVVSSVTLSELGDLRNYRRSRSVAAAVGANPRVIESGNHKGKTRMSKQGNSRVRAILYCAAMACLRTRNDHCLKRFYNRLVERGKTHMQALGALMRKIIVLMRALVISGQPFDPDYDLKKHLCTASPEKELQPVDNLA

SEQ ID NO: 230762 - protein, 346 aa, unidentified
MKKLSKMPTRRGETVGIDLGDKVSRYCIVDHAGEVVEEGTFRNQARSIDHHFGDRPRRIALEAGAQSAWISREWKRLGHDVIVANPRQLKWITSSDTKNDPVDARKLALLARADLRLLAPVEHRTAEQQAELAVIRARDAILRARTLLINSARSIAKGFGVRLPKSITGTFGARALEALPEFLRLALSGLLQQLDAISGEIAGYDRQLAGQHPELARLESIPGVGRLTAMTFVLTLGRAERFAHSRDIAGFLGLRPKQRQSGARDPQLGISKSGDPYRRKLLVQCAHHILGPYGKDSALRQWGLAKSEGGKKATLRAIVAVARKLSVLLHRLWVSGEFYKPFPKMA

SEQ ID NO: 230763 - protein, 371 aa, unidentified
MKQQSKSSHITVGLDLGDRRHRFCALDERGEVVEEGTICNERDSLRKLAGRYHGALGVMEAGAHSPWISRFLEALGWRVVVSNPRKVRAIYQHERKSDQRDALMLARIGRMDLALLYPVRHGTAEAQQDLLRIKLRDSLVRARVAVINSVRFTLKSLGYTVRNPSSERFHKVVMEEVPESVREMITPSVQALAELTARIKMLELEINTLAQMKYPQSAQLQQIPGVGPITALYFVLKIEDPNRFAHVRDVGAYAGLCPRRDQSGESDPQLRISKRGDAYLRRLLVSAAHYILGPFGPQSALRAYGLMLAADGTARAKKRATVAVARKLAVLLLSLWKSQQPYQPFPGACLNGEQEDRRSGTIALHRMEATD

SEQ ID NO: 230764 - protein, 375 aa, unidentified
MKENLRFLGMDVHAETIAAAIAEPDGEVRSLGTIPNRMESVRKLIKKLGAVEKLRVCYEAGPTGYVLYWQLAELGVQCEVIAPSLVPVKAGDRVKTDRRDAEKLARSYRSGDLTAVWVPDAGSEALRDLVRAREAAKQDELRARHRLGKFLLRSGHRPPSGVRAWTHLHLIWVSQIRFAQMAQESTRLDYLHEVEHMRERVLRLEQAIAEAVKLASPALQEVITDLQALRGIAQISAVTIAAELGQVSRFDSARQLMGYCGAVPSENSSGQRTRRGSITKTGNAHLRRIVVEAAWSYQRPPAIWAGLRKRQQSASDEAKEIAWKAQHRLHKRYARLAAKGKDKRKIVTAVGRELLGFIWAIGTKAEATVRQRIAA

SEQ ID NO: 230765 - protein, 341 aa, unidentified
MRKTLFCGVDLHSNNAMYVITDQRDKQLLRKRLPNELPVVLKTLAPFRPRLKVVAVESTYNWYWLVDGLVDHEYPVVLAHPSEMEQYNGIKEADDLTDAAFLARLARLNILPTGYIYPKEDRPVRDLLRRRMLVVQHRTGVILSLQNMAERQTGQKVGWRTLRKLSDAERADLLGDHDCLAFVTAEQVELIELLSEKIKRFEQKVLEHAQLRPAYTCLQTLPGVGPILALTIMLETGDIGRFATVGDYTSYCRCVRATHTSNGKKKAHNNGKNGNPYLTWAFVEAVHHALRTCPQAKSFYDKKRAKRNGALATKALAAKWSKAAYYMMKRQESFDLTRVFG

SEQ ID NO: 230766 - protein, 433 aa, unidentified
MGNCAGVDWASEKHDVLIADASGNELFAGTFAHDESGITSLCAVLIKRDVELVAIERPDGLLVERLLETGIQVLALHPNQVKAARDRFRASGGKSDRFDSFVLCELARTDRHRFRLLEPDSDQTKALRALTRAREDLVAARVAMANQLRAELERFWPGPVGLFADLDSPISLAFIARYPSPADVKGLGEKRLAGFLKNHGYSARKTPAELLERLRSAPAGRAGNVETRTRRSIVLRLTGTLQIMVEQIRELESEIAETLDAHPDGEIFRSFFRTRTSVICAATLLAEIGDCRARYPHRDAIAAQAGHAPVAVESGKRKHAKFRWACNKRLRRALDTVAMSTGRWNPWAADRYAQARQRGHNHRRALRTVGRAWSRILWRCWHTRTPYDPARHTGLQQHITVTIPSPPGPRPDHTATKRIAPKLARHASEPPGG

SEQ ID NO: 230767 - protein, 347 aa, unidentified
MRFYNNQHKYYCGIDLHTRKMYVCIIDEKGEIREHRNLKTDRDAFLKAIAPFREDIVVAVECIFTWYWVADLCHNEGIPFVLGHALYMKAIHGGKAKNDKIDSQKIAVLLRGGMMPMAYVYPSKMRATRDLMRRRNHLMRKRSELFAHIQNTNSQYNLPDSFGCMARPKNRDGIIEQFKQPSVQQNIAVDMEMINTYDSVLSQLEKSIVKLANHHDPVSYALLQTIHGVGKIIALIILYEIENIRRFETVQDFASYSRLVKCAKESNGKKSGSGGSKIGNAHLKWAFSEAAVFFINGNDPAKKYLDRLTNKHGKSKALSILAHKLGRAVYFMLKNKEAFDQKKFLTV

SEQ ID NO: 230768 - protein, 366 aa, unidentified
MKKVSTTAARQINNFCEQKLTIGLDLGDRSSWYCVLDEAGGVLLEQKLSTSPQAMREVFGAMPRSRIALETGMHSPWVSRVLNELGHEVIVAHARNVRLIGESRKKDDRLDARTLARLARIDPQLLCPVKHRSAKAQADLSVIRARAGLVRARTALVNTARGLAKSYGERLRGCNVRNMNPEKAERLSPELQAALQPLLAGIESLSERIRECNEGIERLAQESYPQVELLKQVKGVGTLIALTYLLTLEDPHRFRKSRDVGCYLGLQPGRRNSGQSEPQMHISKEGDPYLRTLLVQGAHHILGPFGVDSDLRRWGLKLAERGGKNGKKRAVIATARKLAVLLHRLWVSAEVYEPLRNSNQRAMAAA

SEQ ID NO: 230769 - protein, 461 aa, unidentified
MHDDSSILASPGQACGRQKTSNKPHAKTMNTPHPYDLIIGLDRSDKKADLCLITTATGQRRSQIIDTAPEALWEWLLQLRQEQPQARVALCLEQPAVHLVAFLESYAWITLYPINPITLQKYREAFVTSRAKDDAKDADYLADLLLTHHAKLKPWAPEDGQTRALQQLVYHRRAVVDERTGLTNRLIALLKQYFPQALVLCGDDLWRPLATRFLLKWTSLQAVQKTKPATLKQFYYLNGSRSAKLLEQRLALVAKAVPVTDEPALIASFALRVQLICRQLQLVQQTLANYEHQIAAAYAAHPDQVVFASLPGAGPVLGPRLLASLGSQRERFGAAADLQHYSGIAPVTKKSGGSCYIHRRYLCPKFHKQSFHEFAKESILWSRWSAAFYLQQRTKGCPHHTAVRALAYKWQRIIFRCWQNHTPYQEEIYEAALRKHGSALVNLFDRVELGKSPFKNPMKNS

SEQ ID NO: 230770 - protein, 339 aa, unidentified
MKNIRYFIGLDVHKKSTTYAVRDKIGKIVTDGETATLYYELSERLGPYLKSSLIGLESCTSYYALYQHFLKNKHNIKVANTIQLRQLITKNDKLDAKRLSEMLRLGTFPCSYIPDEHIQHLRSLLQVRHSLMEEKNRCNNRIQALLDRNGIVMPDQEAFGKKWRQQLMQYIGSGEISLELRYEYDHFVYLEKQAEHLGQEISGYTMKHWKSEYMLIQTITGFGPVLSCYIIAHIHPITRFPSNRKLRRYAGVVPAFHDSGEKKSKGHIPKTSSRKQLRWALIQAANAAGKTNTKLGRYYRKKKKQKNNAGIAHVAVASSMIDIIYKVLTTKKPYSPRVC

SEQ ID NO: 230771 - protein, 430 aa, unidentified
MKSNTQNKKIEAITEKTLVIGIDVGSETHYARAFDYRGIEYSKKPFSFSNSEAGFEMFKAWISDIKGKHEKDKVEPGMEPTGHYWFSLGKYLQDNEMKPVLVNPHHVKKSKELDDNNPTKNDRKDPKVIAGLVKEGRYMIPYLREGVYADLRTASNMRFQIQSELTRIQNRISRWFNIYFPEYKTVYGKPDAVSGMMILKQAPLPEDILTLGVEGVNQIWRDAKMRAVGKKRAQVLIEAARHSVGAKEESMAARMEIRMLLEDYESRNNRLQEVMTLIEELVKQIPMAEKLMDIKGVGIKTVSGFLAEVGDVSRFSNPKELQKLAGLALVENSSGKHKGQTTINRRGRKRLRYLLFEVAMSLVAKNPEFRELHNYYTTRRLNPLKKMQSLMAISAKLIRVFYAMLTKGVDYDPKKMVSDIKRPAVYLQAA

SEQ ID NO: 230772 - protein, 318 aa, unidentified
MNNSKTQEFVGIDVSKATLDVCLRRSGQSWQERYDEGGVEALVGKLVELKPALIVLEATGGLEVSIATALAAKGLAVAVVNPRQVRDFARATGQLAKTDRIDAAVLAAFAEAVRPEVRPLKDEQTRALAELVQRRRQLVAMRVQEMLRLQRAASKELEKSLKGHIDWLAGEIEKLESALSEHLRASQAWRVKDNLLRSIPGVGKVTSVTLLAKCPELGTLTRREIAALTGVAPLARDSGGYRGRRFVWGGRGEVRAVLYMATVAAMRSNAVIQGFAQRLEQAGKPSKVVIVACMRKLITIMNAVLKHNTAWNPRTACA

SEQ ID NO: 230773 - protein, 327 aa, unidentified
MTETAFCEGFCSLGIDVAKAKLDCAISMQGKWRHKVFPNNAQGFESLLNWLRALTDTPVRVCLEATSTYWEGVAQWLSDAGLHVSVINPALAKAHGQALGLRSKSDKVDAKALSLYGTQMQPRPWVAPSLAERRLRALVLRYQSLMDMQSQERNRTETARTDVLPSLQAHLQWLADEIKRIEAQIRQTLDDDSDLTSKRELLQSIPGIGEKTLAVLLAYGMTDERFTHARQFVAFAGLSPRIHESGSSVRGRPRMSKVGHTALRRALYMPAMVTLYRTDWGRLFRQRLAANGKAPKLIIGAMMRKLAQLAFGVLKSGKPFNSALHGV

SEQ ID NO: 230774 - protein, 398 aa, unidentified
MRRIWAGTDCGKTHHHCLVLDSEGDTLLSRRVANDEPDLLKLLGDVLDLADGKSVTWALDMTGGEPALLIALLINHGQELVYIPGLAVNRASDSYRGQGKTDARDAHVIADQARMRRDLQPIRPHDDATVELRLLTERRVDLVTERTRTTNRLKALLTSMFPALERALDMGATGALTLLTGYQTPAAIRRTGLRRLTTWLTNRKVRGAEALAAKVVETAERQHTAVAGEAAIARMVLTLAKEVITLNEKIRDTDKLIEARFREHELAEVIQSMPGIGPILGAEFLVGIGRSLEAFPTPDRLAAFAGVTPAPRDSGKVSGNLHRPQRYHRRLQRVFYTSALVSIQFDPNSRKFYDRKRAEGKRHTQAVLALARRRVNVLWALIRDRRCYQVTPPVTATA

SEQ ID NO: 230775 - protein, 420 aa, unidentified
MKAKKKAKLDLVDDDTLVVGVDVGKRNHYCRFINVRGYEIGKGFSFSNNRDGMEKIISKIEEAKIQNNLVKAVIGLEPSGHYWKPAAHYLSGSGYKLALVNPYHIKRIKEIEDNSQTKTDPKDSLLIAKLLRDGDFFNPNLAGGTYAELRRMFRLRLKVKKSFIREKTKLKALLDEYFPEYQDLFCDILGATSEYIIDNYFLPESVARENILSLTGKIKMISRGKIGASKALKLIERARASIGINTGIDAAVLEKTYILESISNLKLKLACLNKKLKYYLDKIECSKYLLSIPGVGVVTAAGFLGEVGDISKYRSAKEIIKLAGLNLVEISSGVKKGKKKISKRGNDRLRCLLYQCAIVAISKNSQIKKYYSYQAETKNKMKMVVAVQCKLARIMFALLKYKKYYDPEEVLKSMVAQEVA

SEQ ID NO: 230776 - protein, 400 aa, unidentified
MNIIGIDVSQGESHATLITKEAEEIAFKFKHNKSGFQILNSYIKPGTIIIFETTGVYSAQLTTYLKNKNVKFYELNPLEAKLRMASLRRNKTDKNDSFKLALLGKTQLAEIKNHCNKQSNSLYESLRILSLRYKQLIKCRTRILNFLRSSLELTFPELNQIFKNAYAVLALQVFRMYCHPDFLVGLTLKEMTTRVYQSVSRRIHKDVIQSYCAQVWLAAKDSYPAVPANSLEIEIISEYCDEIESYNKEIAYIQNKLIKTAVGLDDFKAISSIPGVGQLNSTLLLGFTGDIARFDNYKQLNAFLGLDLNRYQSGKYIKGDTINRRGSSQGRAVETDMIRSMLRNQGKIQNHLIDYYYKLKKPPFNKHDKVALIACANHLNRTIINLVHTHQLYNYSKAIN

SEQ ID NO: 230777 - protein, 339 aa, unidentified
MELYVGIDLHSNNSVLVILDETDKVVYERRHPNELPVILAQLAPYKESIQAVAVESTYNWYWLVDGLMEAGYNVKLVNTAAVKVYEGMKYTGDEHDARHLAHLLRLGILPCGHIHPKEDRAVRDLLRKRGQLVRYRTMQILSIQATVSRNVGHGLSTAEVRKLDDVEIDRLCGGEAPRALAIKSNLMTLRCLDAQIAEVEALALQKAKLKPEFKKLLTVDGIWEILGMTIMYEAGDMKRFEKVGQFASYARYVGSSRWSNGKKKGEGNRKNGNKYLAWAFIEAAHYAVRYNERIRKFYQRKKAKTNNIVAAKAVAHKLARACYHVLKEQAPFDEARAFA

SEQ ID NO: 230778 - protein, 369 aa, unidentified
MEKASTYVGLDVHKDSIDVTIAEAGAAGEVRHFGTIGGDLEAVAKLVRRLRRKDRELRFVYEAGPCGFEIYRFLREQALSCAVVSPSQIPRRAGDRVKTDRRDSESLARLYRAGELAAVYVPEPDDEAIRDLARAREDIKRARQKARQQVHALLLRQGKRYAGKCAWTLAHRRWLSDLRLDHAAQRIALEEYLAVVDEATARLQRIEDSLLEQVTTWRFAPVVAALQALRGVDTIAAIILVTELGELTRFDSPRELMAFLGLVPSEHSTGSRRRLGAITKCGNAHARRTLVEAAWAYRHPARIGRRLLNRSEHLPATLRAIAWKAQLRLTARYRRLAARGKPHQVVVTAIARELSGFVWAIARSRAALR

SEQ ID NO: 230779 - protein, 362 aa, unidentified
MLQSTTIIAFDQHAATTVAAVLLAGQGTPALHSLSSDSATILRFVERLRREGAVQCCYEAGPCGFELQRALVGHDVPCDVIAPALIPRRAGDRIKTDRRDAGQLAILYRAGALTPIHIPTAEEEAARDVLRCREDIRADLLRARHRLSKFLLRHGRRFPGPKKAWTTRHGEWLRTQVWPLAALEQTYTAYLRAVDEAGARLRTVELDLRALLELPSLRPRVDRLRCFRGIDDLTALTVAAELGDPRRFPTAPKLMAFVGLVPSEHSSGTKRARGAITKTGNAHLRRVLVEAAWHYRHRPFVGQALRRRQCGGPEAVIAQAWAAQQRLHRRYRRLAGRGKPTPQVITAVARELTGFVWAALTR

SEQ ID NO: 230780 - protein, 355 aa, unidentified
MDRVIIGVDPHERSVTLEARDTREVLRVVGTLPTTRDGYRALRQVARQWPDRIWAIEGANGTGRPLAQRLLADGERVLDVPAKLAARARVFDTGQGRKTDATDAHAVVMVALRDGGLRELTVDDELVVLRMLCDRRDELSKARAQGLNRMHRLLTELVPGGVPTKKSVSQYRAMLAGVRPRDQLGRTRRRLAADLLAELAQIEARLTTLKAELKQAVLARGSDLMNIYGIGPAGAARILADVGEVARFPDRNHFASWTGTAPIDASSGEQIRHRLSRAGNRRLNHVLYMAAFVQLRHDTDGRAYYRRKLTTGKTPMEAMRCSLEEYRQRGRARCRAVALGRVGGWPRCRARSGPV

SEQ ID NO: 230781 - protein, 421 aa, unidentified
MKAWNEVTHFAGFDWAKDHHDVLVLDNAGKIVAELRFEHTAAGWSLCQQKLAAFPHLAIAVESGHGAAIERLMVLGYRVYPVHPRSSKSYRTRKLPSGTKTDHIDCWALADALRLEGESWHMLNTPEPLVQQLRLLCRDKVALIEQRTALINQLQQALYEYYPAALAAFDDWTSLSAWAFVARFPTPQALVKAGKRQWEKFLHTQKLYHPEWYQKRLAIFAKADEFCGPEAVTAAKSVLATALVKLLQTLELQLASYRLLITECFKQHPDYHVFSSLPGAGPKLAPRLLAELVALQPLADQPQVLQCLAGMAPVSYQSGKVSVVYLRRQCNRFLRATLHLWVDLSRHYCDWARIYYEAHKKKGQSHACALRCLGMRWLKILAAMIRSHTPYDAALHARSQLQHGSWVLQLQPKLSITKDAS

SEQ ID NO: 230782 - protein, 348 aa, unidentified
MLHVGLDLSRKRLDYCLLDQQGDRVEVGGVPPDADGLRGFARGVEDRHGPVVVCAAIESMNGARFVHDTLERCGWEVEVADAQKVKGLAPLACKTDRIDAWVLAELSRRDLVPAIWLPAFELRQERERARWRLFLVRKRSSLKHRVHAQLLAFGHTCPVSDLFGVKGRKLLERLDFPDPWRGGVLAALAMIDELDDEIGQIDRELKALGADHRYIPLLQTVPGIAWVLGYTIAAEIGDIHRFASPTKLCGYTGLCPRVYQSGNTDRRGPLTHAGPKYLRWALMEAAIHACRHEIYRDRYQRNKQRLGKQRGAKVAQVDIARRLAEAIWQMLSRNQPFAPAGATRALAA

SEQ ID NO: 230783 - protein, 338 aa, unidentified
MQGYKLTIGLDISKSVFQVHGVESTTGEVITKRLRRSKLLEFFEKLQPSLIGIEACASSHHWARTLKTLGHEVKLLPPAYVKPYVKRGKNDAIDAEAIYEALTRPTMRFVPVKTAEQQGALAVHKVRSQLVGERTKLINVLRAQMAEFGIVAPKGIWRIGELKAIVNNDADARLPMMGRVALKVVAAQLEVLETQIGKLDRVILDHCRNSEVSRRLAAIPGIGPVTASAFAASIADAKVFKSARHFAAFLGLTPKQNASGLKNRNGRISRMGNSYLRTLLVIGATCMVRQASRNKAPSLVTRLLAKNKPVRLVTVAQANKMARIVWVLMARGEVYRPA

SEQ ID NO: 230784 - protein, 338 aa, unidentified
MNINVVGLDLAKNIFHLFSLSAEGKPMKTKVKRNDLLAYIANLPISLIGMEACGGSHYWAREFKKLGHEVVLLNARYVKGFVVGNKNDYNDAEAIFTAAAQPRKRIVSIKNLEQQDMQMLHRLRQGTVEERTAVVNQIRGFLSEWGIVLPQGVNKVRKELPAILEDAENGLSVISRGLFAKQHEKIKALDKTISDYDVQIGQLCLQNNLSKRFLDVPGIGPLTATMAASDVGDGKGYAKGRDYAASLGIVPKQHSSGDKQVLLGISKRGNGYLRTLLIHGARAVLKNCQGKTDSLSRWLQALIERRGFNKAAVALANKNARILWTMATQNKGYETAVA

SEQ ID NO: 230785 - protein, 396 aa, unidentified
MIGPANLQKRGLRWKPRSKAAQSRIQEAGPMQKLRFIGLDVHKDSIAIAIAEGGGGSVEVVATIPNDMPSVVKRMRRLAEGYEARFCYEAGPTGFELCRALRKAGLDCIVVAPSLIPQQSGNRIKTDRRDAAKLARFLRSGDLSPVEVPDAATEAMRDLERAREDAKNAERVSRHQLSKFLLRHDLKYPGKTSWTHKHLDWIRRQRFEHEAQNRVLTDYLAAVVQAANRVAQLTKDIAELVEQWSLKPLVQALQALRGVQLVSAVVLAAEIGDFRRFPTASSLMSYLGLVPSEHSSGEKVRRGRITKCGNGHARRILVESAWAYRFRPALSRAIRDRNEGLPPEIQSAAWKAQQRLHGRYRKLLGRGKSKQQVITALARELTGFVWAIARQQPLSA

SEQ ID NO: 230786 - protein, 340 aa, unidentified
MEKRYIGIDLHRNRFTCCIRLENQRTYVTEWELEDLGRFVKKLRANDEIAVEITGNTRLFFDAVVRHVARVVVVNSNQFKVICQSVKKTDSHDARALALYLSKDMLPGVRMKDREHGQLASLTQTRDTLVKLRTALKNKINNILSARGLNLAKEALSSEKKLDEVLSLPFDQIVRIELRVIVEQIRSLNKSIVELEKTIGEEGSKLEGHKGLSSIKGIGKITGAILLSVIGDVNDFADEGRLASYFGIVPRVSNSNETERSGGIHKRGTKLGRTALVQSALIAANYSPYLKRFYEQVKARRGAGKAIIALARKFLGIIYRTLKNKWVFQDFPNFVLAEAS

SEQ ID NO: 230787 - protein, 359 aa, unidentified
MDSPTSPNAEVSVTLGVDTHKDAHVAVALDELGKHLGALSVPTTVTGYKRLLGWARGFGTVEHAGVEGTGSFGAGLARFLRVEGIEVFEVIRSKRRDQYRSGKSDPIDAEAAARAVLAGTATGQPKGANGEVEMIRTLRSARRSALKARTQAVNQLRALLITAPEELRSELRGLSTARLVARASRLRPGANPPDVEAATKFALRSVARRYHQLSEEISELDEQLDRLIAQAAPELLALEGVSTDTAASLMITAGDNPERLKSEAAFAHLCGVAPIPASSGKIVRHRLNRHGNRDANRALYVIALGRMSRDERPRAYVARRTKEGKTKKEIIRCLKRYIARELYRILTSSSTSACPITVP

SEQ ID NO: 230788 - protein, 306 aa, unidentified
MGKTTAYVGLDVHKDTIAVALAEVGLRGEVRVYGKIANTPAAVKTLATKLAGRHGELRFCYEAGPCGYGIQRQLSSLGHDCQVVAPSLIPRKPGDRIKTDRRDAAKLATLHRAGELTPVWVPDQAHEAMRDLVRARQAAVRSVRQARQQLSSFLLRHGHHYQRPAWTKAHRRWLSGLKFEQPVHYIVLEDAIAAVEAATARRDRLEAQIEAALPEWSLAPVVQALQALRGIRLVAAATLVAELGDLTRFTNPRQLMAYLGLVPSEHSSGNTRRQGGVTKAGNGMARRMLIEAAWSYRFPARLSREQ

SEQ ID NO: 230789 - protein, 340 aa, unidentified
MQITTVGIDLAKNVFQVHGVNAHGKAVLRKSLRRHQVPAFFAGLAPCVIGMEACGSAHHWARKLQAFGHTVRLIAPQFVKPYVKSNKNDAADAEAICEAVGRPSMRFVPIKNAEQQSVLALHRVRQGFVKARTAQANQIRGLLGEYGLVVPQGLAHVTRRVPRLIDDARNELPGEFRGLIGRLLDHLRLLQRQVEETELLIRAWHGASDASQRLAKVPGIGPLTASALTATVGDAKNFANGRQFAAWLGLVPRQHSSGGKATLLGMSKRGDAYLRTLLIHGARSVIYRVTQGADPENWLAKLVVRRNRNVAAVALANKTARVVWALLYHQREFQPDHSHA

SEQ ID NO: 230790 - protein, 346 aa, unidentified
MEHHVGIDVSLELSSLCVLDVTGKVIREAKVGSEPEALVAFLRGLGVTIVRVGLEAGPLSQWLYDGLQAAGFETVLLETRHVKAALSAMAIKTDRRDARGIAQLLRMGWYRPVHRKSVPSQQVRVLLAARKQMQIKAMDLEQTLRGLLRGFGLKVGEVSRGRLAIRIRELVSGHTMLERIAEPMLTARETLWREFAKLHREVLAIVKEDQVCRRLMTVPGVGALVSLTYRAGVDDPARFAKSKSVGAFFGLTPKRYQSGEMDVTGAITKVGDAGVRTALHDAANALLTRATKFSTLKRWALDVAKRRGMRRAKVALARKLATVLHRIWADGTEFVWGKDPAAAAAA

SEQ ID NO: 230791 - protein, 363 aa, unidentified
MNASTTVAVDLAKSVFQLAVADVAWKVVESHRLTRSQFERFFDNRAVDLVIMEACGSAHYWGRRLAGLGIRVMLLPAAYVRAYVKRNKTDAADARALLEAARASDMVPVRIKSEEQQALQGLHRIRSLWMGTRTSRINALRGFCREFGLVVPQGARTGVEAISRALADPHVEIPGLIRTSMALLIEEIRLLEQRIAQLERELTEVARHSPACVSLLTVPGIGLLTATAMVAATGGSVSHFKDARHFASWFGLTPREFSSGNSRVLGRISKKGDRYLRMLLTHGARAVLRAASVAKQTQRHLDGLREWALAVQGRTNHNKAACALANKLARICFAVLRDASPYGQPSPREFNKKSNRTAFAVAV

SEQ ID NO: 230792 - protein, 343 aa, unidentified
MNEYIGLDVSMKETMVSIRREGKRIWRGRCASDPKLIADLVRKRAPTARRVVFETGPLSVWFYHALRAEGLPAICIDARHAKAALDMAANKTDANDADGLAELAEVGFFREVRVKGFDSMLTRTLVMARMRLVRITTELSNQIRGVMKTFGMVVPAGRGSVFEKNVRALLVDQNGLTPIVLPMLEAWRSLRIRAAELGRQLIGGARRSQACRILMSIPGVGAITAMSFATAVEEPANFKKSRSVGAWLGLTTRRYQSGQVDYDGHISRRGDHHLRGLLYEAATVILTRSSADSTLRAWGVRLRERVGFKRAAVAVARKLAVMMHAMLKTGELFDRSAGIVAAA

SEQ ID NO: 230793 - protein, 316 aa, unidentified
MMDLQGTIIDEFTFTNNYDGIASLASRLTMDDRVVMESTGSVWTNLYNHLDDAHIPVVLANPLKTKAIASARIKSDEIDARILAHLLRTDLIPESYVPTKEIREVRALIRHRTSIVKIRTMVKNKVHAIVDKNGLEHDELFSDLFGKAGMQWLGTIRLPSLDRLMLDNHLDHLESLKKQIHAVDQEIHARASRDEDVRLLLSMTGVDIFTALLVRSEIGNISRFPEYKKLISWAGLAPSLHQSGSIEYHGSITKQGSKMLRWVMVEAARVAVNHDEKMRAFYARVKYRRGDQKAIVATASKMLKIIWFMLAYKTAG

SEQ ID NO: 230794 - protein, 394 aa, unidentified
MNFLKYAIGIDMGMEKLDACISLMTVQQQVIVKAQCNFNNDYKGFALFHAWVIKNIKMDIPIIFLMEATGVYYEQLAWFLYDKGCTVSVVLPNKAKKYKEALGLKSKNDHIDAKGLAQMACEQKATQWKPFSKDIYLLRLITRQIQNISKQCNIIFNQLHALQHAMFRDKVIEKMYNKQLALLQKNKKDLQKRVELIVDSDKALKHKFQNICKIKGLGLQNLAVMVAETNGFAAFENIAQLVSYAGYDVIENQSGKRTGKTKISKKGNAHIRKCLHFPAFNTVRLKVGPFKNLYERVYERSKIKMKAYTAVQKKLLVMVFVLWKNDQSFNPDYQDKVSRDAEPEPSLASASKKPLIIGITSIVKKVALAKTKATQDKHPSKHRRMPSLAYLKIT

SEQ ID NO: 230795 - protein, 315 aa, unidentified
MNILGIDVSNKTLDCCLLIQNEPYYHTFTNNDEGFYNLLSLYNNFKVNSLGFESTGNYHKKLESYFVNNGVLPYILKPISVSSFRKAFAIHGKTDKTDSYAIAQFLLKGDLTEYLHYPTRDFFKPLLSSIVLLDKQIRQTKNSLHAIDLYPETTFITEELKDTYKYLQITKGRIEKKSIDLLFENCPEAKLIKNEIGGVGDKLLLCLIPAIYDNFDKFTLKQINAFFGLNPLSFQSGTSVYKKEHISKKGNPLVLKMLYMASVSAVRNNEILREKYLRLKEKGKPSKVALVSVMSHLLRAIVIKLSHYKNKPIKK

SEQ ID NO: 230796 - protein, 330 aa, unidentified
MNIPGIDVSKNKLGCVLLTSSAPDKELYKKVPNTPVGFRQLITWSCKKARCESAQIHAVTEATGPYHENAALALYQAGMRISVINPARIKHFAKGIGVKAKNDKKDASVIARSGLMNKPPLWKPEPAEYRELRAMPGRPEALETDIRREKNRLEKIRAGRATETAEASLNRVIIFLREEKKSLRKQVRNHIDNHPNLKKDRSFLESVPGIGPVVSSWMLVLLQGGKRFDAAPKAASYVGLTPTEHQSGSSVLKRPRLSKAGPPVFRAKLYMAAMVAARYNPDAKELYQRLIEKGKAKMPALGAVMRKLVHICFGVIKNQAKYTSQVKNEG

SEQ ID NO: 230797 - protein, 332 aa, unidentified
MLIAGVDISKDDFHVCIKEKSDDGAVKIKGSRSFPNNPKGFSELSGWVSKREHANLGTWYVMEATGTYYENLAYFLYEKGCRVSVVLPNKIKHFAKSMNLKTKTDKIDAAVIAGIGIERSLAEWKPMSKDFKELRDLSREMLALKQERSRAKCQRHAMVHSHEKTASVLKLKESQIEFYDNAILEIESEIKRIVDADPVLKGRIDNIATVKGLGVLTIVAVLCETNGFGQFNSIRQVVSYAGLDVQFKESGNFKGKTRISQKGNARIRQCLFMPALTATMHNEKIKNLYLRICERNPDIKKKGVVAGMRKLLVLIFVLWKKNEEYNPLYQWN

SEQ ID NO: 230798 - protein, 387 aa, unidentified
MPQANDSSRCLLTLEQDSTLIAVVELSQASWLVAGIVPAVERQPLKKIEADEAALLRLLGRWTDEATRAGRAITRVCVAFEAGRDGFGLARWLRARGIEAHVIHPSSVAVPREHRRAKTDRLDTELLKRAFLGWLRGERGHCTTAAIPTAEEEDAKRPNREHESLVGERTRIVNRMRSALARLGVRGFRPTLRKACERLGTLRTAEGAPLPPNTLAELRRDMARLRLVREQIAEVEAARLERLEEEPGSRPHAMVRLLARVIGVGVETADMLVREVLSRDLRDRRAVARYAGLTGSPDESGRRRREKGLAKAGNARVRHGMVQLAWRFLLFQRESALARWYRERTADARGGTRKTMIVALARKLLIALWRLVTTGAMPEGVVLRPAA

SEQ ID NO: 230799 - protein, 356 aa, unidentified
MAEGTWVGLDVHARKVVAGVLDASTGELRSLRAPTLPAETVVWLQRFPAPVRVAYEAGPTGYGLARACASAGIVCTVAAPSKIQRAPADRVKTDRRDAERLARLLRLGELVAVRVPEPQEEAARDLVRAREDARGELMRARHRLSKLLLRHGLVYDASAWTLAHDAWLRRQRFESRPLQLALEESYAAAVQAKARRDLLDEAIIELAAESPFAEIVGRLCCLRGISTLTALALTVELGDWTRFRPQSLGPFLGLVPSEDSSGERRRQGAITKTGNTHARRLLIETAWQQRRPLRESATLRRRRQGQPAAVRARADQSARRLHDRWHALERRGKRRTVVAVAVARELAGHCWALATM

SEQ ID NO: 230800 - protein, 346 aa, unidentified
MSKTRRVGEVDRVLAVKVFCGVDVSAARLDVAVQQEGVEGFRRRQFANTAAGHRQLLVWLRKLGWGVRVALEASGVYSLDVALALDEAAGFEVAVLNPRKASDFARSLNRSKTDKADAEALSEHSRRMEFVRWRRPCRAALELRALGRHMATLTEEHSRLSNRLHAAEGSRTAPRCVREDLKRSMAGIRKRLLRLQREARAMIEREAEMKRKLLRLMAMPGIGEISAMQILAELAGLDEQMTVRQWVAHSGLDPAHQSSGTSVHKRSRISRQGNRHLRKALFMPALTAARFDPYLRAFYLVLLDRHKTKLQALTAVARKLLHAIYGILKTDTDYDGAKLFPALKIA

SEQ ID NO: 230801 - protein, 355 aa, unidentified
MSSIARAPEPVIEIVGGVDTHRDTHTAAVIDTFGRRLGDRQFPATGVGYAALLAWLRGFGLLLLVGIESTGSYGSGLAGYLAGQQVEMVEVDQPDRRARRLRGKSDPVDADAAARAALARTRTGIPKDHSGTVEAIRNLRVARRSAVSQRADCIRQIKMLLVTAPDPLRDRLRHLPTTALMASCARLRPDLDRIDQPEQAAKRSLSSLARRWHDLSDEIASLDTLLEPLVKKANPTLLTLPGVGTDVAAQMLITAGQNNQRLRSEAAFAMMCGVSPIPASSGMTTRHRLNRGGDRQANAAIYRVALSRLRWDPATHAYLERRTQAGHTKRDIIRCLKRRIAREIYYVLRKHTMTT

SEQ ID NO: 230802 - protein, 343 aa, unidentified
MENTIVGVDLAKDVIQVCVFTNKKVRSNTEMTPSEFTAFLANAKSTTIVFEACGTSNYWKQKAISLDHDARLISAKLVAAVRQNQKTDQNDALAIVQASLLPDVAFIAGKSIEQQQLQSIMRLRELCVKQKTATGNQLTSLLLEFNIKVSSRNGGLRGAVELTLEDAENGLSSEFREALNTAWQQYLSIIKSINTYDDCLEKAIELHSECKKLLKLEGVGTLNAINLYIALGCAELGVFEKGKNASACIGLTPIQYSSGGKTKLGSIGKYVKNSVLRSQLITGAMSAVNHATNRTAKTQKDQWIQAMVERRGKKCTAVALANKTVRTAHAMLTQNTEYKAILI

SEQ ID NO: 230803 - protein, 341 aa, unidentified
MEEISMYAVDTAKSVFQVHGEDAARTMKVQKRLRRGQFLGFFVRLPGPVAVVLEACGSAHHWARELAALGHAVRLIPPQHVKPFVKRNKNDARDAEAIFEAALRPGLHFVPVKPVAQQCDRALHRGRDLLVRQRSQLGNAIRSMLSEMGIVAPQGAAGSARLYAGIEAGEAAIPAALLGVLKPMLAQWRSLHAAVQALDEQILAAARADAKVRRLVKIANVGPVTAHAMIAAIGDGKPFRTARDFAAWMGLTPTHHASADKMRIGRISKAGDRSLRRLFVLGASSGVHHARTRPERASPWLKGVLARRPVKVAVVAQAAKTARIAWAVLTSGEEYRSQAAA

SEQ ID NO: 230804 - protein, 312 aa, unidentified
MAELSFCGIDVSKDRLDVVVLPAEYVFSAGNDLTGLVELVSKLRCLSVATIGIEASGGYERSAVRALLAAGFSVRQINPFKLRQFAKASGVLAKNDRLDARLIAMFVATMPTRPVQRNAATERLAEILMARRQLSEQKVAAENASRLFEDVVLMRLYRRRIARLEADIALLNKRLTELVAADSALAQRYALLISMPGVGPVLAITLIALLPELGQMSRKQVAALVGVAPYDFDSGKLRGVRCIRGGRAPVRRVLYMAALIASRCNPALKLFHDRLDSAGKRSKVVMVAVMRKILTMLNAMVRDNIGWRPKSA

SEQ ID NO: 230805 - protein, 423 aa, unidentified
MEVMYERVAGLDVHKQTVVACVRLMVGRKVVRECRTFGTTTDSLMGLLSWLRAWRCSHVAMEATGIYWTPVWKILSDGEFDLLVANAAHIKNVPGRKTDLNDAMWIADLMACGLIKASFVPQEAFQELRSLMRTRKQLGREQTRHVQRIQKTLEEANIKLDSVISDILGVSGRRMIEAMIEGVRNPHQLAALAHRGIKASPQQLYDALHGRLTDHHRFLLKLHLGQWDRLDAAIRDIDREVDGRIEQMDQKLADGEPPFRALIVRLSAIPGVSTLSATTILSEIGRDMSRFPTAGHLVAWAGLCPGQNESAGKRKSSCLRKGAPWLKTMLVQCAWAAKRQKNSYYMAQFYRLQARRGPQKAICAVAASLLTAIYHMLKNGTRHHDLGADYFDRRSPEAKAKRLLAQLSRLGFEVTLQPLAEAA

SEQ ID NO: 230806 - protein, 424 aa, unidentified
MNNVQAEKLDFVKGKVLIVGVDVAKKINYARFIDSQGYELCKHYRFQNDLDGIKSFISKIKYLEHKHGLERTVIGMEPSGHYWEPLAYQLKEYQLGQVFVNPYHVKCSKEMADNSPSKSDLKDALLIAKLVIDGNYFKMYLPEGIYRDLRNLTRERYQLRKKLNNSKNRLIAQLDSYFPELYRAFKDPLGKTAVYILEHHPFPQDIAALTVEELATAIKGASKSRLGLKKALELKKAANDSVGINEGLASARYRIKSCLTEIAFYKAQLSSLEEQMLRYLNDTGFSHNLLSIPGVGVVTAARFLGEVGDISRFNSPEQIIKLAGLNLKTNSSGQKKGKTTITKRGRSELRSLLYQSALVMVCRNEQMIKSYHYYRTRSKNPLKSKQALVIIMKKLVRIIYALMTKDEFYDPAVVLREDFATTAA

SEQ ID NO: 230807 - protein, 344 aa, unidentified
MTYYAGFDVSLRTVNICIIDEQGEFVTETKLASDVQDIVAYLDELDLDIESLALEAGTLTQYLTYGLQAAGFEVICMESRQVKGALSAMRNKTDKHDARGIAQILRSGWYSPVHVKSIESHHIRMLLSSRRAVLRKCVDLENEVRGLFKIFGLKLPPKLGHGAFDNAVRDIIEADKALSHALLPLLEARLALYRSFRELDNRTRKMANADPVCQRLMTVPGVGFITALTFKAGVDDPSRFKKSRTVGAHFGLTPRRSQSGEIDFDGHISKAGDADVRCALYTAANAMLTRTTQWSSVKAWGMQIAKTRGHRRAVIAVARKLAVILHRMWIDDTQFRWGMEGARS

SEQ ID NO: 230808 - protein, 409 aa, unidentified
MAAVMIGVDPHKGSHTAVVIDQAEMALDQVKVRACTAQAERLLAWAAAWPERTWAIEGAGGLGHLLARQLVAAGERVLDVQPKLAARVRLLAAGDVNKNDPDDARSVAVAALRSAACPQVRAEDHAAVLKVQSERHRDLSRSRNQVTCRLHAVLCELVAGGVSKQIRAAAAARLLDQIQPCGAVQAARRDLAGQFLADLRRIDAQRRDTKKTLAAAVRTCGTTVTEVFGVGPAVAATVIGDVRDISRFPGPDCFAAYNGTAPAEVSSGNRKVYRLSLRGNRRLNHAIHMAAVTQIRYRHTKGRAYYDKKLAEGKTAKEALRALKRQVSDAIYQHLKAGARRAAATAGPGGHPGNGSVASAAGSHPEHRLFGPATPGPESTLRPRPGPSKATRPGSSRRTRRSVPSHTSA

SEQ ID NO: 230809 - protein, 316 aa, unidentified
MSAPQIFVGIDVAKAQLDVALRPTGERWPVTNDDASITTLVAQLQAVQPTLIVLEATGGYQRAVVAALAAAALPVVVANPRQTRDFAKATGQLAKTDALDARALAHFAEAVRPTPRPLPDAQTEALRALMTRRRQLVAMRTAELNRLASAPPQVHADLQAHITWLDQRLATLDDTLDTTLRASPIWRERETLYRSVPGIGPVSARTLLLDLPELGTLSRQRIAALAGVAPFNRDSGTLRGHRTIWGGRAPLRATLYMATLVAVRHNPVLQAFYERLLAAGKAKKVALTACMRKLLTVLNAMVKHQTPWQPREVAIA

SEQ ID NO: 230810 - protein, 373 aa, unidentified
MNYSTVYVGMDVHKETFSLCCYTNEKEQAEYCQKVDGHYSKVLNYLEAMRFHYGDDAVFICGYEAGCLGFTLYHQLTKHNVKCVILAPTTMSKPAGKKKVKTDKRDASLIARCLAHHDYSPVHIPTDKDEQTKEYIRMRDDHKLALKKVKQQISAFCLRHNYRYDATATHWTQTHLKWLKALKPEGLYQEILTEYLTTYDQLTDKLERLDKRIEELATDTDYQEDVRKLSCFLGVKTQTALSTIVEVGDFKRFPSAQHFASYLGLVPGEDSSGDSQKRLGITKAGNSHVRTLLVEAAQSFTRGRAGCKSKVLKARQYGNTADVIAYADKANDRLRRRYYHMVLTQNKKANVAKTAIARELACFIWGMMTDNIS

SEQ ID NO: 230811 - protein, 337 aa, unidentified
MRYIGVDLHSNNFMVCILSENEEPTFKKYELSELAEFKEFLNLTDKIAVEATGTTRFFYNQVVSLVAECVVVNPSRFEIIKKSYKKTDKNDSLNLARFLSNGELPSSRMKDELQAEVNSLATTRDKFVKLRTILLNKIHAHLKGNGYQSRKEAYDHPANLKKVLNLNWSAAVRIELEVIISQILNLTEGIIKLEKEISERGSQIKGYENLITIKGIGNYSAAVLLSVIGNVDDFPDENNLASYFGIVPRVSNSNQTQNHGSITKRGSKLARTVLVQCTLTAKRFSPYLKQYYERIKTRRGSSKAIIATARKFLGIIYRTLKYEWVFEDFPNFVLAEQ

SEQ ID NO: 230812 - protein, 344 aa, unidentified
MEQYAGIDVSLELSSVCVVDAQGKIVKEAKVASEPEVLIGFFETLGFAVDRIGLEAGPLSQWLHAGLKRAGFDAVLLETRHVKAALSAMTVKTDRKDARGIAQLIRMGWFRPVHAKSIGAQEIRALLVARKQLLGRLIDVELSIRGILRGFGLKVGPVTRKNFEARIRELVTGQATLERITMAMLSARAALKAEYAKLHKAVLTIVRDDTVCRRLMTVPSVGPLVAITYKSAIDDPHRIAKSKAAGALFGLTPKKYQSGETNVTGGITLAGDEMVRTALYEAANVLLSRITRFSKLKRWGMDVAKRRGSKRAKVALARKLAVILHRVWVDGTTYRWAEPKPIVA

SEQ ID NO: 230813 - protein, 411 aa, unidentified
MDVVNARCAGLDVHKATVVAGLRVPGPQRGERCGETKTFATTTRGLRELIDWLMAHGVTAVAMESTSVYWRPVHAVLEGHVQLVLVNARHVKMVPGRKTDVRDCEWLAQLLECGLLRASFVPPRAVRDLRDLTRLRKTLIRERGHHVNRIEKTLELAQIKLSGVVTDLMGKTGRAILQALSAGIVDPDQLAEYAQGLLRKKRAALREALVGRLTPHYAFLLQQHLSLIDALDAHLATLETRIEMAMAPFAEPAALVQTMPGVATRAAQAILAETGVDMTAFPTAGHCASWARLCPGNHESAGKRQAASTGQGATWLRATLQEAAWAAVRSKKSYYRALYHRLKGRRGAKKAIVAVQHAMLVALWHMLTYRVAHHDLGVDSFDRRNIVRTRRHHIRRLERLGYDVVLVERAA

SEQ ID NO: 230814 - protein, 420 aa, unidentified
MSVQPPARPLDDTLGLALVAGIDTHKDTHHVAIVDQVGRLIADHQFATTVEGYGQIVQFLHRHGNVSAVGVEGTGSYGAGVSRVLNAAGFRVLEVIRPNRQQRRAKGKSDPLDAEQAARTVLSGQGATTPKSASGAVECLRMLLTERRSANKSRTQTINQLHAVLVTAPDLVRNTYRDLITEQIITKAARSRPTAFDMADVTTTARIVLRRLATRAQQLQDEVRTIDAEMTALIAQINPAMLQINGMGPLTAATLLTAAGDNPERLASRAGFAALVGVAPVPASSGQRVRHRLSRGGNRHANSAIHRIILLRLRHHEARTTAYVTRRQAEGLSDRDIMRCLKRHVANEIFKAITAPQPADTTGQQLRHQREGTGLTISELARRLDVPYQRLRRLETGERVDPDLAARARAHLEHLALLAA

SEQ ID NO: 230815 - protein, 395 aa, unidentified
MPPTNETAAPVSAEDITLYVAMEISRKTWVLGVKSPASEKISLHSLGPADKEGLRDLVEKQRAKAEQALDQEVRVLCCYEAGYEGFWLARWLEQEMSIETVVLDPASLLVNRKAKQRKTDRIDAKKMVRALLAHDRGDAAVLSRVRVPSVEEEDRKRLIRERRRLVKERTSLTNSIKGLLKLHGIFELDPRTRGFDEKFADVVTAYGSPVPPRARQEIERLKERLSLVERQINEVEAERDEVAQAGAQLSITDTLEGSDAQAAAKIATLAQLKGIGENDATVLVNEVFYRGFRNRRELASWVGITPTPWTSGDTQRDQGIGHDGPGWIRAHLIQMAWRWLRHQPQSPLSIWFENRTAGAQGRIRRVMIVALARKLLIALWRFSETGLVPTGTKLA

SEQ ID NO: 230816 - protein, 338 aa, unidentified
MKVTTLGIDIAKSLFTLHGVDEKGRVVLQKTVTRARLVETVAKFSPCTIGMEACGGAHHWAREFEKIGHTVKLMHAKYVKAYVKTHKNDGRDAEAICEAVTRPNMRFVPVKTIAQQELSALLSMRALLVKQQTGLINHIRGLMAELGIVFPKGVKKAVLGLVRLLDPENSALSPFSKGLFQTLSDQLAEIGKRIALLNEQILRIHRNHPICQRLSRIPGIGPVTAVALVATLPGITFFENSRHLSAWLGLVPNQHSSGGKPRLGRISKRGDRSLRTLLIHGARSVVRLADRRTDPLGKWICRLKNERGANKAAVALANKTARIVWALLARDQEYKKLA

SEQ ID NO: 230817 - protein, 370 aa, unidentified
MPRAHIGGDSGREFCDLVGPVDPRRVLLVGVDVSKPSWFVLGSDLTGEVVLDGAKLMADAAGLGQLLVLLRESRRRLDAQVVVVGVEATGHFHQTLAAHLADVDGVVVRLVNPAAVAAVRKAQLNRRRKTDWLDAAAICELLRRGVGSPSHLDESAASTLRVLWSGRKDLVDARSGMRHQAHALIDCLWPGLTAKDRAAGLRPLFRDAFDIKAARVIVGLLAEGWTPANFANVRVDTLRELFAEKGCRLVRPHAQRIITRAAAALAPHPAATRGKALVLRALLSSMAQLDVHIAEIEAEMARLLALTQAAKLTQVRGIGVVAAPGFVAFVGHTSRWSEWAKVWRAAGLDPARSQSGPRDNAFGISREGSA

SEQ ID NO: 230818 - protein, 367 aa, unidentified
MKQQTSATTETCNKGRNIIDFTGKTIYVGIDVHQKDYQVAKVLNGFCLGNHRMESNREKLIEHLKSHYPGATFKCVYESCAWGFTLQRTLQASGMECIVVHAADVSTTDKEKRRKTDKVDALKLAHGYASGSLKGIHVPNEETQKDRSLIRYRKQLTGDINRSKNRLKSLLKYQGIDLPPQYAGNNWSRNFLNWVEQQAEKDALLKETLMLLLEQIKLLRQLLLKTERKLREMRKTKYAQKADLACSVAGIGPTTAMLFLLETGDINRFKGFDSLNDFVGLCPDTDSSGDTHRDRGITTRRHKQLRSALIEAAWQAIKTDPALMDSYQTLLKRMKGTQAIIRIARKLLRRLRAVLLSGRPYQKGVIA

SEQ ID NO: 230819 - protein, 408 aa, unidentified
MDKLFVGIDVGSRDNAVYIMMPDGSKHSAFEVQNNLGGAQTVSSRIVSALAENELPAASIGIEATSVYGDNLIYFLKEDGALARFERSLFVLNPKQVSKFKESYPELPKNDPVDAFVIADSLRFGRIGLPIQMDDYRYKALQKLTRARFYAVQNLTREKQRFANHLFAKCSGLAQEKVFSNSYGATALAVYEEFETPDDIVNTDLMDLTAFIAECGKNRSPYPDEIAKAVQAAARGSYRLPKTVNDSVNQVLSISISSMRAMQAQIKALEKEIERQFENIPNTLTSVPGIGLVYSAGIIAEVGDVNRFIKGQSGLAKYAGLVWKENKSGMFEGQNTRLIKSGNRFLRYYLCEAAMSLVRCDTEYKRFYDLKYKEVNKYQHKRALALTARKLVRLVFRLLKDNRLYTPA

SEQ ID NO: 230820 - protein, 431 aa, unidentified
MGRWWAGIDWSWGLQDFVIIDDGGRVVLHLRVEESREGVEQILRALRDLNPTSHRFSRRQVPIAIEDGSRLLVAELQRRRQPVVVIPPAVTARYRGRHGAAVSKSDRGDAALLADIIRQNPGRRSFLPENSDQAAAIAVLARTQASSTEAARAIMLRLRSHLGLYFPAAVEAWSGMQYGLRRPEARAVLALAPTPRLAAALSKRRLHDTLAAAGRTRLLDEEAARLRELFAAPGLRQRPETEQAMGERTRLHLAELSIACQHAAHLSELADTRFSAHPHHQIYRSFPACGPLVAARLFAEIGDAPERFPTGRHLRAYAGTAPITWSSGSSHTVVHRTVCNRALKATVHQWAFGALTRSPGCRALYDARRERGDGYAAALRHVGNRLLSGLHHCVRTDQLYQEHVMFPAVDGRDGVTGGQDEHLRVTLGREP

SEQ ID NO: 230821 - protein, 343 aa, unidentified
MQTITTIGLDIAKSVFQVHGVDAEGNVIFRRQLKRRYVLAFFEKLPRCLVGIEACASSHHWSHEIQALGHTVRLMPPAYVKPYVKRHKNDATDAEAICEAVARPNMRFVATKTSEQQSCLTLHRTRHLFIRQQTSVINAIRAHLAEFGIVAPVGRHGVAQLLGIAADANDKRLPDVARACVAALGAQLQTLKAQILEFDRMIRAWHRSSEASRRLDDIPGVGPALATALVASIADPKVFRSGRDFSAWIGLVPKQNSSGGKDRLGNISKRGDRYLRSLFTTGALAVIRYAKIHGTRHRPWLTALLARRPTKVAAIALANKIARMAWAMMARGEHYKEPAALAA

SEQ ID NO: 230822 - protein, 345 aa, unidentified
METMYYIGLDVHKKTINYCVKDGSGRIYAEGSIPATRLTLDMWMKTLPRPWTAAMEATIFTAWIYDHLKPHAAAVKVAHPLMLRAIAVAKKKNDRIDAKKIADCLRCDFLPECYMASTEIRERRRTLRYRNLLVRQAVQMKNKIAVLLMEAGVSYNKQKLHKVGYFRELLATNPDIDEGLKPLLRLCRETVVRLGKTESALVRSLERDSLLVERVERLMTIPAVGPITALTWALEVGDVQRFSSIKKAISYCGLCGAERSSANITMRTPLSKQRNKHLQTVLIEAAKMAPRNSPELAMVYDQEKQKGNANRATLAVARKLVAYLVAVDRRQKEFLTVERENRTAA

SEQ ID NO: 230823 - protein, 375 aa, unidentified
MIYVGIDIAKDKHDCFITNSDGEVLFKSFTISNNRDGFETLFQKIQSVSDDLTKVKVGLEATGHYSYNLLGYLLDKGLPTYVINPLHTNLYRKSLSLRKTKTDKVDARTIASMIMSDVNLKSYSDTSYHNEELKSLTRYRFDKVKERAKLKTSVSRLICILFPELEKLVPTLHMASVYALLSEFPSAHAVASAHLTRLINLLSQSSKNRYGKDTAVMFREAARNSIGSNMPTKSLELKHTIKLIQELTSEIDEIEAAIKQIMDEEIQSPILTIPGISYRMGAMIIAEIGDFCRFDSADKILAYAGMSPSTYQSGQLDNCYSHMEKRGSRYLRYALYNATKYVCHWDKSFGAYLEKKRSEGKHYNVAISHAAKKLV

SEQ ID NO: 230824 - protein, 326 aa, unidentified
MEHELHYIGIDTAKEKLDVDVLRPDGRHRTKKFANTTKGHDELVSWLKGHKIDHAHICIEATGTYMEPVAECLYDAGYIVSVINPALGKAFAQSEGLRNKTDTVDARMLAEFCRQKRPAAWEAPHPLERALRALVVRHQALTDMHTQELNRTETAREVQRPSIDAHLLWLEAELKRLEKQIKDLTDDDPDMKHRRKLLESIPGIGEKTSAVLLAYIGLKDRFAHARQFAAFAGLTPRRYESGSSVRGASRMSKAGHVSLRRALYMPAMVATSKTEWGRAFRDRLAANGKKGKVILGAMMRKLTQVAYGVLKSGVPFDASRHNPVAA

SEQ ID NO: 230825 - protein, 322 aa, unidentified
MTTVLGIDISKKDFYVSLLTESRATKPKKFTNNTQGFESLHNWLKQQSVVALHACMEATSIYGEALAEFLYGAGFQVSIVNPARIKGFAKSELLRTKTDSVDAALIARFCAAMKPSLWTPTAPEVKELQALLRRLESVTEMMTSEQNRLETATPTVAALTLEHLEYLKQQQQLIKKLIGDHFDQHPHLKQQRDLLTSIPGIGDLTASILLAEIGEVSDYDNARQLAAYAGLTPSERSSGTSVKGKTRLSCTGNVRLRKALYMPAVVAMRYNPLLKAMSERLLGRGKVKMQVIGALMRKLVHLAFGILKSQKPFDPNYAIATP

SEQ ID NO: 230826 - protein, 366 aa, unidentified
MATNISNHKQEKKNNSSVKNAYVGKQVSVGIDVHKRTYSVVTVVEGMVVKKWRTVASPEKLAQQLGSYFPGASIETAYEAGFSGFVLHRALEKAGIHNIVVNPGSIEVAIHNRVKTDKRDALKIATLLEAGRLKGIRVPSQRQEQQRLLTRTREQLVQERSALKNKIRMKCHQMGLIDPNDRREMSHKLVVEILALTPSPEFSLIIKAYWSVWKSIETQIKKIERKLNEQAKTDPNETIYRSAPGIGPLSSRILSHELGDLSQFANERQLFSYTGLTPSEFSSGDTVRKGHITRQGNKRVRYILNEAAWRAIKQDRDLKEFFDRLAPRTGKKRAIVAVARKLIGRLRAAFKTRQPYQMNPISLQPA

SEQ ID NO: 230827 - protein, 420 aa, unidentified
MLMNIPSQSPYRATVGLDWADQKHDVFVRFANGDSYRRKIDSRPEAVQEWLLELRSACAEGKIAIALEQRCGALFFQLCTHLFWIDLYPINPHSLASFRKTFFSSRAKDDPVDSQLLEELLRTHPERLRPYQSEPTTERKLDQYCRHRRSLLNLATRTELKLISTLKKYFPLAVHLFGEVGLKSDIALNFLSRWPTLDELHKAKAQTLRSFFYAHNSRSQSLIEERIEQIAQAHSVTDDLALIEPLVLTTKCLVALLRQFNRAINEFDHKIKELFKSHPDHFLFESLPGAGEQLAPRLLSLFGSDRSRWADATDIQKYSGIAPVVERSGKSLWVHRRLARPLFICQTFHEFAQQSTKRSSWADQFYRRQREKGKSHHSAIRSLAFKWIRIIFACWKANKPYDESFYVDAIAKRNFASSST

SEQ ID NO: 230828 - protein, 385 aa, unidentified
MSNAVYSSQSEFAAFVGIDWADRKHVWALQVSDSLLFEQGELDHTPEAVEQWAAALARRFPGRLVAIAVEQSRGALCFMLSKYEHLVLYPVHPNSLASYRKSFRPSGAKDDPDDASLLLDLLVRHRDQLRRLNPDTVETRTLQFLVEDRRKLVDERTRISNRLTDYLKLYFPQMLDWFDQVRAVVTAGRLAVTALVQLVRQLNAAIRAYDEQIQQRAQNHPDFAIFDSLPGAGPALVPRLMVALGTQRDRYQSAYQIQCYSGIAPVVESSGQQLWVHWRWCCPKFLRQSFHEWALHSIGFSDWARAYYDQQRSHGKSHHTAVRALAFKWIRVLFRCWQDRTPYDETKYSRALQQRRRKPPLPQPVAVDLQLKKVAGFWKLSANPS

SEQ ID NO: 230829 - protein, 314 aa, unidentified
MSSLVFVGIDVSQVRLDIAVRPGASFSITHDESAIARVVEQLCALSPTLIVLEATGGMEIPLTSALATAGLPVVVVNPRQVRDFAKASGRLAKTDALDAQVLAQFAEVMRLQPRPLPDAEARALAALLTRRRQLVEMLTAEKNRLLSAPSPIRTRLRTHITWLERDLQSITTALAEAIRQSPVWREKDELLQSVPGVGPVLTATLLASLPELGTLTNKQIAALVGVAPLNRDSGTFRGRRTVWGERAYIRAVLYMGAIVAARFNPVIRVFYQRLQRAGKAKKVALTACMRKLLTILNAMLKHRTPWRVVEAHHA

SEQ ID NO: 230830 - protein, 450 aa, unidentified
MKALPVLDPRAAAIDVGSEKLHVSIAGDTPKVFGTFTGDLEVLRDWFKAQGVRTVAMEATGVYWLYLYEVLEAAGLEVVMVNGRHVQNVPGRKTDMADCQWLATLHAHGLLRGGFVPTADIRQLQDYQRLRADHIIGAGAQVQKMQQALERMNIKFHDVISDLAGVSGLKVVRAILKGERRPGELLRLCDEQIQRKKSDRVKESLRGSWKKEQLFALRQALEVWEFYQKQIAECDREMEELLHQLAGGSPPCEGGQPPERGGGLIGPVKVGPSKAPGKNAPVIERFQELLARLCGGRDATQIPGLSAYLVLQLISEVGTDMQRWETEKHFTSWLGLAGGRKQSGKRKGTVKAHRNRAGRMFCAAARALAQSVDKALGGFYRRLRGRLGGLAANVALARKLAQLFYRLLRYGIEYVEKGLQNYEIKVLENETRLLRKLAQKQGFILMPATT

SEQ ID NO: 230831 - protein, 338 aa, unidentified
MIVIGVGVHKQSVAAVAVDEAGRMLEEKTVSVGREELLEWASALSVERLWAVEDCRRLTRWLERQLLAAGEELVRVPPTLMAPERRSGKGRGKSDAIDALAVARAALREPQLSRPRADEEPFRELKLLVDHRDGIVDERRRVHQRLRWYLHQLDPTFAVPLRMLARKSHLERVSRWLARQQQELQVTLARELVTRCRALDREIAELDRELERRTAAIAPALLELPGCGAITAAKLLAEIGPIGRFNNDAQLARHSGVAPLEASSGRIQRHRLDRGGNRQLNAALYRVAITQARMHAPARAYLERKRAEGKSRREAIRCLKRLLIRIVFNTLRASPALT

SEQ ID NO: 230832 - protein, 343 aa, unidentified
MNTTASVIGLDIAKNVFVAVGRDVHGKVVWKRTLGRDEVLPVFANLPSVPVGIEACAGSHYWARQLNGLGHEVKLIAAQHTRAYVTGNKNDANDAAAIAEARARSATKYVAVNTAAQQDLQMLHRARQALLEEKKAMVCRIRAFAHEYGKVFPVGVAKFRAGLTPWLTHEGNGLSAMALETLRDLVSQLDDKETRLQRYDQRLVEATQTDARAKRLLAVPGIGKVTATALLATVADASDFKQGRDLSANLGLVPREHSSGGKQRLYGITKRGDRYLRTLLIHGARSALRSADGKEDRILRWALKLAERRGTNVAAVALANKLARIAWAMLAHGRVYQPNYQAA

SEQ ID NO: 230833 - protein, 351 aa, unidentified
MYTLGIDLHKKSSVWILIDAERTELWKEDVLCSPTYISTIIKSLPVSPREIQVAIEPVGGWRWVSDLLEASGMNVHIAHPRKMQLIAQSTKKTDTEDARVLANLLLAGYFPEAHKSSEDIYKLRLLLRERTFIIQRRTSVKNQLHGIATTQGLHLIQSGNPLFKKGKADIMAGDNFVLQQLHYLIEDLDRRVVPFDEQLLLECMKYPVAQLLMTFPGIGIITALTIISEVDDFSRFSSGKKLASFAGLVPRQRSSGESIRYGSITHAGSASLRTSLVETAMRIRESNAPELYAFVTRLTPVCGAKKARVALARKILVIIWKMVITNTPYQPNHAPSVCTANLSDLDTSSGT

SEQ ID NO: 230834 - protein, 416 aa, unidentified
MSRVVDIVRPVCCGIDVHKNFLVACIATTDKRNHTAHQIRRFSTFKGDLQRLADWLLANNCKDVCMESTGKYWIPVFNVLEKTVNICLTHPKYVKAIKGKKTDKKDAKWIAELFKCDLVRSSFIPPPLTRHLRELCRYHAKLTYMNSSEKNRGQNCLTVCNFKLDDVFSDVFGASATRILDKLIELGHSDFDVAPLLHKRCKATPEQVKAAIDGELSPAQAQKLALVREHMKQLENLQNTLESSVTKLAAPYQPQIDLLMTVPGIGSEFTAIRILAEIGVDMSVFETAKQLTSWAGLTPQNNESANKKKTTRIARAGTFLKPLLVQCTLAAVSSNKHPWLKDKYQALKKRRGHKKAVIAIARKLLAAIWNMLTKNEPYNHELHQKSDPPPKNRVLTPEQAFALLRKHGYQIAETVA

SEQ ID NO: 230835 - protein, 331 aa, unidentified
MKKTALVGIDVSARTLDLALDSGRGTPPLLTFANTAAGHRKLIARITRGGRQARVCLEATGVYHLSLCVALHGAKGIAVMVVNPRAAKDFARAQLQRSKTDQVDARSLLEFLRRMDFAPWSPPSRSILDLRALSRRIQSLIVSRAQEKNRRHADEVVTDTTPAIRESIERHLAAINEEIETLTQSALEIVRGDDRLSPKLDHLISVKGIAEPSAIAILAELAVLPPDMSARQWVAHAGLDPRHAESGSSVRGQVRISKVGNRHLRAALFLPAMVASQHEPRVKAYYQKLIAKGKKPMQALVAVMRKLLHAIYGMFRHGADFDGCRFLAENA

SEQ ID NO: 230836 - protein, 406 aa, unidentified
MVAVMIGVDPHKGSHTAVAIGAAGEALGELRVRASAAQADQLVAWAAGWPERTWAVEGARGLGSLLAQQLVAVGERVLDVQPKLAARVRLLAAGDTNKNDPGDARSVAIAALRSSARREVKLDDHAAILKVWSKRHRDLGRTRTQVACRLHAVLCELVPGGLSKDITATHATRVLESVKPSGAIVLARCELAAEFPGDLRRIDAQMHDTRKRLTSAIRATGTTTTGIFGVGPVIAATVIGCAADVSRFASRDHFAAYNGTAPTEVSSGNRKIYRLSRRGNRRLNHAIHMAAITQIRYRHSDGRAYYDRKLAEGKTHKEALRSLKRRVSDAIFARLQADARRAAASARTEGPGGQPGSDSVASAAGSHPENRLFGQATPEPGTSLRRPSGRSQTRPAPVPKKTQKGS

SEQ ID NO: 230837 - protein, 409 aa, unidentified
MIFVGDDWAEAHHDICIIDEAGKKLAKRRVPEGLDGVNRLHALVAAHASDPAEVVVGIETDRGLFVQALIAAGYQVYAINPLAASRYRERHSTSGAKSDPGDALVLAELVRTDRHNHRPVAGDSELAEAVKVLARAHQNLIWVRQRQLNTLRSTLREYYPAALEAFGDDLGSRDALGVLGRAPTPALGKVLSAAKIASAIRAAGRQRNIETKAGEIREHLRGAHHLEAPAALAKAYGATVKATVGVLTEMNAQLAALEEELESSFETHPDAEIIVSLPGLGTVLGARVLAEFGDDRTRYDDAKARKSYAGTAPITKASGKSKVVLARFARNSRLTDACYLWAFSALSASPGARAFYDAHRAARGPNDKDAHSKALRALANRLVGILHGCLRHHSPYDEAKAWHREEAAA

SEQ ID NO: 230838 - protein, 368 aa, unidentified
MEITTIGIDLAKSVFAVSGADRRGKVVLRRQLRRAQVLEFMGKLGPCVVGLEACGGAHHWARAMGKLGHEVRLLSPALVRPYRSGPNKHDRNDADAICEAVRRPQMRYVAVKSVAQQDQLALHRVRAQLLKQRIAQSNLIRALLHERGVVARLGAAGLRQALTQALQAENSELSGAMGELLLELSGGLRELERRIAALTRRIERAAQDDERCARLMEVPGVGPLISSALVATVGNAREFKRGRELSAYLGLTPRQHSSGGKTVMLGISRHGDRYLRTLLIHGARALLYRQRRGRAHPRAAWAARLVARRGPNVAAVALANHNARVLWALLSRGDGYRPPTSSFPSRPSAGAVIKRAREGKLLLATQRA

SEQ ID NO: 230839 - protein, 397 aa, unidentified
MPELWAGIDAGKAHHHCVLIDDEGNRLLSRRVANDETALIELLRDVRTLAAGREVLWATDLNRGGAALLIGVLEAHQQTLVYIPGRSVYHAARTYRGDGKSDAKDAAIIADQARMRRDLHPIRNGDQISTDLRLLISRRTDLVCDRTRAINRLCAVLLEYFPALEAAFDYAMVKAAVVLLTKYTTPAGIRRAGEARIAAWLRNQGCYNAKTIAARAVTAARAQETTVQAQGVGAELVAALARTVLDLHEQVAQIEKRIETRFREHQQAEILLSMPGFGTLLASEFLAATGGDLTAYDSAARLVGVAGLAPVPRDSGRISGNFHRPKRYDRQLLNAFYLAAQSAARYCPQSRTYYQRKRSEGKNHKQAVLSLARRRLNVLWAMLRDNTPYQHSAVPAV

SEQ ID NO: 230840 - protein, 348 aa, unidentified
MTEAYDGRQVVGMDLHRRRSVLVRMTEDGRKLETVRITNSPAELRKVIARAGENPRVVVEATYGWYWAADVLEEAGAEVHLAHPLGVKAYTYRRVKNDERDAADLADLLRMGRLPEAWIAPPEIRELREITRYRHKLVKARTSYKDQVHGVLAKLGVPVSHSDIFGVHGQAWLDGLPLPQPYAGKVASLRQLAGELGAEIALLDKVLGDLLDGHQGYRAIQQLPGIGPVLAAVIVAEIGDIRRFPGPGQLGSWAGLTPRHYESDTKVIRGHVTKQGSRMLRWAVTEAIQRQPAGSRPREVKDAIIARRGKEAKNIAKIAAARELLTLVFYGMRDGRVRRLAAPRRPAA

SEQ ID NO: 230841 - protein, 312 aa, unidentified
MSFNGTSVGLDVHALSVVAHAVDEESGLVERARLCPDHGEVLRWLGQLRGPLRVAYEAGPTGFGLARALAEARIECVVAAPSKLIRPAGDRVKTDVSDAAHLTRLLRLGEITPVSVPEADVEAVRDLVRAREDARADLMRVRHRLSKLLLRQGRVYSGGQAWTGLHQTWLRQQRFTHAHTAAAFDHHFDAVLSATAARDHLDEQIVGVAASPRWADTVDRLGCLRGISALTGLALAVEIGDWSRFTGASIGAYVGLVPTEYSSGASRVLGSITKAGNAHVRRLLIEAAWHHRASYRNPGPRCGPAGPRSTQP

SEQ ID NO: 230842 - protein, 337 aa, unidentified
MAILTVGIDLAKNVFALHGVNEAGKPELLRPKVPRAKLLEVVATLPPCLIGMEACSGAHHWAREFAQHGHRVKLMAPKFVAPYRRSGKRGKNDAADAAAICEAVRRPNMLFVPIKSQEQQSRLMVHRARQGFVVTRTATLNRIRGLLSELGLVMSLKASTVRREATLMLEALPGYANTVIGDLLSEVTHLDQRIAQYDAHIRAMAKDTSARQLMHLRGVGETTATALVAMIGRGHDFTGGRQLAAWLGLVPSQYSSGGKMRLGRITKAGDPYLRSLLIMGARAVVNAAKAKTDALSQWVTRLVERRGYWKAVVAVAAKNARMAWAVLSKGEAFKMPA

SEQ ID NO: 230843 - protein, 489 aa, unidentified
MSKASQQQQGKKDATLKAQAPKRQARGSHRPQGEGNQRRSQLRITNPDAAGIDIGSQVHYVAVPEERAERTVRSFGAYTTQLEELAHWLKECAVKTVAMESTGIYWIPLYQKLEEAGFEVLLVDARQAKHVPGRKSDVQDCQWLQQLHTYGLLRAAFRPEDSVCRLRTLQRHRKNLVECAGMFVQHMQKALNEMNLHLHHVLSDISGYSGLAILDAILAGERDPRKLASLADYRVKKSQAQIEAALTGDYRPELLFVLNQSLQDYRQIQQQLAQCDLRIEKQLRQIADCTNPSQDCGPRQQGPESATGKRAKIKPKDALEVSLAGHLKRILGVDLTTIPGLNVLAILTLISEIGTNMAKWRNEKAFVSWLGLSPNNKISGQRLLSSRTRKVVNRAATTLRLAAMVLGHTNTPLGSFYRRKRAQLGAPKAITATARKLGCLIYRLIKNGQAYQAPDLHVYELKYKDQILNSLRKRANSFGFDLVEVPKAA

SEQ ID NO: 230844 - protein, 337 aa, unidentified
MNDCTLYVGLDYHQSSVQVCAMDVSGNVLVNRPCANNWAAIADAAEAHGRVKRAAIESCAGAANLTDDLVSRAGWSMDLAHPGYVQRMKGSPDKTDFSDARMLADLERVGYLPKVWLAPEDVRELRRVVRFRQALVAERRNIKLRIGALLRDQRVRCHDARPWTKVWLHWLRSTDAVSPESRWVIDRQLARLAYTLEDISAVEDRLTELTKSDPLVVALQGLHGIGPVTSWTIRAEIGRFDRFRTGKQLARFCGLTPRNASSGTRVADAGLIKAGNRQLRATLIEAAQRLIRMDTTWKALAHKLLARGKPKCVVIAAVANRWVRWLFHQMQPSQLAA

SEQ ID NO: 230845 - protein, 319 aa, unidentified
MVALYAGLDVSLELTSICVVDEEGRMVLEAKAASEPDAIADALREAAGEFVRVGLEAGPLSQWLFFGLKDAGLPAVCLEARHAKAAMVAMNRNKNDRNDARSIAQLVRSGWFKAVHVKSRRSQELRTLLTAREFYVNKLRDHENEIRGLLRPFGLKVGKVGARDFEARARELVAREPLLELCIETLLAGRAAMKKALADLHRALLRLTENDELCRRFMTIPGVGPVTALAFKATIDDPDRFRRSNDVGAHLGLTPRQYQSGETDVRGRISRSGDAFTRTALFTAAPRDADPVSAVDGDPCLGHADRAAQQPEEGQDRCG

SEQ ID NO: 230846 - protein, 340 aa, unidentified
MSTQFFCGVDLAKHHFSLHAVDDHGKVILHKSVSRAKLLATLANMPTMCIGIEACSGAHYWAREFNKLGHDTRIMAAKYVGPYRTKGKNDLNDAVAICDAVQRPNSRFIPVKSPERQAILATHRVCEHWVNERTALINRIRALLAEFGIIIPTGRAAVHRQVPLILEAAENGLPDIARAVVADCFDHLQTLNQRIADTEQCFDMVTKASPNAHRILNVRGIGPQTATAIIATIGKGEQFDSGRDFAAWLGLVPKQYSTGGKPRLGRISKRGDKYLRTLLVHGARAVITNLGDKQYRLSVWGRNVLERRGMNRAIVALAAKNARIVWALLHHQTDYQDYAA

SEQ ID NO: 230847 - protein, 343 aa, unidentified
MPHYVGLDVSQKTTAICVVDEQGKRLWRGVCATDPGPISARISQHAGVDAKVGIETGSMTPWLVHGLRAAGLDVACLDARRVKAALQMQLNKTDENDAEGLAQIMRTGWYRAVHVKSLDAHRARALLGARAQLVGMTTRLSNMIRGVLKTFGLLPGAGRGLRFDRKVEALLEGAPEIALVVRPLLATWRQLRQQIAVFDKAVLQQVRADPICRLLMTVPGIGALSSLMYVSTVENPSRFSRSRAVGAHLGLTPRRYQSGETDRSGHISRCGDGLARTLMYEAAVVILHRVKRPLHLKDWAAAIERRSGSGKARVALARKLSVILHSVWRSGEPFRWAIPAMAA

SEQ ID NO: 230848 - protein, 342 aa, unidentified
MDYFAGLDVSLETANICIVDADGDILSEKKVEAEPAAIIAGLKQFGQAFKRIGLEAGPTSSWLYSELHRSGYPAICLECRHVKAGLSAMRNKTDRNDARGIAQLVRLGWFRQVHVKSEEAQRVRMLLVNRQQLLTKALDLENSVRGSLKVFGLRVGTVTRRTFEGRVLQLIAEDRSLLAITEPMLRVRRALIAEFEQLDRLCRQLARRDPLCHRLMTVPGVGTVVALTYRTGIDAPERFSKSRDVGAHFGLTPRRYSSGQTDYDGHISRCGDAMVRTALYQAANVLLHHGRWSSLRSWAMRIAKRSSVKVAKVALARRLAVVMHRMWVDGTAFRWTREVAAA

SEQ ID NO: 230849 - protein, 411 aa, unidentified
MDVIVERVGALDVHKAQVTACVRVPGERGARAPHLAEFKTTVRGLLALRDWLAAPRVTQVAMEATGEFWKPVWAVLEDDFELLLVNARHVKQVPGRKTDVSDAAWLCQLAEAGLLRASFVPPKPIRALRQLTRYRKAQIAERQREANRLHKALEDTGIKLDCVATDILGVSGRAMLDALVSGTTDPEVLAELARGKLRKKLPALKEALEGRFDSLHALLVGSILAHLDFLDEQIDRLSDAIEQQLRPFAPAVELLRSIPGVERRTAQVIIAEIGTDMSVFPTAGHLASWAGQCPGNHQSAGKRRSGRTRKGSKWLNQALKEAAMAALRSNDSYLQALYRRKKSQLGHGRALGAVKHSIICACWHMLSTGELYNDLGGDYYARRDPERQTRRLIAQLERLGHTVTLQEATAA

SEQ ID NO: 230850 - protein, 425 aa, unidentified
MHFKWNNKINQVTENTLVVGMDIAKHIHYACFVDERGRVIEKAFAVHQSKEGFENLYGKILQTMKEANKTEVIIGIEPTGHYWMNLAYFLDQYGIPLVMVNPMHVRRSKELDDNLPTKHDKKDALVIARLLKDGRFSYPRILKDIEAELRIGPTLRSKLTEDLASIKNRIIRWLDRYFPEFTQVFPNFGKMALATLEMTPLPKDIKEKTADELVFLYRQVKGMRAPQLPKAKLLIEAAKNSIGLTEGTQMAQHEIATLLRQYRLLEAEIETINNQLAEMVQTTMEYEILASVPGLGDATIVDLLSEVGSFSLYENPRQLIKLAGLTLRESSSGQHKGQKHISKRGRKKLRNTLFKVIVPLIRHNEAFKQLHKYYTTRQQNPLRGKQSMVILCGKLLKVLHGICKKKVFFNEQHMMNDLYCLAEAA

SEQ ID NO: 230851 - protein, 330 aa, unidentified
MRKSNDLSRCLAALEQDSTLIAVIEMGKSSWLVAGVVPGIERRPLKKLAANEGALLALLYRWRDEAKKAGHPIKRICVAYEAGRDGFWLARWLRKRKIEAYVIHSTSVCVSREHRRAKTDRLDTEHLMRAFIGWLRGETDHCRMCAIPTLEEEDGKRPSREHEHLVGERTRIINRLKSCLARLGIRDFNPASCKAPERLAKVRTPEGTPIPPNSLDELKHDMAHLRFISDQIDEVEKARLARLQKAPKKGPHAMVRLLASIHGLGIETADTLVHEVFSKNFRDRRGAPRYAGLTGSPDESGERRREKGLARAGNTRVRRSMINLSTQIAV

SEQ ID NO: 230852 - protein, 388 aa, unidentified
MQVVAARAEAPTAIQTDLRAIFVSLELSRSVWLVTSLSPGGGEKMSKHSVQAGDIAGLLRRFAQLKEKARARTGRDFPVITIQEAGLDGFWIHRVLQSEGIESHVVDAASILTSRRRRRAKTDKIDGETLVRTLLAYKRGEPRVCSMVKSPTPEEEDRRRICRERRALVAERVQHTNRIKGLLFAQGAFDYEPLKRNRRAHLEDLKTGDGRPLPVNLKAQISRELDRLEVVLQQLQTVDAERDALLEPASEASPAPAAMLSQLKGIGPEFATILYTEGLFRGFDNRRQVAAYAGLAPTPWQSGSVDHEQGVSKAGNPRLRTTMIQLAWLWLRHQPDSALSRWFQDRVQRNGGRMRKTTIVALARKLLVALWKYATSGVVIEGAVLKAA

SEQ ID NO: 230853 - protein, 396 aa, unidentified
MSGVMIGIDPHKGSHTALALDASETKLGQLRVRAAVGQVDGLLEWARRWPERSWAIEGATGLGHLLAQQLLAAGEHVLDVQPKLAARVRLLNTGQVNKNDPNDARSVAIAALRSTDVRAVRAEDQAAVIKIWARRHRDLSRARNRIACRLHAVLCELVPGGFAKEITAAQANQALAGIAPLGATDAARLELAHELLDELRTVDEQRRATKNRITRIVAASKTSIIDIYGVGPIIAATVLGYVGDVRRFATRDRFAAYNGTAPIDVSSGNNNVQRLSRRGNRQLNHAIHMAALSQIRYPDTIGRRYYDRKVAEGMKHKSALRALKRKISDAIYAHLVDDAVQKDPGGQSGNDSASSAAGSHPETPALRRSHSRVATKPTTARPTQQLPKPKRSSLST

SEQ ID NO: 230854 - protein, 350 aa, unidentified
MAITMIGLDTAKSVFQVHGVDINGSSQLKRKLRREELLSFFEKQEKCIVVIEACGAGHHWARVLSGLGHEVKLIAPEAARPFVKKGKKNDPADAAALCEAGRRPDIKFVPIKTTEQQAVLALHAVRSLLVKQETMLANAMRGLAAEFGITVAKGMSKLEELMRLVDTNTTIPKLAQHALGELHSHCGGVSARIAKLEAQIVEHARHDETARRLATVPGIGPITASMISASVGDNIGAFKSARHFAAWLGLVPRQHSTGGKTRLGRITKAGNKEIRKLLVLGATSMVGRAAQWNSAAGIWVRGVLERRPVRLATVALANKMARIAWALMTRKEVYRAKGRVAATATAEAVA

SEQ ID NO: 230855 - protein, 439 aa, unidentified
MKVMYERVAGIDVHKDMVKVAIRSPGDKPWTRKTEIVEFKTFYGVLQHMAAELRERGVTHVVMEASGVYTEPVYHALREQDFEQVAVINPAHAKALKGHKTDARDCARLAELFECGLLRGSYIPSAEQKEMRDLTRYRMKTVQARTSEIQRLGKALESAGIKLGSVASDLSGKSATLMIEALIDGERRGGVLADLAIGRMRTAGKLADLSRALAGRFTEHHALLCRLHRDRITGFDAAVGGLDERIAGKAGRWQRQIGLLTTVPGFGDVVACAWVAEIGPAPHQYFPDHEKLASWITLCPGNNISARKRKHGRTGDAGTYIKPMLVQAAWAAIRVRGRLQARYNRLVRRFGGDKNPGAKKKAITAIAHTLLKIAYQVLKTGMPYTEPGADFYTRRESPEHRQAFLERQLQNLHPGCTITVTISPPEPPDRPALAGTAVA

SEQ ID NO: 230856 - protein, 388 aa, unidentified
MPAAETPVAYLGIDVGKSSHSACALDAGGGVAFRAELANRPDDIDRLLERAGSGALVVVDQKRNIGALVLARAHAHGNPCAYLPGYAEKQARGMFPGTAKTDAIDAEVIARTALGVPRALRPAPEEPEGTASLRILSSQREFASSARTRAKNRLRATLLEADPALEGAVDPSSRWQVSMLAEFGGAAGCSAAGWRRFSNAARRAGAPAAGARRLWEALLASSRSGRRLPAGEDVAVRMLAREIASLDADIEELDSLVADSLAGDEVYECLLTVPGIGPKTAAALVTSIDISAFRGHDELASYCGVAPSDRRSGSSIRSTSPQHGGNRQLKNLLIFSCNSLIGTDNRFGRYYGECRARGMRHGKALKAVARKRLKVIYAIMRDAVPYAS

SEQ ID NO: 230857 - protein, 353 aa, unidentified
MKKISTATEGKIEKVEGQKLTIGLDLGDRSSWYCVLEETGEVLLEQKLPTTPKAMKEVFGKVPRSRIALETGMHSPWVSRWLSELGQEVIVAHARNVRLIGESRRKDDRFDARTLARLARIDPELLGPVQHRSRKAQADLTVIRARAGLVRARTSLINTARGLTKSYGERLRGCSPRKVNRELAEGLSPELQSALQPLLHEIESLSERIREYNDRVQQIAPESYPEVARLEQVKGVGTLIALTYVLTLEEPRRFHKSRDVGCYVGLQPGRRNSGQSEPQLHISKEGDPYLRTLLVQGAHHILGPFGVDSDLRRWGLRLAERGGKNGKKRAVIAVARKLAVLRNSSQAMLSAAA

SEQ ID NO: 230858 - protein, 337 aa, unidentified
MQLPKFVIMKHQFTASPKLYIGMDIHKKSWSIHLRTDISDHKSMTIPPNTAILERYVFENFPDHEVHLVYESGCCGFWVARYFLNLGWHVKVVNPADIPTMNKQTYQKTDSIDCRNLSKQLQADQLRGIYVPDEAQDFLKSLLRQRAVVSRQLRSTKNGIKSLLLYHGIVIPTEYDNNNWSKAFVEWIKAIVWKSATVRTAMESKLRTLEFLHREYLSLANELRAYCRKHYKTDYYLLKSVPGVGGYLASAILAEIGDLRRFNKASDFAGYVGIIPMMRNSGGTEKIIGVTPRCRALLRSYIIESAWTALRLDPHMQSYYRKHAGKKLKGHHRENSA

SEQ ID NO: 230859 - protein, 361 aa, unidentified
MFSERTSVGLDVHARSVSAAAIDGLTGEVIKARLRPVHEEVRGWVAGLPGPCAVTYEAGPTGFGLARALTDAGVRCEVAASSKLQRPAGDRVKTDARDALHLAKLLRLDAVVAVRIPSLAEEAARDLVRAREASRQDLMRARHRVSKLLLRHGIVYGGGKAWTELHDRWLRQQRFGSVATQAAFDDGYETVVLATGRRARLDEKIIALANDSEFTALTRRLACLRGIATLTGFALAVEIGDWDRFSGASIGAYLGLVPSEHSSGQTRSQGAITKTGNTHVRRLLVEAAWHHRSTYRGPGVVLERRWDQAPAAARARAHAGNQRLHQRWVSYQLRKKRSVIANVAIARELAGWCWSLAVLPD

SEQ ID NO: 230860 - protein, 370 aa, unidentified
MYQLSRSKQAALDYNSTIIGALELSEKKWVLAVQLPGVSRHSRHVLEACGDGLASFVERLKARCAAAGRKIARVILTHEAGRDGFWLARFLARRGIEVHVIQPSSLPVDRRARRAKTDIIDVEMLLRTLMAWLRGEPRVCSMVPIPSEADEEARRAYREREDLTGERRSIVNKIDGILATLGIKGYKALRRDRREQLTALRQPDGEPILQKAKARIERLLDRLDLVLKLIEQVESARDAVLKKDAPADEAERMIRSLTDLRSIGPDFATLLVREAFVRQFRNRRALGGYVGLGGTPFSSGGSEREQGIGKDGNRRVRAAMVELAWTWLRWQPDSALSVWFRARVGAMGGRIKKITFGKKPSLSANVSDGA

SEQ ID NO: 230861 - protein, 318 aa, unidentified
MTSYIGVDVGKKSLCFYLPITDKSIEIPNNEQGFAKLISYCAQHYKLSNIIVVFEPTGGYERGLREFLKLNKINFATVHPNKVRSYAKALGWLAKTDSIDSKLLADYGKVFSLPAKQDYSSKSQEDLHALIQRREQLILFKNQEIARLETQHNKFVIKSIKNHIAQLDKQLMQIQQSIEELCNNDPIIKSKVSILTSIPGVGITVATTAICEVPQLGNIEFSKLTALTGLAPYARESGQYKGKRSIFAGRGNLRKVLYMAAVASLRCNKKLKDFYDRLIDNHKPPKVALVAVMRKLLSFMHALIKNNSSWKDNLNYAS

SEQ ID NO: 230862 - protein, 357 aa, unidentified
MTRKLYIGADVSAATIDVAGQCDTQRQVVGQFANSSEGFAEMMTQLASVLAQPATEIYLILEPTGGYELALVAFGHSQGWQVCLPNPKQVRDWAKGDGRRAKTDGQDAQMLAAFGAAKQPKPQADLAPEVQELADLLRRQEDLEQLLRSERNRLGSYQTHPQPSQRVLDSLQRTISAVQAELDDLNQQIEAIVTSQPTLKADRQRLRTVPGIGAKNVLPILVHLYRWQARAGQSADAKGLVAFTGVDPQPFQSGRSVRKRSTISRQGDHRIRQLLYMGALGGLRRKGHNPLRNFYSGLVRRGKAKVLALVAASRKILVWAWAVFTQRVDFDPTRFPVIEPRVCLNLGARGSGERMVG

SEQ ID NO: 230863 - protein, 419 aa, unidentified
MSFKILKNNCCGLDVHKTWIFACIGITDSHNRTEYKQARFSSFTKGLQELCDWLAKYNCTDVCMESTGKYWIPVFNILEKNNIWVTLSHPKYTKPQKGNKTDRKDAKWICDLYMCGMVKPSFIPPADIRELRDLVRYRYKLTCMITGEKNRAQNCLTVSNLKLDDVFSDVFGKSSRSITEQILQHPGETFDVAPFVDGRCKTPIEEIQAAVDGAISTEQAVKLRQCLNHIDELEMHKAEIEREIFRLSDKYEDALTLIRTVPGFDKNPMTAIQVLSEIGGDMSVFPTAKNLVSWAGCCPRNDQSNRKIKSTRISRAGSYFKPVLVQVANALIKSKKHPEITARYRRIKVRRGHKKALIAICRMLLTAIWHILTDLKPYTPEGFLEQRPVNGAKVLTTSQALNLLKQRGYIIKDDVIPVS

SEQ ID NO: 230864 - protein, 328 aa, unidentified
MRVILHNCCGLDVHKDSIVACILKSVNISENTKKDEVDKDICVFDTFPSGLKKLKSWLESQNCQHVAMESTGVYWHPVYDTLEDAFNGNIEIFVVNARHMKNVRGKKTDIKDAEWLADLLRHGLVRGSFIPPHDVRKLRQQTRYRKTIVNDISRQKNRIEKTLQMTGFKLSTFLSDVFGVSGRNLINVLIEKGHITVSDVETEAKYIEADKRANIAKAINGKLDEVQRNFLSMQIDHLNALQSHLSSIEESIDELSVLFEEAIQRLKTIPGIGLTAATSIIAEIGTDMSKFPSAEHFCSWAGVTPGANVSAGKKKTQESCTGIPTSKD

SEQ ID NO: 230865 - protein, 344 aa, unidentified
MELFTLGIDLGKTTFHLVGMNQRGEVVLRKRFSRVQLLHFTANLKVNLIGMEACGGSHFLGRALREQGHEVRLIPAQYVKPYVKTNKSDYIDAEAIAEAVGRPTMRFVPVKSDDQLDLQSLHRVRERWVMRRTAVVNQIRGLLLERGITLRKGRRYVDEALPGILADGSSKLSGAVLVLLAELKQELEQLAEKIDSADKSIEKIARENEACRRLVKMPGVGPVTATAIIATIGNGAAFRKGRDFAAWLGVVPEEHSTGGKQTLWKIPKRGNQYLRRLFVQGARAVMQHRTKQSSGLSAWLAQLMARTHQNIAIVALANKMARMAWAVLAKNEAYRPPLLAGTAI

SEQ ID NO: 230866 - protein, 331 aa, unidentified
MKKKDVIGIDVSKLTIDTYVKIAQVHAEFSNDNKGFRQLVKWIKKHTDCQIEELLICFETTGLYSLQLASFLSQINIDFVMENPIQIKRSMGVVRGKDDHVDSQRIAEYAYMRKENLKHTKLPCEELIKMQNLLAMRERMVRQKAGYQASLGEYKRVLVQQQQKDLFLLLNNMISALKKQILKADKTLIEIIQSNKKLKSTYTLLTSIKGIGVILAANIMVTTICFTKFNDSRKYACYCGTAPFKYSSGTSIKGRTKVSQMANKKMKALFNLAALSAIQHDPELKLYFDKRKANGANGMSTINIIRNKIIHRVFAVIKRGTPYVVMAKYAA

SEQ ID NO: 230867 - protein, 341 aa, unidentified
MDIVTVGIDLAKNVFALHGVDQSGKAVFIKPRVARSQLLEMVAHLPPCLIGMEACSGAHHWTREFSRYGHTVKLMAPKFVAPYRMSGKRGKNDAADATAICEAVTRPNMRFVPVKDVDQQAILCLHRTRQGFVEERTALYNRLRGLISEFGIVLAQKVERLRREIGAHLEALPGWANRCVGDLLAHADRLNERIEEYDKAIAQAARQDARSRQLMQLPGIGPTTASALVASLGGGHDFKNGRQLAAWAGLVPGQCSSGGKARLGRITKAGDAYLRSLLVMGARAVLAGLGDKQDRFSRWARSLVERRGYWKAAVAIAAKNLRLAWAVLHYGDDFRRIEETA

SEQ ID NO: 230868 - protein, 356 aa, unidentified
MQAQVTKKIDFTGKQLFIGLDVHKKSWSVTILIDGTEHRTFTQPPDPESLNSYLHRMFPGGEYNSAYEAGFCGYGVHRRLNQLGINNIVINAADIPTSQKDKLQKRDPVDSRKIARSLEKGSLHGIHIFDRELEELRSLNRTRFYLMRDLRRSKTRIKSFLQYYGEPIPQEFDNNQWTLRFVSWLKQVKMHTQSGQDAFSNLIGSYEHHRSQLLTLSRQIRERIREYDRELYTLLKSISGIGPLTASALITELGDINRFKNIDQLGSYVGLIPRIRESGETTYTGGITFRCNSFLRTLLIESSWQAIRMDPALMQYYHSHLVNNKGHKVVIKVARKLLNRIRYVMKNRQPYVTGVV

SEQ ID NO: 230869 - protein, 358 aa, unidentified
MSRCIPTGDATITLGVDTHKDTHVGVALDGLGRLQGTLSVAANPAGYKRLVEWASEFGHLEHAGVEGTGSFGAGLARFLKAQEIKVFEVIRPKRRDQYRSGKSDPIDAEAAARAVLAGTATGEPKDADGEVEMIRTLRTTRRCAVKARAGAANQLQTLLVTAPEGLKSDLCGLSTARLVEKASRLRPGANPSNVEAATKFALRSVSRRYQQLSEEISELDEQLDRLVTEAAPELVAVDGVGTDTAASLLIAAGDNPERLRDEAAFAHLCGAAPIPASSGQTIRHRLNRHGNRDANRALYVIAVCRMSRDERTRAYVAKRTAEGKSKKEIIRCLKRYIAREIYRILSSLPSRNSPISTP

SEQ ID NO: 230870 - protein, 343 aa, unidentified
MQTVTTIGLDIAKSVFQVHGVDAEGNVVIRRQIKRRYVVTFFQKLPPCLVGIEACASSHHWSRELQAFGHSVRLMPPAYVKPYVKRHKNDATDAEAICEAVTRPNMRFVATKTPEQQSCLTLHRTRHLFIRQQTSVINVIRAHLAEFGIVAPVGRNGVEQLLGIVADSNDKRLPEVARACVAALGAQLQMLKAQILQFDRMIMAWHRSSEPSRRLDNIPGIGPVLATALVASIADPKMFRSGRDFSAWIGLVPKQNSSGGKDKLGSISKRGDRYLRSLFTTGALAVIRYAQIHGAKHRPWLTALLARRPAKVAAIALANKIARMAWAIMAKGERYKEPAALAA

SEQ ID NO: 230871 - protein, 344 aa, unidentified
MTIVEEKPAITGGVDTHSEIHVAAALDPLGGLLGTREFPATAAGYASLLGWLGKFGDIALVGVEGTGSYGAGLARHLAAHGVRVVEAGRADRQDRHRNGKSDPLDAVSAARAAQSGRASGIPKGGDGAVEAIRSLMVAKRSARHERTQAINQARALILTGPDELRARFAGKRAAALAEAVAALRPRPGDAADYSLRVALRELGRRVEFLDAQIERLDDLIVPLVTACAPGLLSLYGVGPDTAALLLVAAGDHPERLRSEAAWAHMCAVAPIPASSGKTRRHRLNRGGNREANHALWRIVITRMSAHPATRAYVQRRTAEGLSKKDIIRCLKRYVAREVYPYLRG

SEQ ID NO: 230872 - protein, 319 aa, unidentified
MGRNNIEFEQVIDRGCGLDVHRDTVVATVMGKGIQTETRTFGTTTSSLKELGEWLASLQVTDGAMESTGIYWKPVLHVLREYPLNLIVVNARHIKNVPGRKTDKADSQWICKLLISGLLKGSFIPPENIQELRDLHRYKKKLVGTIASEKNRIIRVLEDANVKLSSVVSDTSGVTATYLINGLIEGRRDLDNLISECYHRKLQSSREQIKEAINGRLTPHHAFILRSMQKHIASVETQISEIDVEIEKYIKDFEKEIELLQTIPGVGKDGAIGIVAEIGVDMDVFPSEHHLASHSGMCPGNNESAGKKKVQEHDKGTNT

SEQ ID NO: 230873 - protein, 400 aa, unidentified
MAVMIGTGPHKGSHTAVAVGAAEEPLGKLRVRACPDQAGKLVAWAQAWPERTWAVEGARGLGRLLARQLVAAGERVLDVQPKLAARVRLLEAGDTNKTDPNDARSVAVAALRSKGRQEVTADGHAVVLKVRAKRHRDLSRTRNQVVCRLHAVLCELIPGGVPDEITAGQAARILEQVAPAGAVAQARCELAAELLAGIRHLDAQRREVKKKLAAAVTASGTSLTDVFGVGPVIAATVIGDVITVARFPSRDHFAACNGTAPAGVSSGQRKIHRLSLRGNRRLNHAVHMAAINWIRHKHSDGRAYYQRKLAEGKTHKEALRCLKRRISDAIYARLRADARKAGPGGQPGNDTGSSVTGSHPGHRLFGHATSGPEPSLRAPATFTQATPAPEPSAKKIQRAT

SEQ ID NO: 230874 - protein, 375 aa, unidentified
MRDHSEAFVAFDTSKLRNAVAIAEAGRSGEVRFLGEIDNTAGATAKLVKKLAAKYGRLSFCYEAGPTGYGLYRQISQLGHDCIVAAPSLIPKKAGDRVKTNRRDALGMVTQFRAGELTAVWVPDPRHEAMRDLTRARGTAVEDLRRKRQHISSFLLRLGLHYAGKKTWTKTHMKWLASQKLEHAEQRIAFEEMLLAVRQAEERIARLEEAIRAVVPDWSLAQVVDALMAMRGIDMVSACAFLAEIGDLSRFRSPRELMAYLGLVPSEHSTGDTVRRGSITKTGNRRARRILVECAWSYRHPPRVGKKKQDKVAAAPRGVREIAWKAQHRLYGRYRALTRKGKPKTVVVTAIAREFAGFIWAINREIATAGVVASP

SEQ ID NO: 230875 - protein, 365 aa, unidentified
MEWPAPRWPALSWLSNEEGVHSMQIAVLGIDLGKNSCSVVGLNAVGQVVLRRRMRRDSVVQLVRRLPPCRVAMEACCGAHHLARQLASFGHAVRLMSPEYVRPYVKAQKNDDRDAEAIAEASTRPTMRFVETKSEDQLDLQTLHRSRSRLVSERTALINQLRAILLERGIVIAQGRRKLEQRLAEMLVDGEVLTISARMQILIEDMRTQWRELDRRIAEFDAEFERYARENAAARRLASIPGIGVMNATALVAAIGNAETFARGRDLAAWLGLVPRQATTGGKPRLLGISKRGNTYLRTLLIHGARAAMPSLSKSATPLGEWLRALLARCHPNTATVALANKLARIAWAVLRRECSFRIVPAPAA

SEQ ID NO: 230876 - protein, 418 aa, unidentified
MTTFTTEFTAHIGIDWADKKHDFCIQGVNQSTREFGILTHSAEKIDDWVQSLHQRFGGQLAISIELTKGPIVYALQKYNFITIFPINPLLLAKYREAFTPSKAKDDPTDAELALDLMINYPKKIKPLALQSTPIRKLMYLVEKRRRLVEDRRRFGNRLIYVLKQYFPQLLEMFSHRDSEVFCNFIRRWPNLQKLKRARADTIRKFFLAAGGRSVPLIEKRIEIINHAQYITEDLAIVDSHQLLAISISDQIITTVRAISRFDIEIEKLFHEQPDAEFFESLPSAGPCMAPRLLVAFGENRDRFSTASEVQMYAGVAPVTVRSGQKSWVHWRWQCSTFLRQSFIEWTAKTVRSSYWAGLYYTQQRKKGNSHQSAVRSLAFKWIRILFRCWKSRVNYSETKYLKSLRDKKSPLLLLKTVD

SEQ ID NO: 230877 - protein, 411 aa, unidentified
MEQIHDRVAGLDVHRDSVAACVRTPGPRGGTRIEKERFSTTTGGLCQLAAWLAEREVSLAAMEATGVYWKPVYYALENKLEVWLCNAHHVKNVPGRKTDLSDAEWLADVAAHGMVRPSFVPPPPIRELRELTRYRKTQIDARVAEIQRLEKVLQDAGIKLTSVASKVLTQSGRAMVEALICGRRDPAELANLAMGKLRPKIPALTEALTGHFGPHHAIAARRILDHVDFLDASIATLTEQIDARTAPFGAVHDLLLPVPGFERLSIDTVIAETGADMSRFPSPAHLAKWAGVCPGNYESAGRRRNVGTPPGNKWLRRTLIEVARAAVRTKGSYFGAQYRQIAKRRGPNKAAVAVANSLIELVWHLLSTGEVFMDLGDDYFQCRRDPVRETRRLVAQLEQLGYSVTLAAATP

SEQ ID NO: 230878 - protein, 346 aa, unidentified
MLVIGCDFHPSWQQVCWVDTITGETEEKKLVHGSGEAERFYRQLSGPALIGMESTGNHQWFLEMVTAAGHELWVGDAAKIRASDVRQQKNDRRDAALLLKLLLDGRFPRIWVPSSEQKDLRQLLIHRHKLVRVRAQVKNELQHLALNQGVQRKQRLWSAAGQKVLNELALRPWGSRRREDLLKLLAMLDQQIAPLDLAVEQAAQENSQAKLLQSQPGVGPVTSLAFVLTMGDVSRFRRGKQVASYLGLIPREYSSGGHQRLGSISKQGNRFMRMLLVEAAQIAVRYDPGMRNEYLHRCHSKAKGVAKVAAARKLAIRLYWMLRTQKPYPQIVRIESSSRVALVGES

SEQ ID NO: 230879 - protein, 412 aa, unidentified
MEGETVIAGVDTHKDVHVLCLLDGLGRKIWSGSFGADPEGYDRLAEAIGDPGSCMVVGVEGTASYGAGLTRRLVELGYNVVEVLRPKRDKVRPGEGKSDPLDAERAARKAASGKGCSVPKSQDGWVEAVRQPYVARRLAVATSTSCVACAKSMLTTAPSALRERFRGRERPKDLMPLLARGRKAGDALEESVLASLRSVAAVWKEARSQVESLDERIRALLEANAPALLGVEGCGTTTAAALVVAAGDNPGRLKGEAAFSMMCGASPIPASSGKTDRHRLNRGGNRQANWALYEIAIKRMAYDERTRRYVARRTSEGKSRREAIRCLKRYIAREVYHVLMDPNPDGAAPEGPELAKMRKAMRVTQKKAAAELGLSAATLGHLERGKRRSTKLERRYYELLCELKGALPQTAS

SEQ ID NO: 230880 - protein, 441 aa, unidentified
MQEATQHDAVDVFVGVDVDVDVDVDVDVGKGRHHAVALDRNGKRLYNKALPNDEVKLRALIAELKTHRRLLFVVDQPSTIGALPVAVARAEGVLVAYLPGLAMRRIADLHAGEAKTDARDAAIIAEAARSMPHTLRSLRLADEQLAELTMLRGFDDDLAAQVTQTSNRIRGLLTQIHPALERVLGPRLDHPAVLDLLERYPSPSALAAANEKTLANRLTKLAPRLGKNWAAEIVQVLNEQAVIVPGTQAAAIVMPRLAQQLAALRKQRDEIAAEVERLVLAHPLWPVLTSMPGVGVRTAARRLTEAAPKAFATAAHLAAYVGLAPVTRRSGSSIRGEHPSRRGNKVLNAPCSSPPSLPYETQSHGPIPRARSSRASATTKYSSRSHGDAATSCLPCCATAPFTHPSQPLTLDERHRAPARAVPQHRRAAPRPCAGCDPAPM

SEQ ID NO: 230881 - protein, 444 aa, unidentified
MLKSSRETKYEIENLGDVIHPVCCGLDIHKTWIYAAILIYNFEKKQIHWITTRVTSFKKKLDKLAKWLIVNGCKYICMESTGQYWIPVFDALEDAGLKPIVAHPKYLKVLSGKKSDPNDARWIAKAFACGRVVASFIPSKAIRNLRSLVRFMIKISHEATSNKNRARNCLTSLGLKLDDVFSDVFGKSSRSIINYIIAHPGEKFDVAPFVDKACKTPVAMIQDSIDKAIDAKQDEGTLLKLRKALERLDDAEKDIQELKGNITQQMGAYKKQLDLIRTVPGFDTDPFTAMRVLIEIGPDMKVFPTMKHFCSWAGVCPHHDSSAYKVKGRRISRSGTYLKPLLVNIAKAVVRSKNHPEISRRFNRIKNRRGYMKAIIAVCRMFLTAIWNILSKGEPYRADGFMPVNNGNNKAISISQALAYVRSRGYAIIDDNSGALTTTGSQGT

SEQ ID NO: 230882 - protein, 358 aa, unidentified
MSNVKSSRLDFTGQPIYIGLDVHKKSWSVSIFSKYGEYKTFNQPPEADKLVHYLSHYFPGALYYAAYEAGYCGFWIHDQLRNKGIQCLVVNPADIPTKNKERRTKRDPIDCRKLARSLRNGEIEGIYVPCRSKLEDRTLIRTRQSMVRKQTRCKNQIKGMLLFYGVVIPEQREMGHWSRRFIQWIERIRMERASGDIALKAHLEELNHLRQLIASLNRAILHLARTEEYRPFVRLLKTVPGISTLTAMILLAELGEITRFPSLDELSCYVGLIPDTQESGEKEYVGAITQRRHAQLRWLLIEASWVAVRKDPALLMAFQEYCKRMRKTKAIVKIARKLLNRIRYVLKNQAEYVPCVIE

SEQ ID NO: 230883 - protein, 349 aa, unidentified
MTEQRRSYAGECVYVGVDVHKETYTVTCVCHKQIVKTATVQAEPASLAASLRRWFPGATLASAYEAGFSAFVLHRALTKAGISNIVVNPASLAVAANDKVKTDRRDSKRLAVDLADGRLRGISVPTEEEELARLLPRTRAQLVEHRATLARQIKAKLHQFGLIAPSSRRLLSHRYLREIESWTLPPELRVSLQMLAEQWRFVTRQLIEMRHLLREQATAQAAIDKVYRSVPGIGEVVARTLATELGDMTRFANERALFSYTGLTPSEYSSGAAVRRGPISRQGSSRVRHLLVETAWRALPYDAVLQTMFERIAATRGKKRAIVAIARRLIGRIRACFRQGTMYAVGTLA

SEQ ID NO: 230884 - protein, 353 aa, unidentified
MIIIGVDPHKSTHTATAVDPVTNTDLGSLRIEATLTGYRRMLAWAKQWPQRQWAIENAEGLGHHLAQWLVARAEVVLDVPATATARVRELSRGARRKNDRIDAAGAACVAAAQGDARPVVREDHVDALGLLDERRMNLSQHRTRTINQLHRLLRELLAGGVPTDLTAAKAVAALRVFRPCSTPERVRLQLCRELIADVRRLDQQLADNQAQATRLLDEQGTRLREIDGVGPVLAARILGRTGHVRRFATAAAFATYNGTAPVEVASAEYHCHRLNRHGDRQLNSALHTIAIVQVRMPDSAGRRYYDRRIADGKTPRAALRCLKRHLSNQLWRTMLADERRHRDRAHDQSATAS

SEQ ID NO: 230885 - protein, 418 aa, unidentified
MRIVNQRCCALDVHKKSITACVLVWDGHEAVEERKKEFGTYKKELERLRFWLMASKVTVVAMESAGVYWKAVWHVLERQRQFKLKLVNAQHYHGVDGQKTDQIDAAWLADLLQCGLLKGSFVPPQWQRELRDLTRLRVSLLQDQNRIQNRMEKVLEDANLKLGGVASDTLSVSARRIIRAVIAGDKDPGWMADLARGTLCGKRKELERSLHGFVTEHHRSLLATLLAQHESLERDVERLEADIRQRLAPYQELVDRLNEIPGFGLVTAWTVIAELGVDPKVFGTAQRAASWSGLCPGNRKSAGKRGHGRTRKGNRWIRRGLTQAALGASHSKDTYLRSFYWRIASKRGDKKARIATAHKQLEMAFIMIRDGVHFKELGANHLDLRHKDRTQKYLVNRLEGLGYRVTLEPAAHPQGRNS

SEQ ID NO: 230886 - protein, 317 aa, unidentified
MTCVGIDVAKGHLDLAIRSSSGEVETRRFNNDPEDIDQLKELLCEVDPERIVLEATGGYERPVSAALAAAGLPVAVVNPRQTRDFARATGRLAKTDEIDARILALFGERIQPEVRPAPSADQEVFSALVARRRQLQEMKTAEQNRLGTAPSEAVRSDIEEHLSFLEERLAETERQIKEAVENSSLWREEEELLCSIPGVGETTAHVLMAELPELGEANRQEIAKLVGVAPLNRDSGKHRGERCTWGGRASVRRALYMAALSATRHNRRIRSFYDRLVERGKAKKKALVACMRKLLVIMNTMMKNRTHWNPEYHASSA

SEQ ID NO: 230887 - protein, 391 aa, unidentified
MIYVGIDVAKDKHDCFITNSEGEMLFNAFTIPNNSDGFNDLYQKISSLTNDFSNIKVGLEATGHYNYNLLGFLIDKGFPTFVINPLHTNLFRKSLSLRQTKTDKVDSRTIALMMMSGVNLQSYSDTSYHNEELKSLTRYRFDKVKERAKLKTSVSRLVNILFPELEKLVPTLHMVSVYALLTELPSSHQIASCHLTHLTKLLHNASKGHYGKEKAVEIRNAARQSIGSSIPAKSLELKHTIKLIQELTSEIDEIETSIQSIMDSIHSPILSIPGINYRMGAMIIAEIGDFSRFSSPDKILAYAGLSPSTYQSGQLDSCYSHMEKRGSRYLRYALFNATKYVCIWDNTFAAYLAKKRAEGKHYNVAISHAAKKLVRVIYQMEKTGQSYNRAS

SEQ ID NO: 230888 - protein, 340 aa, unidentified
MNHYAGIDVSLECSSVCVVDASGKIICEGKVASEPEALISWLALVGVSLARVGLEAGPLSQWLFAALREAGLAVELLETRHVRDAFKAMPVKTDRKDARGIAQLMRLGWFRPVHCKSMAAQETRAVLTARKLVQAKLHDVEMSLRGILRGFGLKVGKTTPRRFEGRIKELVGGHPSLEVVVAALLAVRGVLRREFRAFEKRVRTMARDDARARLLTSVPGVGAIVALTFASAIDDPARFKSSKSVGAHFGMTPKKYQSGETDLSGRISKIGDGGVRTAVYEAANVILTRPVKGCTSLKSWAMKLAKRAGMQKAKVALARKLTVIMHKMLADGTTFTNRPA

SEQ ID NO: 230889 - protein, 415 aa, unidentified
MPMAVSCGIDWSEEHHDVAVVDADGRLVAKRRIGDDAAGFGQLLEVLAEAGDRPEAPIPVAIETTRGLLVACLRATGRPIYAINPLAVARYRQRHAVSGKKSDHADAVVLANILRTDRAAHRPLPADSELVRAIAVLARAQQDAGWDRTQAHNKLRSLLREYYPGLLAAFRTTRGGIMRPEARALLAAAPTPADAARLTRPELVGLLRQAGRQRRLATHAARLYAVFAASCLRQPPLVEQAMGRHALALLGALNTACANADELATATRQAFDQHPDAKLITSFVGLGQLTGARVLAELGDDRSRFAAAKAVKAYAGAAPVTRASGKSLLVTHRRVKNQRLATAGYQWAFAALTASPGAHAHYQRRRAAGDAHAAALRNLFNRLLGCLHHCLQTQQPYQEHAAFAPPGWQHRPASA

SEQ ID NO: 230890 - protein, 406 aa, unidentified
MYHVGIDIGKRRHDATVLDEEGQERLHISFPNTAAGAEQLLARLARLAEVRPEHFGVVVEATAHYWMGLHGFLTARGLTVTVINPLRSSSIRNLYLRKAKTDARDSFLLADLLRMNRVGESQLPDEDDLKLRQLSRLRFHLVDSVTTSKLRALALLDRIFPEYQSCFASVFTKSSRALLKRYTTPKQIAEARPTHLVRLLKEHSAGRVGRQTAQALQERAKQSIGATVALDTLAFQLKLLLAQIEFVEGQIEQISSAIADLMRAREPVILTIPGIGVVLGAAILGEIGDITRFRGPKNLVAFAGLDVTVHQSGQYQATRCRISKRGSPQLRRAIWLAAVGSRCRDAQLGDLYRRQLARGKHPKVAMGAVARKLTCLIYYICRHNERYDPNYRLRSTHVAESQSAGT

SEQ ID NO: 230891 - protein, 320 aa, unidentified
MQCIGVDVSKQELVTYDGVKGQTFPNDKQLGKFAEYLDSVKHAVVVFEPTSTYSHRLHALCASRSISTCQLNPRVVPNLRKASRSRSKTDKTDAELLYQYGMDRGKDEAREAKQVDRLVHALSVQLALYRVIQKARITYQGLLEAWINDPSTPKTSINRLGADIASMKGKEARCVARAEEIIEEDQQASSSLQALMSIPGLGPITSITLLAFFRRYQGANREQTVALAGLDPMQYQSGTSVHRRGKISKRGSRELRKRLYEATLSAARYNVSVRQLYQRLKDAGKPEKVARTAAARKLLLIAHAIYKTGEHYRSPVNQAT

SEQ ID NO: 230892 - protein, 319 aa, unidentified
MNETPVFVGIDVAKATLEVAVRPSGAQWVSANDEAGIQTLLGQLRALTPALVVLEATGGYEHAVAATLATAGVPVVIANPRQIRAFARATGQLAKTDAIDAQILALFAERVRPTPRPLPDDATQALEALLTRRRQLLEMLVAEKNRLGVARASLRRDIGQHIRWLERRVTDLDRELHAGVRASPVWRAQDDLLQSVPGVGPVLSYTLLAALPELGTLGRKQIAALVGVAPLARDSGTRRGRRTSWGGRAPVRTVLYMATLTATQWNPVLRHCYQRLRAAGKPHKVALIACMRRLLLILNAIVRTQTPWRATPTAARATA

SEQ ID NO: 230893 - protein, 332 aa, unidentified
MKKRIFYHFIGIDISKLTFDVAIITNNSSKGSYVFDNDPKGIKAFLRFLRNQKLILEDCLICMEHTGVYGKLIIRKLVEQQANVCVEMSLKIIRSLGVQRGKNDRIDAIRIAQYALKNSQELELYKPMLDVLEKIKLLVTIRERLVKSKADLTKYPKELERFAPELSKIANKNIKKSLKTLTDETKRIEQEIKNLILSDDRLNKTISLVTSVTGIGLFTALYLCIHTNLFTRYQSHKQLACYCGVVPFEHSSGTSIRKRARVHHMANKTLKKQLHLCAMAALNHDPEIKAYYKRKVDEGKSKMLVINNIRNKLIVRVCAVIKRQRPYIKTAA

SEQ ID NO: 230894 - protein, 369 aa, unidentified
MNSVAVVPMDIHKKFSKAVVMDGEGNVTSEERVSHEAPEEMKKFLSQFEPGTDVVMEATFNWPWIADLVEEMGMLPHLAHPPRVREMAKGMAKSDRKDAIFLGKLWLAGEIFPESYLAPPEVRRMRGLFRLRLALVRMRAAIKNTVHGQLHRQGILVEGCTDLFGKKGRRALKSLVMPEYERWQLEQKLRMLDDIVKRIGEIEKTIQKDLRHDPRADILMTLPGVGEITAYSLLAEIGEIERFPNSRALAAYAGLLPLDNESADKDFGKRTQRSCNQYLRTAMLEAVSGAVKSSVRMLSLHSRVKAKNRNKTGKARVAVARELIELVHLVLTRKVAYIEKRPLRPGSKKAGGETHPNRASREGLSAHRS

SEQ ID NO: 230895 - protein, 344 aa, unidentified
MENYAGIDVSLELSSVCVVDAQGQILKEAKVASEPDALVEFFERLGFAVKRIGLEAGPLSQWLHADLKGAGFETVLLETRHVKAALSAMTVKTDRKDARGIAQLIRMGWFRPVHAKSVDAQEIRALLIARKQLLGRLIDVELSIRGILRGFGLKVGPVTRKNFEARIRELVAGQATLERIAIAMLSARSALKAEYGRLHKAVLAIVRDDAVCRRLMTVPGVGPLVAITYKSAIDDPHRIVKSKAAGALFGLTPKKYQSGEKDVTGGITLAGDEIVRTVLYEAANVLLSRITRFSKLKRWGMDVAKRRGSKRAKVALARKLAVILHRIWVDGTTYRWTDAGPIAA

SEQ ID NO: 230896 - protein, 402 aa, unidentified
MNAVGIDVSKGKSMVAIMRPFGEIVSAPFEIKHTASDINSLVELINSVEGESRIVMEHTGRYYEALAHQLSEANLFVSAINPKLIKDFDNDSLRKVKSDKADAIKIARYALDKWQNLKQYNVMDELRNQLKTMNRQFGFYMKHKTAMKNNLIGILDQTYPGVNTYFDSPARSDGSQKWVDFASTYWHVDCVRKMSLNAFIVHYQNWCKRKKYNFSQSKAEEIYGKAKELVPVLPKDAITKLIIKQAVDQLNSASTTVESLRTLMNETASKLPEYPVVMAMKGVGTSLGPQLMAEIGDVSRFTHKSAITAFAGVDPGVNESGTYEQKSVPTSKRGSADLRKTLFQVMDVLIKTHPQDDPVYQFLDKKRTQGKPYYVYMTAGANKFLRIYYGRVKEYLSSLPES

SEQ ID NO: 230897 - protein, 405 aa, unidentified
MNAVGIDISKGKSMVSAMRPLGEVVFKPYEVIHTADELEKLAYSLKKLDGETRVIMECTGRYHEAVAGSLYEAGIFVSTVNPVLIHGYGNNSVRRAKNDRKDSIKIAKYGLDNWADLREYTPMEAVRQNLKTFGRQYNLYIKTKTALKNNLIALLDQTFPGANTLFDSPARPDGHQKWVDFVMEFWHCECVASLSERAFTERYRKWSKKNGYNFSLGKAADVYASSAGHFATMPKDGHTKLLITGAATQLTAVSYMVETFRAEMLRLASSLPEYPVVMAMYGVGVTLGPQIMAEIGDVRRFERKQSLVAFAGVDPEPNQSGTHNPISRPASKRGSPALRKSLYLVMSALLRKAPADDPVYQFLAKKRAEGKPYYVYMTAGATKFLRVYYGRVKEYLNSLDDNSDA

SEQ ID NO: 230898 - protein, 345 aa, unidentified
MKLTTVGIDLAKSVFQIHGVDERGKIILKKQLKRSQMMAFFVNLPTCLIGMEACGSAHHWARELQKLGHTVRLMAPQFVKPYVKTNKNDMADAEAICEAVGRPNMRFVPIKTVEQQAILSLHRVRQGFVKARTAQSNQIRGLLAEFGLILPKGIGQIAQRIPELLEDADNGLPGMFRQLIDRLLAHFNDLHRQVLELEAQIKAWHRDNPASQRLAEVPGIGPITATALVASVGNARDFGNGRQLAAWLGLVPRQHSTGGKSVLLGISKRGDSYLRTLLIHGARAAILAAQRKTDMTDRWLTNLLQRRNPNIAAVALANRNARIVWALLAHDRNYQSAYARTIKSV

SEQ ID NO: 230899 - protein, 350 aa, unidentified
MLTTVLGIDLGKRWFHVVGKDAAGHVTLRRKCNRAQLIEFIAQHSSCLIGMETCCGSQHFARKFSAAGHEVKLLPAQYVKPFVKSQKNDFNDALAVAEAVVLPTMRFVPIRSEEQMDVQALHRSRERMLQQRLALTNQIRGLLLDLGVEIAQGFYALRTVLPQLLADDRSDLTPMMRDLGRLTLEMWNRTEQAIKELNARISQLAGSSDICRRLQSVPGVGPLLATAIVASVGNASTFKHARDLSAWIGIVPRQLSTGGKTRLLGISKRGNSYLRRLFIQGARAVWVWKDKHPDDSLQRWLTQVGQRRHAHVAVCALANKLARIAWAVMTSGEEFKVNYRRLGIEPSPSI

SEQ ID NO: 230900 - protein, 416 aa, unidentified
MEIEHTHCAGLDVHKKTVVAAIIVPDGQAGLRKEVRTFGTMTADLLGLSDWLLSFGVTHVAMESTGEYWKPIYNILEENFEVLLVNARHIKQVSGRKTDVMDAEWIADLLRHGLLRSSFIPPVGQRELRELTRHRTNFVRERASVVNRIQKTLESANIKLASVASNVMGVSGRAMLEAIVAGTTNATEMAGLAKGRLREKREQLDKALEGRVKPHHRFVLAELLCQVDSLDESIARFDAEIEKYCHPFEEEVELLDTIPGVAQRIAEVIVSEIGSDMSRFPTADHLAAWAGVAPGNNESAGKRYSGTTRHGDRALTVALLQAAHAAARTRNTYLSAQYHRLAGRRGKKRAIVAVAHSILVISYHIIQRKEPYRDLGGDYFDQRRPEATAKRLLIRLQHLGYDISRIEQPATSSAAA

SEQ ID NO: 230901 - protein, 456 aa, unidentified
MPEGKRSRPQRGLTPVHPAAAAVDIGATMHVAAVGPDRDVEPVRTFQTFTGDLHRLADWFARCGVKTVVMESTGVYWIPTYEILEQRGFEVVLVNARDAKHVPGRKTDVSDAQWLQRLHEYGLLRGSFRPQAEIAGLRAYLRQRERLLDYAAAHIQHMQKALTQMNLQLHHVVSDITGATGMRIIRALVAGERDPNALASYRDARCHASIDTIREALVGNDREEHIFALTQALELYDVYQEKVAACDRQIKAILDRLKSAAPPVGELPAARRTTRQPNSPAFEVRGPLHAILGVDLTQIHGLGPYLALKLVGECGTNLSAWPSAKHFTSWLALAPHNKISGGKVLSSKTRRTGNRAAALLRLAAATVGRTETALGAFYRRLSGRVGKAKAITATARKIAVLFYNALRHSISYADPGASYYEDRYRERVLRNLQKRAKSMGFVLQQADQGASQPAVS

SEQ ID NO: 230902 - protein, 326 aa, unidentified
MRSVIGIDVSKAKIDVLWLKDVAALKAKSKVFGNDRKGHVELLAWLSKQINRPLNELHVVMEATGIYHEALAHCLFDHQVNVSVINPAHARDFAKGLGAVHKTDKADSLILARYGAMVDPALWQPEPQAIRELKALLARIEALEADLQREKNRLEKTEFNATSSIVMDSLHKMIGELEAERQRMEKEIDDHIDRHPDLKNDLRLLRSIPGVGPVVSRVMLSVIRSRAFTTAGECAAFLGVIPKLKESGVFRGRTTLSKKGPPNVRAKLYMAAIVASQHNPNIKAQKERLLMNGKNKMQALGAAMRKLVHQCFGVLKHQTEYCQQAI

SEQ ID NO: 230903 - protein, 428 aa, unidentified
MNERDNSRLKEFRQTRKEVRVSRECLIVGIDVAKDKHNAFFGTSTGEALFRRLVFENNIEGFTRLHERTEALKVQHCLSKVVYGLEPTANYHKPLAEYLIKGGANVVLVSGVAVDRNRESLDGRWDKNDIKDSANVADLISQGKIQYCDYPSIELRNLRNLLSLKRRFKKQEHGVKVRIRNHLVAQYFPEMDRFIGRGSSEGLSIVKWCLNPSAISGMEYQEFVRLVAPRIKTIGQGYRVNAIWNLAKDSIGCEAGQSLGFESKLMVEDLEQIRESIKRVDGHIEAICIGFPEYKYLLSIPGFGPDVSSNVIAAIGDPFRFDNVTQVLRLAGFDLSAARSGKTSDRAVPVISKKGKAYLRYALYQAAFIASTKNEHFIVYYTNKLRGREREKGIKIKMIVKLAAKMLIIAWTLMKKKESFNPKYLNMD

SEQ ID NO: 230904 - protein, 391 aa, unidentified
MVCVGIDVAKDKHDCCILDSDGMVRADCFTIPNNMDGFKQLLQTIRNCTKKSDKIKVGLEATGHYSYNILGFLLDNGLPTYVINPLHTNLYRKSLSLRKTKTDRVDARTIATMLLSDVDLKSYTDIAYHNEELKSLTRYRFDKVQECAKLKQSVSRLATILFPELEGLVSSIHGTSIYALLGEYPGAKQISEVHLTKLTNLLTTASKGRYGKEKAIQIREAARASIGSVMPAKSLELKHTIKLIQELTSEINEIEDSIQKIIDELNPPILSIPGMGVNSAAVILAEIGDFSNFSSPDKILAYAGCSPSTYQSGKLTNCYAHMEKRGSRYLRHALYNATKYVCYWNPVFAEYLAKKRAEGKHYNVALSHAMKKLVRLIYALQKSGKAYLAAA

SEQ ID NO: 230905 - protein, 391 aa, unidentified
MIYVGIDVAKDKHDCFITNSNGEVLFKAFTISNNQDGFNFLYQRIESVMEDVTKVKVGLEATRHYNYNLLGYLIDKSLPTYVINPLYTTLYRKSLSLRLTKTDKVDARTIAYILMSDVNLKSYSNTSYHNEELKSLTRYRFDKVKERAKLKTSVSRLVCILFPELEKLVPTLHMASVYALLSEFPGAKHIAGAHLTRLTNLLSDASKGRYGKDTAITFREAARASIGSNMPAKSLELKHTIKLILELGSEIDEIENEIKFIMDEINSPILSIPCISYRMGAMIIAEIGDFSRFDSPDKILAYSGFSPSTYQSGQLDSAYSHMEKRGSKYLRYALYNAAKYVCHWDSTFAGYLAKKRAEGKHYNIAISHAVKKLVRVIYHLVKSNQQYIKVA

SEQ ID NO: 230906 - protein, 368 aa, unidentified
MEHDITAYVGLDVHKDSIAVAVAAPGRAAPRFVGTTGPRLAELTKALSHLGKPAQLHVAYEAGPCGYTLARELISRGYRCEVIAVAKTPRKPGERIKTDRRDALSLARYLRAGELTPVTIPDACDQALRDLSRAREDAVRARLKARQQLKAMLLRHGLRYEGKTSWTQAHERYLGQVSFEYPAQDIAYAEYRTAVRDANDRVERLTQALRKQTDGWRFAPVVNALMALQGIDFVTAATLVAELGDLTRFAHPKELMSYLGLVPSEYSTGESRSQGKITRAGNSHVRRVLIESAWSYRYSPRMSRDRVVRCEAQPKAVRDLAWQAQLRLCSRYRRLTARGLHQNKICVAIARELAAFVWDLARHVPLER

SEQ ID NO: 230907 - protein, 358 aa, unidentified
MSNVKSSRLDFTGQPIYIGLDVHKKSWSVSIFSKYGEYKTFNQPPEVDKLLHYLRHHFPGGDYRSVYEAGYCGFWIHDQLRKKGIQCLVVNPADIPTKNKERRTKRDPIDCRKLARSLRNGEIEGIYVPCRPKLEDRSLIRTRQSMVRKQTRCKNQIKGMLLFYGVGIAEEREMGHWSRRFIQWIEGIRMERASGDIALKAHLEELSHLRQLIASLNRAILHLARTEEYRPFVRLLKTVPGISTLTAMILLTELGEITRFPSLDELSCYVGLIPDTQESGEKEYVGSLTQRRHSQLRWLLIEASWVAVRKDPALLMAFEEYCKRMRKTKAIVKIARKLLNRIRYVLKNQAEYVPCVIE

SEQ ID NO: 230908 - protein, 402 aa, unidentified
MAYDCVIGMDVGKYFHHACVLDPQGRQVLSKRINQHEGSLRKLFGTYLADNASVLVVVDQPNNIGRLTVAVAQAMGADVRYLPGLAMRQLSRIHVGNSKTDVRDAYVIAHAGLNLPDALRSVDRVEEVFLQLKVLNGIDEDLARAYTRLINQMRSALVGTYPAFEHVLHGQMIHRKWILHLLAKYGGPTKIRRVGKARLAAFARSHRARNPEPVIDAMLAAIEGQSVTIAGAEYAELGVAMSAKDALAKLEHRKEIEAQVLELIQDIPQTEILLSMPGIGPRSAAQILMTVGDMSDFPDAAHLASYAGLSPRTNQSGTSIMSNSPNRAGNKKLKNALWQSSFASIRFHERSRQFYERKRKEGKRHNAAVVALARRRLNVLFAMMRSGELYRDISTVQEAAAA

SEQ ID NO: 230909 - protein, 312 aa, unidentified
MITSPVYLGADVSKASIDCRLLDQSFSITNNPAGFAKLGSRLKPLVDCRIHVVAEATGGYQDAFVDYLHKHQILVSILNPRQVRDFARSRGILAKTDRLDARVLADYGRINTPAADTPKPKHIQRLGALLGQRDYLVTERAAHKTRLHQAQDRWLRTQTERAIGFFNREIEKLEAQLLLLRDTDLELKAKAERLDQASGVDWRTALALLGYLPELGTLSRRAIAKLAGLAPLNHDSGQYRGLRHIAGGRAAVRRLLYMASLTAICRNSILKNFFARLKAAGKPSKVALVATMRKLLILLNSSLKNPNLSLAS

SEQ ID NO: 230910 - protein, 404 aa, unidentified
MQVVHERCCGLDVHKRTVVACVLTPEGREIRSFGTMTADLAVLVGWLQERRVTHVAMESTGVYWMPVYNLLETLELTLFVVNAQHIKTVPGRKTDVKDAEWIADLLRHGLMRASYIPNREQRELRELVRYRRTVLQQRAQLANRIQKVLEGANIKLGDGANDVLGVSGRAMLEAIAAGTDDPAMLASLARGSLQKKRPALERALTGLIGPHQRVLLKSLLRQVEFFDAEIAELNQEVANRLHGLEQALDRLDTIPGVGRRCAEEILAEIGPDMDRFSSAAHIASWAKVCPGNNESAGKRMSGRTGSGDPWLRQALVEAAWGASHARKTYLAAQYHRLAARRGGKRAALALAHSILVIAYYVLKRGVEYEDLGPNYFDERNRTAVVRRSVRRIEQLGYKVTIDAA

SEQ ID NO: 230911 - protein, 314 aa, unidentified
MGFLHHEPSHCLGADIAKDTIVFSDGPAGSVRTIANKRGAIRAFLKARGADLIVCEPTGGHELVLLEACLAAGIACHRADTLKLKSFIRSFGVLGKSDAIDAGMLAAYGRERWKGLTLWRSPDADQLRLRSLVRRRSELVAMRVAEQNRAKAPGNSALTTSFRAIIVAIKRQILALDAAIKALVGEAPGLARRATVCTAMNGIGPISAAALIACLPELGSMSRRQAAALAGLAPHPSESGARKGYRNIRGGRPEIRTILFMPALRAAAGNGEFAGFYKRLVTKGKKPSVAITAIMRKIVITLNARLRDDQSPQS

SEQ ID NO: 230912 - protein, 382 aa, unidentified
MDTAATCTFEYTLERVLYMAIELDNNRWKLGFTTGFGQRPRERDVPARDTAALQREIRAALRRFHLPDDCPVLSCYEAGREGFWLHHYLIHHGINSLIVDAGSMESRKRRRRAKTDRIDMEKLLRMLIRYHAGDEDIWSVIRIPSTGAEDRRHLHRDRWTLSSERNKHSNRIKGLLASQGISLSVNGDLPEKLGQVRTWNGSLLPPGLKDRLLREHERFQMVEQQMKAIEQEQRQAIRNPDHPSITMVRDLMRLKSIHIHTAWPLAMELFSWRQFQNSREIGALVGLEPVTHQSGEMSREKGLSKCGNARLRSLAVEFAWQWLIHQPDSELSLWYEERFGKGSSRVRKIGIVALARKLLIALWRYLETGEIPKGAVLKAVSV

SEQ ID NO: 230913 - protein, 285 aa, unidentified
MEFEFFIGIDVSKNELDFSVQRGKCFLFHQEIKNEPEAIKALLKELIKLEGFFLSKAIFCMEHTGIYSNHLLSCLYQKKANICLESAAQIKKSLGTLRGKNDKVDSMRIAAYAYKNRDELRLWAPRREEVQQLAHLSSTRSRLIKAKKMLKTPLKEYGSFIKKKASKQNIAVCNKALNGIEASLEHVEKMIMSVINADPELKRLFALVTSVVGIGKVTALQLMVTTNEFKDIKSAKSYACYAGLVPYVEESGIFKGKGRVSHIANKKVKHFCIWRHWYPFNIMMS

SEQ ID NO: 230914 - protein, 378 aa, unidentified
MPSENTIRIAIELSVSSWLVAARLPGAEKSRLHRIDGGDTTALLALIVKLRSRTSAKLGQTVDVACCFEAGRDGFWLHRWLTAHDVVAYVLEPTSILVNRRARRAKTDRLDAGGMLRVLATWLGGDRQVCSMVRVPTPEEEDAKRPHREREHLVQERLRIENRIEALLFTQGIRGRPSLRSWERDMAELRTGDGRALPSLMQAELNRLRRRLVLTLELIREMEAERAEAQASTIEDAVTRKITALQRIRGIGANFSTVLVREVLYRSFANRRQLASYVGIAPMPYQSGGMDRDRSISRAGNPRARTTLIQLAWLWLRYQPGSALAAWFRKRAGTLQGRTRRIAIVAMARRLLIALWRYVETGVMPDGVEIRAAAEAAA

SEQ ID NO: 230915 - protein, 302 aa, unidentified
MKRYVGVDVSRDECAVCILGEDGTRVFEGSCPTDPDAILRTVSDHAKQVEKIVHESGPLSIWLTRELAKRGAPVVCIDARAANKALSARMNKSDKSDAEALAQLARTGWYREVHIKSEESDRLRLLLSARERLIRIRMDIEGQARGILKTFGIRLGPVRAGWSRRNFRDQLAEIVSGDPILEAVFALLIAVHKSVCEEATDLDNEIQQVAKDSPLARCLTTVPGVGPIVALSFIATIDDATRFRRAVDVGAYLGLTPRRYQSGETDWSGRISKRGDSAMRKQLYEAANILIQRVPRFSPLKA

SEQ ID NO: 230916 - protein, 429 aa, unidentified
MQESSSSAPAEGVAAYVGMDWADQRHDVILRAASEPAKVEYRRLPQQPEALMEWVAELQQRFAGKGKILVALEQSRGALIYHLMGYEFLELYPINPSQLASFRQTFSPGGAKDDRPDAELICELLYCHRDRLKAWKPDDELTRKLTFLNEGRRKAVDQRTQLANEMKSQLKVYFPLALQVLDNDCSTALAADLLLQWPTLDSLQKPSAHKLRKFFYAHNCRQEQKLLERLELIKAAKPLTRDLAVIEPTALRVQLLAQQLKSLLPYIARYEKQIAELFDAHPDSFLFRDLPGAGSALGPRLLTAFGTDRERFERSMEISSLSGIGPVRRASGKKSGKHATVHFRSACPKFLRQSFHEFAACSIRYCSWAEACYETQRKRGKGHHAAVRAVAFKWIRILFACWKQRVPYDPQRYQQTLQTRGSEYAKITA

SEQ ID NO: 230917 - protein, 360 aa, unidentified
MRYIGVDLHKTNFVVCFLNEDDTSHLETFSLSKTGISRFLEKLEKSDAVAVEVTQNIYYFYDQIKTSVSRVVLVDTYRFAVIAKSKKKTDKADAQALARFLKLGWLPEVPVPSERVRELRHLLQARETLVGLRTKLKNMGHAALTRNGIALSRSAFASALSREKLLKRDDLAASDQVILESALRQIEELDREVERLEAEIIRRGKTLSGIKRLLQLHGMNLLSAISLLAEIGDIKLFETSKQLTAYAGLVTSTRQSNETTRHGHITKQGRKRLRTVAIRAVLSMVNRTSTPLMDFYGRKKKEKGSGKAICATARKLLTIIFVMLKKDLDYWYLAQLSHDESTSAHFAAMTSYAKSNVKLH

SEQ ID NO: 230918 - protein, 376 aa, unidentified
MQAAQIRGYEVGTVLYMAMELSNSKWQLGFGNGTKLRRKSIAARDRKCLLEEVALAKAKLQLPAEAQVVCCFEAGRDGHWIHRWLESEGFEVLEVDSSSIETTRRRKHVKTDRVDVEKLLDLLIRHYCFGLRKAFRVVRVPSVAAEAGQRLHREDEHLLKQRTRISNRIKALLVTQGVAEFRLGKGFEDRLDRLRLWNGESLTAELKRELLRLYAQYVLFDGQLRELQQAYAEELLAQTPVAEYRRRLERLKSLGPKTSRLLSAEVFAWRCFDNTKQVGAFAGLTPTPSQSGDSHTEQGISKAGNRRVRRTMIELAWLWLRWQPDSALSQWFNQRWAHGGKRQRRVGIVALARKLLIALWRYVEHGVIPEGAVLKA

SEQ ID NO: 230919 - protein, 406 aa, unidentified
MEGPIITVDVSKGSCHYQPFIENGHPMRKPKQLSATIDGFQKLGQTIKDLEAKTEREDIPVIFEATGVYHRPLQKYLEDHRIRYYIISPLLSATYRKTDLHSNKTDALDCAHIAKAYYCEKELRQYQAQPQEYKRLYQLSRIYESELVHLRKRKVSLRSMLDIIYPRIDKTFKGNQNLYDPIPMEILKRYPHPSLLLSHREDTIVKTVGHRTGHLKGYTERIVHKIYEKAKECYSGCDIDDIEVVKLPSLIENVQEQKKKCDSLLKEMIEIARTCPYFASIVSIVGIGENLAARIIAELGDVSRFDNRAAIVAYAGLNPKIQQSGDIDGLHLKISKKGNKHLRCLLYLGAQCNYRLRKEDPLYEFTKKKRQQTQCPLSSKAAYTASAHKLLVIIYSLCKNGTLYHS

SEQ ID NO: 230920 - protein, 351 aa, unidentified
MKEYIAFDSHKHYTLMEREDRQTARTVQLRVTHQPGAIRSCLRNCETGTDVAVEATGNWYWIVSEIEQAGLKPQLVHPRKAKLMMGLINKTDKLDVHGLNRLQRNGTLPTVWIPPAELRDQRELTRTRLVLVAQRTRLKNRLQSTLAKYGLAVRDCSDAFGTVGRSQWPELLGKLPEQTQWVSQQLLKQLDLLEEQIGQCEKRLNQLLKITPQIERLKSQPGVGLILGASIAFEIGEVSRFASAEHLASYAGTTPRVHSSGDKLRFGRLRPDINRYLRWAFVEAANVVALHHQQRPERHVSHLYWRLKQRKGHAKAIGAVARHLAEATFHILSRQEDYVDPALRKGRSKPV

SEQ ID NO: 230921 - protein, 336 aa, unidentified
MTTHAAQAPIAVGVDVSKEELVIAELFSDGAFTHRSLKNTMAAAESYVGELAERGFTGRIIVESTGHHQWPIVLAGADTGLDVRLLNPLQAAARRQGRVRKTKNDRVDAEVLAEMAWTERKLPAPFVRSRAAIALRQQLQLLAQLERSIQRLQATLRAQREAAERAGVAPPESLAGLEASLEDFRAQRRTLQRESDALARQLADRQIAQAFTRLPGITADCAHMLASVLDPGAARHGWVAYIGLDVSVIQSGKFQGRGKLTKRGMPYLRKRLYQAAWGAAMNTAAGRRYYDALREGGRKHKEALVIIARKLLRAAHAVAQNPDQPIDEDRLFALPA

SEQ ID NO: 230922 - protein, 394 aa, unidentified
MIYVGIDVAKDKHDCFITNSDGEVLLKSFTIANNREGFETLFQRIQSASDDLTRVKVGPEATGHYSYNLLGYLLDKGLATFVINPLHTNLYRKSLSLGKTKTNKVDAHTIASMIMSDVILKSYSDTSYHNEELKSLTHYRFDKAKERAQLKQSLSRLATILFPKLEKLVPTLHMASVYALLSEFPCAYTLSSAHLTRLTNLLSDCSKGRCEKDMAIMLREAARSSIGSHIPAKSLELKHTIKLIRELDTEIEEGETEIKIIMDEINSPIVTIPEINYRMGAMIIAEIGDFSRFDSPDKILAYAGMSPSTYQSGQLDNCYTIWKNVVQKHLRYALYNATKYVCHWDESFGTYLAKKRAEGKHYKVALSHATRKLVILFINSKRLDKATSNQLNFL

SEQ ID NO: 230923 - protein, 372 aa, unidentified
MKIITQNEKILYIGIDVHKDKYSLCCFDFFRNELSDEMTIKATTKAVIKYLEAIKKKHKEEILFACGYEAGPTGYGLCRGLQKAGYGCVVMAPTTMSNPDGKKRVKTDRIDARAIARILAYKSYSQVHLPSEEMEALKEYTRARDAKKRMFKKAKQELLSFLLRNGKSYPESGNYWTEKFFKWVKTVQFSEKWMQEAFNEYLSEVYSLKAKIELMDMKIREIAELEIIKDKVDKLVCFSGIDVTTAVETVVEIHDFTRFATAAQFVSYLGLCPGEDSSGKTKNMLPLTKAGNKRVRALFCESAKAIKRTNPYGQKSKRILERQKNASPEIVAYADKATKRIRTKMKHLEERGKITTYLQRQEQESLHVLSGE

SEQ ID NO: 230924 - protein, 403 aa, unidentified
MNSVGIDISKGRSTVAVMRPFGEVVISPFEVRHTDSELSELARQLKSLDGETRVVMEATGNYHAPVAKLLYDAGLYVSVVNAKLVHGYGNNDLRRVKTDKKDAVKLANYGLDRWLTLPRYVPEEDTRLLLKNCYRQYRQYSKVQTVLKNNLISLLDTVFPNVNRLFSSPIRGDGSEKWVDFAAEFWHCRCVSDKSEKAFANKYQRWCRKHGYNFSEAKAHIIHAEASGRIGVMPKSETTKLLVEQAVAQLRATSAALAALKQEMQSLASLLPEYPVVMDMFGVGPTLGPQLIAEIGDVRRFYSKKALVAYAGLDAPPNDSGDVTGRHKSMSKVGASSLRRTLFLVMSIYLQTAPLDEPVYQFMDRKRAEGKPYRVYMMASANKFLRIYYATVKAYLESLEHTA

SEQ ID NO: 230925 - protein, 370 aa, unidentified
MLDTTTFIGLDVHARSIKAVSLDVMTGEVRAATFGYDAGAVAEWVRSVDPRARCVYESGVTGFDLQKRLSGLGVDCAVGAVSKMIKPSADRRRKNDRNDAEFLARMLSVGNVVEVWVPDDECEAARDLTRALEDARDDLSRSKQRLSKFLLRHGLVFDERTPTGRRKGNWTRAHWSWIESIRFAEGADNDVLAYYVDAVRRAAEEKARLEGLVEAEARKPRWRRRVDSLRCLKGVDTASAADLVFEAGEFSRFRNARSFAAWVGLTPSEHSSGESDRRGAITKAGNKHLRKALVEAAWHYLTCSGRPKDLAKGQAPDRGARRHAAKGVRRLVERREALLARGVHGNKANVATARELACWVWAVGLMAEEA

SEQ ID NO: 230926 - protein, 523 aa, unidentified
MAVRRTRTRSRSRAPQFVQKPHGVIHPRVQQVGPEHFGIVTVDGAKARSQFMLCDCYGHVRIPPTEVPHNHNALEAAVAQVRQALVTYDLRDVLVAIERTGRYHQVVQRVFRAAGFEVRIVHPFATKQFRQAQDPGNKTDDTDLVALQRAAINGFALTEASLDPAWQEWQLLIRHRRDLVFKTSTLCRQIGEHLDAAWPGYAARFGMLWDSAIPWCLLRQFESAAALHRAGLAGLRTCLRAHGIQFKQPTLVAVLEWAAQAAPGATPTDLHRRLALALDDERQQKAREIQALERELAGRLARTPYLLLLSFPGVNVVSAADFAGEMGPIGNYASARSITGRAGLYPSRYQSDRVDLANGPLVRCANRRLRAAILGIADNLIRSNHHFRHLAHTWQAAGKDPRLTHVKIGVRFCRIAYQIVAGRQLFRHPSVQQRSYVLDQLIAFHREHETPMAQTLADLQAAIDQLPKDAYATEAQPLADELQRIQQGRRRGPQLIGAILPIVLARLGVQPVQSQTSGEEDSR

SEQ ID NO: 230927 - protein, 312 aa, unidentified
MTTKNNNFMGIDVSKATLDISVRGKHIKINNSRAAINSFINGQLAGVDIRLCVLESTGGYERLVITMLNEANIPVHRAHPNKVYAFAKACGHFAKTDKLDSKLLEKYAEFIKDKNVVCIELTKELIDLQGLRAVQKNLERELHANQCRAKLLSGKAVDYIKEEIEFNKKQLGSIENDIEELISRNKELRKKQQTLISYKGIGKKIANSLIAELPELGSLSNKEVASLVGVAPKTNESGKKVWKGHISGGRFFVRKTLYMAALVAAFSNDKMKKKYKELIEKGKAAKVALTAIMRKIIVCLNAMIKNNKLYEI

SEQ ID NO: 230928 - protein, 432 aa, unidentified
MNRLQVGIDFSQKKADLCLLFPDGHPLESHVSFANSSSGFSAAKKLLLQTLDTFAFDGVDVSGEATGYLWLPFFLQLSADPDLTLHDTELFLLNPRWVKWFKKCFAQDHKSDQRDPFYIAERTRTRRPDAPWSPPEALPLRLYTRLRFHSVQNLAREKCYFSAFLFLKASAYRCLKPFSDVFGVTSRLVLTQQPSLDELARLPVEDLAAHLYELSGHHLPAPLDNAAKLQRVVQESFPLDAALALPVQRILDLTLAHICFLEAQLAQIDQWITAELAHHPAIAQLATIPGVGPVFSSGIGAEIGGIQRFLLPPKWDPKRHRFRPRNLRDAEDAVAKIAGLWWPRVASGDFEAEDRRLAKSGNRYLRYYLIQAANLMRIHIPEYAAFYARKYAEVPKHKHKRALVMTARKSVGPVVGLLHRDEPYRSKEDRRT

SEQ ID NO: 230929 - protein, 451 aa, unidentified
MSRKRKGKQKTGAPMLCCLNPNAAGVDIGATEIYIAVPADRDPQAVRCFATFTEDLHAAANWLKACNIETVAMESTGVYWIPLFQILEARGFKVFLVNAHHVKNVPGRKSDVSDCQWLQYLHSVGLLRGSFRPEQAVCTVRSILRHRDSLVQMASTHVQHMQKALDQMNLQLHHVISDITGVTGLAIVEAILAGERNPHTLAALRDRRIKASADTIAKSLVGDYRREHLFTLSQSLTAFRHYQELIAACDREIARYLEGFESKVDPPSGSPSPSKDESQPKTSEPSFDLQTHFHRILGVDLTQVPGINVLTTQTLLAEIGPDLSSFDDGSALASWLGLCPDNRVSGGKVLSVKTRKVKNRAATALRMAAQSLYRSQSHLGHFYRRMRAKLGAPKAITATAHKLARIIHHMVTTGDAYDETICAQNEVQNRKRMEARLRKQARELGLQVVAL

SEQ ID NO: 230930 - protein, 369 aa, unidentified
MKYVGVDLHKDSLTVAVLDEAGTVLQRTTLPTKCRNRIVELFSSLAPCEVAVESVGFYHWFWALVRPHVTKMRLADPAGVRVAAGRKAKTDRNDAPLIAQLLQESRLPEAYVPDEPLFTLRQLVRLRHGLARALASDRRALRWVSIKSNLPGPAVFTSDRARKWELSQADKFAPAESVAAKCFVERIANCERELFSIERLLRETAARLPKISRTMELLKSIPGIGDIAALTVIAEAGEFSRFKDSGALACYAGLCPRVSQSGESVRHGHITKLGPSLLRWVLQQASWVAQRDHDGIRLLFNRIARKAGRKRAATAIARRLLTYCWSVVKRGAPFTWPDAGKAKAGKAPFEGGRKIEGNAIGGMAWSYQI

SEQ ID NO: 230931 - protein, 382 aa, unidentified
MAHGMRWVGLDAERVTAEMVLLDVENRLSKGEGCVMLHVGLDLSRKRVDVCLISGEGELVEQLAAPSDGDGLRRLTDRVAKKHAGPVRAVVESMNGARFVHDTLESCGWDVLIADAQRVKGLAPLACKTDKIDSRVLAELSFRDLVPAIWLPDPEIRRERELARFRLHLVRHRTSLKNRIYATLIAFGKPCPVSDLFGVAGRELLDSLHVPEPWGGNVDASLLLIDDIDRQIAKLTRELKRLGADHRYVPLLMSAPGVGWLVGFTIASEIGNIERFSSPTKLCGYSGLCPRVYQSGGSDRRGPISKHGPKYLRWALFEAALNACDHPVYKERYDRTKKRLGKQRGPKVAQIDLARKLTEAIWHMLTRNQPFAPAGAAYRLTA

SEQ ID NO: 230932 - protein, 412 aa, unidentified
MKLFVGIDVSSEKLDVCFLDSHDTTLKEITLSNDINGANAIQQDVLQFHETFSYEKIVIGMESTSIYSFHPATFLHEDQALKSLGIVEVVVQNPTAIHRYKNVFVEDKNDRIDAFRIADFLRIERYSKPLIKEEKYVALQRLTRSRYQLVCQLTECKQHFLENLYYKCNTISKELKSDNKSVFGATMMDLLSDSLSLDEIALMEIEELAALLQQKGKGRFSDPEKLAKTIKKAIRDSYRLGKVLQDSVDVILATYVQLIKALKEQIKALEKSIIALFEVIPEAKCLESIPGIGIVYTAGIIAEIGQIERFEDDAKLAKYAGLYWKKSQSGNFESQRTPMTRTGNHYLRYYLVEAANSVRLKEDVYASFYRKKYAEVPKYQHKRALVLTARKLVRLVDVLLRNRQLYTPERSV

SEQ ID NO: 230933 - protein, 358 aa, unidentified
MPAAGPITGRREGIQVVVIIGVDPHKGSHTAVAVDDCEEEISRVTVRATVRQLDQLRRWATPFEERVWAIESAGRLGYLLAQQLVAAGESVVDVPATLAARVRLLGTGRSNKNDPNDARSVAVAALRSTTPTPVHAADHAAVLRLLAKRNLDLGRERNRVACRLHVMISELVPGGITKEITASHAELVLAEVRPTVAIDVARLAMAQELLVDLRRLDGQKAEIKRRITQAVAASKTSVTDVFCVGPIIASLIIAYTGDVRRFGNRHQFAAYNGTAPIEVSSAGRVVHRLSRRGNRPLNYAIHMAAVGQIRHPHSDGRAFYDRKVTEGKTNREALRALKRRVSDAVYHQLLIDADRRQG

SEQ ID NO: 230934 - protein, 365 aa, unidentified
MKKISTVATKQSRNFSQPKLTIGLDLGDRSSWYCVLDEQGEVVLEQKLGTTPKAMKEVFGGMPRSRIALETGMHSPWVSRLLGELGHEVIVAHARNVRLIGESRKKDDRVDAQTLARLARIDPQLLSPVKHRSAKAQGDLTVIRARAGLVRARTALVNTARGLAKSYGERLRGCNVRNMNPEKAEVLSPELQTALEPLLAGIESLSERIREYNEGIEQLAQESYPQVARLKQVKGVGTLIALTFLLTLEDAHRFRKSRDVGCYLGLQPGRRNSGQSEPQMHISKEGDPYLRTLLVQGAHHILGPFGVDSDLRRWGLKLAERGGKSGKKRAIIAVARKLAVLLHRLWVSGEVYEPLRNQTAMPAAA

SEQ ID NO: 230935 - protein, 391 aa, unidentified
MVCVGIDVAKDKHDCCILDSDGTIRADCITIPNNMDGFKQLLQTIRDCTKRSDKIKVGLEATGHYSYNILGFLLDNGLPTYVINPLHTNLYRKSLSLRKTKTDRVDARTIATMLLSDVDLKSYTDTAYHNEELKSLTRYRFDKVRERAKLKQSVSRLVTILFPELEKLVPSLHIASVYALLSEYPGAKQISEIHLTKLTNLLATASKGRYGKDKAIQIRDAARTSIGSVMPAKSLELKHTIKLIRELTSEIDEIEVSIQKIMDELNPPILSIPGMGIHSAAMILGEIGDFSNFESPDKILAYAGCSPSTYQSGKLTNCYAHMEKRGSRYLRYALYNATKYVCYWNPVFAEYLAKKRAEGKHYNVALSHATKKLVRLIYALQKSGKTYLTAA

SEQ ID NO: 230936 - protein, 411 aa, unidentified
MQVVHERCCGLDVHKKTVVACILITLANGEVQRHTRTFSTMTAGLLALADWLESLAVTVIAMESTGIYWRPVFNLLEEGRSVILVNAQHMKAIPGRKTDIKDSEWLADLLRHGLLKASFIPPAPIRELRDLTRYRKSLVQERAREVNRVQKVLETANIKLSSVATDVLGKSGRDMLSALIEGTTDAEILADLARGKLRKQLPQLQQALDGRVQAHHRLLLKHILAHIIFLEETLEQLQQEIEQHLGPLEEAMTLLMSIPGIQALAAATILGEIGDDMTRFPSAKHLASWAGVCPGNKQSGGKRLSGKTTQGNATLRAILAEVVWVLSHMKDNYLSAQYHRLARRLGKKKAVVAVSHSLLVIIYHVLSTEQPYSDLGADYFEQRDSTRLTQRSVRQLEALGYTVTLVPKEVA

SEQ ID NO: 230937 - protein, 351 aa, unidentified
MVSNPNREEANEMSVLIGVDPHKRSHQAVAVDRDERRLAELNVRAAKDQTQRLLAWADQFPERRWAIESAAGLGYLLSQQLVAAGEEVLDVPATLAARVRVLGSGRSQKNDPNDAFSTAIAALRQRGLRQVRADDHRAILRMLATRYHDLGALRTQAACRLHASLAALIPGGFSGRLSAKRAASLLRTIRPTEGVAAERKAQAAELVADLRRLDAAIAATRKRIEVAVEASKTSVTDVYGVGPVVAAIIVGHAGDVRRFWTRNHFASYNGTAPLEASSGPRKRHRLNPRGNRQLNHAIHMAAVTQIRNDTPGRAYYERKLAEGKTKKEALRALKRRISDAVYRQLLVDTDR

SEQ ID NO: 230938 - protein, 377 aa, unidentified
MENSSIVFIGMDTHKETTDVSYALEGRDNQPQHLGKIASRKQALTKLVRQFQSKYPGATLHFCYEAGPCGYWMYRLLSSLGVICYVVAPSLIPKKPGERVKTDKRDSLKLTQLLKSGDLNPIYVPAEEDEAVRDLSRAREAAMRDLNDARYRLKALLLRNHIQYTGKADWSLKHLRWLTEIILPHPAQHFVLQELIQTINERTNRLERLDNELQYRVKLWRYYPVVKAIQALRGVRLLVAVGVIAELGDLTRFDQAPKIMSYVGLTPSEHTSSDRRRLGGLTKAGNSRARRLLVEGAHSYRFPAKVSKEMQVRQEGLPKAVTDIAWRAQVRLCKRYQYMSQRGKNSNVIKAAIAREMIAFIWSISREVALPKPALGR

SEQ ID NO: 230939 - protein, 492 aa, unidentified
MNDRNRKVPMATPQSKTVNTADYLKSIGRMAEQARRDAEQCAQLASLPIQHSHAAGIDVGDSTHWVCVESTPDGSDLVREFPAHTPGLRQLVAWLTRCGVTTVALEASGVYGHVLFLTLLEAGFRVVTTAPTFTRQIKGRPKTDRRDCQWIQRLHKHGLLPSIFQPDEATQTLRDYVRQRANLVRLSGHHIQRMQKALELMNLKLTKVLGDVTGVTGLKILRALLAGERDPRVLAQLRDRRCKHTLDEIATALDGRYRSEHVLELRCCLTMWEHYQRVIAEVDVVIAAQLRAMARQTNLPPLPPKTRQRGRKPHDPRFDVRTALYYATGVDLTAIEGIDEIHALTLVSELGGDFTKWPTVKHFTSWLGLCPNWKKTGGKVQSSRTRRGKNRAAHALRLAAWSLMRSKSYLGAYLRRQRSRLGAPKAITACAHKLARILYNLMRHGVAYMKQEEGAYAAQVRARLEKQLQRRAKELGFEVKKIEQTETAAAAQ

SEQ ID NO: 230940 - protein, 369 aa, unidentified
MGDRITYVGLDVHKDGIVVALAKDGLRGEVRDYGRIANTPAALQRLVRKLGQEGVELRFCYEAGPCGYGIQRQLSASGHDCVVVAPSLIPKRAGDRVKTDRRDAGGLAKLHRAGELTAVWVPDPGHEAMRDLVRARLDAVRALRRARQQLSGFLLRQGCHYRRPAWTKLHRRWLAGLKFEQAVHHIVLEDYIATVEAAEARRDRLTAQIEAMLPDWTLAPVVAALQTMRGMALVNAATLIAELGDLSRFANPRQLMAHLGLVPSEHSSGASVRRGGLTKAGNSAARRLLIEAAWTYRFPARLSRELLLRQEAQPKPIREIAWKAQLRLCARYRKLARTGKPANVVTAAIARELAGFVWAIARRVPPAAS

SEQ ID NO: 230941 - protein, 364 aa, unidentified
MVKKATRLARFAEAVEDQPVVVGLDVHKKTYSVALFSSQDGQVESYTCPAGEAALAAQLSGLGCSIEHIVYETGPTGFALARTLMAAGFKVSVIAASRIPRGYAAAAKNDRLDAVKLATYFARGLLHSVAIPTVEQEGYRALVRRRKRVAESRGKIKQKIKGFLLASGIGEPQSIQKWSLAASADLSALDMPPEHRMSLASMVREYLFLLSEDKMLRAEIRTATKRMHAERFAHLTSVVGVGETAASNFLAELFSPERFNRPEEVTSYLGLAPVVSQSGGSQARARIRPVGQKRLRGILIEAAWQWTWRDPEAKELYNRHFAKHGIGQKAIVAVARKLAIKLWRMAVEIPPVSMEGAARGAWSG

SEQ ID NO: 230942 - protein, 409 aa, unidentified
MEVLHPVCAGLDIHKESVVACVRHIAQGKVGTQVRTFKTTTQELPVLSEWLAQHGATHIAMEATGIYWKPVWHILSDGEFQLVLANAAHAKNLPGRKTDVNDATWLADLMAHGLIRASFVPDEPTQQMRALLRTRKQMVGERSSHTQRIQKTLEDANIKLDTVVTDILGLSGRRILEALIAGQTMPQALAALAHRNIKASADLAASLRGRVRAHHRFLLKLHLDQIDAIDTAIASIDKEVDGNIEPFRQAIERLSAIPGFSQLAARVLVSEIGIDMSRFETAGHLVSWAGLCPRNDESAGKRRSTRMRQGAPWLKTTLIQCAWAAARTQGSDFQAQYHRLRSRSGAKKAIGAVAAALLTTAYHMVKNGSEYQDLGPNHFDQQAKARHVLGLVNRLENLGFEVQIALKAA

SEQ ID NO: 230943 - protein, 407 aa, unidentified
MELVALYKRVIGLDVHQAQITACALIEEVDGSVRVEQRQFGAFKRDRRELAAWAASLRADEVVMESTGIYWKSPYAALEAVGIRAKVVNARHVKNVPGRKTDVGDAHWLATLARAGLLRGSFVPPAKLRELRLIARQRQKLVGQLASEKNRLHKVLTDSGVRLGVVVSDLHGQSARAMVKAIIADKPPHEVLQLASRRLKASREELFDALQGDLTASHRFVLDELMRHIEEIEARIARFDSRLLGELQTERNTLALLQTQPGVDLIGAAMLLVEIGTDMDAFGSADRLASWVGICPGNNESAGKRKSGHMRKGNLYVRRLLCEFAHAASRTQSVFKSKFQSLVVRRGHKRSIVAIGHKILRTIFFMLKRREHYRDCATDYEAMSVQRNAPRWIKALTKFGFIKPAKA

SEQ ID NO: 230944 - protein, 404 aa, unidentified
MDLAPLYRCVAALDVHQAKLTVCILREEADGELRVELREFGGFKRDRREMARWVASFAPESVVMESTGIYWKSPYEALERAGLRALVVNARHVSQVPGRKTDLADAQWLAILARSGLLRGGFVPPANFRHLRLVSRQMQKLTGILASEKNRIHKVLTDGGIRLGVVVSDLHGKSGRAMVKALVAGESAQSLLGYADPRLKASEEDLLDALDGDLSAEHRLVLRQLLDHIGYLEQHIAALRQALVAGLAPQQGLLQALQTIPGLDETGAAMLVVEIGDDMQAFGSPEKLASWAGVCPGNHESAGKRKSGRQRKGNPYVRRLLCEAAHAASRTRCALAEKFKGLLVRRGRKRAIFALAHKLLKTVFVLIDRGDYYRDAGVDYEAMSVERNAPRWIKMLRKYRYIPA

SEQ ID NO: 230945 - protein, 347 aa, unidentified
MLFSGIDLHKRSLVIHTLDADGVTTREAELKSDRAAVLAYFGTLAGPHRAVVECVQSWYWLRDLLAPSGVDLRLAHAKYVKAISYAKVKTDRVDARMLAQLLRAGLIPEAHMIGAEHRETRDLLRSRLQLVTRAVRCQHAVGSLLEKHNVPTAAELPELARLQAALQEEQRALIRTHVRRVEAVLKGRLLPTPDVQRLLWVPGIGRLGAYTLVLEIDDVRRFPTVRHFHSYCRLVPGADNSAGKTRHKRSRDGNRYLKLVFHTAAVRAAQYHPEIRQEYRRLARRKGKIVARALIAKELASIVYWVLRKQEAFNGRFRGHVLTPKPAVWPRLASPRSLTDADGASHV

SEQ ID NO: 230946 - protein, 361 aa, unidentified
MFTERTSVGLDVHARSVVAAAFDGDTGEVFKKRLTPASDDVIAWGRSLPGPSAVVYEAGPTGFGLARAFDTAGIRCEVAAPSKIQRPPGDRVKTDARDAMLLARLLRLDDIVPVSVPTVEREAARDLVRAREDVRGDLMRSRHRVSKLLLRQGIVYYGGKAWTGTHLRWLRKQHFDTPGLQLAFDAEHEAVLAAEARRDRLDAAIEAMAADSEYTPVVNRLGCLRGVATLTGFGLAVEIGDWERLTGSSIGAYLGLVPTESSSGQSRSQGSITKTGNTHARRLLVEAAWQHLKPYRTPGATMRARWELAPAAARARGHAGNQRLHQRWLHFNDRKKDPVIANVAIARELAGWCWSLAVMDD

SEQ ID NO: 230947 - protein, 408 aa, unidentified
MEVVYRCCCGIDVHKKIIVACLNQGGEQSLREFGTTTSEIKSLATWLTESGCEIIAMESTGVFWKPLYNLFELMDLDAIVVNAAHMKALPGRKTDVKDAEWIADLLRHGLLKASYIPSREQRELREITRYRKSLTEERCRETNRLQKILEGANIKLDSVVKDINGKSARKLLEKIIEDDVPTSEEEISKMIHGRMRSKLGQLVTAIEGITTPLQRKLLAQVIDHIDDLNRRIADLDKLVQDYMDEYEAAITALCDIPGIARRSAEVILAEIGLDMSRFPSAAHLCSWAGVCPGNCQSAGRRKHGKTINGNMLLKTILTQCAKSARSVKGAYFSAQYQRIAARRGKNRATLAVAHSMLIAIYHMLRNNVPFRDLGSDYYDSFNRDRKIHGYLKRLKALGWEPDALPGSA

SEQ ID NO: 230948 - protein, 312 aa, unidentified
MIEQCFVGIDVSQDRLDVLLLPQATGFSVANNEAGWNALIARLRDVPVAAIGLEPSGGYERGVIRALLTASLSVRRINPNRLRQFARARGALAKNDRLDARLIAAYVATMPTHVVRHDPAAARIAEIVTVRRQLCDEHVAIENQTAQLEDAMLRRLAKRRLARIETDIRLLDKRLTQMIAAEADLARRYARLTSMPGVGPVLAFTLIALLPELGRMSRKQIAALVGLAPYDFDSGKLRGHRSIYGGRMAVRNVLYMAALSACRYNPALKTFHNRLAAAGKKPKVILVAVMRKMITTLNAMLRDGARWQPQAA

SEQ ID NO: 230949 - protein, 397 aa, unidentified
MYIVGIDIAKRKHEAAVIDGEGTVIIKPFSFTNNCSGYNRLLAMLTKAKLPLDEVSFAMEATGHYWLALFTRLQKEGFRVQVINPVQTNSIRSFYIRQAKTDPRDALLIAEVIRFGHFSESTLHPENIYELRELCRGRHAIVSMQADVKRKVVALLDQVFPEYETAFTNMFGDTSMAILQTCPTPKELSEMRLEELCHLIEVSSHKRFRMAKAQELQALARNSFGFAMAGDVFSTMIRLYAKHLDFLKQQVREMDRKIAEIMETLDTPITTITGIGPTLGAYILSEIGDISRFSSAAKLAAYAGIDPTMRQSGEYNGVRNRMSKRGSPYLRHAIWLAASSAVLHDPALKLYFQKKRDEGKPYMASVGHACRKMVSIIYAVMRDNKAYTPCIPNEISA

SEQ ID NO: 230950 - protein, 308 aa, unidentified
MSKAHLDAAWGERFERVSNDAGGWDALVAKFQADGVDVVVLEATGGYENAAACALQAAGLAVGVLNPRQAREFAKAMGQLEKTDRVDAYSLRDFAGVIARHPKRARYIRALPDAERAHLAALVMRRRQLLDMRTEEANRLHTAHPAARKSVQAILKAIDKQLATVDDDIDRHMQQHFKELRTCLESANGVAEVTSSTLAGLLGELGQLPRRSIAKLVGVAPLARDSGPRKGTRAIWGGRAEVRAVLYMATVSATTHNPVIREFYQRLLTKGKPKKLALVACMRKLLTILNAMARDHAVWDDSKHVKTA

SEQ ID NO: 230951 - protein, 321 aa, unidentified
MQTNPAVVYAGVDVAKATLQLHLQGQQSEFSNTLKGLRELCAELQKVPNVHVICEATGGYERALVKLLHQEQIPVSVTNPARVRAAAQAQGQRAKTDRIDARVLTDYGQRYQPKATPPTSATQDQLVAQTQWLKQLIHGRALAKTQAEHHQDPFVRRQHAKLMTHLDSQIEAVENQIEALLEQDAALQQRVNCLDEIQGVGPRTAWMVLAHMPELGQLNRHEVAALAGLAPWTRESGTMKGMRCIGGGRPEVRLALYMAALSAARCNPVLRTLYKRLRAKGKLSKVALTAVMRRLLTYMNQRIKALLSETASAQTEVLQKA

SEQ ID NO: 230952 - protein, 340 aa, unidentified
MREITTIGLDLAKNIFQVHGVDEAGAVVVRKQLRRAQVLGFFAAMSRCVIGVEACATAHYWARELIALGHDVRLMPPNYVKAYVKRNKNDAADAEAICEAVRRPAMRFVPVKTADQQAILMMHRARALLVRQRTMLVNALRGHLAEFGIVGAQGLHKVEGLMTIARNGSDERVPEVARRVLSIIANQLDDVEAKIAALEAQMLAWHKSNPTSRRLATIPGIGPMIATAIAATVPDPSVFRNGREFAAWLGLAPRQNSTGGKARLGGISKRGDSYLRRLLVNGAHAALFWSKAAKADPWLISLRARKHRLVATVALANKTARIAWAVMSKGEKYRPVAAAA

SEQ ID NO: 230953 - protein, 336 aa, unidentified
MKKPSESMIYVGFDIGKSEHAWAAVNEVGFVIDQGVIRNTKKERLALSKKIIKSFPVFIVGMEATGSYYETMALTFLEAKKTARIINPALTSTKALRTSMRCTKTDKADAIGIAKKLAERRGEIGTPFVWNPEERRLQALGRHIRFLKRHRSALRVRIESLSDRPFRSLKLESKLFDEELKSLERILITEALLVFPKAMEILTAIRGLGEGTAAALLAEAGSLSRFTSSRAFAAFPGLDPTVKQSGTSVRAPGRLSKAGSPHLRHMLGWSAKLLVQWNSTFPTSFQNSLAKGKVPGVAYGMIARKLATIIYQCVTKGEAFMPEKVGLGILSTDQSS

SEQ ID NO: 230954 - protein, 342 aa, unidentified
MGEVSTIGLDLAKHVFQVHGVDDAGNAVLRRQLRRSGMLKFFEKLAPCTIGLEACASAHYWARELAALGHTVKLMPPAYVKPYVKRGKNDMADAEAICEAVMRPTMRFVPVKSAEQQASAMIYKGRELLVRQRTQLINALRSHLAELGIITAQGVGKIDSLIAVVRDRKDARLPPAAREALQELIRQIEALEARIEPLEDEIVAQVRSSELGRRLADVPGIGPIIAGALLAMVPDPGGFSSARHFATWLGFAPRQSSSGGKQRLGRISKRGNRYLRSLLILGARNVLCRSNPRMSAWLRALRARRPFKVAAVALAHKTARIVWALMVKGTSYRAAVAAVAMS

SEQ ID NO: 230955 - protein, 367 aa, unidentified
MKQVTTYVGIDAHKKDLFIAMLVGTAAVPVSWTVANEPNAVRRLVRKLEREAPGAVQVCYEAGPCGYALQRRMTTPRVSCQVIAPALVPRKPGERVKTNRRDARKLVELLRAGLLTEVRPPTPEEEAVRDLCRARDDARTDLQRCRHRLGKLLLRRGLHYSGRNWTRAHRQWMASLTWTHAAERVVVEDYLLAIDQVEARLRELDAHLTETAQTDPYREPVAWLRCFRGIDTLTAIVILAELHDFRRFQSPRAFMAYLGLVPGEDSSGEKHRRGRITRTGNTLVRRLLVETAWHYQHRPTVGIALTRRRKGQPGRVIAIADKAQQRLCRRFRKLAAEHKPAPKIAVAIARELAGFLWAALQPPVVAN

SEQ ID NO: 230956 - protein, 479 aa, unidentified
MTKQTAQRSDLKAVPLLLNESLYIGVDIGKGTHVAGFLSKTLLERHDRFEACPALVFENSREGFRMLMERARSLAPLEQVFVLMERTGHYHRALQQYLQELDITVYVMHVQSRPSGMLKTDKRDALTLANHLYSQLELGVQVANTLHLVRRVVPPTEAAAQLKGLIRHRYELIRESTQRKNKLTAICDEVFPELTRIVKDPNSLVALALREQFPTPQALAIASFPTLQLIRGGARSLSDAKLLELQRLAAQSIGVKDMARLRGLLLEQRQLIKELRLLREHVDQLESEIGSIVEQAREGQILLSFPGIGPVMAATMIAAIGSIHNFPSAATLKSYFGWAPIREQTGTSYDRSRLTRGGTRTMKQMLFLVVFQAIRLRDNEWAKLYERLVKAKCPYDERTQSHVGKKRVIGRVAGQMTEAIYALLKRDAELLSTVLPGQDPPPPQLYDPEVHRQHRQGQYRPLKSTPPPNTITLVHPSSS

SEQ ID NO: 230957 - protein, 410 aa, unidentified
MRIVGMDIHRVAAEVVALCDGELIRLGRIPMLRERLEAFAKKELTHDDHVVVEATGNAAAVVEILAPFVDRVVIANPKQVRMIAHAKIKTDGIDASVLAKLYATGFLPEVWVPDQQTLALRRQVARRTQLVRQRVRLKNLIQSILHAHLIPPCPHGNLVGISGRRWIARQVVPPDEHLAIERHLGQIDLIERALKTVEADIANAALSDPIVRRLMTLPGVDLTVAAGVAAAIGDIRRFTDPQKLVSYFGLNPSVRQSGEGPAYHGPITKQGRGQAPRMLVEAAWAATRSPGPLRAFFQRIAARRGKHIAAVATARKLAMIVWHMLTKEADYIWARPALMARKFRAVELRAGLPTEHAKRGTAYDYNIPEKRASERVRCEEAERNYARFTSRWRTKGKRGCPSPTKATPGA

SEQ ID NO: 230958 - protein, 366 aa, unidentified
MEKIITPIGTPVGIDVHKRSCQVVEFDHGGIKVRKSMTNTREGWLEMVAELPPDAEIGLEVSTAGYFAMSVLEEAGWRERAHWVHTAGIESNRRQKNDRLDAERLARKLAAHHLDPLPEAWFPPPEIRALRLRSRQRCWLALLRKKAKNHLQSLLGMHGLQAAGTDPFGAAGEKWLAEQTLPLPLGESIPQIQRLLQLLEEEIEVSEKYLQAVDGQFPQLPLLRTIPGIGPILAPVIWSEIGTIERFRSAKALANDTGLVASYYDSGDVKVSGPITRQGSRWLRWAFVTAANVALQHRNPFARRYHRLRRSKKPNVAKAAIAHSLARCVYGVLKHGCPYREDRWGRLVGVLEQEARAGARSTKTVV

SEQ ID NO: 230959 - protein, 443 aa, unidentified
MIKELDLGLDVHQEWILTAVAEEGRGPVRDTGAISGDLHAVEKWIGGLRKAYGREVKMRACYEAGPCGFGIARRLKQLGVECEVVAPSLTPTRAGERVKTDKRDARKLARLLRAGELTPVYIPEPTDEAIRDLCRARTDAVDDRRRSRHRLKGFLLRQGYRYQGKSAWSGAHMRYLRELVLPHPAMKVILEEYLMAIQAAGEQVQRCEVAMRDLLEQWRLAPAVRALMAMKGFQSVAAMILGSELGAINRFTHPRQVMAYLGLIPSENTSSDKRRQGAITKCGNAHARWLLVECAQHYVAPPKVSKELSRRQQDQPREVRAISWRAQNRLHGRFRRLAARRLQRNKSARSHRAGAVRFYLGALAHATLLPSADQLGRRKLVRGEELSEGGKHTGRQTHILSAEADLRRQVTVANPRGLVSVKAGVIQPQSTRHLDCRTKAAVN

SEQ ID NO: 230960 - protein, 349 aa, unidentified
MRFYNQQHRFYCGVDLHARSMYLCILDQAGATVLHQNYPAEADAFLQAIAPFRDGLVVGCECMFAWYWLSDLCAKHAIPFVLGHALYLKAIHGGKTKNDRIDAGKLAALLRGGNFPVAYVYPKGLRETRDLLRRRMFLVRQRAHLIAHIQNTNSQYNLPVFGQKLVYAGNRQELAVAERFTDPSVRLSIETDLALIDFLDERIHDVELHIERHARIDDPNTLARLRSIPGVGKILALIFLYEIHDIRRFENVGRFLSYCRLVRCTHESAGKKKGSGNPRIGNAHLRWAFAEAVCLWLRRSDRAKKWQARQERKRAKAKVLAILGAKLARALYHMLTRREEFDETKALGG

SEQ ID NO: 230961 - protein, 372 aa, unidentified
MKVTYQTCCGVDVHKSFLVATIVKTTGGVEPSYQKKRFSTFNNSILEFKHWLLDNDCLDVCMESTGKYWVPVFNLLEDEINVVIANPKWVKAVKGNKDDTKGSKWIGDLFRLGLVKGSYIPCKKVRILREYTRYRYKLVSYRSSEKNRYQNALTVCNVALDSVVSDIFGKSSSSIIDYLLEQSDTSINHEEIASKLLRRLKSKEDAVQFLCTIPGVKRDSAITVISEIGTDMSQFSSSKRLCCWAGLTPGSNESAGKKKSVRITRAGIYLKPALVQCAHAAVKSDKSPYYKKKYDSLVKRRGKKRAIIAIARMILTAIYQMLSTGEQWNPSDLYKIDMPVALVEKQKAKAIKQAKKLLQREGLFPPDEPLAS

SEQ ID NO: 230962 - protein, 453 aa, unidentified
MAKKRSKKLKKMKPLHVIQPNAAGIDIGSTEIYVAVPDDRAAESVRCFATFTEDLISAAKWMKSCGIETISMESTGVYWIPVFQILEAYGFEVALVNARHVKNVPGRKTDVQDCQWLQYLHSVGLLRGSYRPAQEVCAVRSLLRHRDNMVKIAASHVQHIQKALTQMNLQIHHAISDITGVTGLAILDSILNGERNPKKLAALRDRRIKADEKTIIKALKGDYRSEHIFTLKQALQAYRYYRKMISDCDVEIEKHLREFESRIEPGEKPMSTSSHRKPKRNEPDFDLRTHMYRILGTDLTKIDGISTLTTHVFFAEVGPDISKFPTVKHFCSWLGLSPNNKISGGKILSSKTRPGSNRAAQALRLAAQTLWNSQSYLGHFFRKMRARHGSPKAITATAHKLARIIYYLLKTGKQFDETIFAKQEELHKKRLELNLRKQAKYLGFQLVPVESSI

SEQ ID NO: 230963 - protein, 412 aa, unidentified
MRRVIGLDIHRTFAEAVAWEDGRLVRLSRVDMTRTALEGFGKGLRPSDEVVVEATGNAMAVVRVLSPFVARVIIANPLQVKAIAHAHVKTDKIDAGVLASLHAAGFLPEVWTPDPETERLRRLVARRNQVVRHRTRIKNEVHSILHAHLIPRCPHADLFNRRGRDWLARQPLPADEKATIDRHVRELDRLAEDLDVLDREVAQDAIGNPSIERLITITGVNVTVAAGLVAAVGDIRRFASPQKLVSYVGLNPRVRQSGLGLAQHGRISKVGRSHARAMLVEAAWAAAKAPGPLHAFFVRIRARRGHQIAAVAVARKLAVLCWHLLTKETDYLWARPALVAIKKRSMELQAGQPARKGNQRGAAYAYNVKELRNREMLVATQAERAYEHFVGQWRPRGPGKGVRERLNPARHE

SEQ ID NO: 230964 - protein, 338 aa, unidentified
MKLTRIGLDTAKQVFQVHGVDEHGKTRLQKQLSRARVLAFFSNLPPCLIGMEACAGTHYWARELSKFGHTVRLMACQFVSPYRKSGKNDANDAEAICEAVGRPNMRFVPVKSVEQQAVLSVHRARLLLVEERTALVNQIRGLLGEFGIVVAQGINRLRRSLPEILEDGENGLPGLARETFADLLEQLRGIDVRVAHYDMRIETLAREMNAAKRLMAIAGIGCITATALVATVGDAKAFSNGRQFAAWLGLTPRQHSSGGKSKLGRISKRGDVYLRTLLVHGARSALRMTANKTDPKSRWAEDLKQRSCNNIAVTALAAKHARIIWAMLTRGTDYRLAV

SEQ ID NO: 230965 - protein, 415 aa, unidentified
MDVIHERCAGIDISKADVKVCIRVPGPGRRRHREVRTFSTMTNDLLAMRDWLLAERVTVVGMEATGAYWKPVFYLLEHDMECWLLNARHMKAVPGRKTDVKDAEWIAELVEHGLVRPSFVPPEPIRQLRDLTRYRTEIIRERTREIQRLEKFLEDAGVKLSVVVSDLTGKSARAMLEALVAGERDVTVLAELALGSMRGKRPVLAQALTGRFTAHHAFLVRAMLDRIDACVAMEQRLSTQIDQAMRPFRQQLDLITTIPGASTRAAEVILAEIGVDPTRFRTAGDLASWAGMCPGNNQSGATNKPGPTRHGDPWLKAALGQVAVAASRTKGTYLATRYRRIAARRGKKRALVAVGHSVLIAVWIMLTREIPYHDLGPDHFTDRLNPHAKARQTRRLIDQLHQLGYNVTVQPAQAA

SEQ ID NO: 230966 - protein, 313 aa, unidentified
MNQKARQGVNIGVDVGKFQLDAYIYERDIHIEVENTEKGIKTLLGRFRRYKVERIVVEATGRYERALADAAMHLEMPIIIVNPMSVRRYAGAVGQLAKTDKIDSAIIAEFAAVLQPEVRTLNSKETRKIRDYLARRRQLLTMSTMEKNRLQIMPRFLHADIRRVIHHLTKQVEKIDRQLDKLISEQEDWQRKREIMLSMPGIGPAVVNTLLGDLPELGTMTQKQVAALTGVAPFNRDSGNLRGKRRIRGGRYTVRTMLFMAVLTSIQHNPVIRCFYHRLVAQGKHKKVALTACIRKMIIMLNAMIRDDKMWAY

SEQ ID NO: 230967 - protein, 385 aa, unidentified
MLKLDHTDAPATDEYATVHIAFELSKAKWKLGVMLPGSAKMSRYTIAGGDLAALAERLAAARTKAARTGKPVRIVSCYEAGFDGHWLHRWLTDQGVINYVIDPASIQVSRRARRAKTDRIDLEHLMRALLALLRGEPRVCSIVHVPAVEDEDRKHRNRERERMLKERTAHTNRIKGLLHAQGIRDAMPLKPGFLDKLVDLRTGDGRPMPRRLKEEIVREHERLCLVHKQLAVLEADSRAEQRAAAPGSAEAKTVSLAQLKGIGPVGGQGLVNEVFYRTFDNRRQVGGYFGLVGMPYDSGDSQRDQGISKAGNHRARELAIELAWLWVRHQPDSDVTLWFHKRVGDIKGRIRRIAIVAVARKLMVALWRYLETGVVPTGAVLRPSL

SEQ ID NO: 230968 - protein, 370 aa, unidentified
MKKNNSVKGSSKGSTKKQQQITIGLDLGDKSTRCCALDQSGEMVFERSVATTKKGMGQTFGALQRCRIALEVGTHSPWVSRLLKTLGHEVIVANARQVKLISQSTRKDDKLDAQTLARLARIDPELLRPIRHRSEQAQLDLTQIRVRATLVEARTSLVNAARGLAKPMGERLPKCDAGNLTVERLESLPAPLAAVLKPLLEEVESLTEKIHACDEQIEQIARTKYPETELLRQVSGVGPLIALTFVLTVEDPARFANSREAGCYAGLRPKRRDSGERQPELGITKEGDVYLRKLLVQGAHCILSQRAPDTDLKRWGSRLAARGGKNAKKRALVAVARKLAVLLHRLWVTGAGYEPLRNSQAALQLNRKAA

SEQ ID NO: 230969 - protein, 405 aa, unidentified
MWYAGIDWADDHHDVVVIDAAGKRVTSLRVPHTAEGLAKLVAFLLGLGDVRDYPEHLACIIETNHGLLISGLLEAGVAVYPVNPKTVDRHRNPAGAKTDAIDAYLLARTGRSDLADLRRLQPDSPLIAEVKLLTRDQDSLIQSQTRLVNQLTACLKAYYPGAVTLFGKLHQPTTLVFLQAFPTLQAGQAAAVEQIGEVLQAAGHSHATSKAHEVWQQLHQPQFVASAEVTRAKSRLMLALVGQLAVLLPQIAAYDEEIGRLFLLHADSKVFASLPRAKKRLAPRLLAEWGDDRGRYAAVASIQALAGTSPVPYASGTFSLVHRRHACSKPLRNALQQFAWQSTQKEPWALAYYHRKRDEGKSHSMAVRALANQWVRIIFALWRKHAAYDATIFLAAQQAHGARAA

SEQ ID NO: 230970 - protein, 375 aa, unidentified
MRVVYQICCRVDVHKKFLVATIITTTKGVQPHYQKKRFSTFNTDLNRFADWLNENNCVDVCMESTGKYWVPVYNILEMRGIRTIIAYPKWVKAFKGNKDDTKDSKWIGDLFRLGLVPGSFIPRKKFRVLREYTRYRYKLTSMKSSEKNRFQNAFTVCNVALDAVVFDMFGVPASAIADYLISTEQFDEDYCKSLLKRSLKKKSDTVIESIQGYCIEPEQKLRMQFVRNHLDYLKNEISQVDAVIDTMIKKCEGLIALLTTIPGVKRDSAITIISEIGDDMSQFGFSKRLCCWTGLTPGNNESADKKKSVRITRAGIYLKPALVEVAHAAIKATESPYYHIKYEKIVKRRGKKRAVIAIARIILTAVFQMLSTGEV

SEQ ID NO: 230971 - protein, 494 aa, unidentified
MAKGKTEAAGSSKRGKIGEMANAYRKRHAKAKARATAHAEAEVQRVEGLPVLNAHAAGIDIGSRSHWVCVGVSADKDAPVIREFSAYTEGLHEIVTYLRHYQVTTVAMESTGIYWIALYELLEANGFEVLLVDPSYTKQVKGRPKTDRLDCQWVYRLHSVGLLAAAFRPDEKTCQLRSYLRQRANVIRYAGQHIQHVEKALEQMNLKLTETISDITGVTGRAIIKAILRGTRDPVKLAKYRDPRIKASEEQIAQALTGTYRDEHLCALKLAFEAWQFYQKQLDQIDTQIEQQLGRMKQDRALPPLKPRKRSGGRKPNHPRFEVRTALYYAVGIDLTEIEGIEEMTALTIISEIGVDMSQFATVQHFCSWLGLCPLVKKTGGRVKSSRTRPGVNRAAVAFRLAANSLHASKGAIGAFLRRKKAHLGAPKAITAAAHKLARIVYLALKHGMTYVRQTQEEYEARAREQQVKSLKKKARALGMEVIETPAPEAPPAV

SEQ ID NO: 230972 - protein, 340 aa, unidentified
MHATIIGLDLAKNVFQLHAEDRSGTVLWKRRLRREELEAFLRKQPPALIGMEACGSAHHWARVFTAVGHEVRLMHAKYVKAYVKRGKSDVRDAEAICEAVQRSSMRFVPIKSVEQQIDRSLERARDLLVKQRTQLMNATRALLAELGVVARAGLRGFTTLADKIAAGDAVIPRPSLTALKPLVEQWRALQASIDQLEARLVARAHSDERMRRLMKIPGVGPLTAHAVVTAIGDPKRFSTGRDFAAWAGLTPLTDSSAEKTRIGHISRQGDHSLRRLMVLGAVNMARHARAKPCEANAWLNGVIARRPVKVAMVAQAAKTARIAWALLCSGENYRGRTAAA

SEQ ID NO: 230973 - protein, 315 aa, unidentified
MAANRVVGIDVSKKRFDAFCSTTKEAFKANSDMKSVEAFVDRVKALQPELVVLEASGGYERTLVCALAAAEVPTAVVNPRQVRDFARSMGRLAKTDKIDAAVLARFGAVMDIEPQSLPTEEAQEASDLLTRRRQLIDMRTMEKNRLKTPVAPRVERDLREHIKWLDERIEEHDDTIDSWMRHSKLWCEKAALLQTVPGVGRILTATLLFSVPELGNLNRKEIAALVGVAPMNRDSGQYRGARTTSGGRAGVRNVLYMATVVGKTHNPVLKAFYDRLIAAGKPPKVAITACMRKLVTILNVMVRDKTSWAPQNGCC

SEQ ID NO: 230974 - protein, 408 aa, unidentified
MNTLYVGIDVSSKSNVVYLMLPNGDKHSNFSVANSHEGSTQLVKRILSALISHSLDTVLIGLEATNVYGDNLVYFLREDAILAPFNRKIHVLNPKQVKKFHDTYNDLPKNDYVDSFVIADCLRFGRINKEVYMGDYRYKALQNLTRARYYAVQNLTKEKQRFINVLFKKYSTMTQEKVFSDTFSTTALAVYDEFESAEALANMDLQELTDFIIEKGKNRFPDPDSVAKAIQKAARSSYRLPKTVNDSVNQVLSISITSMKALESQIKEFDKAIKAQMELLPNVLISIPGIGPVYSAGIMAEIGDINRFDNQAALAKYAGLAWKQHQSGGFEAEVTRLIPSGNRFLKYYLCEAAFSLVRCDKEYSDFYHLKYKEVNRYQHKRALALTARKFVRLVFRLLKDNRLYTPAK

SEQ ID NO: 230975 - protein, 337 aa, unidentified
MEYFAGLDVSMAETQVCVVTRDGAVIHKAKVPSTPADIAAELAQVPACRRIVFETGRMAPMLYHGLRQFGLPVVCVESRQAYQALKLLATHKTDHNDARGLAHLARTGFFKPVHVKSLPAHAVRSLIIARKKLVGHRVTLENQIRGLAVVFGVRLPRALSSTFIRQALQASDGIPGLSAAMQGLAAVRAAVLAAIVAIDGDIRRMVRASDACRRLMSIPGVGQLTALAFTAAVDDPGRFRRSRDIGAYLGLVPRRHQSGEIDYTGSISKCGDRRVRTLLYEAANVMLTRYKGPLKLKDWALAVARRSTMRKARIALARRLAIIMHAMLRHGTEFKPA

SEQ ID NO: 230976 - protein, 359 aa, unidentified
MTEYNKQVGEIVGLDLGDRYSQFCIVSRQGEIVERGRVATTATAMKKQFERGASTRIALEAGTHSPWVSRLLEELGHEVLVANARKLRMIYDSDSKNDRADAETLARVARMDARLLGPIRHRKEQTQVDLAVVRSRDALVKARTQLVNHVRGMMKSVGSRLPKSSTPAFHKKAAGAIPELLESALVPILETLEMISEQIQNYDRKIEQLSREKYPETELLTQVSGIGSLTALTYVLTLENPDRFSQSRAVGSYLGLRPRQGDSGKQQPQLRITKAGDPMLRRLLVNSAQYVLGHFGQDSDLRRWGLELAKRGDKNAKKRAVVAVARKLAVLLHRLWSQGVVYDPFYQSRSKSAVSVLVS

SEQ ID NO: 230977 - protein, 336 aa, unidentified
MTIISIGLDTSKHVFQIHGVDENEKPVLRRQLRRGEVEKFFAKLPPTRIGIEACGASHHWARLLRGLGHAVMLMPPQYIKAYVKRGKNDAIDAEAICEAMSRPTMRFVPVKTAEQQAALTMLGVRDLLVKQRTMLINAIRGHAAEFGLTVAKGPQQVVELLQRLATGEGVPALAREMIGLLAGQLEVLNAKLKAIEAQLMAWHRQDQTSQCLATIPGIGPIGGVSFALKVPDPKGFRSGRHFAAWIGITPRENSTAGKHRPGKISRQGDESLRRLLVLGATAVIQQAKRGRASPWLLELLARKPKKLAAVALANKMARIVWAMMVSGETYRRPQDA

SEQ ID NO: 230978 - protein, 375 aa, unidentified
MIAATRSVVSVAKSVLYVAFELGKAQWKLAMTSGFTITPVVETMCAGDWAAVDRALADGRQRFKLEGTAPVWSCYEAGRDGFWIHRGLVGRGIHNRVVDSSSIEVNRRARRTKTDRIDALKLVMMLVRVAAGEQRVWSEVRVPSVAAEAARHVSRERQALTTERTRLVNQMRSWLVTAGAPWPRRAARGWWAHVRDWAAQPLATPVQARLARAHARLQLVTEQLAALDAQQHASVAAAGPDSVAHRLLQLKGIAVTSASVLLDEGLVWRQFRNRRQIGGLLGFAPSKYESGDRSRDQGISRAGNQRLQAVMIQLAWGWVRWQPQSALTRWYRARFGQGKRARRVGIVALARKLLVALWRCATHATVPAGAMLKMA

SEQ ID NO: 230979 - protein, 378 aa, unidentified
MYRIIKIGMDVHSTNYTLCAMEPVIGAEDRIFANIKVTPDYKNVLMFIENLKLKLGLNDTYDIECGYEAGCLGYSLYNQLTAAGVRCVILAPTTMLTQQGQRIKTDARDAVMIAQCLSYGGYHPVYIPAEEDDSVKEYLRMRDDHKLALKKVKQQINAFCLRHGHRYEKTKWTIAHLKWLKQLELSALYRETLDEYMASYDEQTAKIERFDKRIEELASQERYQKKVKKLGCFLGIKTHTALSLIVETGDFERFAKGNVYAAYLGLAPGERSSSDSINRLGISKAGNQHLRLLLIEASGGICKGAVGHKSKDLRQRQNGNPADVIAYADKANTRLRSRYYKFIRHGKKRNMAVAAIARELACFIWGMMTDHIQMQKSA

SEQ ID NO: 230980 - protein, 416 aa, unidentified
MEVLHPRCCGLDVHKETVVACLRLVSEGKVVTEVRTFDTTTAQLIALSEWLAANDCTHVAMEATGVYWKPVWHVLADGEFKLVLANAAHVKNVPGRKTDVGDAAWLAELLAHGLIRASFVPDALTQELRTLLRTRKQLVREQTSHVLRVQKTLEDANIKLDSVISDVMGKSGRAMIKALIGGESDPAKLARFADRRVKVSQEKLREALRSRVTNNHRFLLRLHLNQFDALDAAIATIDQQVEANLAPFQSAVELVESIPGIKGVGAQVIVSEIGIDMSRFPSDGHLISWAGLCPRNDESAGKRRSNRLRKGAPWLKTTLVQCAWAAIRKKGSYLQAQFYRIRARRGPKKAIIAIAASILTAIYHMLKQGTFYKDLGADHFQRRSKDQQRQRLVKRLADLGYAVELSPRGQLAVVSF

SEQ ID NO: 230981 - protein, 427 aa, unidentified
MEVPHAGDATGEEVMEVMYPRCAGLDVHKETVVACVRLAAGSDTSHVVRTFATTTADLIELSEWLEENGCTHVAMEATGVYWKPVWQVLVDSSCFELILANAAQVKNVPGRKTDVNDATWLAELLAHGLVRASFVPEPAIQELRGLLRTRKQLVREKASHVQRVQKTLEEANIKLESVLSDVMGRSGRAIIQALIDGETDPAKLAALAHWKVRASTETLSEALRGRIKRNHRFLLRLHLQQIQALDAGIAEIDREVDDGLACFRDAVDRLSTIPGISQLSAQVIVAEIGTDMSRFATDAHLRSWAGLCPRNDESAGKRRSTRLRKGAPWLKSMLVQCAWAAIRSKGTYLHAQYVRLRGRRGPKKAICAVAASILTAAYHMLKDGTFYNDLGPTHFDRRRPETQARRLIKRLAELGFSVELKSMATAS

SEQ ID NO: 230982 - protein, 409 aa, unidentified
MRDYLGVDWADQTHAVWVVDESGTKIAARTVTHTAEGLDAWGRELDEWRAQGSELWAAIERPDGRVVDLLLDHGVVVYPVNPKALDRARDRFRQSGAKSDPFDARVLADFLRTDHTHLRALQPSSEAAQELKLLTEDCQRHIRQQTRLVNQLTATLKAYYPRALEVAELTSALAREFLLAYPTPAALTALTERQWPRWARAHRLTEARTGELWAVLRRPQLPVPAHVVRAKARLMRALLEQLMPVMAAVAQYRKAIDDFFARMPAAQWARTLPIGKHGITAPTLWARLGDAPGRWESFRHLQAHAGTVPVTKRSGKQQRVVLFRFACDKALRYVVDQVAFLSLLSSAWARAYYDQQRTRGHSHRQALRALGAKWLKIIFVMWERHVPYDEQYHLATMTRQQLRRQNQIA

SEQ ID NO: 230983 - protein, 374 aa, unidentified
MSDTMLHLGMDVHKDSLTLAVLPADASAPTHVDRLPNDLQKLRRYLARHAPVPAATRVCYEASGAGYVLQRALTEWGYHCDVIAPSLIPKRPGVQRKHDRRDAVELARLYRAGELVVIRIPSAAEERVRDLVRCRETFQREILKSRHYVLKFLARRGVVYRAGRHWTTAHERWLRQVMATSTELGAEDRLVLGEYLALLDYKLQRRQELDRQLEQLVLAPATATAVAWLQCFRGIQRQSALVLATEIVDWRRFENPRQLMAYLGLVPREHSSGDRERRGAITKAGNTHCRHVLVQAAWAYRYRPLVSQHVKRRQEGQPALVIAQAWKAQHRLHKVYTKLAVRRRPQIAVVAVARELAGFLWAVLREIEPMTAAA

SEQ ID NO: 230984 - protein, 332 aa, unidentified
MNLNLQGGAANRERGLNAGIDVSKAHLDACWGAEQLRMTNDPVGWGALVSKFKEAKVDLVALEATGGYERGIVAALQGAGFDVARLNARQARDFAKSLGRLAKTDRVDARVLRDFADVLARHDARHKFITPVPDPQREQLNALMTRRRQLVDIRVEEGNRLESAHRLARRSILALLKTLDKQIETIDKDIGDRLDQHFKEQRKFLDSVKGVGPVTILTLTAALPELGQLDRRAISKLVGVAPLCDDSGPRNGKRRAWGGRSQVRTVLYMAALSAKKHNPVIKAFHDRLIAAGKPKKVAIVACMRKLLTILNAMLRDHALWDPTKHIERPKTA

SEQ ID NO: 230985 - protein, 362 aa, unidentified
MNVGVDLHKSQFTVHVYEGKDEKENRQYSTSKAGYEEFLEKVQAWQRSGESIRVGVESTGNTRYFQNQMEAAGCEVKVINTLKFKVVNESVKKTDKHDAATIAEFLAKDMLPESRLCTEESEQIRRLLKSRQTLVRAGVTIKNQIHALLTGIGMEDKKASLQSKRGRQRVLDALKEAGNVLVVQPLIDTINNLEENVKVIEKEIEQLTKGDKVVELLMTIPGCGPIGAWTIRAHTDDIKRFSSAKKYSSYAGLAPWVQNSNERVCHGRITKRGPEALRTALVQLVLGMRRIKKQTLKWRLMTRHEMMKKSKGSGKSIIATARKISRIIWTMLTNETEFDCSLMLNKNISKTADSMKKLAIIA

SEQ ID NO: 230986 - protein, 393 aa, unidentified
MKVTRIGLDIAKQIFELHGVDRHGRVAIRKTLRRERVLEYFSQLAACEVALEACGGAHYWQRELSKLGHTVRLLPAHKVKPYLDGNKNNAHDAAAICEASSRPSMRWVEPKTIAQQDLQSLHRVRQVTVRQSTLLANHIRGLLLEYGIAVARGTAALQRALAQLLEPDEQRLSPLLKQLIAGQWRMLKLHEQQVTVHDRRIANIARHDASCQALLKVEGIGPLTATALVATAGNGRQFKNGRHLSAYLGLVPGHSSTGHKTVMLPITKRGSRYLRTLLVRGARSTLYHARRKTDPRSLWLQRLQATRGHNVAAVALANKNARIAWALLRFGQAYRPNLAHAPVAERGATPAASAPGRRAGLTLKLHRARAASAESPIFPSRPQRVKGGTEKCS

SEQ ID NO: 230987 - protein, 341 aa, unidentified
MDGLYIGLDVSDKVTHICCVDYLGKVIWCGEAATDPEALASKLKKHCKTITRIVLETGSLSSFLYHGLNERGLPVTCVCARHAKGVLSVQTNKSDVHDAEGLANLARTGWFKAVHIKDTQTHLHRARLKIREQLVKAHGAMRNQMRGLLKLFGLRLGVVNTPNKRNERLLMLFAQKPELAEIMKPLMDALAALEVQIKVATHELTKRATSDPVCERLMSVPGVGPITALTFINSIEDPARFSRSSDVGAYAGLAPRRFQSGERDNKGHISKFGDGQLRSTLYEAANNLLSRVKRPFPLQTWGKALVQTKGAKRARVAVARKLATLLHSLWRSGEKFKWETA

SEQ ID NO: 230988 - protein, 424 aa, unidentified
MKVTYQTCCGVDVHKSFLVATIVKTTGGIEPSYQKKRFSTFNNSILEFKQWLLDNDCHDVCMESTGKYWVPVFNLLEDDINVVIANPKWVKAVKGNKDDTKDSKWIGDLFRLGLVKGSYIPCKKVRILREYTRYRYKLVSCRSSEKNRYQNALTVCNVALDSVVSDIFGKSSTSIIDYLFEQSGSSINHEEIASKLLRSLKSKEDAVIESVEGYQMTDAQKYRMRLVRAHMDYITAEINDVDKMIENMISSNTDFENAVQFLCTIPGVKRDSAITIISEIGTDMSQFSSSKRLCCWAGLTPGSNESAGKKKSVRITRAGVYLKPALVQCAHAAVKSDKSPYYKKKYESLVKRRGKKRAIIAIARMILTAIYQMLSTGEQWNPSDLYKIDMPVALVEKQKAKAIKQARKLLQREGLLPPDEPLAS

SEQ ID NO: 230989 - protein, 361 aa, unidentified
MTKVSTMTSRAATTDFIGLDLSDKTATYVILSAEGQVIRDGRISLTRPGLSRVFAARPPASIAIEVGGHSPWVSRALTELGYVVTVANPRQVKLISHGPRKNDKQDAENLARLLRYDREMLRPICHRGETTQADLALLRSRDVLVRGRTRLINSVRSMVKAAGGRLPRCSAESFHYKVKDYLPEMLKPALEPTLEVIAGLTEHIKTSTSKLEKLADERYPETHILRQPKGVGTLTSLGFVLTLEEALRFAKSRSVGAFIGLTPRQYDSGESHPQLRITKAGDPFLRRLLVSSAQYILGPFGEDCDLRRWGFKLMRGSDNQILKKKAVVAVARKLAVLLHHLWLTAEVYEPLRQAALEEEAA

SEQ ID NO: 230990 - protein, 343 aa, unidentified
MYYIGLDVHKKTISYCVKDAAGKIHREGKMGSTRRELDAWIKTLPQPRMMAMEATIFTGWIYDHLLPHAEKVKVAHPLMLRAIAAAKRKNDRIDASKIADCLRCDFLPECYMTSTEIRDRRRTLRYRSLLVKQTVQMKNRISGLLMETGVSYNKKRLHKVGYFDELISGNEEIDDSIRPLLKLSRETINRSQKLDYALVSSLERDPLLKERLERLRTVPGVGPITALTWVLEIGDVARFRSIKQAISYCGLCGSEKSSADKVLRTPISKQRNKHIQQVLVEAAKLAPRLSHELALIHEKEKQKGDRNRATLAVARKIVAWIVAVERRKQAFVPAEKLGGEAAA

SEQ ID NO: 230991 - protein, 319 aa, unidentified
MDGSITHFAGIDVSKKSLDLCLLPEDRRQTFTHDKAGIQQLLAALPVGGTCLIAVEATGGYHRNLVAELVNATHQVAVVNPRQVRDFARGLGILAKTDRLDAHVIACFAQHVRPRVAAPLSPAQAELEQLVTRRRQLVDLRTAELNRMQTVSSKSVRKSVQQMVDMLRKEIRRVEHDILTLLQSDDDWKAKMDRLESVPGVGPVSVASLLAELPELGQLNRQQIAALVGVAPFNRDSGRFRGKRAIWGGRASVRSVLYMAALTARRHNPILRAFANRLEAAGKPFKVVITACMRKLLIILNTMLKERTQWQPEKSLANA

SEQ ID NO: 230992 - protein, 349 aa, unidentified
MTQAITETIGVDLGDKYSAYCILDQKTGEEVGSGQLRTRPQDFEGFFSGRSKARVVMEAGTHSPWTSRITSAACAETHVANSRTLRFIYGNTRKSDERDAESLARLGRADPKLLSPIQHRGASAAKDLALIRARAAMVRSRTSLVCALRGLVKSSGARLPKASPCSMGPKTCEQLPEALRDYLTPLLLSIERLNEQIAVADKEIDRKARESYPETAALTQVWGIGNLTALTYVLTLEDPDRFASSRIVGAFLGLVPRRDQSGTTDKELRITKAGDAGLRTLLVECAQRTLQRNAPDSDLKRFGERIAADGGKVAKRKAIIAVARKLATLLHALWRTGEVYEPLRSARAA

SEQ ID NO: 230993 - protein, 351 aa, unidentified
MSESMTVAVGLDVHARSIRLAAVRADELLEERTLPYNEEAVERVLRRWPAVRCCYEAGPTGFGLYRHLLERGIDCLVVAPGLVPQRPGDRVKTDPRDARKLARLLAGGLLEPIHVPSPGQEAARDLVRAREDARLDRMRDRHRLSKFCLRHGRTLPTSSWTVVRRKWLSEQRFPFPAQQITFDSYVHAVDLVDARIEQLERAIRETAQQEPWRELVARLRCLRGIDTLTALALVAEIGDFSRFRTAEEFMAFVGLVPSEHSSGEKRRQGSITKVGNSHVRRLLVESAWHARRRPKVGYELARRQRGQHAEVIERAWRCQQRLYQRWQRMAGRGKPQQKIVVACARELAGFV

SEQ ID NO: 230994 - protein, 371 aa, unidentified
MGAYYVGLDVHSRETVFVIQDPTGAVIGRGALPTTPEALARMCHQYQLPPGTPVALETGTSAFYVARALSALGLKPIVIDAHEVRLKARRAGQKSDRRDAFELCDGLRRDLYRSIVHIPSPAISALRTALSRRRHFVRIQTAEVNATKRLLRGAGWLIGTRGSLRNASGWERLIDALASEPALQTHTRFHYAVWQQAGEQVRAVDHLLGDLGRGFCDDVRRLETVPGVGPIVALTAVAVFADVERFGSAKHVASYAGLVPSTYQSADRDCHGHITKRGSAELRTMLCEAAQHARRPSHPLHPYFLKLCARRGYKSAVVAVAHRLCRVLYALLRDRTDFQPSRLGIEEGPFTQTVTRRFRLTPKSAGRLALV

SEQ ID NO: 230995 - protein, 419 aa, unidentified
MKLFVGLDVSKATLDACFLSREDDTNTILWQTTVANSDTGARTLKNKILEFHEKLEYDKIVVGMEATGQYSMHPSLFFSNDPDLQLLNVQTIVENPRLIHRFSKVWTDEKNDKLDAQLIAEFLSTGKHSAAQPREEKFVALLRLTRTRYQLIRQLSEAQQHYVENLYYKCNTLTSDLHDESISTSIFSSTMIQLMTGDMTMADIRTFKTADLADLLQTFGRQRFKDPIKLAQVIKKSVSDSYRLGKVAQASIDINLGIQMRVIRSFEQEIKTIDKAIENIMETIDEAKSLLSIPGIGPVYAAGIIAEIGQIDRFDHESKLAKYAGLYWPKHQSGKFQKEQTPMSKSGNRYLRYYLVQAANSVRRYIPEYNDYYDKKYNEVPKAQHKRALVLTARKFVRLVFALLSNHQLYTARSEAIES

SEQ ID NO: 230996 - protein, 371 aa, unidentified
MKKNSSCSQSPKRGKKAQRGHMTIGIDLGDKTSRYCVLNEQGEVLAESGVATTKQALGRVFGTRKPCRIALEVGTHSPWASRLLERLGHEVIVANAREVRSISHSSRKDDRRDARMLARLARADPQLLRPIRHRGEQAQGHLLRIRVRATLVEVRAKLVNTARGLTKAWGERLPACDTDTMGVRRLEGLPAALRAALEPLLREVESLTEKIKACDVELEQIARKEYPETELLRQVSGVGALIALTFVLTLEDANRFARSREVGCYVGLRPRRKNSGEHRPQLGITKEGDRYLRKMLVQGAHYILGWRGPDTDLRRWGLKLAERGGPNAKKKAIVGVARKLAVLLHRLWVTGEVYEPLRNNTAGPRRKALAA

SEQ ID NO: 230997 - protein, 327 aa, unidentified
MTIPPNSAAPAIFVGIDVSKETLDAARSDTGQVLQCPNTAAGIRKLIAWLPAGVTRIVLEATGGLEQPALEALLDAGLPVARVNPGKVRHLAKGLGIHAKTDAIDAGLLMEFARLAEPRLAQKRSEKQAELDALVTCRRQLVAAKTDQTNQLQSTVSPFAKKALRSVLTSLDKQIKRLDKQIVSIIDSDDDMRHQDGLLRSAPGVGPVLSSAILAKLPEAGTTERHQIAALVGVAPFNHDSGKYQGKRAIRGGREDLRSILYMATQIAIMHNPLIRAMATRLEKLGKLPKVIIVACMRKFLTLINAMLRDNLPWSELDVVKNHPQCP

SEQ ID NO: 230998 - protein, 343 aa, unidentified
MLSNNIIAIDLAKNVLQVCHISVHGEMLSNKPLSRQKTKEFLAKAKSSIVAMEGCCGCHYWGQLAEQFGHEVRIINPKKVKGYLKGHKTDHNDALAIANTAIQIGIKYSRPKSLEQQSMHSLETSRRFLSRSVVSLALHIRGTILGYGIANSRGEKGLKASVQTVLDGETSIPTNVVSVLSMLWEQYKELKAKLIAFEKEKNALTRQIEPCQRLMEIEGVGETTAAMLYTTLGDGKQFKNGRQASAFVGLTPKQHSSGGKVFMIGIDKCGGVKELRSLLYLGAMSYVGRLPEKPKTQKDAWLRSIIDRIGFKKACIALANKVVRTAWAMLRYETEYKPVLLTD

SEQ ID NO: 230999 - protein, 349 aa, unidentified
MAMVGGLDLHRRQITFDVLEVESGQEWRGRIWQPDRDRFRRWLGHEVTSRAQGGRVALAVEGCTGWRYVAEEIAAAGFEAHLAEPADTQAARGRKRRAKTDRTDARLLRDLLLAGDLPESWIPPTDVLEWRERVRLYVSLVNQRTVWCQRIHAELYQHGVAVPEGAIRTAKTRAMLADDRLPLSPAARQRVTVGYRMIDATDTEALPLKCDLTRFGMKQPACRALVNAQYGIGGLIAVAVWTELGDCRRFSRSEQVVRHTGLDVTVDASDRRRAGGYLSRQGPETLRWALYEAAKNSSHQRSPDHDYYIRLKGRHDGKIAAISMARKLARRSYHVLRNVDPDLVYAMPN

SEQ ID NO: 231000 - protein, 311 aa, unidentified
MTELTIGVDISKRRLDAACYTSGRQERFANDAAGLKALRRWIGPGRLVARLVYEATGRYHAGLEAAFAGWPLVKVNPLRARRFAEACGTRAKTDAVDARMLARMGAQLALPPDPPAGPGARELQALQTARAGLVGDRIALMQRADQARLPLLRRLAARALRLVEAQLAEVEAAIAARIAADSALARRQEILLSIPCVGQHLSATLVVEMPELGAASAKEVAALAGVAPLTRQSGQWTGKARISGGRGDLRRALYMPALNAIRYHPDMRRLYERLTAAGKPAKVAIVAVMRKLLVLANALVAQDRLWEPRPA

SEQ ID NO: 231001 - protein, 345 aa, unidentified
MSIVGGLDIHRKQITFDYLDTETGQVRRGQISPADREHLRAWLARFAGREDVAFALEGCAGWRYVAGELAGAGITAHLAEPADTAFARGRKRHAKTDKTDARHLRMLLAEGRLPECWIPPGHILECRALLELYNDLRRERTAWAQRIHAVLFHQGAPALGEGVLRTEQGVAGLRAAAAAHLSPAGQLQVATALEVIDALEARLHAVRHQLTDAARHLAGAKALAARLYGVGPITALAITCWLGGAGRFSSSRQAVRFAGLDITVSSSDRKGPPGKLSRQGPPVLRWAVYEAAKTHARTSAPDHRYYAAVKDRKNSKRACLSEARKILRQAHHILAELGDDALAAA

SEQ ID NO: 231002 - protein, 343 aa, unidentified
MDIAVLGIDLGKNVCSVVGLDASGAVVMRRKVRRETLIAVVAKLPPCVVGMEACCGSHHLGRLFAAHGHDVRLMSPEYVRPYVKAQKNDDRDAEGIAEAATRPTMRFVGLKSQDQLDMQTLHRSRDRLVGERTALINQLRSILLERGLVAPQGKRKLEQFLAVLMDEQGGAGLSPRMIELVADARTQWAGLDRRIAAFDAEFVCWAKENEDARRLTTIPGIGAIVATALVAAIGRAEVFDRGRDLSAWLGVVPRQFTTGGKPKLLGISKRGNTYLRKQLIHGARAALPHVAERDTPLGRWAKALMERAHHNVAVVAFANKLARIAWAVLRSGERFAVTGTMAA

SEQ ID NO: 231003 - protein, 430 aa, unidentified
MARVIIGMDPHKRSATIEVIDGRERVLAQGRYGTDSEGYRAMLAAGRRYPQRVWAVEGCNGIGRHVAQRLVADRETVVDVPAKLSARARVFATGQGRKTDPVDAHSVAVVALRTTGLRQVAVDDATVALRLMVDRRDWLGRARTDTVNRLHALLLDLVPGGAKKHLSALQARTILAGVRPRDVVGRTRRQLAAELITELAVIDKKIKLADKALNELVAATGSQLQQLNGIGPSVAARLLGDIADISRFASRNHFASWNGTAPLDASSGDQQRHRLSRAGNRRINRALHIMAVVQLRHDTEGRAYFRRKLAAGKTPMEAMRCLKRRLSDVVYRQMVADARKASPGGQPGATLASSAADPIPTVDSSDKPQPGLNREPTPPAKATAEPTTTAVSPPAARTARRPCRSAQAMPLTSTSATRTDPQTRRSPRSP

SEQ ID NO: 231004 - protein, 346 aa, unidentified
MAFIGVDLHSNSFTTCRLGADGSEVFETFQLAAAELERFCLSLDAGDEVAVEATGNAAWFCDEIRACVGRIVVVNPRQFQVIRQSVKKTDRNDARALAVFLSRDMLPETRLKRPCDAQLASLAQTRDMLVKSRTRVLNKIHGVFNRHGIKLKKEGLSARRLRALEIGRFGEVEQVELTVLRDQALALSAAIRGLDKALAEAAAELEGFEEITSIKGIGARSAAVFLSGIGDVTDFASADKLAAYVGIVPRVAASNGVEHHGRITRRGNKLMRTTLVQCTLVAIRYSGYLNAFYRRIKARRGAGKAIIATARKLLTIIYNTLKNKWVFEDFPTFRLRNPGQGAGQTS

SEQ ID NO: 231005 - protein, 349 aa, unidentified
MLTDEVDYVVGVDTHRDEHVLAIVAVAVGAVVAQRAVAANGRGYVQALRFARRHAPGARLWAVEGAGHYGAGLARYLSEQAETVLEVARVPRQERRSRGKDDQLDAARAARAALAGEPLPLPRSGQRREALRLLLVARRSAVDVRREALVQLRSVIVTAPDQLREELRGLPVQRLLDRCSRLRRSTTAKPDELATRLVLRTLARRIEAVTVEASELECEILAHVRMLAPQLLDEPGVGPIVAAQLLVAWSHRGRVRSEAAFARLAGVAPVPASSGQTKRQRLSRGGDRQLNRALHTVVLHRRQHDPATKDYIARRIGEGKSRREATRLLKRYLARHLYRVLDNQEPLMT

SEQ ID NO: 231006 - protein, 303 aa, unidentified
MAIVGGLDIHRRQITYDWIDTTTGETGRGQLSPATRLELRAWLAQFDGPQADFALEATTGWRFVAEELERAGFRAHLAEPADTRALRGPKRRAKTDRTDAHHLRELLRAGTLPGSWMPPPHIADARTQVRLRRALVGERTGWYQRIHAILFHHGLPDRSQLLTADGRAWLASIHLPAVARQAVDLALRMIDHLEVELDTLDAQLARIARHQPGCTALMGRYGIGWLTAVAIWAEFGDVRRFANSRQAVRFTGLDITISESDGKRARGHLARQGSPVLRWALHEAAMCAARPSSPDHAYYLQVK

SEQ ID NO: 231007 - protein, 363 aa, unidentified
MIKKLLKQVVGIDVAHKKIDVSLGCMDQEANTEIYAYKTFNNNEKGFAALLLWVKKYTQADTHLRFVMEATGIYHEALAYHLSAKGYTVSIVMPTKVTNFFRTLDVKTVTDKTMSETIALYGLERKLEDWVRPQKVYRELRQVTRERDQLIAERTMNKNQLHAEQTEANPYEKAVARIKARIVMLNKQIKEIISEITDINKNNDDIAEATKLITTIPGVGLLTAITVLAETDGFSLIHNKRQLTSYAGLDVKEKESGTSIRCKPRISKRGNKHLRKAMHLPALAAIRHCERYRSTYATIVSRTGIKMKAAVAVQRKLLEMIYTIYTTKKPFDVEYLQKETRSKQDLKKIENSSEELFPIQADI

SEQ ID NO: 231008 - protein, 318 aa, unidentified
MKQVDEYAGIDVSKAQLDVALRGSDRHWSVANDETGISELVTALQAVRPVLIVLEATGHLEMPLTAALLAAGLAVAVVNPRQVRDFAKATGHLAKTDTLDAQVLAHFAQAVHPPARPLPDANTQALAAVVTRRRQVVEMLTAERNRCASAASAVRPRIERHIEWLVQELADLDTDLRQRVQASPAWCAQAQILQSIPGIGPTTACTLLAELPELGQLDRRKIAALVGVAPFNRDSGPRLRQRHIWGGRTAVRTTLYMATLVATRCNPIIKVFYQHLLDSGKPKKVALTACMRKVLIIANAMLKHNVPWNPVHASQTAL

SEQ ID NO: 231009 - protein, 434 aa, unidentified
MTTTAAAVIGGVDTHADTHYAAALDQVGRLLGTRQFAADAAGYRQLLGWLESFGSVQRVGVEGTGCYGAGLTRFLRGRDVTVVEVNRPDRRARRLRGKSDPLDAEIAARRAMAAYDTAVPKDTATAVESIRVLRLARDGAVKARTAALNQLKDLITTAPDQLRSSLRGKTLRKVAAEAARFRPDMTRLANPVQVTKIALRSVGARVVALNGEVAALDRQLGALVGATAPRTMALFAVSTQHAAQLLVTAGGNPHRLRSEAAFAALCAANPIPASSGKTTRHRLNPAGDRDANATLHMIAVLRMRWDPATRDYVTCRTEDGLSKREIIRCLKRYIARQAYHAVTADLAEPATCDDTPKLARVSSEPVELIALDEPAQGLISARRNGEPTFTHVQGIADAMMAALSRGVDRVIPKQLYPDLRESLPPELPPWVKVR

SEQ ID NO: 231010 - protein, 348 aa, unidentified
MIVGIDVHKRTHVAALLDERGGTMGTFGFANSPEGMRRLQAWLVEHDAGEAVVGVESPAGYGRLLVASLEAAGHEVLNVPAWRTHRERRRHGPGKTDPGDAIAVAQVVLHKRAELGPALEPELVRALALLELQRRRLVRDRTQAIQRLRADWNQVDPVGEARVLNLTRQRELRRLRRISFGDGLVEQVATRCIRDLARDIEDLNQRIAALAAEIAKLLAEHGNPIADLHGAGTQIAAAVIAHAGDVRRFRDAAAFARFCGAAPIPCGSGQTAGRHRLHRGGNRQLNAALYRIAIVQARHHPPARTYLARKIAEGKTPREARRALKRHLANVIYRQLYAWAEATPALNT

SEQ ID NO: 231011 - protein, 351 aa, unidentified
MPATAQTAVAVIGIDIGKNSFHVVGLDSRGAIVLRQKWSRGQVEARLANMSPCLIGMEACVGAHHLSRKLKALGHDARLMPAKYVRPYSKGQKNDFRDAEAIAEAVQRPTMKFVATKTAEQLDLQALHRVRERLVSQRTGVVNQIRAFLLERGVAVRQGLRFLRAELPRLLATPPDVLSPRMVRVIESLAEDWHRLDERIDHLSDEITALARQDAGCERLVSVPGIGPIISSAMVAAIGNGDAFSKGRDFAAWLGLVPKQISTGDRTILGKISKRGNRYLRVLFVQAAWVVLIKPQSWERHGLKPWIEAAKKRLHRNVLAIALANKLARIAWSVLARGRSFEARPAMASAA

SEQ ID NO: 231012 - protein, 326 aa, unidentified
MFLGIDVSKATLDAALLLDGAAPKARHKVFPNTHEGHQLLLLWLQEQNAPVVHATLEATGTYGEAVSLALHEAGHKVSLVNPALVRAFGQSQLKRTKTDKADAILIARFCAMHQPVPWTPPAPELGELQALVRRVEALEEMKRMEENRLDAGVSCEIVRASLVDHIVYLQSQIEAARRQIQEHIQAHPELKEQARLLCSIPGIGEVTAAVILAEIGDVSHFQSARQVAAFAGLVPRLRESGSSVRGKPRLSKVGSPRLRKCLYFPAMTALRWNPLIQALGQRLLAQGKPKMLILGAAMRKLLHLAYGVLKSGKPFDANFNAQTSTA

SEQ ID NO: 231013 - protein, 318 aa, unidentified
MDNETIDFEQVVAKGCGLDVHKETVVATVSGTGIKRETRTFSTFTRSLKELKEWILSLGITHVAMESTGIYWKPVFNILEGSGLTILIVNARHIKYVPGHKTDKKDSAWIAKLLLAGLLKGSFVPPVEIRQLRDMTRYRRKLEGAITAEKNRMIKMLEDSNMKLSSVLSKVHGVSGTRIVDALLEGKTDPVYLASLCHGKVKAEQEDIILALEGNLTEHHKFMIRIIRRDIRQTEALIKELDAEIEKQLLPYAKEISLLSQIPGVGEQTAGELISEIGVDMEVFATDKHISSWAGVSPGNNESAGKKKVDEPPTETSK

SEQ ID NO: 231014 - protein, 346 aa, unidentified
MGKARGDLRSITTVGLDLAKHVFQIHAVDADGKIVITTALRRRDVLSFFDALPSCVIGLEACGSAHHWARELIKLGHDARLMPPNYVKAYVRRQKNDAADAAAICEAVTRPSMRFVPVRSIDNQAVLMHHKVREILVSQRTQLLNALRGHLSEVGVIAAQGPRGAYALAEAILEGDSSIPLCARDALAPIIRQLQTLDDEIAAIDRAIMGLAKTDETARRLMSVPGIGPITASAIAASIRDVGAFSGPREFAAFLGLAPRQNSSGGKERLGRVSKMGNRYLRKLLVVGAHAVLFHRRSHQDGLRTWAAKLMETKPFRLVAVATANKLARIAFALMRDGSIYGQAVA

SEQ ID NO: 231015 - protein, 408 aa, unidentified
MRIVGLDIHRVSAEAVMLDEGKIIRLGRIGMTRDHLEAFARRLTHDDHVVVEATGNATAVVEVISPYVGRVVIANPRQVHLIARAKIKTDVIDATVLARLYASSFLPEVWIPDTATLSLRRQVARRNQIVRQRVRLKTITQSVLHTHLLPQCPHADLFGNRGRSWLTTQRLPRDERDAVERHLREYDRLGEDLRVVERELAQAALASENIKRLMTIPGVDMVVALGLAAAIGPIVRFKGPEQLVAYLGLNPSVYQSGDGPPQHGRITKQGRNHARSMLVEAAWQAVRGPGPLRGFYERVARRRGNHIAAVAVARKLAVIVWHMLTKGEDYASVRPALHAKKLRELELRSGQPERRGQRGTAYAYNLTRVRQEERRQAEQSEIAYRRLTEGWTKRRRRAPMDAAKEERR

SEQ ID NO: 231016 - protein, 400 aa, unidentified
MTTVRAGVIAGVDTHADTHHAALISDTGQHLADRSFPATPAGYQALAVFITSHGPLVRVGVEGTSSYGAGLTRVLLATDMPVVEVIRPARTNRRRGKSDPIDAYAAAAAALANDKLPTPKTSADQVDAIRAVLTVRRSAVKAATATMNQIHNLLITAPNQLREQYRTLSGAKLVAALAAQTADDHHHIRTALQRLAHRHQHLTAEVTAADTDLDHLTALANPALRSGYGIGPISAAQLLVTAGDNPDRITTDAKLAALCGISPIPASSGKTNRHRLNRGGDRQANSAFHHIALIRLQHDPRTKAWAEPRQTPHNSNNKHILRCLKRALCREIHHYLLNPHDIPDITDLRPLRHTLGLTLAHAAQQLNTTTATISRLERGQHRNDHLATTYRTWLHTHPTP

SEQ ID NO: 231017 - protein, 334 aa, unidentified
MAFDQHRERIAFDALDTATGEVHRGRIRPADRLGLRRWLSRWDGEEIEAALEATTGWRFMVEELRAVGAEVHLAEPAETSALRGPKKRAKTDGQDARRLRELLQAGRVPESWIPPQWVLELRSKVRLRHTLIQQRGEWQQRIQAQLYHHGVARGRQLLVGERRAWPEALELPDAARRQIRVALAMIDSVDHQLEPLDRALRALARRQPGCRALMAHYGIGEITSVAILAELGDARRFASSRHAVRYAGLDVTVSESDRKRAPGHLSRQGPPTLRWALYEAAQVARRPNSPDRDYYEQAAARLGGNRACLSVARKLLQRAFHTLSELGEEALQPA

SEQ ID NO: 231018 - protein, 363 aa, unidentified
MNEITTVGVDLAKEVIAVCAADGSGKTVFTRVFHRDAFAAWAVQLPACGFGMEACGAAHHWARWLTSHGHTPRLMAAEFVKPFRKSRAAKNDRNDAEAVLTAVRQPNMRFVAVKSVEQQACLSWHRMRQGFSEERTALINRLRGLLGEFGVWRGRSAEVFTRALPLLEHDEALPLMVRRLLTDTGPHLARLNEAIAACEMEIKSHIKTNVAAQRITAISGVGALTAAAVIATVTDARDFKNGRQFAAWQGLVPRQDSSGGKARLGHITKRGDTYLRGLLTQGARSALQAALTKEPLRRTRLQSWMVQLHARVGYHKTLVAIANKHARMIWAILAKGEAYDPDAWRRWTRSAPATPPAVCSIAA

SEQ ID NO: 231019 - protein, 316 aa, unidentified
MSEPVYVGIDVAKASFEVAVSGEAQTLTLGNDEAGHAELCQVLVPLAPRLVLLEATGGHERLLALALAAAGLRVSVINPRQARDFARCMGKLAKTDRIDAQVLRGFAALLDAQGHEPRALLDEQQRELTALVTRRRQLVAMLVAERQRLALAHPKAKASILAIMDAIAAQLHDVDGQLREHVQAHHADLAKLLTSVKGVGPTTATTLLAQLPELGHLNRKQITSLVGLAPMNRDSGTLRGQRHIFGGRADVRRVLYVAALVGTRFNPVLKAFYAKLLAAGKPKKVALVACMHKLLIILNAIARSKSPWSQEIAGIA

SEQ ID NO: 231020 - protein, 355 aa, unidentified
MKQEKYIGMDVHQATISVAVMDSNGKLIMECILETKADTILEFLHGLRGTVSVTFEEGTSAAWLHDLLKPHVAHLVVCDPRKNALLKDGSKSDRIDARKLAELLRGNQLHSVYHGEHGVRTLKELGRSYQTLTKDITRVMSRIKALYRSWAIPCSGTTVYAPRHRAEWLAKIPQPGVRLRAERLYQQLDLLQPVRQEARRDLLRESHQHHAVKLLRQIPSIGPIRAALLVALLQTPHRFRTKRQLWAYSGFAIETHDSGEYRYVRGKVQRNRERITVRGLNDNHNHDLKNLFKGAALSASTQPGPLHDFYGALLEKGMRPTMARLTLARKIAAITLIIWKKGVSFDAKQLHRQAA

SEQ ID NO: 231021 - protein, 437 aa, unidentified
MSQQLPLLDPLAAFVDVGSEHMHVSVGGNRPEVFGTVTSQLHALRDWLLAQGVRSVAMEATGVYWLPLYGVLESAGLEVRMVNGRQTRNLPGRKTDIADSQWGATLHMHGLLHAGFVPPADIRRLQDYLRLRADHLAAAATCVQLMQKAFERMNIKLHDVIASLAGVSGLAVTRAIVAGERSPEALVALCDVQIRRKKAQAVIEALRGTWADEHIFALAQALQSWDHYQKLIAGCDERIAAVLPPHDDTQPPLPRSTRQTGVNAPDIARLREILAQMCGGRDLTKLPALSSYGVLQLISEVGTDLSAWPTEKHFTAWTGLVPGSHDSGKRRKGVRRGRNRTGQLFCMMAQSLVRSRDIALGGFYRRLAARRGGLVATKALARKLAAWFWRVMVKGDDYVEKGLARYAEPVRKTREQALRRLARELGRELVPLPGVSD

SEQ ID NO: 231022 - protein, 317 aa, unidentified
MALPLLFVGIDVSKDWLDLWLPPLKRFERVSNDAAGWAAAIAQLRSLGSEAGLVVAFEATGGYERGLRHALLETGINVRRLNPLRVRLYAKSLGRHAKNDRIDARVIARYAAAADTAPEILDPAREQLAELVAHRRRLIDERVAIGNQTQTLRGARLQAQNRQRLALIERQIAETEGLIQEAIGETPRLAATIKRLKTLKGVKDVTAIALATLLPELGRLSRRAIAALVGLAPFDRDSGKSRGTRSIAGGRAAVRTALYMAARAAARSKSPLGDFYKRLIAAGKKPKVATVALMRKMLVTLNAMVRDDQTWKFAKPA

SEQ ID NO: 231023 - protein, 345 aa, unidentified
MNQRNITTIGIDTAKNVFHLHAVNKHGKEVYQRKLNRIRLLEFLANHPTCTIAIETCSGSYHWARAFKEIGHSVKIISARHVKKFANTRNKNDFNDARAIVKAALDPDIHEVAHKSIHQQEIQAVHTLRDGLIRQRTATINRLRALLTEFGVVLPLGREKLMKLLPQVLENTNNELTDMVRQLVSEQYEMIKKISQDINNYNRRIKSYAKTSEDAKRLQKIPGIGPIISTALAYMIADPKVYKNGRQCAASLGLTPKEHSTGGKQRLGSISREGNAYLRRILVQGAQSVLRRASKRQKEPLMKWVYQLKMKKCNNVAAVALANKITRIAWAMLVNQSEFAYKQVV

SEQ ID NO: 231024 - protein, 403 aa, unidentified
MNNVAGIDVSKGKSMVSVLRPFGEVVAKPFSIGHTGSELKELADYLKSLDGETRVVMEHTGRYYEPVARFLHEEGVFVSAVNPKLIKDYGNNTLRKVKTDKADARKIARYGLDNWAELRQHTPMDTIRMQLKTLNRQQSLYAKTKTMMKNNLIALLDQTYPGVNALFDSPVREDGSQKWVDFATAFWHVDCVRYMSLTAFAERYRKWCKRHGYNFSQSKAVEVHTGAQDLIAMLPKDALTKTMVRQAIDALNAVSASLERLKAEMQALAAQLPEYPVVMAMHGVGDSLGPQLMAELGDVARFTHRNAITAFAGVDPGADQSGTHEAKSTRVSKSGPPELRRALFLVMDCLLKTQPQDDPVYRFMDKKRAEGKPYLVYMTAGANKFLRIYYGRVKEYLASLEEN

SEQ ID NO: 231025 - protein, 405 aa, unidentified
MYVGVDWGSQHHSVCVLDQAGGKVAAFSVAHSAAGLGELIARLRRLGDPAERPVAIERPDGRLVDRLLEAGHPVVPIPAHALKAWRRAQSLAGAKSDPGDAALLADYLRCLQHRLRVLEPFSAHTRALRAVVRTRDDLVDQRVAAGNQLRACLEAFWPGAAVIFADVCSPIALAFLERYPTPEAAQRLGEQRLAAFLVKHGYCGRRPAAQLLGRLRAAPAGLIGSVEAEARRNAVWALIRVLSALNTAIKDLDRSVAAHLGEHPDAPVFTSLPRSGKLNAAQVLAEWGDCRQAYDGPEAVACLAGVVPVIRRSGKHTSVSFRWACNKRLRRALCIFADNSRHASPWAAKVYGDARARGLDHPHAIRVLARAWTRVIWRCWQDGVPYDPAKHRAAQRLTETADSAA

SEQ ID NO: 231026 - protein, 367 aa, unidentified
MKKVSTVAAKPSKKISQQNLTVGLDLGDRNSWYCVLDESGQIQLEQGVRTNAKALQEVFGAMPHSRIALEIGTHSPWISRLLSELGHAVIVANARKVRLIGESRKKDDRLDAQTLARLARIDPELLYPVKHRSVQAQADLMMIRARAGLVRARTGLVNTARGLAKSYGERLRGCNVRNMNPEKAESLSPELQAALEPLLNAIESLSERIVEYNERIENLAQASYPQVALLKQIKGVGTLIALTFLLTLEDPHRFRKSRDVGCYLGLQPGRRNSGQSEPQMHISKEGDPYLRTLLVQGAQHILGPFGVDCDLRRWGLKLAERGGKSGKKRAIIATARKLAVLLHHLWVSGEVYEPLHNSSRRTVAAVA

SEQ ID NO: 231027 - protein, 423 aa, unidentified
MMKLKYSICCGLDVHKNVIVATIVTTNKDGISEYKQKSFSTINSDIQRFHNWLIENNCYHVCMESTGKYWIPIFNYLENDIDVCLTHPKYVKAIKGKKTDKKDSKWIADLYKFDLVRCSFIPPKDFRQLRELSRYRFKLVCMKSSEKNRIQNCMTVSNVGIASVLSDPFGKTATEIISYLLEHTADSMDEKAVRKFIKKGAKSKSDEIIEAIKGYTIETDQAKKLELARGHLEYLDDMITQTEVELYVRIKPYYEFVEFVSTMPGMTELSSTIVLTETGVDMDIFDDAKHLCSWCGLSPANNESAGKKKSVRIAKAGDYLKPMMVQCALAAIKSKKQPYFAIKYGRIKKRRGHKKAIIAIARMMMVCIYHMVSEKKPFTPTDYEELMNPQNHVERVVLNENNVFAYLESLGYDSSKLVKRNDN

SEQ ID NO: 231028 - protein, 323 aa, unidentified
MSNKATTKRRSFIGIDVSKKLLEVGVHQSDYHLRCPNDPKNFPALISELISLRPARIVLEATGGLERALLQALHAVGLPVVVVNPRQVRDFAKALGLLAKTDRLDARVLAHFAAAIQPSIRAVKTQQESELDALMGRRTQLSDMLAQEKNRRGSAATKATRDDIAEHIEWLEDRIKELDEKLKEQLACSAVWQQKDKILQSVKGIGFVTSMSLLADCPELGQLNRHQIAKLVGVAPLNRDSGQQRGSRHIYGGRAQLRCKLYMATMAAIRFNPVIKSFNERLIAKHKPKKVAIVACMRKLLTIINVMIRENKLWNVEAHQLSA

SEQ ID NO: 231029 - protein, 422 aa, unidentified
MVLKGVPMALKIVYQICCGIDVHKTFVVACIASTNKQGVTTYKRHRFSTFTQGLKELLQWLLDNHCKDVCMESTGKYWIPIYNVLEKDCNIVLAHPKYVKAIRGKKTDKKDAKWIADLFKHDLVAGSFMPPADIRQLRDLMRYRFKLTCFMSSEKNRLQNCLTVSNIQLASVVSDTFGKSSQRILDKILENPDDTSFDIEPLIHGSMKKKLPELELAIDGFITPEQAGKLKVIKKHFEDLESRKAELEKLILALASPYQQELDLILTAPSFKNKFTAIGIISEIGVNMEAFPSAKHLCSWAGLTPTNNESAGKKKSVRVSKAGCYIKPLLVQCANSVVKSEKHPEIRNRYLRLRKRRGHKKAIIAIARMLLTALYYMLKNGENYNAELYRKSDLPPVDREITVEQAILIARNQGYKIKSATA

SEQ ID NO: 231030 - protein, 418 aa, unidentified
MKVVYPICCGVDVHKTFLVATLITTQGIVPHYSKKRFSTFNNSILQFKHWLIDNNCFDICMESTGKYWVPVYNLLEDTIHITVANPKWVKAVKGNKDDKKDSKWIGDLFRLGLVPGSYIPSKPIRILREYTRYRYKLVCCKSSEKNRFQNAFTVCNVALDAVVSDMFGKSASSITDYLISSDSFDPVHCSSLLHKSLKKKADTVIESIEGYQMTQEQKERIGMVRSHLEFVQQSIAKLDEKLDKMVAPYESAISLLCTIPGVDRESAITIISEIGTDMSQFANSKRLCCWAGLTPGNNESAGKKKSVRITRAGVYLKPALVQVAHAAVKSDKAPYYKIKYERLYKRRGKKRAIIAIARMILTAIYNMFVTGEMWNPSDLYKIDMPQEMLEKQKEKAIKQAVKLLVSNGVIKATDISVA

SEQ ID NO: 231031 - protein, 370 aa, unidentified
MEQPTPLFVGLDVHKDSIAVAHAAGGTGDPPIFVGSIGTRQADIDKLIRRLQAKARALVFAYEAGPCGYGLYRYLTGKGLDCRVVAPSLIPKRPGDKVKTDRRDAVELARLLRSGDLTAVYVPSVEDEAIRDLCRARDAARVCLKAAKQRLKSFLLRQGLHYVGRADWNEAHRRYLSKVVCPTAAQQIVFQESLHAVDEQVERLARLERELLEAAPSWRLYPVVQALQALRGVQSIVALTVVAEIGDLTRFTNPRQLAAFVGLIPSEHSSGDKRRQGGITKTGNGRARRALTEAAWAYRYNAKISPIIQKRLEGLPPNLRAIGWKAQVRLCKRYRRLLARGKHANVVITAVARELIAFMWALAKEVPLSA

SEQ ID NO: 231032 - protein, 376 aa, unidentified
MIKQSLGIDVSASSLACCISSIDLQQQVQVLATRTFANSQSGFKSLIHWIKKHHKQTPVPLVCLLEATGVYYENCALALTTAGLYVSVILPNKSKKYMESLGLKSKNDKIDARGLARMGAEQSLPRWQPLSKYFFTLRTMTRQLESLQKTKTSVSNQLHAAENSIYKVGMVTRQLKSLIRTLEKQIKALEAAIADHLRSEAQMTEKVAHLCSIKGVGMTTAAVILGETNGFALIENVSQLVSYSGYDVVEDQSGKRVGKTKISKKGNSRIRRPLYFPAITAVGCGVKPLYDLFHRTHGKHHIKMKSYVAVQKKLLILIYTLWKKNEPYKEPDPESECLERTQVTQTVNGQKRKFPTNGREPQGKPPHEMAVSSQME

SEQ ID NO: 231033 - protein, 344 aa, unidentified
MQITRVGVDLAKNVFQVHGVDRSGRCVWKRQLKRSNWLGALFKKVEPGAEIGMEACGGAHHWARVLRDRGYRVKLIAPQFVKPYVKSSKNDATDAEAICEAMSRPGMRFVTIKTLEQQDIQALHRVRSSVIEQRTAQANQIRGLVAEYGLVAPRQLASLRRAIPVWLEDAENGLTDRFRHLLSDLWGELLRLDERIKDLDRQVARVADASEDAKRLKTLRSVGPLVATALVAHFGDGRQFKRGRQAAASIGITPRHRGTGGKNRIYGITKRGDPYLRSILIHGARSVVSQAHKKDDPLSRWLTELAEKTHPNVAAVALANKTVRIAWAMLRNGTDYDPKLAAAA

SEQ ID NO: 231034 - protein, 394 aa, unidentified
MRFVGIDVAAEQHVVAVVDETGAVGLKPTPFTEDAAGYQQLFDHLGAPGDTLVAMEATGHYWKTLFAALVARGFAVALLNPLRTHRFAGEDLRRTQTDAIDALGIARFAAQKRPPATRLPDRAAEELRELVRFRDRLVQDFGDRVRQLHRLVDLGFPEFTRYVRDLSSELATAILRDYPTAAAFTGVSPRRLASLRYDGRHKVGDELAQALLQAAAHSVGRHHGEAYRIQVRYLCEDLDILRRRLRDLEGDIERLLHDHEVGSLLTTIEGIGPQTAARLVATFGDFSGFRSGAAVAAYVGAIPALRQSGKRTPIRAPLTPIGDAQLRAKLWMPVLTAVRKNPWLRAYDEALIARGKLPKVALMAAMRKLLHAAYSVATHRRPFVPCPAGEGARP

SEQ ID NO: 231035 - protein, 370 aa, unidentified
MGVAGIDPHKRTFTAAVLDERGGLHGVASFDTSEQGLAVALAWLGEVGFDLDRVGVEGSAWLGHQVAASLAAAGYDVREVQASRTAERRRRRRRAKTDAEDAQAIARETLAHPDLPPAGKQHAPDPDWEELVALRNQRRSLIAQRRRLLNEAESVLVGLPLVVRAVLPDTSQVRPRLRALAQGAADQLELTGADRVHLAWLAASAADIGRLDQRIGQLDQRIPAVLARHCCTLTEEVGIAAVGAMELLVEVGDPTRFTTEARFARWCGAAPAAVSSGEGDGEPERHRLDLGGNRRVNSVLHTMHITQARCHQPAKDYLGGKRAEHKTAREARRAHKRLLANVIIRRMWADHQRRRSPTLNLSNPTTPNAA

SEQ ID NO: 231036 - protein, 356 aa, unidentified
MASRTVNVTQKQEDASMESRESFWVGFDVGKNSFSAALDCHGKNIRAKITSLPCRDFKRTPEGVEQFFLWAKKTIPGHDIRIVMETTGCYSQHLTDWINQLHPEISVTIENARNIHAFIQSLNLPHKTDKLDAQAIARFGTERHPKPTNRPSKTILSIRELSRERTALIKARVNLENRRDTLTSPVVRKINAQTLATLTTQIEKIDREIKACVVQDEELLSEVHIMTTMPGVSFISAYSILAEIGSLKQYSAKELSALSGLAPRIIESGSSVHSSYLSRRSSGRLRQILYLDSVPGVPKIPVLQEFHQRLIGKGKKKMTARCACMRKMFLILRSMVVHNTPFNGKFPNNQRKGLDF

SEQ ID NO: 231037 - protein, 371 aa, unidentified
MSELPAETRPARLRVGASPRPPGARKPETELGAVSTTAVPHPDSRSGPSPHLQGRVMDEQRTVFVGIDVSKDRLDVHLRPSGEAFCVPREGKGMDDLVIRLQGLSVALVVLEATGGFEATVAAALAGVGLPLCVVNPRQIRDFARAMGRLAKTDTLDAEVIALFAERVRPQARPLREPERVHLAELVGRRRQIIEMIGMETNRGRQAIDKPLARRLARHVAYLQKELDAIDHDIGDAIKHSPAWREAEALLKSVPCIGDVTARTLLAELPELGTVSRHQVAALVGVAPINRDSGLMRGRRAIAGGRTSVRAVLYMAALTAIRRRSPFRAFYDQLTAHGRPKKVALVAVMRKLLTILNAILRDHTPWRPLNA

SEQ ID NO: 231038 - protein, 361 aa, unidentified
MKKPTQHLIAEVPRSSSKVGMTIGIDLGDVWSHYCTLNEDGEVVGRGRFRTSPSGVEKWFTDLPPVRIAMEAGTHSIWISEQLQELGHEVIVANVRELRAISHSDRKSDQVDAEKLARYARLDPKILRPIAHRTVAQQEALTLIRARNLIVRLRTAAVNAVRGLAKPCGYRLPASSTLCFAKRCMAVLPPGLAQALGPVLEQIAEMTKKIKHYDRLIKRLTETEYPETQALIQVYGVGQLTALTYVLTLGSKERFQRSRDVGCYLGLRPKRSQSGDRDPQLGITKAGNIYLRTLLVECANHVLGPHGRDSTLRQWGLHLASRGGKQSRNRAIVAVARKLAVLLHRIWITQEPYIPFYGVAA

SEQ ID NO: 231039 - protein, 377 aa, unidentified
MHSENIAAYVGLDVHKETLAVAIAAPERLGEVRYYGTINNEAQAVRRLFQKLQGLYGNILSCYEAGPCGFGLYHQLTAMNIKCQVIAPSRIPKSPTDRIKNDHRDAISLARLLRAGELTPVWIPDLTHEAMRDLIRARAAAKRDSRVARQRILSMLLRTDKHYAGKHWTGKHRTWLANQSFSQPSQQIAFQHYCQSLEQIEDRILQLDQEISRLLPEWSLGNLVCQLQALKGVGQLIAITLVAELGDFSRFSNPKQLMAFLGLVPGEYSSGNSIRPRGVTKVGNSELRRLLYEAAWSYRTPAKVGAWLIYYRPDSVTQYSKDIAWKAQQRLCSRYRSLTAKGKKSQVAITAVARELTGFMWDIALAAQSSFSQQKQN

SEQ ID NO: 231040 - protein, 443 aa, unidentified
MKELPVLDSRAAFCDVGSEHMHVSIAGGQPKIFGTFTSQLHELRDWLLGEAVHSIAMEATGVYWLPLYGVLEAAGLEVVMVNGRQTRNLPGRKTDMKDCQWGATLHAHGLLKAGFVPPAHIRKLQDYQRLRTDHISSAASNVQHMQKALERMNIKLHNVISSLMGVSGIAIVHAILDGERDPAKLLELCHSTIRHKKAKEVIEALRGTWEPEHLFALRQALQSWEHYQRQIAECDQQIESLLQEITFNETQGGGIGEKPKAKDSKRPSANAPQISGLHSMLIELCQGKDLSILPAHTDYSVLQIISEVGTDLSKWPTEKHFTAWLGLAPGTSQSGKRKSNVKRSRSKVGRYFCIMARSLARSKDMALGGFYRRLAARRGGLIANIALARKLAALFWRVMVKGTEFVEEGLAAYEAKCLEGKKRSLRRLARELGQTVSPIPVTV

SEQ ID NO: 231041 - protein, 337 aa, unidentified
MKQIKFFIGTDVSKGWLDMCIVLEGEVLSNERIENKQAAIRKWLKGTQKQFGYVMNSTLFAMEFTGIYNHHLLEVLHEAGANIWLVSGIEINASRGLERSKNDRQDAKLIAEYACKNLKKVRLFKKPRTAVKKLSALLMMREKLITSKHGYSVTGKEYKGFSIKEEYLIIKEYSAAMLRTIDKELKKIEDQIKDLIKGDERLLELNEYISSVDGVGLITSANTIVETNEFLDINEAKKFSNHSGVVPHSEDSGKKIKKQRVSHKACKKMKKLLHLAAMSEIRKKGELKDYYERKIAEGKNKMSVLNAIRNKLVLRIFACVNNKRKYEKNYVYSLAKP

SEQ ID NO: 231042 - protein, 284 aa, unidentified
MKEKVRFLGLDVHAETITVAVAEPDGEVRSLGTIANREESIRKLIRKLGSAEQLRACYEAGPTAMCSIAADAVRSRVRGRRSNTSSNQGWRQGETDRRDALKLARSHRSGDLTAVWVPDPDSEALRDVVRAREAAKRDQLRARHRLSKFLLRMGGVRQAGLKAWTEPYMAWVRQVRFERPAQQATLLDYLHEVDHMAARVKRLEQAITEVVKLASHEVQEVVKGLQALRGIAEISAVTIVAELGQIARFDTPRQLMGYSGAVPSEDSSGNEGDKAASPRPATHI

SEQ ID NO: 231043 - protein, 331 aa, unidentified
MTPTFFIGFDISKLTLDVAVLKDGTLLQTRKIDNSESAIKQLLIALKSTHHCAPDNTIYCAEHMGLYRKFLTDVLTLKQARLCLESPLRIRLSLGIQRGKSDVLDAIRIAEYALKNVDSLKFWTPPRAPVEKLKTLMHLRKKLTKMSAMLKNTKKIEAYYLSESSRKDIGGYTHSTFRAIKADIHVIEREMTDIINLDAQLHNLIQVMTSVPYIGKIIATEIIILTNEFRDISCPKKFSSYCGIAPFARTSGTSVNKKPKISHIANKDMKKILHLAALGATRRGQTLFKSYYERKVKEGKNKMSILNAIRNKLVRVVFACVRDNKLYEEQA

SEQ ID NO: 231044 - protein, 337 aa, unidentified
MRKHSKKPAEKVSGYVGIDLGDKKSRVCTLGEQGEVVAQEWVTTTPEAFFKRFSGPTNMRIAMEVGTHSRWASEVLKRCGQEVLVADARQLALITNSNAKSDKRDARMLAQLVRADPRLLSPIEHRGEELQRDLTLIHQRDNLVETRTRLISSVRGVVKASGARLPECPTGNFPQQVAGAIPEPLRAALAPTLEVIDQINEQIYACDGTLEYWAQTRYTESARLRQVNGVGTLTALAFLLTVGDKERFSRSRDIGSFLGLRPRLEQSGDSQPQLRITKAGDGYLRKTLVQCAQHIVGPFGQDSDLRRWGLKVVAAGNGSKRAKQRAVDQERRRTADL

SEQ ID NO: 231045 - protein, 391 aa, unidentified
MKKNSIARLQVETKGRKKQDRVVASKQRLTVGLDLGDRTSRYCILDEAGEKVSEDKLPTTKAGLESLFGKMAACRIALEVGTHSPWVSRHLAAMGHEVLVANPHKVKLITSSVKKNDRVDAEQLARLARVDPKLLSPIRHRGEEAQADLAAIRVRAELVDTRTALINCARGMAKPMGERLRACDADQVKEGLADGLGEGLQRVIRPLLQCVEEISKQIGVYDEQIEEIGKRYPEHKLLTQVWGVGTLIALTYELTIEDPQRFKHSRDVGPYIGLTRKQRDSGDSEPELGISKHGDELLRRYLVQSAQCILRQGAPDCDLKVWGMQLQNGGRPANRKNQKGSKRAKKKAVVAVARKLAVLLHRLWVTAEVYDPHYNRKAVAAAAAKRKGKAA

SEQ ID NO: 231046 - protein, 354 aa, unidentified
MSDIKYVAFDVHQATISAAVLNLDGKLLTQAVMQTDAIAIRDFLRGLSGQVHLTFEEGTQAQWLFDLTRPLVAELIVCNPRLNHCKKRDNKSDRLDAFNLVTDLRAGLLKAVYHGAPQTEALKQLVHNYETLTQDTTRCMNRLKAVFRSQAVKCGGRDVYYSRNRRAWLAKLDEEGLRLRAEFIYNQLDHLRQLRREARKALLKEARQQAAFKRLCAVPGLGPIRVAQFISVIGSPFRFRTKRQLWTYCGFAVVTRSSADYKVVGNKLERRPKSSRTRGLNPNHSRRLKLVFKSAAIEALKEEAFKKMYERLQGSGMRAEMARLTIARKLSAVALAIWKSGEGYDETKLSKLAA

SEQ ID NO: 231047 - protein, 350 aa, unidentified
MRTSQKTPDTIATIGIDIGKNVFHLVGLDKGGAIVVRQKLSRGQLARRLANIPRCLIGMEACSGAHHIGRELVALGHAARLIPAQYVKPFLKGHKNDYRDAEAIAEAVQRPTMHFVTIKTPDQMDLLALHRVRSRLVSQRTGVINQIRGFLIERGITVRQGPMPLRKALADILSCGAVSPRIVCLISDLAEDWRRLDDRIATVSAEIEALAGQDESCRRLMSVPGVGPIISSAVVAAIGNGAGFKQGRDFGAWLGLVPKQESTGDRTILGKISKRGNKYLRTLFVQAAHVVLARRPSAAMRGLWPWIEQASKRLHRNMLAIALANKLARIAWAVLARGRDYQPTITANAA

SEQ ID NO: 231048 - protein, 392 aa, unidentified
MIYVGIDVAKAKHACCILDAKGNVLRGTFVFANNLEGLSQLKAAILAAAESQDDQQVKAGLEATGHYSENLLDFLRLSGYDPVIFNPLQVKRFRQSLSLRKTKTDQIDAKCIAQLLMSDTSSPARPSYQNQELKSLTRHRSRLVAQRSKAKVQYGRLIDLLFPELSSVCWSISQVSMLALLKALPGARKIALCRVDRLTTILIQHSAGKYRREKALQIKELARQSIGRQSEALSFELQQVIDQIEFFNRQIKALDQQLKQMVTDLNTPLTTIPGIGYRLAAIILAEIDDIARFASPDQLLAYAGLDPSTYESGSFNADRTPMSKRGSTYLRWALMQAARLAARRCPELNLYMEKKLAQGKHYFVALGHVTKKLVRLIFCLLKKNEPYVPQIA

SEQ ID NO: 231049 - protein, 331 aa, unidentified
MNYSHFVGLDVGKKTFDASLMSADEKELSHKSFDNTPTGIQSLLDWIAGYHLSLSKLLFCAENMGSYVTELSVSSVSMGFSLALVCPLTIKKSIGLQRGKNDRIDAKRIANYAVLHYRKLELYKLPDKDLVRLRGWIIIRDNLVKQKVSSIKLLETFSWMAKLADVTESISFLEEQLKSIKEKILEVEEDMEQLIAASTSLYTNYLLLRSIKGIGIINAIVLLCVTDNFQRFDNPRKFACYCGVAPFEHTSGISIRGKTQTSSLANKEVKVYLTRAAITAISWDPQMKAYYKRKIAEGKHKASVINAVRAKIIARSFAVIRRQTPFVTLVV

SEQ ID NO: 231050 - protein, 419 aa, unidentified
MVHVHGAQAQQLAQATRGVDPAELVAVPVDVGKHTAMALVCDFTGELLARPFEFPMTLAGVRLLVERVQAATRGRMIGLVRVGVEAAGHYHQPLVSAGVLPEEWQLVQVNPTQVASQRQLTGRRRLKTDALDLVAISDLLRAGHGAGHRVLASALGELAGWVAHRERRVTARTALKNQLLGQVDRAFPGVSGCVSSLFGTKVGRLVLAEFTDPARLSALGVAGFLQAAAARGVQVLAPVAERLVAAATVAIPTDQAPMARTIIDRDLTLLAAFDAQIAEADKHLAALLPRTPFAVLCSGPGWRVVRAATYGAAVGDPARWPSARHVYRASGLCPATYASAGRRHDGAISREGSVTLRRAVLSLGVGLWRLDPAARAYAVSLRARGKPPGVIATAMANRANRIAFAMVRDQRPYDPNRWR

SEQ ID NO: 231051 - protein, 393 aa, unidentified
MNKIIYIGMDVHSSNYTLCSFEPGYGICDDKVFGQVQFKDDFIKNTEKYILNLKKQRKDADVVCGYEAGCLGYAPQRELTEKGIKCIILAPSTMAVLKGGKKVKNDYRDSIDIARCLASGAYKPVYIPDTEDEDVRDYIRMRDDHNTALKHIKQQLNAFCLRHGFMFDGKSKWTQKHLKWIKDLCCTKMQREIINEYLASFESLNNKIAALDVRIEEIAKQDRYDKTVKKLTCIKGIKTHTALSFTTEVGDFNRFESAQRFAAFIGLTPGEQSSGDSERKTKITKSGNRHLRRLAVECAGTYRRGNVGQKSIELKKRQKDMPSDVINYADKASARCQRKYYRLTNKGKESNKAVTAVAREICCFIWGMATSSYENNNGCTTNDLCSVDESALD

SEQ ID NO: 231052 - protein, 349 aa, unidentified
MKILALDLGKYKTVACDYEAESGRHRFHTTLTTPAALAQLVKQLQPGRVVIEICNIAGWVCDLLRRMGVAVQVANTSDDAWRWRKVKKKNDRCDALKVAQLSAVHQLREVHIPIMEVRQWRALIAFRQQLVQRRGKIKNHIRDLLLSEGQMLPRGAKCWTLLGRAHLEALARPLEEVGMNELWRGQLAIELRQLQAIQQEIEAAEEKLDALARTDPRLSLLRTIPGVGPRLSEAIVALLDRPQRFRKASEVSAYIGMVPKELDSGETVRRGRITKQGSRLVRSLLVEVAWAGLRYNPWVRQTYQRISGGKKSRKKIAIVAVGRRLLVRCWAMLRDGTRWRPPAIQAAGP

SEQ ID NO: 231053 - protein, 380 aa, unidentified
MKTDTHIAPQEPVYCGIDLHSNNLVLVVMDQQGHRLAQARVGCELDKVLGFLGSWKSRLKRVAVESTYNWYWLVDGLDDHGYPIDVVNPAQFSPYQGLKHSDDLSDACFIAEMLRLGVLPVGYKYSREDRPVRDLLRRRSLLVRQRTSQYLSLKSLHSRNYGKSVRLSELKKWDSQKADGIFPNKADQLLVTQQLLLVQQLSQGIRAIEKEVLRVAKLRPEFIRLQTVPGVGVILGMTLLMEIGQIQRFSSPEKLASYARCVPAPRVSNGKSKGQNNRKWGNRYLGWALVEAAHCAIRGDGPAQRYYQRKVAQTNPSVATKALACKLCKAVWHVWNDQTEYDPVRVFGPQPQSTSGRAAGSQERVCPNGTDLIGSCSPSP

SEQ ID NO: 231054 - protein, 319 aa, unidentified
MRVGIDVAKAELVVGVRPSGERWTVANDERGVRTLVERWRSEAPELIVLEATGGYELLCVAALVAAGLPVVVANPRQVRDFAKATGQLAKTDRIDADILALFAERVQPAVRPLPDAEAQELEALLARRRQLLEMLGAERNRLGQVFGRGQRQVKKSLKGHIAFLERELRITDTDLGDMVRKSPAWRDRDDLLQSVPGVGPVLSLTLLADLPELGRLSRRAIAKLVGVAPLSRDSGTLHGRRFVQGGRASVRSVLYMGTLVATKRNSIVRTFYQRLLAAGKPKKLALVACMRKLLTILNTMVRTQQRWSADHQSGAPITA

SEQ ID NO: 231055 - protein, 380 aa, unidentified
MASMHDSARFKTTVYAAIELSKKSWVVAIARPDRDQPSIHRIAGGNLADLIGRLRKAAGEKQRIVVCYEAGYDGFWLARSLAKIGIDCRVLDPASIQVNRRARRVKTDRIDSLALLRALIAIDRGERHVCAVVRVPTVEEEDARRSHRERQRLVRERTGHINRIKGLLFAQGIRGIEPKRRRTRIDFGKLTTAEGRPLAERLRRELEREYQRLELVQSQLRIVEKERDTADAQDPAVERKRELLCALQGVGGASAAILAREVFARPFASRRQLGSYLGLTPSAYDSGSTTRCQGISKAGNSWARRVLIEVAWLWRKYQPGSPLSHWYARKTADQSPRIRRIMLIALARKLAISLWRYVETGLVPDGAVMAKTTPHTAAAT

SEQ ID NO: 231056 - protein, 427 aa, unidentified
MAYRVAAVDVHKKMVAVVVADVACEGEYQFERRQFGTTPDQLHLLAQWLDQQEVEEVVMESTAQYWKPVWGVLERYWKPARQKRDGATKMSGTLHLCQAKSNRGPRGRKNDFADGERMIKRLVAQELVLSFVPDPEQRLWRTVTRRKHQLTRDKVRLRNQLESLLEQAHIKLSSFVSDLLGLSARRMLTALAEGETDPAVLAALADCRLRATPEQLRDALGACTQLNGIYRRLLKMALEELKLMEEQMEQLDREASNLLQEYQDAVQRVAEVPGFGADSAVQMIAEVGPSAAAFESEKALASWVGVCPGSEQSAGESKSTRSPKGNRTMRRLLNQAAQSAVKVKGSIFDITFRKLLPRLGYKQAIWAIAHRLCRLLWLILRKGARYEERGPAVSAKSRRTRTARMIKELQKLGYRVEGAPLAAGTLA

SEQ ID NO: 231057 - protein, 427 aa, unidentified
MLSETERLNAFRQMRSSIRNSGQYLIVGIDIAKEKHHAFFGTAAGKTMCKQLIFSNDISGFELLVARAEQLKLQHQLIQVVFGMEPTANYHKPLAEYLIQRDAMVVQVSGTAVTRNRELLDNRWDKHDRKDAANVADLVGAGKCQFYDNPPQAIYDLRELLSLRRRYRKLESGLRTRIRNNLLALYFPELDRRFSTYQQDCLTIISTCFSPVVIAAMPFEEFCWRIVTRKKGNRQIAFLEDIWNTAHHSIGRPVDESVQYMAERMVAQLGQIRADIADLDQQIFKIASSLPYYQYLISIPGFGPFITAKFLATINDPGRFSNEAQVIKLAGFDLCASRSGKPAGKAVPVISKKGNAELRFALVQAAIVATTRNTLFIKYLSQKLQGREQEKGILKKMRTKVASKLLVIAWTLMKHNEYFNAEHLKLT

SEQ ID NO: 231058 - protein, 416 aa, unidentified
MEREFSFYVGVDWATEQQQACVLDRHGQVLAQRKIEHSGKGIIDFLAWMEELTQSQVHQIAAAIEVPRGPLVEAFLEHPWTVFAINPKQLDRFRDRHTVAGAKDDSRDAFVLADSLRTDQHCFRRVAPDHPVVVRIRELSRTEDSVGTDLRRTVNQLYQLLLRYFPQMLRICATPDEPWLWALLELAPTPQRAWKLSLTRIRNLLAKHHIRRWSAEEIAEILAAPPLPLAPGTVEAVSEHALLLIPQLRLLSTMRKQVADRMELLMDEMTASQSEEANAFRDVALLRSIPGIGRIVTGALLAEAAGPLAQRNYYAIRAHGGIAPVTRQSGKTKQIGMRYRCNVRLRNALYHWARISIQHDCRSKQHYARLRAAGHSHGRALRGVADRLLTVLVAMLKTGQPYDPKRRPATADAPAH

SEQ ID NO: 231059 - protein, 351 aa, unidentified
MIVIGIDPHKRTHTAAAVEQVTGELVDELTRPAREQGHGELVAWACSLADERLWALEDCRHVSGQLERFLLARGERVVRVPPKLMAGMRRSARSRGKSDAIDALAVARAALREPSLPAAQLEGRSREIRLLCDHRDDLVGERTRIQQRLRWHLHELCPELELPAGALDRQVWLQRVARRLARLEQTTQVRIGRELVRRISELSRRANELERELEALVRSEAPSLLELIGCGTLTAAKLVGETAGASRFASDARLAMHAGVAPLDASSGDQRRHRLNRSGNRQLNCALHRLAVNQGRWHPGAAAYLERKQAEGKSRREALRCLKRHLARVVYKLLVDVNQPTAAPPAAFALT

SEQ ID NO: 231060 - protein, 347 aa, unidentified
MAGIDLHSNNLFCGIVDAEGKRVFEKKLPCLLPSVFKALKPFAKRLETIAVESTYNWYWLVDGLQDQGYHTVLANPAGMEQYNGLKHSDDKSDAFFIAEMLRLTIQPTGYICDRELRPVRDLLRRRMGLVQKRTSLMLSLKSLHTRMKGQDLPLNQLKVLEPSQAGQLFEHPCDQLITRLDLELIKKLNEGIAEIEMTILKTIKSSPRYQVLQSIPGIGLILGLTITLETVDPKRFASAGDYASYCRCVDARRESNSKKKGENNRKCGNKYLAWAFVEAANFARRYDTQCRKFFDRKTAQTNQIVATKALACKLAKAAWHMMSQNTKYDPARIFPGTQKETLTKEQT

SEQ ID NO: 231061 - protein, 349 aa, unidentified
MKNISMIGVDLAKNVFQVHGVDAAGKVLVRRQLRRRQMEKFLAALPVGVVVGMEACGGAHHWGRLVQKLGHQARLMPAGYVKPYVKRNKNDGRDAEGVCEAMGRPTMRFVPVKSVESQAMQVLHRTRRLLVRQRTMAANALRSALSEFGIIAAQGLKGLRSLMEELEGEASGIPDMARMALLVLARQWEALNAEIDKLETQIVGAAKTDVVARRLMTIPGLGPLGATAILAAVSDARVFKSGRDFAAWLGLTPRQFGSGGKQRSGGISKQGDRTLRTLLTLGATAHLKCERGRGPRDPWLRALLARRPFKVAAVAYAAKMARIIWAMLVSGEPYRAFGQRRKAVVQAAA

SEQ ID NO: 231062 - protein, 333 aa, unidentified
MDQIIIGVDTHKSSHIAVAINTQGARLGTMTIPTTRQGYRSLEAWATGFGPVKAFGIEGTGSYGAGLSRDLRTKGHTVLDVIRPNRQLRYLHGKSDILDAESAAKSVLNGQATALAKTQSGASEMIRHIKIARDSAVKSKSQAMITLKTLIINAPAELRASLDQIRGPITLVRHISALRPGEITSPTASAKAALRALAQRWLALHEEIQIHEAELERLVADKAPKLMKSHGISTLTLAEMLILVGDNPERIRSEAALAKLCGICPIPASSGKTTRMRLNRGGNRQANAAIYRVAIVRMRDDDRTKAYAARRTAEGKTRREIVRCINRYIVREV

SEQ ID NO: 231063 - protein, 338 aa, unidentified
MKTFVGVDYHKKFSYGTIMTETGQIIKQGRFANHPNSVAGFLGEYGGSACSAVLEATRNWTVMHDWLEELVDQVTLAHPLKVRAIAEAKVKTDKIDATTLAHLLRCDLIPAAHVRSPQARILTNLLRHRMFLVRLQTMTKNRIHVVLDRHPLIRSERSAGELFTKVGICWLKQLKLPKYDRYILDSEVALLEHLQEQIKQADRWLAGVGRKDERVKRLMSIPGIGRAFALLIVCEIDDVRRFASDKKLHAYAGLVPSTHSSGGRTFHGRIIRGGNKYLRWAMVEAVWPAIQKDVGLNTYYHRIARRKGANPAKVATARRLLTIVYKVLKEQREYRYGG

SEQ ID NO: 231064 - protein, 366 aa, unidentified
MIAAVVECCAGIDVGKKVIVVCVLKGPANGDAQAQIRKFETINLALAQMRQWLMECGCTHVVMESTGEYWRPVFNILEEANTLQIVLANSQQVKGLRGHKTDPEDAHWLAHLLRHGMIRPSYIPPPPIRQLRDLTRRRRQLIGTGAQERNRIQKVLETANIKLGNVLSDVFGLSGQLMLEALLGGQSDLQKVAELAQRQAKKKIPQIRAALEGHRLSAVQGKLINLSLDHMALLEEQIAVLDQEIDQHLRTAELQPPHQLLQTIPGIKQEAASSVLAELGPDMKVFGSGAKCSAWAGVAPGNNESAGRRKRAPALRGNPYIRSTLVECAWSASRKKDSAFEHQYERLKPRLGHKRAIVAVAHLYCW

SEQ ID NO: 231065 - protein, 383 aa, unidentified
MLHLDPTDAPARSEYATVYLVFELSKAKWKLGVMLPDAQKMSRFTIAGGDVTALATRLTAVRSKACQAGRPVRILACYEAGLDGHWLQRWLTAQGVICYVVDPASIEVNRRARRVKTDRIDLDKLMRMFLAYLRGEPRVCSMLHVPSVEDEDRKRRTRERERLVKERTAHTNRIKALLFGQGIRDVMPLKPGFIASLEQMRSGDGRRLPPHLKEEIVREHERLCLVAKQLAGVEAKSQAELRVPARGSAAAKIAQLVDLKSIGVTSAQQLVNEVFYRSFDNRRQVGSYFGLTGTPYDSGASRREQGISKAGNHRARKLAVELGWLWLRHQPGSDLSHWFRERVGDVKGRIRRIAIIAMVRKLMVALWRYLEIGVVPTGAVLRG

SEQ ID NO: 231066 - protein, 351 aa, unidentified
MKLEPTAQPKLYIGIDIHKRSWKVHCATDLFGGKSFAMPPKPEVLYEYVAKHFPDHQVTTAYEAGCCGYYAHRSFEAYGWHSLVVNPADIHRKGKELFTKTDKIDAQLISRELKDGRLESIHVPDVEREQLRSLFRRRNDLVKDYRRTKSFIKMQLLYFGIAIPEEFDNDHWSHKFRGWVDEVTFKYPSARETLDSRMRSFRFIDQELRDVSTKMRAYCRKHYKKDYYLLKSIPGIGGIVACGIICELGDLRRFNNIKHLAGYVGLAPGIHQSGDNQKSTGITVRAHRLMRSYFIEASWQAIRTDPIMQNYYRKHLGKNVKSIIIKVARKLLSRTLAVIKTETPYEIGVIE

SEQ ID NO: 231067 - protein, 344 aa, unidentified
MSEVTTIGLDIAKNVFHAHGADERGRVVFSKRISRGKLLDFFAAQPSCTVALEACGGAHHWARQLIHLGHEVRLIPPAYVKPFVKRHKNDAVDAEAICEAAQRPSMRFVAVKGEEQQAAGLVFRTRDLLVKQRTQLINAIRGHLSEYGWVAPKGPSHVAMLADLLEEEEMANTLPDAARSMLRVMLDLLGQLDERIKDLDKEIARRAREDAVSRRLMTIPGIGPIGATAIAALAPPAETFAKGRDFAAWLGLTPLQKSTGGKQKLGATSKMGERTLRRLLIIGCSAVVLQASKRGAPKGSWLERMLARKPRMLVTVALANKTARIVWALLVKQEDYKAPVAALA

SEQ ID NO: 231068 - protein, 348 aa, unidentified
MKILSLDLGKYKTVGCDYERESGQHRFRAIGTTPAGLQQLVKEVKPDRVVIEVCNIAGWVCDLLRGMGVEVQVANTSDDAWRWRKVKKKNDRCDALKAAQLSAVNQLREVHIPIIEVRQWRALIAFRQQLVKRRSKVKNHIRDLLLSEGEILPRGAKCWTQLGVACLEAKAKPLNQVGMNELWRGQLHIELRQLREVQADLELVEEQLDAIAKTDPRIALLRTIPGVGPRLSEAIVALLDRPERFHKASEVSAYIGMVPKQFDSGESERHGRITKHGSRVVRSLLVEVAWAGMRYNPWVRQTYQRISGGKKSRKKIAIVAVGRRLLVRCWAMLRDGTSWRAPVTKTAC

SEQ ID NO: 231069 - protein, 348 aa, unidentified
MKYIGLDCHKQYDHATMIDTETGEVKARKLAHIKEEFREFIGDKTGTRVVIESCRDWSRTYELSKDLVEDIILAHPLKVKAIASAKVKTDAVDSRTLAQLLMADLIPEAHLRKAENRVKQRVIRHRTFMVVMRTRVKSRIHNLVDSQLLSPEALKAKPKNLFSKKGMKWLTSLEWAKEEDNRLVESHLRVMEAINQEISITNDMVKEIYEKDRDAQLLITIPGIGITLGMLISTEIDGIERFHSPSKLCSYAGLVPSTHSSGGKTYHGKITSEGNRWLRWALVEAAVPASYADAEIKERLDTLRKKKGANVAKTAMSRWLLKVVYHVLKERRPYITDYNVIAKAGAAF

SEQ ID NO: 231070 - protein, 425 aa, unidentified
MQAALGTERAVWEAVLERCCGLDVHKKTVTACLLVGALDHQPQESLGTFPTTTKGLLELRDWLEQNGCTHVAIESTGIYWRPVFNILEDAATVLLVNAYHMKQIPGRKTDLKDAQWIARLLRWGLLKPSLIPPKPIRELRDLCRYRKKLTEQASAEKNRIQKVLEDANIKLASVATDMFGVSGRTMLDALLAGDMSPDEMAELARGKIRPKIPQLVDALEGRLSDHHRFLIRMHLEHLGYLEQAIAQLHQRIDEKIRPYQHQIDLIRSTPGFDTTSAQQVFVEIGGDIKLFPSEGHLASWAGLCPGNNESAGKRKSGRTTKGNRWLRGALVQTAHAASRAKGTYLKSFYHRVAARRGKNRAAVAVAHKQLASIYGELQCDRPYQELGENFFDLINQKALEQRLVQRLQGLGYRVQLHPQTAATTP

SEQ ID NO: 231071 - protein, 421 aa, unidentified
MKNSAARKLKQVPAEYLVVGIDPHKKKHAAVAITEDLMVRVRFKFANSRAGFEQALESARAEMIKSSCRGVIFAIETGGHFWRNFAYFLEERGIPFRLISQLTLKRMRDGRDLNRRKNDFRDAEMAAGVFRTGDFTETKLPQGVYAALRSTHSAYYRLVKERTRIINLLKGLLDGLFPEFTQVFKDPCGRTALVVLSTCPSPAAIANLNEEVFVAAIRTERQGRLMVRKLKALHEAARTSIGIKPGADAVAMEVSLLVSRYYLIEQQVDRLVESLIRLVDKTEEGKYLLSIPGINYLSTAGLLAELGPLKSYHDAKQLIKMAGTNPIEAESGGKRLGKTPMSKKGRPRLRYSAWSAVIPLFRHNPDFRAWAKRLRERPAHANPLNGKEVVGAALNRLLRLVYVLVKKQEFYRSPQIVLAVN

SEQ ID NO: 231072 - protein, 345 aa, unidentified
MDYFAGLDVSVKETSVCIVDDAGKIVREARVASEPEALLQVLTNAIYRFKRVGLEAGPLSQWLYSVLAEAGLPVICVETRHMRAMLKAQINKTDRNDARGLAQMMRVGLYRPVHVKTLRSQKLRVLLTHRKLLQSKAIAIENDLRATLRNFGLKVGTIGPVKYEMRIRELVENLPDLAVLVEPLLIVRRVIREQLGILHHRLLAIVRDDDVCRRLMTIPGVGPVVALTYRATVDVPARFRNSKAVGAVFGLTPCKYQSGENDRTGAISRCGDEMMRMMLYEAAQSMLMRSTKWSWLKAWAMKVARHRGMKKAIVALARRLAVIMHRIWVDGTVFRWTREQAAPAA

SEQ ID NO: 231073 - protein, 393 aa, unidentified
MTATPKHCTDRQPALYVAFELGWSEWKLAFVTAPADAARLRTIGGRNTAAVLQEVAKAKKRFGLADDAPVYGCYEAGRDGFWLHRWLTSQGWHNLVVDSASIEVNRRQRRAKSDRLDAAKLVSMLLRYHGGEQKVWSVVHVPSALDEDRRQLHRDLLELKAERTQHVNRIKGLLASCGLAVPTIAADFPPVLEALRQWDGTPVPAELRRRLLREFARHQFVSAQVRDLENERARTIRTSDAQPLAQVRKLLGLRGIGANSAWLFVLEFFGWRRLRNRKQLGALAGLTPTPYNSGQTAREQGISKAGNRRLRTMAVEIAWCWLHYQPQSALSQWYARRWGSGNSRQRRIGIVALARKVLVALWRYLEADELPQGAATVDWKVKMGSTRAATACG

SEQ ID NO: 231074 - protein, 364 aa, unidentified
MDVHLRSTTVCALDAETGETVTRRFRGNPWGEVAEWMSGFPGPSLAAYESGYLGFAPQRELSGLGVDCVVAAVSRVPRSAADFSSKNDRNDAARMAKAILSHDISPVWVPSPEIEGLRDLAGAHDAATARLAAAKQRLLAFLARRGYAYGGTTPAGNPRRYWTHDFLRWLDKVRPADDGGIRALAALRSEVEAASETRDDLLAEYRAAVAAGPLSAEVEALQSIKGCGFALAAAFASEVGDFSRFRSGRQVTSYFGLAPKQRSSADSVRLGGISGAGNALVRRLAVEGSWSYVQASHQPKLMPKGSGVPLEVRMHGRKGSERLLRRREEMLARGMPQAKANAATAAELVRWLWALGAMCREATE

SEQ ID NO: 231075 - protein, 418 aa, unidentified
MANEPKWWVGVDWASETHQVTLLDANGRVTGERSFAHGGAGLAALCDWLLATTGAAVAEIAVAIEVPHGPVVEMLLDRGFAVYAINPKQLDRFRDRFTVAGAKDDRLDARVLGDSLRTDQHCYRPLHLADPLVVELREWSRMTEDLQQERNRLGNRVREQLWRYYPQALELSDDVGADWFLELWALVPTPAKAARVRTDTVARLLKTHRIRRLDAAEALRLLRQTPLTVAAGTTEAATAHIRAVAARLKLVNRQIKEAHRRLDELCAKLAEEGDAKPGQPQEQRDATILRSLPGVGRIVLATLLAEAWEPLRNRDYHALRTLCGVAPVTKRSGKRCIVLMRQACHLRLRTAVYHWARVAIQHDELSRQRYGQLRKRGHSHGRALRTIGDRLLAVACAMLKTHSLFEPDHKGCKAAVAA

SEQ ID NO: 231076 - protein, 382 aa, unidentified
MGKRGVARSSVLITEALAGNVVGSDPHKRTVTTTVLDGRGGVLGTAHHKVSGEGHRAMEAWVRSFGPVVRWGIEGAASWGRHTAMFLCARGYDVRDVCPNRTHERGRARQQGKSDALDAERIARETLAHPLLPLAFKRSSAGEAGADMDHELLTLWHGARRSVLTSRQHLVNEAEFLLDALPETLRRRLPDTKAVRPRLAAAARLTRRKTLDPATTLRLALLREAHAAIVALDGKEREVTRQLRVLVRASGSTLGQLCGLSTRSVAELLVEVGDPRRFTEGGFARFNGTAPLPASTAEGPDEPVRHRWNPGGNRRVNAVLHRMAVTQLRCEPRAQAIFADARRRGHSKKEARRILKRHLSDVIYRRMIRDQAVLEEPASGAA

SEQ ID NO: 231077 - protein, 378 aa, unidentified
MRTVCGLDIHKDSVFMCILDEQGKKSERKFGVSTREVKSLSMMLKSYFVSEVCMESTGIYWKPIWHLLENDFRMYLVNPQFIKQLPGRKSDVKDAEWIATVLLKNLVRNSFVPDNMIQQLRLYGRRINELNKDIVRCEQRIDMILQSCNIRISNYVSRINSKSYKKVIDAIIAGERSPNELVKLIHGRTVNRHGREIVRDSLEGNIEHADIDLLKQYMEALQMYQRQKETCLTEMIKLCKKHYHRAFSLLLSIPGIKEQSAVIIISEIGTDMSLFATAAALVSWAGLSPRNDESAGKIKSRKITHGNKYLRKALIEVAWAASRTRGSIFYNKFWRLRQRNKNQNKCTVAIARHLLVIIWSLLSKDEHFDNEYTLKISA

SEQ ID NO: 231078 - protein, 342 aa, unidentified
MQISIIGLDIAKHVFQVHAVDAEGRAVAQVRLCRAQVLDYFSKVPPCLVGMEACATAHHWAREITALGHEVRLMPPAYVKPYVKRNKTDAADAEAIAEAVTRPTMRFVAVKSADQQAALMLHRVRELLVRQRTMLATALRAHLAEFGIIAPQGIHRVEKLAAEVQSPAVPALAREALTLLVDELAGIWRRIEAIEARLVALHRADEVSRRLASIPGIGPITAMAIANTVTDPTMFRSGREFAAWLGLTPKTHSSGGKDRLGRISKRGDRYIRHLLYVGAGNAVRFAKARAATGEAWIEALQKRRPPKVVIIAVANKMARIAWALMMRGGTFRSPIAAAAAAA

SEQ ID NO: 231079 - protein, 370 aa, unidentified
MLDTTTFIGLDVHARSIKAVSLDVMTGEVRAATFGYDAGAVAEWVRSVDPRARCVYESGVTGFDLQKRLSGLGVDCVVGAVSKMIKPSADRRRKNDRNDAEFLARMLSVGNVVEVWVPDDECEAARDLTRALEDARDDLSRSKQRLSKFLLRHGLAFDERTPTGRRKGNWTRAHWSWIESIRFAERADNDALAYYVDAVRRAAEEKARLEGLVGAEARKPRWRRRVDSLRCLKGVDTATAADLVFEAGEFSRFRNARSFAAWVGLTPSEHSSGESDRRGAITKAGNKHLRKTLVEAAWHYLTCSGRPKDLAKGQAPDRSARRHAAKGVRRLVDRREALLARGVHGNKANVATARELACWVWAVGLMAEEA

SEQ ID NO: 231080 - protein, 355 aa, unidentified
MDSVKYIGMDVHKEAISIAVLNSSGKLVMECTIETKAATILQFFEGLRGSLHVTFEEGTWATWLYDLLKPHVTKLVVCNPRRNALLKEGSKSDRIDARKLAELLRSNLLRPVYHGEHGVRTLKELARSYLTISKDLARVMSRLKAIYRSWGIPCTGKQVYALRYHSEWLGKIQEAGVRRRAEFYYQQLDALRPLRQQVRRELLIEAGKHSAWKLLRGIPSIGPIRAALIIAMLQTPHRFRTKRQLWSYIGFGIETHSSAEHRYVDGELQRSKKQISIRGLNRNHNHDLKNLFKSAATVAAAKPGPFQEFYDALVAKGIKPEMARLTLARKIAAITLTIWKKGVRFDASYLKPQTA

SEQ ID NO: 231081 - protein, 366 aa, unidentified
MQTQSNKLDFNGQNIYVGLDVHLKSWKVTIMTDYITHKTFSQPPKTEALYNYLERNFPGGVYHSAYEAGFCGYWIHNKLVSLGIKSMVVNPADVPTTNKERVQKEDKRDSKKIARSLRNGELTPIYTPSIKTLEDRALLRTRATVVKDLTRYKNRIKSFLYFHGIEIPELFAKPQSHWSKRFMDWLESIELPEESGKMSLNALLVESTHLRVSVLDLTRKLRKLSETDNYKTNVKLLRSIPGIGLITSMTILTELEMISRFNNIDKLCSFIGLVPSTSSSGEKDRTGKITPRGNGILRSAIVESSWVAVRNDPALMMSYLEYCKRMEPNKAIIRIAKKLLNRIKYVLKNNQPYVSGIVNNNQNPSL

SEQ ID NO: 231082 - protein, 336 aa, unidentified
MVQIYGIDLGMSSFDVSFLSESGSVRHLSGVKNTVHGISKFLLSLPSSAVLCAEHTGVYGDLLLRLCTLNRTCLCFVPGYQIKHSLGLQRGKSDPLDACRIREYAERFYDLLRPCFYPGEEMSELQELYRTRSLLVDSRKRLDTLNIGDNCKSSVSLAAGHARRAVLAELNTQISGLDHEIEALIQNSSEFSRNYQILTSIVGVGPVTSCELIIKTENFRKLDTAKKCAAYAGIAPYPKESGKMKCGHKISPMGDKQLKTLLFLCARSAKEHNKEIRLYFLKKHKVEKKHFFVAMNNIANKLLRLIYSLIQKQQTYDRDYIQRDPRCVVISDTNKC

SEQ ID NO: 231083 - protein, 346 aa, unidentified
MEHYAGIDASLELSSVCVVDGRGKIVKEAKVASEPEALVYFFKELGFPMNRIGFEAGPLSQWLHAGLTQAGFETVLLETRHVKAALSAMTVKTDRKDACGLAQLLRMGWFQQVHAKSIGSQEIRALLVARKQLLGKLLDVELSIRGILRGFGLKVGQVTRKTFEARVRELVTGHTTLERIAGAMLSARATLKVEYEKLHKAVLAIVREDAVCRRLMTVPGVGPVVAVTFKSAVDDPSRIAKSKAVGALFGLTPKKYQSGEKDVTGGITRTGDEMVRTALYEAANVLLSRITRFSKLKRWGMDVAKRRGSKRAKVALARKIAVILHRMWIDGTTYRWADAKPIAAQA

SEQ ID NO: 231084 - protein, 343 aa, unidentified
MKLSRIGVDLAKNVYQLHGVDRHGKTVWKRRLRRGQWLQALLDKAEPGCEIGMEACTGAHHWARELQSRGYTVRLIAPQFVKPYVKSNKNDANDAEAICEAMSRPHMRFVTVKSVDQQDIHARHRVRTEIKDHRNAKANQIRGLVAEYGLVAPKTLLALRRAIPEWLEDAENGLTDNFRCLLHGLWDDLLTLEDRFKELDKEIEKLARSNEVTKRLQQLRGVGPIVATALVATVGNGEQFNNGRQMAASLGLTPRQSSSGDKHRLLGISKRGDVYMRTQLIHGARAVVSQAKHRDDPLSRWATDIAKRRHPNVAAVALANKTARMAWAMLRNETDYDPNLAVG

SEQ ID NO: 231085 - protein, 316 aa, unidentified
MEVLFESCCGIDVHKKTLTACIMIGKDGKITKKDIRTFSTMTEALEEFRDWLKSEGVTHVAIESTGIYWRPVYNILENDVEVILANARHIKNVPGRKTDVADSEWLCKLLRNGLIQGSFIPPRHIRQLRDLTRYRSRLNNNIAAEKNRLQKYLEDANIKLSSVATDTLGVSGRRMIREIIRGNRDRDSLSELAKGRLRSKIEELKKSFNSRITEHHRMLIEMSLKHIEYIEEMIEKLEMEMDGLIKERKLDEAVELLDTIPGVDKIGASIIIAETGADMSKFPSASHLASWAGMSPGNNESAGKKKAEGPHQETSG

SEQ ID NO: 231086 - protein, 377 aa, unidentified
MHSENIAAYIGLDVHKETLAVAIAAPERLGEVRYYGTINNEAQAVRRLFQKLQGLYGNILSCYEAGPCGFGLYHQLTAMNIKCQVIAPSRIPKSPTDRIKNDHRDAISLARLLRAGELTPVWIPDLTHEAMRDLIRARAAAKRDSRVARQRILSMLLRTDKRYAGKHWTGKHRTWLANQSFSQPSQQIAFQHYCQSLEQIEDRILQLDQEISRLLPEWSLCNLVCQLQALKGVGQLIAITLVAELGDFSRFSSPKQLMAFLGLVPGEYSSGNSIRPGGITKVGNSELRRLLYEAAWSYRTPAKVGAWLIYYRPDSVTQYSKDIAWKAQQRLCSRYRTLTAKGKKSQVAITAVARELTGFMWDIALAAQSSFSQQKQN

SEQ ID NO: 231087 - protein, 342 aa, unidentified
MTITIGIDPHKGSHTAVAIDSNEHVLDEIRVRSCSTQIVRLRDWAERFEERTWAVESAHGLGYLLAQQLVAAGEIVVDVPPVRASRVRVLGSGRSQKNDPNDARSIAIAALRADDLATVRVDDHARVLKLLSKRHRDLGRLKNKASCRLHALLLEMVPGGAEFGITAVTRVNAVIDGVEPADAMGRQRQEIARELADDIDRCNELLDASKQRINAALAASATSLTSICGVGPICAAMIIGETGNIDRFNSKHHYASYNATAPVEASSGPKARHRLNQRGNRKLNWAIHVVAISQLSHDTAGRAYYDRKVAEGKTSKEAIRALKRRLSDVVYRHLVADARQQS

SEQ ID NO: 231088 - protein, 348 aa, unidentified
MRRVYVGMDIGSKQYAAVAVDVRGKMVDSEVFRTSERNMISFCEKQKGSVTVMIEEGELAGWTARTLRPHVERVMVSDPRRNAWVSKAGNKNDPLDAAKLAELLRLGSYSEVWHPENEDIAEFKLVVQRYDECSKKLARTKIQIKALLRRQGVITSGKGVYGLKGRQAVLDKIESEPVLKLVELEYEMHDFLVCAKAKALRILKQQSRKFPVIRRLKNIPGVGPVLAARFVAYVGDPNRFNKRTLASYSCLGVVKRSSDGSPIGRERLSKAGNYALKDLSRTAFERAKVTKRSNGITEFYQASLARTNSRTNARLNTQRKILAIMLAMWRDGTEYCEEMVTGVAFAGS

SEQ ID NO: 231089 - protein, 327 aa, unidentified
MRYIGIDVSKATFMVAYPSNEKEYKTREFGNNAKGIHQFIHTLKEDDHCVMEATGYYSYLLLYLLNQANITTSMENALKVKNFARTMLSVTKTDKADAQLLSLYGERMRPAPFKMPPDSILLLKQKRAALRQFQKQLQANNNLRKSLEVLPQRDAATFKSIDKIIETLEKQIRKIEEDLVALTQKEFERQMQKLTSIKGIGASLAAALIIATGGFTYFDNAKQVSRYLGICPTYQQSGSSINRKGHINRNGDSHLRSQLYVAAWGMSQHNAECRKLYERMKEKGKSGKLIMIAVANKVIRQCFAVVKNDTDYIDGFVSQKPNPAILS

SEQ ID NO: 231090 - protein, 485 aa, unidentified
MKEATLIRSVGIDLSRTGSHQVRCLDEQAKPCDSFSFDSTLEGLENFEKRVFSNSDTPTIIFEPTGLAWIPMAVYLRARHPECQMVKARLQKVAALRRYLRSYTKSDRVDGVTLAKMPFIDAEQLDEAYLPPAEYHSLQRLTRQRERLMKSITVRKNRIGSIVNGYLPGLRKAFSDEWSDRARLFYRQRLNPFTVVRDGKSALETFLVSVKAKGAQTESNRVYQACQKLAEFYEKSKAAGMINEDFFDDLQEEIACELRLMETEEAEVERVSVRIEELYGHLHPSDYLRSIPGIGVRTAQVFLAIIGDPHRFRSQSAFANWTGVVPGARQSAGTEGKGLRMTKAGPSMMKRALFQAGDIARRYDPQLAHLYYREMVHHGKTHLQAMGAVMSHLGARIMAVLREGRPYELRDSQGKLLTKKEAMELIRSAYKVPEETRQARRRRKPNEGRLTSRRTREAAKAPQSGPLIPPPKTVYCGEELQSIAN

SEQ ID NO: 231091 - protein, 349 aa, unidentified
MGEVITIGVDIAKLVFQIHGVDADGTVVIRRRVGRARVLEFFADLPPCRVGLEACATAHQWARELAKLGHDTRLMPPTYVKAYVKRGKNDAADAAAICEAVTRPSMRFVPIKSVEQQSMLMLHRARDLLIRQRTQLTNALRAHLAELGLVAAKGREGLHQLATVVTECGNERLPSNARFACQAILTQLHAVQIEISGLDKRISQTHRANADSKRLETIPGFGVILSTAVAATMADPKAFRTGRDFAAWIGLVPRQNSTGGKERLGSISKQGDRYLRRLLVVGATSVINSARARPYKYPWVIELLGRRPTKVVAVALANKMARIAWAVLAKGERYRAPTRSSNAVVPAAA

SEQ ID NO: 231092 - protein, 369 aa, unidentified
MNATTVTRSSASVVGVDVAKSVFQLAVADSAWKVTETHRLTRSQFERWFANREVGLVVMEACGSAHHFARWLNGLGIEVLLLPARYVRAYVKRNKTDAADAAALLEAARASDISPVRVKSVEQQALQGLHRARSLWMGTRTSRINALRGFCREFGIVISQGSRLGVEQISRVLADPNSAVPALIRGTMKLLVEEIRLLEARIAQLERELTALARQSPACTTLLSIPGVGLLTATAMVAATSGSVSHFKSARHFASWFGLTPREFSSGNSRYLGRISKQGDKYLRMLLTHGARSVLRAATVARQAGRTLDPLRSWATAVQGRTNHNKAACALANKLARICYATLRDSQPYGQPAPRQRHKIERTAFAIAA

SEQ ID NO: 231093 - protein, 390 aa, unidentified
MSGLSVIRKLSTWTKCLNVKSEEERVVLQKAELNGNVDSENNHGGSSSNMYYIGLDVHKKTISYCVKDASGQVHREGTVGATRNELDCWIRTLPQPRIMAMEATIFTGWIYDHLLPHAEQVKVAHPLMLRAIAAAKKKNDRIDAGKIADCLRCDFLPECHMASTEIRDRRRTLRYRHLLVRQMVQMKNRISGLLMETGVSHNKQRLHKVGYFGELLSNHQEVQENIRPLLRLSRETIVRCQRTEYALVSSLQRDPLLAARLKRLRSVPGVGPITALTWAQEVGDVSRFRSVKQAISYCGLCGEEKSSADKVLRTPISKQRNKHIQSVLVEAAKLAPRQNHELALIHEREKQKGNRNRATLAVARKMVGYLLAVDRREREFVPAEGRGTAA

SEQ ID NO: 231094 - protein, 376 aa, unidentified
MVTDRGGHLADAQFPTKAAGYAAAIAFLQAHGTVAAVGVEGTSSYGSGFTHAARQAGLAVVEVNRPDKAERRRIGKSDPIDAYAAARAVVSGRATSAPKDGTIVGIRALQTAARPAIKARTATLNQITHLLITAPDAIRAKYTALSGDKRVTALARLRPASDPAHAPLLTALRTLAKRIQSLTEEHPTLTGELDQLVTILNPGLRAAYGVGPDTAAQLLITAGANPARLRTEASFAALCGAAPVPASSGKTNRHRLSRGGDRAANAALYRIALVRMARCRRTREYVARQAAAGRTKKEIIRLLKRAMAREVFRLLTTPVQVLDIADLRPARQTKNITLTAAAHHFGVWPAIISNIERGLRRDDAFADAYRQWLTAA

SEQ ID NO: 231095 - protein, 352 aa, unidentified
MTLYAAFDTSATTTVICIIAGRDGSPVFETTVPTDPDSLYAALAPYLPRLQRVGVEAGSWSAWLHRELTAKGVPMVILETRHAAAALQAQRNKTDKNDARGLAQLVRSGWFKTVHAKSEASHRLKLLLAHRRTLKRKLLDIENEVRHSIKALGLMVGRRVQRATFPSRVRELVAGDPLVAGITECMLRAWSALWDEYRKLHTLLVQVAGQDELCRRFIAIPGVGPVTALTFKAAIDDPARFAKSKTVGAHFGLTPRREQSGTSIDRDGHISRRGDGEVRTVLYEAASSMLTRSQTWSALKAWGVRVSAKRGHKRAVVAVARKLAVIMHRMWLDGSEFRFSAVEAAPITTATA

SEQ ID NO: 231096 - protein, 339 aa, unidentified
MKVSTLGIDLAKNVFQLHGVGCNGQTVLKKKLTRDKFLPFLMQLEPCLIGMEACASSHHFARVLRQYGHEVKLIPPQYVKPYVKTNKTDAADAEAICEAVARPNMRFVQIKTAEQQAILVLHTERNILIRERTACANSMRAILAEFGIIMPRTLSQLYKKIPEILEEYDNELSPFVRCSVARQLEHLQGVEDQITLIEQELSRWAKTQPACQRVMKVPGVGLMTATYLVASVGNGQRFHSAKQFAAWLGLVPREFSSGGKQRLGRISKRGDRYFRYLLVHGARAVAAVIERHKDNMPWLYRLLNKKAYNVAVVAQANKTARILWSMLVHHTEYRTLSAV

SEQ ID NO: 231097 - protein, 412 aa, unidentified
MEVMYERCAGLDVHKKVITACLIVPGPDGKPRKETRTFGTMTRDILMLSDWLSRAGCTHVAMESTGVYWKPVYNILEANFEVVLANAAHMKNVPGRKTDISDAEWIADLLRHGLIRGSFIPPEPIRELRDLTRYRTSLTRQKASEVNRLQKILEDANIKLASVATDVTGVSARSILHELLRGEMDAESMAQLARGRMRKKIPELQRALEGFLKPHHRLIITQILAHIDYLDEAIAELDREIEERMRPFEADARRLDGVPGLDVKAIQGVIAEIGVDMTVFPSGRHIASWAGVCPGNNESAGKRKSGKTTKGNPWLKSLLVQAAHAAGRSKGNYLSSLYHRLAARKGKKRAAVAVAHAILIIVYHILRDKTEYRDLGADYFDRLDREAVAKRLTKRLEALGYKVDLQDLECAA

SEQ ID NO: 231098 - protein, 409 aa, unidentified
MDQLIERCAGLDVHRDTVTVCVRVPGPGGRRTQEIRTFGTTTTDLLTLRDWLEAHGVTHVAMESTGVYWKPVYYVLEERFECLLVNAAHLKHVPGRKTDVKDCAWIAQCLEHGLLRASFVPPAPLRDLRDITRYRTSLTQERSRLANRLHKVLQDAGLKLASVASDILGVSGRAMLTALAQGTTDADVLADLARGRLRTKLPALRAALTGRFRDHHAFLVGQLLAHLDYLDEAIVTLSERVEELLAPFAERLTQLDTIPGISRTTAEVLVAEIGLDMTVFPTPGHLASWAGLCPGQNESAGKHRSGKTRKGNRWLRGVLVQAAQAATTVKGCALGARYRRVMRHRGHKKAIIAVAHAQLVIAYHVLRHHVPYRELGADYYDRQTAERVRHRAVTALERLGYRVALERAA

SEQ ID NO: 231099 - protein, 337 aa, unidentified
MKFCGIDLHSNNSVVVVTDETDRVLVSRRCPNQLTPVLSLLEPHRAELVGVVVESTYNWYWLVDGLKAAGLEVKLAHPVAMKRYDGLKHSDDKDDATFLAHLLRLGILPTGYIHPPQERALRDLARKRIQLVRSRTQHILSVENIMARQFGQRLSCNEVKGLSATSVDRLGLPTDVALAMKANVAIVQALQIQIDFLEERLLHEAYLRPEFSLLKTMPGIGEVLATVIMLETGNIERFADVGHFASYARCVKSAHYSNGKKKGEGNAKNGNAYLIWAYIEAANFARRFSEDAKRFFEKKKAKTNAVVATKALAHKLARASYHILKEKQPFDARRCFA

SEQ ID NO: 231100 - protein, 430 aa, unidentified
MKSNTQNAKIEAITEKTLVLGIDVGSETHYARAFDYRGIEYSKKPFKFSNTEAGFATFKEWILDLKERHEKDKVVPGMEPTGHYWFNLGKFLQDNEMKPVLVNPHHVKKSKELDDNNPTKNDRKDPKVIAGLVREGRYMIPYLPDGVYADLRTASNIRFQLQAELTRIQNRISRWFNIYFPEYKTVYGKPDAKSGMLILKAAPLPEDILTLGIDGVNQIWRDAKLRAVGRARAKTLIEAAEHSVGSKEGAMSARMEIRMLLEDYESRNTRLQEVMVLIEELVRKIPMAEKLLEIKGVGIRTVSGFLAEVGDISRFNNPKELQKLAGLALVENSSGKHKGETTISRRGRKRLRYLLFEVAMSLVSKNQEFRELHNYYTTRRLNPLKKMQSLMAIAAKLIRVFYAMLTKGVDYDPKKMVSDIKRPAVYLQAA

SEQ ID NO: 231101 - protein, 414 aa, unidentified
MTEEETISWFAGVDWGSERHQVCLLDARGTTVGEREFPHSGEGLAELGDWLLSMASAASTVAVAIEVPHGPVVDALIDRGFVVYAINPKQLDRLRDRFSVAGAKDDRRDAYVQADSLRTDRRLFRRLQVADPRLIELRAWSRLAEELRAERVRLSNRVRHQLWRYYPQMLKLTDDLGAPWFLELWAIASTPAKAGRLRKSTVERLLKQHRIRRMDAETVLRILREPAIKVAQGVAEAASIHMRSLVARLRIVNRELREAERKLDELCTAISEIEQTSGEGLQRRDVAILRSMPGIGRINLGTLLSEASGPLSRRDYVGLRTLSGAAPVTKRSGKSLIVVRRYAAHVRLRDTVYHWARVASQRDPKCRARYTALRKRGHSHGRALRGVADRLLALACVLLQRQTLFDPYFGGSTA

SEQ ID NO: 231102 - protein, 384 aa, unidentified
MNKHSILFIGLDTHKEFNEVAYIEEHRGAQPVHLGRVSSSKVAVQKLVRQFESKYPGATLHFVYEAGPCGYWIYRLITSLGHCCYVVAPSLIPKKPGEKIKTDKRDALKLAKLLKSEDLTPIYVPEPEDEAVRDLSRAREIAMKDLKDAKYQLKALLLRNNINYKGTANWSQKHLRWLTELVLPHPAQHIVLQEFLQTITERISRLERLDNELTHHVHQWRYYPVVKAIQAMRGVRLLVATGVVAELGDLSRFDYPRKLMSYLGLVPSEHSSGGKRHIGAITKCGNGRARRLLVEGAHTYRYAANISTDMQKRQEDLPKDIIDIAWKAQLRLCKRYKKMIAKGKHYNLVVTAIAREMIAYIWAIAKEVVLTPVNAKLRLARVPA

SEQ ID NO: 231103 - protein, 330 aa, unidentified
MKSWNVILGVDVSKLTLDVCHAACNLHIKIDNSTKGFGELKKWCKLNAIDLKETLVVMEFTGGYEYRFIQFCESQGIAYCRIPGLEIKRSLGMTRGKNDHIDSFRIGRYGEEKIKRLEPSKPLNKHILKLKQLLSFRKRLVREKASFESTVKERKHMYGTNRDDQVTHIAQVKIKADKKYILQIEHEIMELIKNQDELLRNYRILTSIKGIGNVNAWMTLAYTENFISFTDPRPYAVYVGVVPFEHSSGTSIKGRKRVSHLAHKEIKQELNQAAKTAIIHDPELKAYAERKLKNKDYPLVLNNVKFKLILRMFALVKRGENYVENYKRAA

SEQ ID NO: 231104 - protein, 435 aa, unidentified
MNEQTTAAPLQFGAFVGLDWGDEKHVLSLQAGVSPVIELSPLQQTPEALAQWANSLRARFPNQNVAVALEQSRGPLLAGLSQFEHIVPFPINPKSLARFREAIYPGRPKDDVRDSDLLLEILLKHRQHLRPWHPDTVQTRQLALLNEQRRHFVDLRTCLTNQLLAHLKMIFPQAVELVGEDLASPMAAAFLKKWPTLQVLQSISPADLRKFYYGHNCRSKKLIDQRLERIKNAVALTSDPALLAAHSLVIQTLAAQLAALHPSIERFDKQIADVFAAHPDALIFRSLPGAGASLAPRLLTSLGTDRNRFPQPVDLSAFSGIAPVTEQSGKSKWVHIRWSCPKFLRQSWHEFANCSIRFSPWAHACYSELRQKNEHHEAIRKLAFKWQRIVWRMWKDRKPYDEAHYQATLLKKRSRYYPAQKQNDSSQAPPPVNKI

SEQ ID NO: 231105 - protein, 346 aa, unidentified
MTIVDTSRLVAGGVDTHLDAHVAAALDANGGVLGVASFPTTTAGFVALHAWLCTFGSPFQVGVEGTGAYGAGLSRYLRSRGLTVIEVDRTNRQLRRRAGKSDPIDAIEAARAALSGRATGIAKHADGNVEAIRALLIAQRSSRQTRARCLNQIRHLGFTSPDSLREQFRDVPKAHLARQAAALRPQANGDPVMHATKLAMRTLGRRAVAISDDMNDLDPVLAQLVSDTAPALLACHGVGVGTAAILLVAAGDNPERIRNEAAWAHMCGVAPLEASSGKQHRHRLSRAGNRQANHALWRIVFTRMGSDPRTRVYVERRSEEGLSKPEIMRVLKRYVARETYKLLPRA

SEQ ID NO: 231106 - protein, 415 aa, unidentified
METETEQIYERYIAIDSHKFYVVVGGIDAHLEPVLPQRRLSLEEFRRWAPKQLRPNDAVVIEASTNTWVLYDLVAPLVGKVVVVHPPKVKLIAAAAVKTDKIDVFKLARLLMVGWLPEVWVPPQHVRDLRALISHRWRLVRMRTATKNRLHSVLQRNAIRAPQKHPFAQQQRAWWEGLEVTATERLRIRQDLENLDHLGRQIAEVESEIQRLSTSEHWVDVVPYAMQLSGLGLITTMTILAAIGDISRFPTAKKLVGYAGLGASVHDSGLTHRKGHITKAGRKELRWALVEAAWAAVRYDPYWKAQFQALERRMHPNQAIVAIARKLLVVLWHLLSKKQAYRQGTEEQTVRKMLRWSWKMDQDARLGLTRRQFVRYALMHLGVAEEMTHIAYGGVHRIASVEEVLALRPELGTRS

SEQ ID NO: 231107 - protein, 369 aa, unidentified
MSTGSCCEARPNSLVRKKDNDMDLFIALDVSLASTALCALNAHGKVVKEAKVDSEPEALIAVLRALPGRVVVVGLEAGPLSQWLHLHMSGAGFTVVLLETRQVKGALKAMPIKTDRRDAEGIARLLQMGWFRPVHCKSVSAQEMRAVLSTRKSLQQALINLELSLRGVLRNFGLKMGAVTKIRFEARVRELVDGNLMLERAATPVLRAREELRKELAGLEKLLRDLAKTDPDCRLMMTMPGVGAVVALTMRTAVDDPGRFHSSKDIGPWAGLTPRRTQSGERDVIGQITKAGDAALRTALYQAANAVLCRSAPSWLKAWALRVAARRGKKRATVALARRIGVVLHRMWRDGTEFRFTREEAMAATPRAA

SEQ ID NO: 231108 - protein, 342 aa, unidentified
MYYIGLDVHKKTISFCVKDAAGHVHREGKIGSTRRELDAWIGTLPQPRMIAMEATIFTGWIYDHLLPHASAIKVAHPLMLRAIALAKKLSDRIDASKIADCLRCDFLPEWHMASTEIRNRRRVLRYRHLLVRQMVQTKNRVSGLLLETGVEHNKSRLHKVGYFRRLLATNSDIDDSIRPLLRLSRETIERCQKTEYALVSSLERDPFLKERIKRLRTVPGVGPITALNWALEMGDISRFRTIKQAVSYCGLCGDERRSADKVMRMPLSKQRNKHIQHVLVEAAKLAPRQSAELALIHHKAMEKGNRNRATLAVARKIVAWLLAVDRENREFIPAQQRETRAA

SEQ ID NO: 231109 - protein, 358 aa, unidentified
MNYIGCDCHISTLDCAVVNERGHETKKQKMNTSVKGLMAFVKSIPKPRKIIIEEGTLASWLLEVCTDYGEELIITDPKINRWIGRAGQKNDEIDASKLAQLARGGYIKEIHHPIGHRRRFRELVMLYHDTVKSQTRIKNKLKAKFRQNGIKCSGETVYSVKYREKWKKKLPQEKVVEVMVVGLWQQLDQVHEVQEELLSHIRKQSRQYSEIKRFKHIPGIGTVHAATISAIVETPHRFANKKKLWMYAGLGLAEKASGEKVYSRNLTRSYNRLLKSALKQAAEAAISARDNQFRRQYLRLTLEKGIPSHRAKLTVARSILATAYGTWKSGENYDPHIDKRRAESDTMQVRAYHLVRNG

SEQ ID NO: 231110 - protein, 370 aa, unidentified
MKKSIMYVGLDVHKNSIEVAFADAGRDGEVRSYGKIDGNLTALDKVIRKLEAKGSELHFAYEAGPCGYEIYRHLSSNGYDCIVVAPSMIPRQSGNRIKTDRRDAQMLARLHRAGELTSIYVPALEDEAMRDLTRAREDAKSVERKAKQRILAFLLRHGYRYYGKTPWSRAHFRWIAIIKMPHPAQQIVLQESLDALSECTERVNRLTEQIQRLLPQWRMFPVAQALQTMRGVSLIVATTTVAELGDLTRFASPVELMSYLGLVPSEHSSGEQTKRGSITKTGNGHVRRVLVEAAWAYRLPARVSTALHLRQEGMPQNVCAISWKAQLRLCNRYKRLLARGKANQLIITAIARELCGFMWAIAKEVETPTA

SEQ ID NO: 231111 - protein, 458 aa, unidentified
MSVLRKVKIKSATNKANVQLPTLHPHAAGIDIGATQIQVAVPCDAEPKPVRTFTTFTDDLLKLRDWLQQCGVRTVAMESTGVYWIPLYQILEAAGIEVCLVNARHCKNLPGRKTDVSDCQWLQYLHSVGLLRASFRPPEQICVVRSFLRQRANLVRCASQQVMQLHKALTQMNVQIHNVISDIVGVTGLAILDAVLAGERDGQQLAKLKDHRIKASADVIARSLVGDWRAEHLFALRQALATWRHYQQLLTECDAATAQALAGFESRVDVAANPPPPSTLRHKKPHANEPRFEARTELYRITGVELTQVPGLQVSTALVLFGELGPDFVQRFPTAKCFASWLGLCPDNRITGGRVISVKTRDVKSRSAEALRLAAQALWQSKTYLGDCFRRWKARLGTPKAITAMAHKLARILWHLLKYREAYDPTVWMAAEEQMRKKKIKRLEQNATALGYKLITVS

SEQ ID NO: 231112 - protein, 345 aa, unidentified
MKHYVGMDVSVKETSLCIVDEAGGICRELKVSSHPDDLIEVLKDPTWHLVRIGLEAGPLSQWLFDGLSNAGLPVVCIETGHTKAFLKATVNKTDRNDARGIAQMMRVNLFRPVHVKTISSQQRRALLTARKLIVNKVRDIENDIRGLLRNFGLKVGVIGRIGFVARIRELLEGMVDLAEIIEPLLSARQQLRASFETLHRKVLSIVRNDVTCRRLMTIPGVGPVVALGFVSTIDIPGRFKNSKAVGPALGLTPVLNQSGESNRVGRVSLCGDTMMRTLLYEAAQVMLTVVRKWSWLKAWAMNIAERRGHQKAIVALARRLAVIMHRMWSDGTEFQWSKDHGLAKA

SEQ ID NO: 231113 - protein, 378 aa, unidentified
MSIVMGLDQHRAQITAEWIDLRSGEISRARVRPADRSGVRRFLSRFAGEQLEVALEATTGWRFLVEELRAVGAGVHLAEPAETAALRGNKKRAKSDRADARHHRELLMAGRLPESWIPPDHILDLRAQVRLRHTLIEQHSQWQQRIRAVLYHHGCPRRPQGLMVGDGREWLDAQPLPETARQQVAVSIAVIDALEVQLAPLSRALRFYARAQIGCQALIEAYYGIGELTAVTILAELGDCRRFQNSRDAVRYGGLDVTVYQSDRHRAPGHLSRQGPPALRWALYEAAQVARHPRSPDRAYYEQAASKLGGNRACLALARKLLRRCFHTLRELGDDALAPPVTQPRPAASSAAARRASSGSPHQTNAPATRKTTDALAA

SEQ ID NO: 231114 - protein, 433 aa, unidentified
MSNLSLGRCDVKPLYTQTFTAYVGIDWADTKHDVCLQAVGSKQREFACIPHQMHRIDEWAKLLHQRFGGTIAVALELAKGPIVYALQKYDFIVLFPINPLTLAKYRQAFKPSRAKDDPTDAELALDLLLRHPERFAPIQPQSVAMRSLISLTEHRRELVGDKTRLTNRLTNTLKQYYPQALDWFEQRDTVLFIDFLTRWPTLAQAKRARIDSLKAFFNAHNSRRAKVIDARLESIKSALPLTEDIGVIAPCRLHALMLVKQLRVTLQAIEQFDHEIAELAPTLPDYSLFQRLPGAGEHFAPRLLAAFGEDRQRFQHADELQKYSGVAPVTERSGKKSWVHWRWQCPTFLRQTFIEWAGQTINKSFWAGAYYRQQRAKGSSYQAAVRALAFKWIRILHRCWKTRTPYNETTYLNALRKRGSPLLKNFMPDATNT

SEQ ID NO: 231115 - protein, 343 aa, unidentified
MSIAMIGLDTAKSVFQIHGVNEAGKVELKRKVRRSDLITFFEKQERCTVVMEACGAAHHWARILTGLGHTVKLLAPEAVKPFVKKGKKNDAADAAAICEAASRPDVKFVPVKTVEQQGILALHTVRSLLVKQQTMLANAIRGLASEFGHVVPKGLNNLEPLVDLVDADEDMPKQARQAIAELHERFGELAKGIQSCEAEIVKHARNDVTARRLATIPGIGPITASLIAATVVDISLFNTARQFAAWLGLVPRQSSTAGKARLSRITKAGNKEIRKLLVLGATSMVGRAEGWHSALGAWLRDILQRRPVRLVTVALANKMARIAWAVMTRDEVYRPQGGVAAKA

SEQ ID NO: 231116 - protein, 413 aa, unidentified
MDKIYDICCGIDVHKKLIVACLNHKRKKELREFGATTRELMELAEWLQKNECEIVAMESTGSYWKPLYNIMESYGLHAIVVNPAHMKAVPGRKTDVKDAEWIAELLQHGLLQPSYIPSKDQRELRELVQYRKSLVGERTRELNRLQKMLEGANIKLSGTVTNINGKSARKILEYILSGNEIDEKKYDEMYEEKLIAHNLKASKEQILDDLKGFMSPLQRRMLKELLQHLDELNVHIENLNDEIDNFMKPEEKQASQVIQDVTGIGNTSAQTIIAVIGTDMERFPSDRHISSWAGLCPGDNVSAKKRKSGKIRKGNALLKSTLVLCAHAAVRHKSSYFHAQFKRISTHRGKKRAYVAVAHSILIAFYHILKDGVKYQDLGAEYYNQFNAERKIHAYLKKLKALGWEPPKEAVPA

SEQ ID NO: 231117 - protein, 364 aa, unidentified
MSSMTADGVSTQPVYAGVDTHKDTHHAGIVDEDGRQITDAQFSTDRAGNEAMLEWLAQWWVHQVAVEQTGSYGLGLTTVLREHGYTVKELNRPDPTVRATVGKSDPVDAYTAAQAARTGRADITPKDHSGIVESIRMLSTARASAVKARSVALNQIRDLVITAPVLREKLAGLTTRKMVAVIWSWRPNRAEAGDPVQGAKLALRGIAGRVRDLDSEIKAYDTQLNTLTRRAAPRLRARPQVGPMIAAQLLVTVGQCPDRIRSDAQFARLAGIAPIPASSGKSSRMRLHRGGDRHANSAVHLVVIGRLRKHEKALTYREKRRAQGMADKDIIRAMKRLVARELFYALKADLKDLDHTTKNASHTP

SEQ ID NO: 231118 - protein, 355 aa, unidentified
MSSEKYIGMDVHQATISVAVPDSQGKTLMESILETKASTLLEFLGGLRGTLYVTFEEGTWAAWLYDLLKPHVAKVLVCNPRKISVLKHGSKSDKIDARKLADRLRLNDLKPVYHDDNGVRMLRELARSYLTIVKDLTRVMSRVKAVYRSWGIPCGGRDVYYTRHRQQWLNKIQEPGVRRRAEQLYQQLDMLQPLRQQARRELLRESRKHTITAKLRRIPSLGPIRCALAVALIQTPNRFRTKRQLWTYRGLGLETRDSGEYHYVKGQVRRRKEQKFIRGLNRDYNHDLKGLFKGAALRSTMLPKPFQDFYQRSVAKGIKPTMVRLTLARKIAAITLTVWKKGENFDADKVKPQAA

SEQ ID NO: 231119 - protein, 453 aa, unidentified
MCLEERPILEPNAAGIDVGAREMFVAVPPGRDENPVRVFATFTEDLERLTDWLEQCGVTTVALESTGVYWIPLFEILEQRGIRPCLVNARHMKNVPGRRTDWHECQWLQFLHSVGLLRAAFRPGQDICAVRTLLRHRNELVSAASQHVQHMHKALTQMNLQIHHVISDITGLTGLAIVDAILAGERDGAELAKLKDPHIKADTETIRKSLEGNWRPEHLFTLGQSRALYRIYQQQIVSCDLEIERMLGEFEPRVDPTQKLLPPDGKRNRAGRKRRRKNGHPHPEFDLRTEVYKLFGVDVTQIPGLEENALPLFSEVGRDMSRWPSAAHFVSWLALCPDNDISGGKVLWRGARRVKNRAGHLFRLAAFSLHHSPTPLGNYLRRMKTKLGPKGATMATAHKIAVIFYVMVKKQVEYDQSIWATRDAQREKRLETKLKRQAKQLGYELVPIQPKAA

SEQ ID NO: 231120 - protein, 387 aa, unidentified
MPSAISPPKAVLGIDVGKSSHWACLVTREGEVALNRRVRNSEGDLDGLFSQVACDTIVVVDQCRSIGLLAISRARLAGLGVACLPGLAAHQAARLFAGDAKTDERDALVIAKTALGIPDALPPVPEPDEALEAARSLAAQRSHMATCATRDKNRLRSILPESRPAFEALADLGDRHWLNMLEKLGGPWGCIDAGKPAFGAVTKGANRAGMDAARNAAMASTRPSKRRVDAENPQVRMLARRIREALEEADGIDREITALLAGDGTHECLVTIPGIGPRTASELVIGINIEDFPDHDHLASYCGIAPRNRRSGTSISSVSASRQGNRRLKNLLIFSCSSLVRSENRFGEYYRACRGRGMRHGEALKAVARKRLKVIYAIMRDKVPYSA

SEQ ID NO: 231121 - protein, 338 aa, unidentified
MNIVFLGIDLAKNVFQLCGLNQAGKPVYTKRTGRKELLQTLANIPACLIGIEASTGAFYWQREFEKLGHKVKVISPQYVKPFVRGQKNDGNDAQAIAVALMQPTMQFVPPKSPEQQDIQALHRARQRIVNHRTATVCQIRGLLLDRGIPIGSAVSRARRAIPLILEDAENGLSSRMRRTIAELYDLFNDLERRIHFFDKEIETVFRQSEACQRIAKVKGIGPETATAVVAAIGKGTEFKNGRHFAAWLGLVPRQHSSGDRQVLMNMTKKGDKHLRTLFIHGARAVVRVATNNNDGHMNQWVNQLKERRGFNKTTVAVANKNARIIWSMLRNETEYQVV

SEQ ID NO: 231122 - protein, 418 aa, unidentified
MNLTVTTKYVCGIDLHAREMSVCVKSIDGKVLMKRNISCDIKVFMNYIEPFKKSLTVGVESTYNWYWLLDELKKHKITCALGHALYIKRMKGGKHKNDPVDASDIADMLRTNHFPLAYDYPSEMRSCRDLFRRRHFFVRKRAASYTHFQNTFTQYGLLDPVYALVKIQGKRRDLLKWSVDDDMRKILETDLDYIDSLDEIIKDLENQAIKQARYHNRKHLDLLQTIIGCGPVTALSILYETHTISRFATPQRYSSYCRVIGADNESSGKYLGHSSSDKIGNPYLKWAFSEIAIHMLKDSPEAKEWFNNVSASCGASGARARLRHKLAVAVYHMLKKNVVFDEFKFFNITNDRTGSSAHNWMETSGEKSKPSGVIGKKSGHSSKSTKTKTKKSITVKNKVSVNKTSGRKTLRTTGKVKA

SEQ ID NO: 231123 - protein, 460 aa, unidentified
MTKRKKSMVNVPAMDVLEQINLHAAGLDIGSEEIYACVPANRDEASVRVFPTFTADLYVLADWLAVCQIETVAMESTGVYWIPVYEVLESRGFEVYLVNARHVKNVPGRKTDILDCQWIQQLHTYGLLRASFRPSEEICALRALARHRDNLIRYRSAHIQHMQKALQLMNVKLTEVVSDITGVTGVSIIRAIVAGERNPHQLARLRQSGCAKSNEEIAKALQGNYKLEHVFVLKQALAQYDFYLQQIQECDAQIEAMYAALPPSDPDGRVSPPPKSKGGKPRKNQAHFDLAAALYQVVGVDLTAIDGIDALTAQAIITEIGTDVNAWPTVKHFTSWLGLSPHNDKSGGKVLRSRTKKTQNRANLAFRIAAHSLSRSQSAVGAFYRRMKAKHGPAKATTATAHKLARMVYFMLKNRTAYVDPGVTYYEQQYRERTIRNLKRRAAALGLELVAAPLQSTAVS

SEQ ID NO: 231124 - protein, 410 aa, unidentified
MERVIERCCGLDVHKKTVVACVRVPGRTSAREQQVRTFGTTTAELLALRDWLAGYGVTHVAMESTGVYWKPIFYVLEDAFTCVLANAAQIAQVPGRKTDVKDCAWIAQLLEHGLVRGSFVPPVPIRELRDLTRYRAALIGEHTRETNRLQKVLEDAGIKLASVASDVLGVSGRAMLDALTQGTHDPDVLADLARGALRRKLPALRQALTGRFRPHHAFLVSQVLAHLDYLDEVIEALSTHLDEVMAPFAEEVSRLDTIPGVNKRTAEVLIAEIGVDMGVFPTAAHLASWAGLCPGNNESAGKHRSGKIRKGNRWLRGALIQAALAGGTRATKGAFAARYRRVMRHRGHKKAVVAVAHAMLVAAYHLLARRTTYQEPGADYYERRHAERVRQRAVQLLERQGYRVTLEPAA

SEQ ID NO: 231125 - protein, 316 aa, unidentified
MAEEAVFVGIDVSKAQLDTAICGETDTFSVSNDPAGIQQLLEFLQPRTPTLIVLEATGGFETPAVAGLAAAGLPVVVANPRQVRDFAKATGQLAKTDRIDAQILALFAARVQPPIRPLPDEAAQALDALVARRRQLIEMLVAEKNRLGFAQATVKKGIQKHIRWLERQLQDVDEDLDSMIRQSPIWKAKNDLLRTVPGVGPNLSRTIIAELPELGRLNRKEIAALVGVAPLNHDSGKLKGKRTTWGGRASVRAALYLGIWSASRWNPLIQPFYERLRSSGKPPKVAQVACMRKLLTILNAMVRDGRSWDPDFQHSC

SEQ ID NO: 231126 - protein, 395 aa, unidentified
MFIVGIDVAKRSHEVCMITSDGRTVQRPFSIRNNCTGYNLMLEKIRKHTNIKSQIVFAMESTAHYWLALFTRLRKDGYHVILLNPIQTSAMRDMFIRKIKTDAKDSFIIAELIRFGRYAESNVAQDRLLALKELCRNRFYLVDMAGDLKRKLIALIDRVFPEYEAQFDTIFCKSSVAVLKKYPTPQKLSNAHLDKLTELLWNSSNGHFGEWKARELRELARNSFGVEDCDGAYSTLILLMLDQIQSLSGKADALEKEISRLFQSFDTTVTTIPGVGPIIGAVILSEVGDISRFSSADKLAAYIGVDPSVNQSGEFQAAHAHMSKRGSPYLRRCIWMASQVAVQRDPMFRAYYEKKAAEGLKYMTIIGHVTRKMTAVVFAILRDHKVYEPVLPTAA

SEQ ID NO: 231127 - protein, 420 aa, unidentified
MSVQETAVSLLPRVLCYVGIDWAAETHAVCVLDGSGRIKTQFTIGHTAAGFADLLRRLVRLTGDPADVAVGIERPDGRLVDALLEAGHPVVPVSPNAIKTWREGEVLSGAKSDAGDAAVIAEYLRLRAHRLQPATPYTAETKALRTVVRTREDIVDMRVAAANQLSALLDAHWPGAKAIFADVESAIALAFLTRYPTYPSAQHLGEKRLRAFCVKHGYSGRRTAAELLSRLRSAPAGSTEEALTDAVRDAVLAQVAVLTALTAAEKNLGRSVVAHLGEHPDAAIFTSLPRSGQINAAQVLAEWGDSRAAYDSPDAVAALAGVTPVTKASGKYRAVHFRWACNKHFRKAITCFADNSRHASPWAADVYARAIARGHDHPHAVRVLARAWIRVIYRCWIDGVPYDPNKHGNASKLRETAAAA

SEQ ID NO: 231128 - protein, 426 aa, unidentified
MEVFFPRCAGIDVHKRTVVACRIVLTDDGEWLRETRTYGTTTEDLLRLSDWLAAGDCTHVGLESTGEFWKPVFNLLEGTCEVWLLNAQRVRAIPGRKTDVRDAEWIAELLRHGLVQPSFIPPRHQRELRELTRQRTNFVRGRATLVNRGQQVLESTNLKLTAVVSNIAGVSGRAILAAQLDGEEDVTVLAELARGKLRKKRDELERALRGRLQPHHRFLLTELLAQIDGLDETIARFDAEIVRLCTVNEEERVVELLDTIPGIGRAMAELLIAEIGVAMTKFPTPAHLAAWAGVAPGSNESAGRQRSGRTRKGNAWLKTALVQAAHGAARMQGTALAAKYRRVAARRGAKRAIMAVAHRLLIIAYHVIARREPYRELGADYLERRRPTALVDRLVQRLRQLGVDVTVIAEDQNASPLAHAGPPAVP

SEQ ID NO: 231129 - protein, 340 aa, unidentified
MTDHSLVSIDLAKTVFQVCQFTDSNKILSNKKVSRKKLSQEIAQLSPTTVVMEACYSAHYWGRNFEQYGHTVRLVPAQHVKPFVRGNKNDANDAVAIGEASLRPNMKFVRVKTLEQQDIQSLHRIRERFVSHRTRISNQTRGLLSEYGLVARQGFKALKVLIQEALESETLSALFKEELASIYEEIMDLAERLKRVNNKLKAMAQQYPLCRLLMTIPGIGFVNATAIYAAIGDGKQFKTARDFAVWMGLTPQQYASGTKSFTGKITKRGNRYLRKQLVHGARALMNRTKGKKDKLSVWVNDIKERRGVHKACVALAHKLARIIWAILSKGEEFKAQKIEV

SEQ ID NO: 231130 - protein, 351 aa, unidentified
MVIIGVDYHPSDQYIAFVDTETGEYEERQLNHSDREAEKFYRELATRGVSVRVGMEATGYSRWFERLLAELGIEVWIGDAAEIKTKRVRKQKTDREDARLLLRLMRENNFPRIWVPSPENRDLRQLLWHRHRLVQMRTRIMNQLQAIAMNEGQRRKKKLWNEQGRAQLEKLPLATWASRRRKDLLELLDRMNPTIEELTAAIEREAKKWPEVLRLMTHPGVGPLTALAFVLIIGTPERFKCGKQIGSYVGLIPCEDSSAGHQRLGHITKQGSSLLRFLLGEAAQSAARWDSDWRRRYVHLAMRRQRNIAKVAMARRLAVRMYWMWRNGWEYSEWIKFGSHAGQLGTRHGVN

SEQ ID NO: 231131 - protein, 422 aa, unidentified
MLEETQETEEIIQRVAALDVGKAELTCCVRVPGQGSSGRRAQEVRTYKTMTRSLLVMVDRLAELGVTRVVMEATSDYWRGAFYLLEAHGFEAWLVNARDVKHLPGRPKTDTLDAVWLCKLAERQMLRPSFVPPRPTRQLRQVTRYRADLVAARTAEKQRVEKLLEDAQIKLSVVASDIFGVSGRAMLTALIAGERDPKRLAQLARARLRAKLSLLEEAFSGFFTDQHAFLLGKMLARVDALDADLAELDAKLQALIAPLAGAVERLDEIPGVGQLAAHLLIAEIGTDMTRFPTAGHLVSWAKFAPGVKESAGKRKGRGSTGHGNPYLARVLGEAAVAASKTDTFLGERYRRIARRRGKRRAIVAVGRSILVIVWHLLSDPTARFQDLGAGFYDTRINAEHAKRNHIRQLEALGYKVTLQPAA

SEQ ID NO: 231132 - protein, 431 aa, unidentified
MSKYLNSIVVGIDVSSEFSFVAVLAPDGSQYRKPFKISHTSDGFNYLIEQIKKAEEKFSTKPVFFMESTGVYHLTLFNFLKDNKFESFVINPLITNCNKNKNIRKVKNDRNDALSIARLGKFEDIKVSSDSDINIFTLKLLVRDYYKLIDTRSVFKKKLSSSLYISFSGYQNIFSNTCGYVSINILKKYPSPQAVISAPKQDIIDILLSARRGIKWAEEKYLKLIECTKNALIVSLISPRLSISITTSISLYEAIDAEATKLLIEIRSFINSDEMPLTLCKNISLLMSIPGIGNITAITILAEIDSINKFPTSKQLVAFFGVDPAVNESGKFKGDRVKISKRGTRLGRRALYAVALSSIRTKRNGEATNKVLLKYYQENLKGKKSKVGLVAIMHKLIKYLFAVLRNQQEYQVRDPKLHQKMFLENKKRQVA

SEQ ID NO: 231133 - protein, 347 aa, unidentified
MTEAYDGRQVVGMDLHRRRSVIVRMTEDGRKLETVRITNSPAALRAVIAKAGKNPRVIIEATHGWYWAVDVLEAAGAEVHLAHPLGVKAFSYRRVKNDERDAADLADLLRMGRLPEAWIAPPEIRELRELTRYRHQLVKARTSLKDQVHGVLAKLGIPVTHSDIFGVHGQAWLDELPMPQPYAGKVASLRQLAGDLAGEITLLDTVLADLLAGHEGYAAIQQLPGIGPVLAAVIVAEIGDIRRFPRPGQLGSWAGLTPRHYESDTKVIRGHVTKQGSRMLRWAVTEAIQRQPAGTRPRQVKDGIIARRGKEAKNIAKVAAARELLTLVFYGMRDGHVRRALQRGQAA

SEQ ID NO: 231134 - protein, 412 aa, unidentified
MEVVYPRCSGLDVHKRFVVACLSIVEKGQRHKELRQFTTMTNEILLLKEWLKASGCTHIAMESTGVYWKPIYHVLEDSFEIVLVNAQHMKAVPGRKTDVKDAEWIADLLQHGLLKASFIPSSEQQAVRDLTRTRMRLIQERTRLVNRIQKVLEDANIKLASVVTDIMGVTGHAILTALVAGQEDPECLAHLARGSLVKKEDQLQTALQGKLTAHHQVLLEELLQLIARLDHSIARLDREIAERLRRFDALIERLDAVTGLSRRSIEVLLGELGWDMSHFPDAAHAASWVGICPGNHETGGKSLSGRTRQGNRWAKTALIQAAHAAGHTQTYLGEQYRRMRARRGAKKAAMAVGHSILVIFYHMVKSGEPYHEKGADYFTESHKQEIQQRLVRQLERLGNTVILQPKAETTLA

SEQ ID NO: 231135 - protein, 488 aa, unidentified
MPALHNNSKLKGAFTAQAAVAHPAASPKKKSKPVKKSPPDPTAGLSITHPNAAAIDVGGDTHWVALPPDRAPKPVRTFGCFTADLEALADWLIAHRIDTVVMESTGIYWVILYEVLEQRGLKVFLINARLAKKLLSRKTDLLDCQWLQRLHAYGLLNNSFRPPEAIRVLRSYLRLRERAVGAASQSVQHMQKALIEMNVQLSTVISDITGETGLRIIDAILAGERDGQRLAALKDRRIKASEQTLTQALRGHWKDEQLFALEQARLTWAHHQIQIAQCQDRIDGQLRAMNAEPPAPGKTSDHAAPGATMAPSSEAGPKPASTFCLREQLKQLAGVDLVSIDGIGELTAQIILSEVVFDMNPGPTEKHFSSWLALCPEHEISGGKILRRGRRRKVSQRAAQALRMSAYGLERSDSALGAKYRRLKRRLGAPKAIVAMAHHLARLVYRLLKHGQDYVDKGAAWYEARYQAQRLKWLQKQAQELNLKLVPA

SEQ ID NO: 231136 - protein, 350 aa, unidentified
MMIIGCDLHTRYQQIAMLDTETGEEVERRLEHESGEARAFYSALAGPVRVGIEATGYTHWFEGLLAELGHELWMGDAAKIRASVIRKQKTDARDAMHLLDLLRQDRFPQIWRPSPEERDLRQLVWHRQKLVWMRGAVKNQLHALAMGEGVCRKKKLFTAKGRKELEGLALGPWASYRRQELLRMFDELAAATAKLDLAVEQAAKNQPLAMRLMTHPGVGPVTSLAFVLIIGPVERFERSKQVVSYLGLNPQEHSSGGKQRLGAISKQGNPMMRSLLVEAGHTAARFDPALKRMYQRLKFRRGASVAKVAVARKLAVRMYWMLRSTADYAQLVRMQGSPWATLVENSPSLG

SEQ ID NO: 231137 - protein, 302 aa, unidentified
MPSKKDIAVVRTIGIDTGKNTLHIVGLDGKGTIVLREKVSRSRIAARLVNVPPCLIGIEAGMATHYVSRELLTLGHSVKQVPPAYSKPFRQGHKNDFRDAHAVAEAVQRPSTRCVPIKTDDQLDLQALHRVRSRLIGDRTAVINQVRGFLLEHGIPVRQGPRFLRQQLPQLLATRTDVLSPRMLRIIGDIVDDWKYLDDRIERITDEIEALARTDANCGQLMTVPGIGPIIASAMVAAIGNGAAFAKGRDFAAWLGLVPKQMSTGDRTILGRITKRGNRYLRMLFVQGARAILLRAKSWAKA

SEQ ID NO: 231138 - protein, 340 aa, unidentified
MVHVGVDLDKRSSQIAVLTDDGEIVQQRLANDAVRLTKFFSQLPPQTPVAIEASGTWWWLVDLLEQLGHQPVLSNPKQTKAIAAARLKNDRVDAERLALLLRGDLLPTVWIPSPALREARELIRHRIQLVWLRGVIRNRLHAMLARRNLQPTSGKSWLTQRGQRELRQLPLAETPSRIREDCGALLPTLDAQIRRLDADLVTRWGADPRVRRLTTIPGIGPFIAIVLVLELGDIARFASAKRVASYVGLTPRVRGSAGRVRAGHITKEGNRLLRWVLVLAATQAIRRPGPLRAWFHAVKKRRGKKVARVALARRLVEIVFHVWKQECDYFTVVRHGVVRG

SEQ ID NO: 231139 - protein, 409 aa, unidentified
MEILFPRCAGLDVHKDTVVACVRCVSAPVHREVRTFGTTTSELIALGDWLASHGVTHVAMEATGVYWKPVWHMLEDRFALVLANAQHIRNVPGRKTDVNDAMWIADLLAHGLIRSSFVPPSRIQELRDLMRTRKQLVREVSQHTQRIQKTLEDANLKVSSVLSSVVGTSGRKMLSAIVAGETDPAVLADLAVGTARKKRAELIEALRGRVTEHHRGLLRLHLSLIAALEAALVQLDATVGKALEPIEARAKILTTMPGVSDIVATVIVAEIGIDMSRFPTAGHLVSWAGLCPRNDESAGKRRSTRVRKSANWLKTTLVTAAWTAVRTKNSYLQAQFFRLKARRGAKKAVMAVAASMLTAAYHMLRDGVEYRDLGPQHFDRRGQTKTINRLIKRLTDLGCEVEVRRNDVA

SEQ ID NO: 231140 - protein, 345 aa, unidentified
MDLAKNIIQVHGVDSMERVVVRKAISRQKFLEWFANLAPCLVAMEACSAAHYWARKLRALGHEVRLIAPQFAVPYRKGGKHVKNDRLDAEAICEAAGRPHMRFVAVKTADQQNVLVLHRMRDGFVEERTALVNRLRGELVEFGVFLPQGIDAFRAHFVGALEDGATELNGVARTALARGWEHVQALDQQIAWCDAQVATHVKHDSDAQRVMAVIGIGPLTASAAVATVGDARLFRNGRQFAAWLGTVPKQKSSGGKTRLGRITKQGNTYLRTLLFQGARSAVTSAHRRTDRLSRWIVQLQTRVGWYRTLVAVANKHARILWAILAKGEHFDPSHVSNPPTPGQSR

SEQ ID NO: 231141 - protein, 352 aa, unidentified
MAVYIGVDLHVRTQTVCWVDTADGEEHEITLDHERDDVRAFYSQFPAPALVGVEASGYSLWFHRLLEELGHRLLVGDALAIRQFARRRQKNDRRDARLLLDLLTHDDFPAIHIPAPASREVLALLRYRHRLVRIRTMLRNGLQAVALSHRLRLGPKLFTARGQQQFAVLPLTGAFAVQRQHSLLLLASVADQIQAVEAQLDQRAQQDPRVLRLRTHPGVGLLTALAVVHALDPVTRFDRARRVAAYCGLDPREHSSGDTQHFGHISKQGNRLLRFLLIEAAHNAIRGDEDLRRFYYQLAARTNAAIAIVAVARKLVLRLYRMLRDAIDYDQFRRRGRDARRAREDASQVLPG

SEQ ID NO: 231142 - protein, 372 aa, unidentified
MKQSRTLYVGMDVHTESIAVASMAQDHGAAVVSLGPVGTRPGDSAKLSRQLQSKSPQLVLVYEAGPCGSWLYRSLMKTGDVCWGVAPSLMPTKAGDRVTTDRRDAMPLARLMRSGDLTPVYVPAVDDEARRDRSRAREETLRDLQAAKLRLTAFLLRHDIRYTGRANWSPAPLRWRSEGRCPTPAQQMVLQEDVQTVTAQPARFQRLEQALHEQVHPWRLAPVVEALQALRGVQCTVAVTTVAARGDLTRFDHPRQRMHSLGLTPSAYASGGRRQQGGMTKTGNTPARRALVEGAWAFRYPAKGSRHLPLRLAKLPAAIQAISWQAQVRLCTRYRHLMAQGKNAHQVVVAIARELRAFMWAMAKQVAVRPQA

SEQ ID NO: 231143 - protein, 385 aa, unidentified
MTESSDYESVQVFIGVDVGKDTHHAVAINRSGKRLFDKALPNDENKLRSLISDLKQHGQILLVVDQPATIGALPVAVARSEGVLVGYLPGLAMRRIADLHAGEAKTDARDAAIIAEAARTLPHALRTLKLADEQIAELSMLCGFDDDLAAQTTQASNRIRGLLTQIHPALERVLGPRLEHPAVLDLLQRYPSPEKLASLGEKKLAAQLCKLAPRLGKRLAADIAQALAEQTVVVPGTNAAAVVLPRLALQLITLRKQRDEVALEVEQRVLAHPLYPVLTSMPRVGVRTAARLLTEVACRAFASAAHLAAYAGLAPVTRRSGSSIRGEHPSRRGNKALKRALFLSAFAALRDPLSRAYYTRKMSQENDTIRCLSPWRDDAATFCSP

SEQ ID NO: 231144 - protein, 386 aa, unidentified
MMTMTRTEESTAVAITSGPTLLLAFELGERIWKLGFTTGLGQRPRVRQIPARATDRVLEEIARAKVRFHLPPDAAVVSCYEAGREAFWLHRWLVAHGVRNHVIDSSSIAVSRRARRSKTDRLDLEGLLNLLARFQNGEHRAWRIVRVPTVVEEDARHLHRTREALQQDRTRIINRLKGLLTTQGLALRLDAHFRTQLDTTRLWDGTPIPAGLHARLQRTWAQLEFLNRTLADVDSERAAPVPTLPTTLSRYVTSLPTLRGIGPIGAWTLATEIFGWREIKNRRQLGGLVGLVPAPYQSGDSTHDQGITRAGNKHVRRLMVQLAWSWIRYQPDSALTQWYQRKFGRGSRRLRRIGIVALARRLLIALWRYVEHGECPDGAMVKGQAA

SEQ ID NO: 231145 - protein, 341 aa, unidentified
MAQASTIGLDIAKRVFQAHGADATGRVVFRKRLVRAKVLEFFAAQPPCVVALEACGGAHHWAREINKLGHTVRLIPPAYVKPFVKRQKNDVADAEAICEAAQRPGMRFVPVKDEAQQANAVVFRARDLLVRQRTQCINALRGHLAEYGHVAPQGPAHVDSLVALVEDPASSVPESARAILKVLISALEVLGTQIEELDGEITRRAKADPVARRLMTIPGIGPIAATAIIALVPAPEGFRAGRDFAAWLGLTPLQKSTGGKQKLGAISKRGERTIRRLLILGASAVVRWASQRGAAEGSWLARMLPRKPRMLVTVALANKTARIVWALLVKGGTYKAPAVAA

SEQ ID NO: 231146 - protein, 411 aa, unidentified
MDIAKFKHVARAQDFRGMEFGSPCQFENTKEGIGHFLKWITEIKKEQRRDKVMVGMEPTGHYWFNLAHILKENGIKFVAVNPLHVKISKELDDNSPTKNDVKDAKVIAQLVKDGRYAEPTIPQGVYAELRVAKKIRDLLTEDLQTVQGQVHNWIDRYFPEFLKVFKKWEGKAALQFLKLYALPHEIAEFTEEEMLVHLRKSVSRSVGLNKIRELKQAASKSIGLRQGAEMARLELKTILAKYELIQSQFDELDTKIDGLLDEIPGVPQMLAIKGVGRDTIAGFFAEVGDLGEYNHPRQIIKLAGISLKENTSGKHKGKTTITKRGRKNLRALLFRVCMILVAKNSAFKALHAYYTQRPDNPLKKMQSLIALCNKLIRILFSIGKKQFEFNEDKMLKDIPHLALAEKTEKAA

SEQ ID NO: 231147 - protein, 355 aa, unidentified
MKTIGVDLHKHQMTLVVLDEQGAVIRREQLPTKCRNKVREWFASYGTDCQVAVESVGFYQWFWDLLQPVVGKLVLADPAGLKPLRPAKQAKTDRKDAELLSRLLFESRLPTAYVPPRSLRALRELVRHRHSVARALALQRRCLRWVMLKLNLPGPKNLTSDATQKWLLSQEGKFSPAQTFIARQRLDQIVALERQLTDTQRLIDEAVAADPWLQQRAQLLESIPGIGRLVAITILVETGELTRFDTTDQLGAYAGLTPRVSQSADTVHHGHISKMGPPILRWVLQQAAWVAVRVDAQARRLWLRISRKAGEKRAIVAVARKLLIYAWSVCRRNEPFHWPDQPVPALAAGPVDYCI

SEQ ID NO: 231148 - protein, 348 aa, unidentified
MEQITTIGLDLAKNVFQVHGVDAAGKVVVRKALRRAELLRFFERLPPCLVGMEACGTAHHWARELTKLGHTVRLMPPAYVKAYVKRGKTDAADAEAIAEAVTRPTMRFVAVKTTEQQAVLMLHKVRDLLVRQRTMLINALRGHLAEFGIIAARGPGGVSAAIAALHEEQDHLPELARQVLHGLVEQMRLIGLEIARAEQRIMAWHRASEASQRLATIPGIGPITASAIAASVPDAALFRSGRQFAAWLGLTPRPHSSGGKQRLGGISKQGDSYIRRLLVIGATAVIRCARQDNASKSWAAKLLQRKPARVVSVALANKTARIAWAILARKQSYTAAAGTAAAGTAAAL

SEQ ID NO: 231149 - protein, 361 aa, unidentified
MLTITIGVDLAKSVFAICELDEYGRVRLRKELRRDAFSAWLAQLPAGTVVAMEACSGAHHWGRRCLAFGLQPKLIAAQFVKPFRKSQKTKNDRNDAEAIATAARQGNMRFVPIKTIDQQTRLSWHRAREGYKTEALAIGNRMRGLLAEFGVVVAKSDAALRTLLADLSAHALPEPLVEMLGDLNTHWQMVRERVTAYGKRIEQHARTDVRCKRASAITGVGALTTDALVAMVGSAQEFRNGRQMAAWIGITPSQHSSGSRKLLGKISCRGDGYLRTLLIQGARSSLQRAKAVTREKATPEQIWIMSLAARLPFGKVLVAIANKHARQLWAILARGEDYDPNAWIKHPMVQRAASKRAANAI

SEQ ID NO: 231150 - protein, 356 aa, unidentified
MQPQFTKSDYSGQNIYTGIDVHLKSWNITVMMDSVYQRTFSQPPSPLALFKHLNTNYPGATYFSAYEAGFSGFWAHYQLLKLGINSMVVNAADVPTTGKEKIQKDDSRDSRKIARCLKNGELIPIYVPSLVTLGNRTLVRHRQTVSKDLARVKCRIKSFLNFTGIEIPEEFKGNTWSRKFVQWLKDLEFSSSCRLSLNGHLSIFHNLHQEKANIKRQIKLLAESPSYKEDVELLLSIPGIGLITAMIILTELENMERFKSFDKLCSFIGLVPSTRSSGEKERVGDITPRGHKILRTAIMESSWKAVAGDPALGLCYNKLCKRMKPQKAIIRIAKKLMSRIRHVLKTRNRYELGVIG

SEQ ID NO: 231151 - protein, 374 aa, unidentified
MNYSTVYVGMDVHKESFSLCCYTNEKETAEYHQKVEAHYSKILNYLEAMRFHYGDDALFICGYEAGCLGFTLYHQLTDHKVKCIILAPTTMSKPAGRKKVKTDKRDAALIARCLAHHDYSPVHIPTEKDEQVKEYIRMRQDHKLALKKIKQQILSFCLRHGYRYNETKSHWTQAHLKWLRSLEADGLYREILSEYLTTYDQLTDKLERLDKRIEEFAAEPTYQKDVQHLSCFLGIQTQTALSTIVEVGDFKRFGSASKFASYLGLTPGEDSSGEDEKRLGITKAGNRHVRTLLIEAAQSYTRGRAGSKSKVLKARQYGNPPEVIAYADQANERLRKKYYRMILKEGKKTNVAKTAVARELACFIWGMMTGNIQK

SEQ ID NO: 231152 - protein, 482 aa, unidentified
MKSNSREKARKVTNHRTPNHWKEMNRKQRRELTRKMQSEDLSLEVVHPDAAGIDIGNESHYVAVPPTRDNQAVRRFGCTTVELKAMADWLKQCRIRTVAMQSTGVYWIAVYDILEAAGLEVYLVNARDTKNLPGRKSDVQESQWLMKLHTYGLLHNSFRPSQEIRTMRTYWRQRNDLVQAAGRYIQRIQKMLTQMNVQLANVLSDVSGVTGQAIIKAILAGERNPHQLAELRDRRVRASKAEIASYLEGHWQEDLLFVLKQEQQGYEFCQQQIAECDRQLQQYLQQREDRSQGTSLPEETRKGRLQKKKKGKPQFDLRTELFRISGTDLTRIDGLDVLTATTILSEAGWDMSKWEDEDHFVSWLRLCPDNRISGDKIIGKGRLPTNNRASTALKMAASTLRASNSYLGAQFRRLRTKLGAPIAIKAMAAKLARLVYRMLRYGMQFVDRGAEFYETQHRKLQIDHLKWKAAKLGFRVVEVAAA

SEQ ID NO: 231153 - protein, 340 aa, unidentified
MGMYAGLDVGGKTTAICVVNEAGKIVWQGMVDTHADRIAARLKGFQDKLVKVGIESGSFTPHLHRALSAMGFAMVCMDARRAADAIKSRRIKSDKADAWALAEMLRTGWFSEVRVKSAESHKIKTLLGARDQLVRVKRSLGNQVRGLLRPFGLKLPSRAGTKRFACAAYQAVQNDRLMHAGISALLEALASIEAQLGKLDEELKDLARRSEVAWRLMSVPSIGTITALAYIAAIEDPRRFGRTRDIGAYLGLTERRYQSADTDIGMGISKQGDAMARHYLYEAANVLLTSVKKRSALRSWGLKLLKTVGPKRARMAVARKLAVLLGRIWKDGTHFEAMAA

SEQ ID NO: 231154 - protein, 400 aa, unidentified
MFVGWDWASKTHDVTVLHPDGSVAERWALCHDEADLTATLARLAGHGEPADLPVAIEASTGLIVERLAAAGHPVVPIHPNAFHAARPRWGASKAKSDPGDSYKLADYLRTDGHRLVRLKPIDEATRNLQLLTRSRGDHVDAKVAATNQLDALLAVHWPGAGAVFARLDSDIALDFLDRYPTPTSTAHLGEARMAAFCRRHGYCGRRPPAELLARLRAAPATTGMLGGDTLTDVIRAQVRLLRSLLASIDELDHAIVAALPSHPKTALLASLPRIGQIHLAQILAEVGPILDRATTFAQACAEVGVTPVTKQSGNHEAVHFRWAVNTRSRDAFTRWADNSRHANDWAAQRYRDARRRGHRHPTATRILARSWLRVIWACWQANTAYQPDRHTRAVHAQTAA

SEQ ID NO: 231155 - protein, 387 aa, unidentified
MKKSNPRSVGLDVHPDSLAGAILAGRDPASAQVLSTSTRVELSDLEKWAGRHTRAEDVLVLEASGNAFAVAGRLRTLGRQVAILDSHQAGKIGKVYCANDRVDAIKIARIYLSGLSAVVWQPDEKTAERREVFSAYQGVVKENTRLQQQIKSMLNEHCVRLPKGFRLSHPSALTRLSKMKAWTPVQLMLLEQLHGGLVAARVRRQSLRRHMAGEILGEEKLLRLARLCGLSLVTIYGLEAAIGDIARFAQSKKLVAYLGLNPSVSQSGDYEGATALKRHGRGALRALLIQSAKKLLQVKNPLQKWGLAVAARRGRNKAAVAVARKLCVAIWHVLSGHAIGALEPLPRLRTKLGKLATELGVSPIKALGYKNKDAFIEQKLYLLKSYP

SEQ ID NO: 231156 - protein, 375 aa, unidentified
MKVQRTSVGLDVHARSVVACALDGDTGEVFQRRLTPDHGEIVAWLGDLPGPVAVTYEAGPTGFGLARAARAAGLEVMVCAPGAIPRRPGDRIKTDVRDAVKLARLHAAGRVRAVTVAGVRLEALRDLVRGREDLRGDLMAARHRISKLLLPRGLIYGGPGHPWESKHHAAWPSAIDVGDRLARVVLGEYLARHEVLLARRARLDALIAEQAHDRRWAALVGRLRRMRGIDTLTAVGPIAEIGDFTAFAHPKQPASFVGLVATESASGEKRNHGSITKAGSGHARRLLIEAARHYRRRRRGVADPAPPPGRPATRRDPGRVARATAAVRALGAPRRPPRQAPHHRRGRRRPRAGVPCLGDRPPARPTATTSRSIRR

SEQ ID NO: 231157 - protein, 311 aa, unidentified
MYYIGIDVSKKDLSVFDGKDLKFANKEGLKSFKKYLKKKYNLSEIAIIFEPTGIYSLYLKEFCAENSIKAYIINPKKSHNFTRALGKRSKTDKIDARILYQFHKHIDLKDIQVPQIDQQAKTLASYLVSYEFALKQRISLSNHLESLRDKGLIALMKKDLKRAKMLEDKLFHDIKEYVSKNQDLREAYQRLLTISGVGEKTAIALLTLFKTYQGTNRAQITALAGLDPVRRESGTSVKDKAKISKNGKGIYRKIFYLPTVCATVHNQKIRVFYQRLLAHHKTKKLAVIASMRKILLIAHAMYRDKTEYIAV

SEQ ID NO: 231158 - protein, 412 aa, unidentified
MQDILTCAMGLDIHRDVIVACLAKGELGTDPEIEIRSFSTLIPEMRKLRDWVLEAECRYVAMESTGIYWQPIYEMLEPCFDGQISILVVNARHMKNVPGRKTDMRDAQWIATLLRAGLLKGSFIPDKTFRELRHLTRYRKSIVRDITAQKNRIDKFLQSSGFRFTAFLSDAFGASGRNIIRHLMEYGNISREALDRCLKTQTRKRIDEILIALNGSLSEHQRGFLRMIFGHLETLEQHRHTVEDAITKEITKHEEALSLLCSIPGIDVTAAAAIIAEIGTDMSAFPDSQHICSWAGLSPGNNESAGKRKSAHINKGNPYLKSMLCEVGWVISGKRSLYLSGWYWRIKQRKGAKRATIALARKLLALIYTMLKTGSPYNEDCFEIRRKQSERKRASRMVNELQKLGYFVVAPG

SEQ ID NO: 231159 - protein, 348 aa, unidentified
MRFYTQQHRYYCGIDLHARSMYVCILDAAGTIVVHKDLGAEPESFLRVIAPYRDDVVVAVECIFTWYWLADLCAREGIRFVLGHALYMKAIHGGKAKNDKIDSHKIAVLLRGGMLPTAYVYPAAMRATRDLLRRRCHLVRQRGELLAHIQNTTSQYNLPALGKKIAYKANRVGVAEHFPDPAVRASIALDLALIDHYDALLTAVELSIVRTAKQHDAQAFYRLRSVPGIGKILALVILYEVHDITRFPRVQDFASYCRLVKCAKESAGKRLGSSGKKIGNAHLKWAFSEAAVLFLRQNLTGQRYFARLERKHGKGKALTVLAHKLARAVYHMLTRAQAFDLERFVTAH

SEQ ID NO: 231160 - protein, 342 aa, unidentified
MAIVAGFDVHRAQITFDALDTATGEVMRGRIDATPVAVARWAERFAGQRIDVAVEACTGWLFVCDALAAAGAVPHLAEPVETRALRGRKRRAKTDREDARWLRELLADGRLPEAWIPPEHVRQWRSRARLRHTLLNERTQWFQRIRATLFHHGIDGTPENLRTGHGRAFLQRLELPADARERIEIALAMIDAIDAQMAPLERELRQLARRQTGCRALMALYGMGELTSLVTLCELGDVGRLSASRKAVRMAGIDIGVHRSDRRSRVGKLNRQGSPHLRWALYEAALAACRPSSPDHADYLALKARGLSHTRASLTIARKLARRSFHVLHELGPAALEPIPTS

SEQ ID NO: 231161 - protein, 349 aa, unidentified
MSQNLNSAVAVIGIDIGKNSFHVVGLDDRGAIVLRQKWSRGQIEARLANLPPCLIGMEACVGAHHLSRKLKALGHDARLMPAKYVRPYSKGQKNDFRDAEAIAEAVQRPTMKFVATKTAEQLDLQALHRVRERLVSQRTGIINQIRAFLLDRGVAVRQGLRFLRAELPRILATPPEVLSPRMVRVISDLAEDWRRLDERIDGLSNEIAVLARQDAGCERLMSVPGIGPIISSAMVAAIGTGEAFAKGRDFAAWLGLVPKQMSTGDRTILGKISKRGNRYLRVLFVQAAWVVLIKPMSWERHGLKHWIEAARKRLHRNVLAIALANKLARIAWGVLAGSRAFEASKLQAA

SEQ ID NO: 231162 - protein, 338 aa, unidentified
MPVTTVSIDLAKHVFHLYGEDAQGKAVLRKRLSRAALKPFLATLPPCRVGMEACGGAHYWAREFRQLGHEVRLINPKFVKPFVKSNKNDSRDAEAICEAVTRPNMRFVPVKTVAQQDIQALHRVRSRLVGQRTALVNQIRGLLAEYGLILPQQISHVRRGLPTLLEEADNGLTPLARELGREVYAELSHLDERIEHLEGLLQRVFRQQAECQRLAQVEGIGLLTATALVAAVGDPTLFRNGREFAAWLGLVPRQHSSGGKTVLLGISKRGDRYLRTLLIHGARAVVCRADTKSDARSRWVAAVKRRRGLLKACVALANKNARIAWALMAHAEPYRKAA

SEQ ID NO: 231163 - protein, 344 aa, unidentified
MDHFAGLDVSVKETSVCIVDEMGKIVREVKVASEPAALLAVLKNPDYHFKRIGLEAGPLSQWLFSALAEAGLPVICVETRHMRAVLKAQINKTDRNDARGIAQMMRVGLYRPVHVKTLRSQKLRMLLTHRKLLQSKAIAIENDLRGTLRNFGLKVGMVGTVKFEARIKELVENLPDLTVLVEPLLIVRRVLREQIVILHRRLLVIVRDDDVCRRLMTTPGVGPVVALTYRATVDVPARFRKSKSVGAVFGLTCAKYQSGEIDRSGRISRCGDDMMRVMLYEAAQSMMRSKKWSWLKAWAMQIARRRGMKKAIVALARRLAVILHRIWVDGTEFRWTREQAAAAA

SEQ ID NO: 231164 - protein, 324 aa, unidentified
MSTPATSYLGVDVAQATLAVAGASPAQVCNEPAALRAWLTALRSTQPTAHLICEATGRHHHALQIVAAECAVPLSVINPRHARHFARSLGRLEKTDPIDASVLQRLGQSLQPAPTPPPPGGLRQLQDLLVVRQALVEEQTAWANRQALLSVAAAGLCGRHQRTLAKELAAVEAQIQSLLATPLAEPLLLRVQTLCLVCGIGERIAWSLVAGLAELGQTNRRQVAKLAGLAPLNADSGQWRGTRHIAHGRAPVRRALYQAAVVAARHNEHLRPFYLRLRAHGKPAKVAYVAVARKLLVFLNRLSRTPHRSLLESRQLLHQAISPN

SEQ ID NO: 231165 - protein, 317 aa, unidentified
MNPQPIFVGIDISKQYLDLATRPTAQVWRVEHTEAGRQQVVTDLQALQPELIVLEATGGLELPLAAALAAAGLKLAVVNPRQVRNFAKALGILAKTDALDAQVLAHFADAVRPAVQPLSDEATQVLAALLARRRQLVEMLTAEKNRHASALPAVRDQVQRHITWLEHELADLNTDLDQRLRQSPVWVAKQKLLRGVPGVGPVLTLTLLADLPELGSLDRKKIAALVGVAPLNDDSGQSRGRRLIWGGRAEVRNALYMASLSALRFNPIIRTFYQRLRQAGKKFKVAITACMRKLLTILNAIMRTNTPWQEKTTGGAA

SEQ ID NO: 231166 - protein, 355 aa, unidentified
MNDAKYIGMDVHQATISAAVRDSSGNLVMEATLETKAETVLEFVHGLRGSLRVSFEEGTCAAWLHDLLKPHVSEVLVCDARKNALLRVGNKNDREDARKLAELLFLNKLHAVYHGEPGIRTLKELARSYITMTRDLTRVMSRLKAIYRSWAIPCAGKQVYAPRYRAEWLAKIAEAGVRRRAEIYYQQFDVLAALRQEARRELLGEARKHPALRLLRKIPAIGPIRAALLIALMQTPHRFRTKRQLWAYCGLALRTYDSGEYRFVGGQLKRSKKAVTIRGLNKNHNHDLKNIFKGAATRAAATVGPFQNFYEARLASGMKPPMARLTLARKIAAITLLVWKKGVRFDAKQLKQQAA

SEQ ID NO: 231167 - protein, 403 aa, unidentified
MNMNAVGIDVSKGKSMVAIMRPFGETVSPPFEIKHTASDIHSLVELINSVEGESRIVMEHTGRYYEVLAHQLSEANLFVSAINPKLIKDFDNDSLRKVKSDKADAVKIARYALDKWHNLKQYSVMDELRNQLKTMNRQFSFYMKHKTAMKNNLIGILDQTYPGVNAYFDSPARSDGSQKWVDFASTYWHVDCVRKMSLNAFTCHYQNWCKRKKYNFSQSKAEEIYGKAKELVPVLPKDDLTKLIIRQAVDQLNSASTTVESLRTLMNETASKLPEYPIVMDMKGVGKSLGPQLMAEIGDVSRFTHKGAITAFAGVDPGVNESGSYEQKSVPTSKRGSGTLRKTLFQVMDALIKTKPQDDPVYLFMDKKRSQGKPYYVYMTAGANKFLRIYYGRVKEYLSSLPK

SEQ ID NO: 231168 - protein, 359 aa, unidentified
MLHSNKLSNLDFTGQSIYAGIDVHNKSWKVSIYCGDLSLIPMTMPPEPDKLINYLRRNYPGANYHCAYEAGYSGFWIQEEFKKEGVDCIVVNPADVPSRDKEKNFKTDRIDCRKIARCLSKGELEGIYVPFREELENRNLLRLRHLTVKKLTRVKNEIKAMLSYYGIKNPNATYKRSWTKAHRKFLEAVELKNPSGNFSLKLLLEELKFSNETINKITNEIYKLSNQSRYKSDFENLITAPGIGKLSAMIILTELIDIKRFKSLTKLNSFVGLVPSEHSSGEKQIRYKITRRGNPYLKKALIECAWSAIRKDPALLMSFKQYCNRMNSNQAIIKIARKLLNRIRYILINKKPYELGVLG

SEQ ID NO: 231169 - protein, 357 aa, unidentified
MLAELLDAIVGVDTHRDTHQVEIALPNGIPIATCQISNDTAGYAELLAWIIGHAPGPRLAVSIEGTRSYGVGLARAATAAGLLVVGCEQPNRKARRGKGKSDPIDAHLAVLAALRLDADRLPIPRADGDREALRILLGARQELTAISTAQTNRLRALLRDGDDTDLALARGLLNDAVLAAIARRREPRDASRQQSVRHAEIRRLALALRESGRTLRTNRAQLQAISNDLAPGLTDRRGLGPVTAAQAIVSFSHPGRCRSDAAFAALSGTSPLQASSGRTVRHRLNRGGDRALNSTIHTIAMVRMRSCSRTQAYVTRRTAEGKTPREIRRCLKRYIARELYRTLTATMTTTAGTPNAA

SEQ ID NO: 231170 - protein, 358 aa, unidentified
MKAQVKKIDFTGQNIYVGFDAHLKSWKVTIMAEDFVYKTFTQPPKPDILHKYLIEHFPGGTYHSAYEAGFCGYWIHYALTSFGIKSIVVNPADIPTTDKERVNKEDKRDSRKIARSLSSGNLVPIYIPSIKNQRDRSLLRTRAMLVKDSTRYKNRIKSFLCFYGISIDDAFKNPESHWSNRFMEWLESLDMKDKSGKESLSVLISECRNLRASILNVTKQVRLLSQSETYRDKVALLKSVPGIGILTAMIILTELETINRFNNLDKMCGYIGLVPSTKSSGDKEKTGDMTPRGHSVLRTAIIESSWIAKSNDPSLMKSYISYCKRMDQNKAIIKIAKKLLSRIRYVLNNNKPYICSMV

SEQ ID NO: 231171 - protein, 441 aa, unidentified
MSLMKPLKYCGIDVSKSFLVCAAIGDLDPHHNQYLPGQAKDIGIINDEPLVVRTFDNSWTGVITMTHWLSSVGVSVAVMESTGSYWYGAYSALEQKGVQPLLANPTQVKNVSVHKTDYRDSVWLAVLLRAGFIIPSYVPAGLLKELRDLTRMRTRIVKDKTRLKNRCHSILDSMLVKLGLSDVFGKKGRHTLLRALNGDYDGLTEDQRTAFGTMSEAQGMMVIDLMSEVSHLEERVTRYEGAIARVVEKFKEVKGDKTFQLLTTIPGVRVIYAATIMCEIGDIGRFATPEKLSSYAGLAPRVVQSGKKDTTGKTGHMCNRHLRTAMFMVAQTSVRFGPPRLRRFHELKRRKKGDYRKATIALARKLMGVMWRMLKDGIPFDMAYDREQEKRKERRVRGSLKRLKKMENEYGPEMVYSALQEYMKFKKGEVQNDPVTSKLPS

SEQ ID NO: 231172 - protein, 365 aa, unidentified
MGVPTMAQARTFVALDVHVSGTEAAVIDGVSGELRRRRLSGGAAEVAEFVAGLPGPVRVTYEAGPTGFALARRLDAAGVSCVVCAPGLIPRGPSDRVKTDRRDAERLARLLIAGELHAVAVPSVEAESLRDLVRAREDLRGDLMSARHRVSKLLLRHDVRFAGAERNWTQPHVRWLASVRFAQPGTQAAFDDYRGAIEALIIRRTELERLIAEQLPASPWAQTARRLMCLRGIDTLTAAGLCAEIGDFTRFAHPEQLMSYLGVVPSEHSSGTRRRQGSITKSGSQHARRLLVEAAWHYRQPPRVSEPLRRRQAGADPVIVALSWKTQRRLHRVWSRMEQRGKRRTIIAVAAARELAGFCWAVATA

SEQ ID NO: 231173 - protein, 415 aa, unidentified
MAEEIEWFVGIDWASQTHQVCLVDAHGECLGERAVAHGGPGIEELCDWLITRTGATPEVIGVAIEMTQGPIVEALLERGFCVYGINPKQLDRFRDRFTVAGAKDDRRDAHVLGDSLRTDRHAFRRLSNDEPVIVKLREWSRMADDLQQERNRLASRMREQRYYPQMLELADDLAADWFLDLWSRAPTPAMAVRLRETTIERFVKAHRLRRWQASEVLSILKQKPLSVAPGVVEAASDHIRTLTVRIRLVNQQLKAAHRKLDELCAQLIPSEEDEPGQQCEQRDVVILRSMPGLGRIILAVLLAEVWQLLRRRDYHALRSLSGVAPVTRRSGKTRVVVRRYACNKRLANALYHWARLATQHDALSRRRYAALRRRGHSHGRALRTVADRLLSVACTLLEQQTLFDPTYEVRDAASG

SEQ ID NO: 231174 - protein, 452 aa, unidentified
MPAGKDITMHYQKVLKMPESIPYLSVGFDVGADFTWMSIMLPNGILIGKPFKIIHSDPQSRELAISKLKEAQEMYSLESRCFLESTGIYHIPLLCFLRDKGFDCAVINPIITKNSTNMNVRKLHNDKFDSKKAAKVGLDASLKASIVPDDAIIDLRNLVRDYYYFKDLQSAIVLKLHAELKVSFPAYLNVFSKVTTQTSLKLLEAYPLAADMLAAPKDELVETIRSTARFGETYALARYDAICTAAKDAAVFGRALPSNALRIRLYIKMYREYQAHLDSILEELHQAVGKLEGTPDYDRISFIQTLHGVGFLSAVVLIAEMGSFDLFSSPKKLYAYFGLDPGVNDSGKFHGDRVHMSKRGSSLARRILHMVAINNLKVDKATKTPVNPVIYDYYTRKCASKKKSVAVGAVMHKICNIIFAMLRDNKPFELITPEEHRERYAAEHPESVNPAA

SEQ ID NO: 231175 - protein, 412 aa, unidentified
MDVYCGIDWAEDHHDIALVGRDGNLLARRRVSDDAAGLALLLALLADHGDTPEDPVRVAIETPRGLLVACLRATGRQVYPVNPMAVARYRDRHSIAGKKSDHGDAVVLANVLRTDMHAHRPLPADTELAQAIAVLARAQQDAVWDRTTTHNKLRSHLREYYPAFLAAFADARGGILRPEARTILAAAPTPADAAKLTLTQLRALLKRAGRSRGLDTEATRLRDAFRTGQMRQLPLVEQAMGRQTLALLGQLNAACAAAEDLEHAAVESFNLHPDAGIITSFPGLGALTGARVLAEIGDDRSRFQDAKGLKAYAGAAPITRASGKTRSVTRRHIKNNRLNAAGYTWAFSALTASPGARAHYDRRRDDGDRHAAAQRNLFGRLLGCLHHCLTTGQHYDETTAFPATKEKPSQAA

SEQ ID NO: 231176 - protein, 348 aa, unidentified
MLAEVVDAVVGGGTHRDTHALELTAPSGATIATLMIGNDERGFAEAIAWVAEHAPGPRVVVGLEGTRSYGIGLARVLQAAGLTVVEIERPRRGERRRGKSDPIDAHLAALHALRLDADRLPTPRADGDREALRILLGARRELTTAKTRTINRLRALLLTGSDADRALSRGALSSDRLAAITRRRGGQHETREYAVRRAEARRLALAISGIDRELADNKWHLADLVTHLAPQLLAKRGVGPVSAAQAIVSWSHPGRCRNDAAYAALAGASPIPASSGRIVRHRLNRGGDRHLNRTLHDILLTRWRTCPRTRAYIARRRAEGKTDPEIRRCLKRYIARELYRSLNTAMAA

SEQ ID NO: 231177 - protein, 308 aa, unidentified
MPLWIGIDVAKDTLAVHVLPLDQLLSFPNTAQGHQRLCDHLAGQSVGNALLEATGGYERAVMTALATAGIPVTRINPRRARAFATALGTTAKTDPLDAALLARMAQLVQAPAPVPDPLREQLRMLVQRREQLVQQRDDERRRLHQATLAMVRACLIEQIGDLRRRIQRMNQAIKQLRCQLDDALAHALGTVPGIGEVTTASLMAYLPELGTLDRRQIAALVGLAPYNVDSGQHCGKRRIRGGRATIRRVLYMACWSVVRTQASFKERYQQLRARGKPAKVAITACMRVLLIRLNAMARDRTPWREVIG

SEQ ID NO: 231178 - protein, 346 aa, unidentified
MEHYAGIDVSLELSSVCVMDGRGKIVKEAKVASEPEALVCFFKELGVPVNRIGLEAGPLSQWLHAGLSQAGFETVLLETRHVKAALSAMPVKTDRKDAFGLAQLLRMGWFQQVHAKSIGSQEIRALLVARKQLLGRLLDVELSIRGILRGFGLKVGQVTRKTFEARIRELVTGHTTLERIAEAMLSARATLKAQYEKLHKAVLAIVREDAVCRRLITVPGVGPVVAVTFKSAVDDPSRIAKSKAVGALFGLTPRKYQSGEKDVTGGITRTGDEMVRTALYEAANVLLSRITRFSKLKRWGMDVAKRRGSKRAKVALARKIGVIMHRMWVDGTTYRWTEAKLIAAQA

SEQ ID NO: 231179 - protein, 410 aa, unidentified
MDVIYSRCCGLDIHKKTVVACLMTSAEGQLPRKEVRTFRTMTAELLLLADWLQMAGCTHVAMESTGVYWRPVYNLLEGLFTLLVVNAQHIKAVPGRKTDVKDAEWIAELLRHGLLRGSFIPSKPQRQLRELTRHRTTLVQDRARVINRLQAVLEDANIKLAAVVTDIRGVSARAMLEALIAGQRDVEALADLARGRLRTKRDRLAEALQGYFTPHHSFLVTEYLSQIDYFDDAIDRVSTVIAQQLVAEQEAIALSDTIPGVSQRTAEILLAEIGTDMGRFPSAKHLASWAGMCPGHHESAGKRLSGKTRKGSRWLRQVLVEAAHVAAKTKQTYLAAQYRRIAARRGKKRALMALGHTILIIVYYVLARKQPYQDLGTAYFDQLEQHRVQQRLVHRLERMGYQVSLQPSVA

SEQ ID NO: 231180 - protein, 359 aa, unidentified
MRGQRNEISFRGQKIYIGIDVHLKSWSVTVLSETSVLKKFSQHPSPEALHGFLARSYPGAEYHSVYEAGFCGFWIHERLTALGIDNIVVNPGDVPTKSSEKLRKSDAVDSSKLARSLRANELKGIYTPDSASLEMRSLIRLKNSITKDTTRQKNRIKSQLRYLGIGIPQEFLEPFSNWSKRFIAWLKEVETLTPSGRQAFDIQIRHLEELRRQKLEMTRALRTLAKTDRFREPLRLIMTVPGFGQTTGMAFLSEICDIARFRNAEQLAAYIGMIPMCHSSGEKDGTGDITVRRNAVMRCNLIEAAWVAVRQDPAMNLFFTEQCKRMPKSKAIVKVARKLVNRLYFVLKHQTDYVNSVMS

SEQ ID NO: 231181 - protein, 328 aa, unidentified
MTVLLHGKVIMRQQLSRGRFERHMTNLQPCLVGVEACAGAHHIGRRLSAFGHNVRLIPAQYVKPFRKGQKNDYRDAEAIAEAVQRPTMRFVPIKSAEQLDLQALHRIRSRLVGHRTAVINQLRGFLLECGIIVPQGPGTLRKILPSVLAQRTDVLSPRMVRLIEELADDWRRLDDRVDAVTGEVQALARQDEGCRRLMSVPGIGALTASAVVATIGNGAAFTKGRDFGAWLGLVPKQLSTGDRTILGRLSKRGNKYMRTLFIIGARAVLAKPGSWAKFGLEGWLAAAAKRLHHNVLAAALANKLARIAWSVLYHGRSFARDFEPQSVS

SEQ ID NO: 231182 - protein, 337 aa, unidentified
MKRYLGVDLHRTQFVVCTRWENGEQEIRQWRIGELARFVEQLQPEDQIAVEAMGTTARFYDAVAGRVERVVVVNPHQFKVISESVKKTDRKDAAALALYLEKDLLPEVRMKPKQNRELMHLAETRDLLVKQRSALKGKINNLLAMQGIELKREALSSKIALARVLALPVSGMVQLELRILVEQIRALSESIAELDERLEEEGQQLPGYENLTSIKGIGSLSATVLLTVIGKISDFADENKLASYLGLVPKIANSNESERSGRITKQGNKLARTALVQCGLSAKRYSPYLQGFYERIKQRRGGGKAKIALARKLVKIVYDTLKNQWVFEDFPSFTLAA

SEQ ID NO: 231183 - protein, 319 aa, unidentified
METAPVTFCVAMDVAKETLIIGGSTPDAVRVRRVANAPAGFRELLKALPPRAHTAVVLEATGGYERNVIAELLEAGYRVALVNPRQVRDFAKGWGILAKTDRIDARVIALFAQHVQPRMLREMPEQQRELADLVTRRRQLLDLRTRESNRWAQTSAKAARKSIQQVLNLLDGQIHKLDKAIAELIDSDDDWKAKSELLQSTPGLGRVTAATLLAELPELGELNRQQIAALVGLAPFNDDSGQHQGQRHITGGRAAVRCVLSMATLVATKHNPTLKAFAQRLQKSGKKFKVVQTACMRKLLVILNTMLKNKTSWNPAFDA

SEQ ID NO: 231184 - protein, 375 aa, unidentified
MNAKVRFLGLDVHAETIAVAVAEADGEVRSLGTIPNRAESIRKLVKKLGPVEHLRACYEAGPTGYVLYWQLTELGVACEVIAPTLVPVKAGDRVKTDRRDAEKLARSYRSRDLTAVWVPDEGSEALRDLVRAREAAKQDQLRARHRLGKFLLRVGQRPAPGVKAGTQAYLAWVRQMRFSQIAREATKLDYLHEVEHMAERVARLEQAIVEAIEQASPQIQEVVKDLQALRGIAQISAVTIAAELGNISRFEGARQLMGYSGTVPSEDSTGKRKKQGRITKTGNSHLRRIVVEAAWSYRHLPRVGPTLGKRQQGVAEEIKEIAWKAQHRLHKRYSRLAAAGKDRRKIVTAVGRELLGFIWAIGIKAEAAANQRMAA

SEQ ID NO: 231185 - protein, 356 aa, unidentified
MKNTIKYVGLDVHPSTVSVAVLDAEGKLILQSILATHAAAILDFVHGVRGSLQVTFEEGTQSAWLYDLLVRHVAKVVVCNPRKNALLKAGNKSDQIDARKLAELLRAGLLSAVYHGENSYRILQELVRSYTTLTEDTTRIMARLKALYRSHAVVCGGKKPYGKRHRQEWLQQVRQPGLASRAQRLYDQLDAVQTLRRAAKHEMLAESQKSGAYRLLASIPYLGPVRASILMARAQVPNRFRSKRQFWAYCGLALETRSSAEYHVVQGQVQRSRKPVFIRGLNLNHNHDLKNVFQGAATAASIHDGPLRQFYDRLLAKGMKPELARVTLARKIAAMALILWKKGESFDPKYLMLPAA

SEQ ID NO: 231186 - protein, 337 aa, unidentified
MEQQREYVGIDLHRRRSVIVRMAEDGQVLGVDQVVNDPVELSMAVAKAGPDPEVALESTYGWYWAVDLLQANGAHVHLVHPLGLHWDSRRVKNDVRDSTELANRLRRGDLPESHIAPPEQRELRELVRYRAKLTALRTSAKAQVHAVMAKEGILPTLDDMFGPGGRILLEQMPFEGAYALRVSSLLKLLDHYAGELIVVEAELTARLADHRGYTAIQAIKGVGPIMAAIFVAEIGDVSRFPTARHLCSWAGLTPSHRESDTKVQRGHITKQGNHLVRWAAIEAVARYKGGDPISPTYTRVARRRGRMIGRVAAARKLLTLVYYGLRDGEIRCLAETA

SEQ ID NO: 231187 - protein, 340 aa, unidentified
MQSEKKCYLGIDVSKLWFDISMICVIDHQKEQMITDRFDNSSEGLMLFGKWLKKHGVPSDENTLVVIENTGVYHRLIWEYCSHHNLNLHIGNAAQIKWSLGITRGKDDITDSQRLCNYCYRHKDELKATPALDPVFIELKDLMTARTRLIVQIKSIEVYLKELKLSNSKEVQKIMEQAHKAALSGLGKSLLQIEEEIKKKLRENAAIKNNYELLLSVPGIGHVTAVYIICCTNNFASKINGKQLACYAGVVPFGNTSGTSIRGKNKVHKMANKELKKLLHLCALSAVKNYPEFKVYFERKKIEGKHPMSILNAVRNKIVLRAVAVVKNQKKYVDNYKKAA

SEQ ID NO: 231188 - protein, 406 aa, unidentified
MDVVYSHVCGLDVHKKSVVACVITPDGKEIRSFSTMTDDLFALKEFIKNKGCTVVAMKSTGSFWKPIYNLLELENLKILLVNAKHIKNVPGRKTDVKDAEWIASLLRHGLLKGSFVPDREQRELRELVRYRHGLVEERSRELNRIQKVLEGANIKLSSVVSDINGMSSRAILEALISGVDDPEILAELSHGKLKNKKEDLKRALKGFINYHQRKMLEIKLKHIDYLDEEIERLDEEIKNRMLPFEEDLALLDTIPGVGRRTAEQIIAEIGTNMDQFPSAAHLCSWAGLCPGQNESAGKRKSARTRKGNKKLRSALVEAARAASRAKDTYLSSQYHRIAARRGSNRAAVAVANSILTIVYHILKRKQPYIELGPNFYEEKRRNMVIRQSLKKLESLGLKVTVETIVS

SEQ ID NO: 231189 - protein, 343 aa, unidentified
MEKKKEIIRQSVGIDISMDTFDVCIIQMQEDFDTCVVSTKKFSNTQTGFEQFYKWVSKFKTKDMPIAHTMEATGVYYESLAYFLKSKSETVHVVLPNKSKKFAESLGLRSKTDKIDAKMLARMGVERKLLQWNPCSVFFRDLRFLTRERLSLIQDRTRAKNQLHALQHSNKPQKKTIERLTTKIAFYDEQIEEVEQDIKQLIESDKILSEKTKRVLTIPGVRLTTLAPIIAETNGFAAIQNIKQLTSYAGYDIRIRESGKWKGHNKISKKGNSYIRASLFFPACTAAEHNKPLKQSYKRIKEKKKIPMVANTAVQRKLLALIYTLWENDTEFDENYQVKNKIA

SEQ ID NO: 231190 - protein, 422 aa, unidentified
MKKRIYRRMPVNDFQPETISHAALGGKLVFAIDVAKVDMVAAIAAADGRVLQTICWKAPDQNLAVLSILRSFRAAGITVEAVMEPSGTYGDVLCHQLEKDGFPVFMVSGKRTYDAKEIFDGVPSLHDAKAAAIIARLHADGLSTRLAVEVPERRQLKAALAILDLYQERYLQLVHRLESWLARHWPELPTLLELTSSSLMALLARIGGPADVAAHPAEATKLLRGISHRLIADDDVAAIVASANSSVGVPLVGLERDALMAIAEDAYRAHRAFATAKTKVAQLADTTPAATLVPVVGHTTAAAVFAEVGDARSFHCTRAFLKAMGLNLKEKSSGTVHGQIKITKRGPSRVRQLLWLAIFRWIQKDPIANAWYQRKKQRDGGRASRAAVALMRKLAKGLYHVGRGGTFDSSKLFDTRRLQVAT

SEQ ID NO: 231191 - protein, 424 aa, unidentified
MKVTFQTCCGVDVHKSFLVATIIKTSSGIEPSYQKRRFSTFNNSILEFKKWLLENECLYVCMESTGKYWIPVFNLLEDEINVTIANPKWVKAVKGNKDDTKDSKWIGDLFRLGLVRGSYIPCKKIRILREFTRYRYKLVSCRSSEKNRYQNALTVCNVALDSVVSDIFGKSSTSIIDYLLGQSGTSIDHEVIASKLLKRLKAKEDAVIESVEGYQMTDAQKYRMHLVRAHMDYITAAINDVDSEIESLISSDPDYENAVELLCTIPGVKYDSAITIISEIGIDMSQFCSSKRLCCWAGLTPGSNESAGKKKSVRITRAGVYLKPALVQCAHAAVKSDKSPYYKKKYESLVKRRGKKRAIIAIARMILTAIFQMLTTGETWNPCDLYKIDMPEALLEKQKQKAIKQAQKLLIREGLLPPTEPIAS

SEQ ID NO: 231192 - protein, 444 aa, unidentified
MNVSVQTLAEKREFIKGKIIIGIDPAKDKHQVRILDAERIPLGRTFSFQNDYNGFTTLLWRKLDQHLGQEVDYREEVVFAVESACDLWQPLVHYLYSNGYLVVRVSPLATYHARVLIGNDFSKTDPKDAQVIATNAANGNFTMHIEHDESIRSMRTLSITSDKLRKDMVKYKNRIISFIKRYFPEFIKVLNPETLTARYLLKRYFLPQHFLTLDVELEAEAIRRISKSQHGKETLMLLQHMAEKTIGVSCTDETEEKSLHLTLSCWLNQLDLIEEQTKQIDRELIQLAKQYPAYYSVRSLKGVSDKMAALFIAETRALKNVTHYKQIQKMAGTNLRLNTSGRYRGRNRISHLGNSRLRWILFIMAKETAKYVPEVRSKYLKRQLKKRNYLKNTIACTSKVLQLIMSLTREERLYKPHLNPELEITCQCLNEEYENLKRGRLIAA

SEQ ID NO: 231193 - protein, 342 aa, unidentified
METKRYIGIDLHRNCFTACVRLENGRNYLSEWKLEELPRFIKKLRASDEIAVEMTGNTRFFHQAVAPHVARVVAVDPNQFKVISQSVKKTDPHDARNLALYLAKDLLPEVRMKEKAEAQIASLTQTRDTLVKLRTALKNKVNNILAAHGISLAKEALSSEKALAGVLEMRFDEMVELELQVIVEQIRALNQSIGKLEQTIRDRGQKLKGHSNLTSIKGIGNLGASILLSVIGDIDDFADEGKLAAYFGIVPRVQNSNETERSGRITKRGTKLGRTTLVQCALIAKRYSPYLARYYDKIKSRRGAGKAIIALARKFLGIIYRTLKNNWVFEDFPNFVLAESAR

SEQ ID NO: 231194 - protein, 334 aa, unidentified
MENIALIGIDLGKNSFHIHCQDHRGKAVYRKKFTRPKLIEFLATCPATTIAMEACGGSHFMARKLAELGHFPKLISPQFVRPFVKSNKNDFVDAEAICEAASRPSMRFVQPRTESQQAMRALHRVRESLVQDKVKTTNQMHAFLLEFGISVPRGAAVISRLSTLLEDSSLPLYLSQLLLKLQQHYHYLVEQIKDLESQLKRKLDEDEVGQRLLSIPCVGTLTASTISTEIGDGKQYASSRDFAAATGLVPRQYSTGGRTTLLGISKRGNKKIRTLLVQCARVFIQKLEHQSGKLADWVRELLCRKSNFVVTCALANKLARIARALTARQQTYEA

SEQ ID NO: 231195 - protein, 352 aa, unidentified
MRYIAFDSHKRYTFASVEEAESGKRTDVRIEHTRGAIREFLKPYEPQTPVAVETIGNWYWIVDEIEAAGMLPQLVHARRAKMMLASSKKTDKLDAYGMNRLQRTGTLPTVWIPDGVLRDTRELFRTRMVLARQSTRLKNRILATLAKYAISIEEAQDVFCQRGRRALERFLPLLPEHTRFTVEQLLDEVDRVQEKLQRLENRILETVKECPKVRLLKTITGIGKILSVVIAHEIGDVSRFPSSGHLAAYSGTTPRVHTSGGKVRYGRIPNDVNQYLKWAFIEAANCIVLVRRRLGYRHIPELYDRIRARKGHSVAVVAVARHLAEATFHVLSRSEPYREPTCRKKSVSSMNG

SEQ ID NO: 231196 - protein, 420 aa, unidentified
MEQHEHYAALIGIDWSDRKHDVCLVDAATGSRELSVISHTPEALNEWARALRARFSGEKVAICLEQSRGSLIYALLKYDFLVLYPINPQTLSKFREAFTPSRAKDDPSDAEYMVELLIHHRERLRAWTPDDERTRTLQLLVEHRRRLVGDQTRISNRLTALLKGYFPQVLQWFPDIRTKMVCDFLLRWSSLDALAGVRRATLLKFFREHNSQRTETVEKRLAAIKAAVPLTTDKAVINSSVVMVRALVSQMKATLAAVKEFDAQIEELCQTHEDFELFACLPGAGKVYASRLLTAMGSNRERWATASELLRFSGVAPVIERSGKSSWTRWRYFCPKFIRQAFVEYAGESIRHSEWAKAFYASQKAKGKSHQAAVRALAYKWIRIIWKCWQTREKYDEARYVECLRKKGSKLFGDLASAEA

SEQ ID NO: 231197 - protein, 327 aa, unidentified
MCVVDAKGKIIREGKVASEPDALISWFRSLGYELSRIGLEAGPLSQWLFAAMRQAGLAVELLETRHVRKAFEAMPVTSDRNDARGIAQLMRLGWFRPVHCKSIDAQEVRAMLTARKLVQSKLRDVENSLRGILRGFGLKVGKTTEREFAGRIEELVAGQPHLEVIAQALLAVRAVLRKEFAAFEKQTRKMARTDARTRLLMSTPSVGPIVALTYASAIDDPGRFKSSKQAGAHFGLTPKKYQSGETDYTGRISKIGDSSVRTALYEAAHIMLTKPLKGCSQLKSWAMRIARRAGMSKAKVALARRLAVIMHRMLADGTPFNAAAAAA

SEQ ID NO: 231198 - protein, 457 aa, unidentified
MARKRKNGTKSPPEPLVIHPDAAGIDIGATEIFVAVPADRDENPVRRFPTFTQDLNALADWLQRCRIKTVAMEPTGVYWIPLFQILETRGIEVCLVNAHHAKNVPGRRTDVSDCQWLQYLHSVGLLRASFRPAQEICAVRTLLRHREGLVQMASGHIQHMEKALDQMNLQIHHVLSDITGVTGLTIIEAILGGERDPQVLAKLRDWRVRASEEIVAKSLVGDYRHEHLFTLRQSVAAYRQCQQLIAECDQEIHRELETLPSKTDVSQAPLPPAKSAPKKRKFGEPDYDLRAQHYRILGVDLTQVPGMSSLIIHTVLTEVGPDFSKFRSASAFASWLGLCPDNDISGGKVLWVGTRKVNNRAAKAFRLAAYTLHHSHSALGSHYRRMRAKLGSPQAITATAHKLARITYHLITTGQTYDESVFARDETRYKKRAEVRLRAQARALGFQLVPVETRLVP

SEQ ID NO: 231199 - protein, 488 aa, unidentified
MKSQPSKRARKDKKQGKEASNNPTLVKWNEMNRKQRREMMRKVQSEDLSLQVVHPHAAGIDIGNESHYVAVPPSRDPQPVRCFGCTTAELKTMAQWLTQCGIRTVAMQSTGVYWIAVYDILEEAGMEVYLVNARETKNLPGRKTDVQESQWLMKLHTYGLLRNSFRPSREIRTLRTYWRQRHDLVRSTGRHIQRMQKALTRMNIQLANVISDISGVTGQTILKAILDGQRDPRELAAYRDCRVEASEEEIVQALEGNWQEDQLFVLRQEQAGYEFCQKQITECDQQLAQYLARLEDRTQGATLPEETRKGRRKKKKGNPQFNLREELFRMTGTDLTQIDGIDVMTAMTMVSEVGWDMSKWKTENHFVSWLKLSPDNKISGGKIIGKARMPTNNRATTVLRMAATTLRESDSYLGAQFRRFRTRLGPPVATKAMAAKLARLIYRMLRYGMKYVNQGAEFYEAQHRKQQVIHLKRKAAQLGLQVIEVAAA

SEQ ID NO: 231200 - protein, 348 aa, unidentified
MQISVLGIDLGKNSCSVVGLDEAGRIVLRRRLSRARVIELSSQLPACVMAMEACCGAHHLGRILAAHGHRVRLMSPEYVQPYVKAQKNDERDAEAIAEAATRPTMRFVDLKSEEQLDMQSLHRARSRLVGERTALINQLRAVLLERGIIVAQGRRRLAQYLSQALDGDEAVPLQLSSRIRLLIEDMRAQWRELDRRVAEFDGEFVAAARSEAAARRLSTIPGIGAINATALVAAVGDARSFARARDLAAWLGLVPRQATTGGRPRLLGITKRGNKYLRTLLIHGARAALPSLLTVESPLGNWLRGLSARAHRNTVIVALASKLARIAWAVLRSSTSYNAAIGRSLIAA

SEQ ID NO: 231201 - protein, 348 aa, unidentified
MEFYAGLDVSLESTRVCVVNGEGKVVREGKLPSDPDAIELFLAEWGVHLKRVGLEAFSFSAWLYAALDEKGLPIVCIETRHTKAALNAMLNKTDKNDARGIAQLMRTGWFRPVHVKSREAQALRVLLAGRKALLGKVIDMENMIRGVIRPFGLKVGAVSIGKFEARVRELVAGLAELEQIIAPLLAARAAMRLQFARMHRMALAAARNDTAVRRMMTVPGVGAIVALTFRATVDDPSRFKKSVTVGAHFGLTPRRYQSGETDWSGRISKCGDEMTRAMLYEAAIAILTRIPKNFKLRLWGLKLLKKKGLKKAATAVARALAVLLHKIWVDGSTFRYGVGLKGGRIARA

SEQ ID NO: 231202 - protein, 408 aa, unidentified
MDAYYIGIDWADAAHAACVVDAAGEVVWTGAIVHTAAGLAAWRERLEGWRVPGREIAVAIERPDGLLVEQMLAQGVPVYPVNPKALDRARDRFRVSGAKSDPFDAAVLAQWLRTDHAQWVPLQPQSAPAQELRWLTEDHQRLVRERTRLVNQVTATLKAYYPRALELWPDLTTASARGFLRAYPTPDALTAGTRAQWERFTRRQRLASRTRSELWARLRVPQIPVPPHLVRAKASLLGALLDQLDAVIRHLADYQRRIEDFFGSLPAAAWARTLPASQSGTTVATLWAQMGDAPGRWASWHHLQAHAGTVPITRTSGQQHSVRFRRACDHLFRAAMDRYAFLSMRQSEWARAYYRQQRARGHRHHRALRALAAKWLKILFVLWQRQEGYDETRHLAMIARQHLRAAAA

SEQ ID NO: 231203 - protein, 327 aa, unidentified
MRQVSQVGVDVDSEKLVCMMQRVGQRMPLTTFANTAAGHKKFIRWATKRARPARVCLEATGIYSLQFALALHDAKNVEVMVVNPRAIKDFARACMQRAKTDAVDAGGILEYLERMPFTAWQPPAPEILRIVQLQTELTREKNRGHASEFAGASGDAVANDIEVNIRHLERRIERMHDSGLQLVHGVPALATKLAHLVSAKGIGEASAMRLLAEVLVLPVDLAAPQWVAHAGLDPRPYESGTSIHRPRRITKVGNRHLRAALYMPALVAIQHEPNVKAFYNKLVAAGKKPMQAVVAVMRKLLHAIWGMLKHDQDFDGNKFFRLAEKTA

SEQ ID NO: 231204 - protein, 363 aa, unidentified
MEETKRRYVGIDLGKRAYTLAIINRNGTMSMHQGKTSEQGRQALYHLLEKSDKVALEAGNLAFIMAREIMERVGCEVRVLNAAKLPFIWDAPTKTDKEDAMKLAHLVEERRDEKLPIVPLPTEQELDKRKTLASYAREMRNRTRHINTLHALFVHQGHTTIVRKDLATAAKRQEAVKLLMGFEREEAVWILQYLELHEQRIKELKDKIQQEAKNDVSMQNLQSIPGVGPVVAYAFTAHIGDGSRFSTGAQVSNFIGFVPRLDYSGTIQRNGAITKQGNGYVRGLLVQAAWTAVRSKTGGALQERYKYKTAGQGTSKKKTIVAIGRRLAEIMYAILRNKTTYEVRQWNGIQDKMTMMVEHALRG

SEQ ID NO: 231205 - protein, 356 aa, unidentified
MSRDLKYIGMDVHKEAVVIAVLNSSGKLVMESIVETKASSILQFIHGLRGELHVTWEEGTWAAWLYDLLQPQVKRVLVCDPRRNALLKEGNKSDKIDARKLADLLRTGMVRPVYHGEHGLRTLRELGRSYQTISQDLNRVMNRIKALYRGWRIPCAGTQVYAPRYREQWLQKIEHVGVRRRAELLYQQLDGLQALRRTLRPELLAESRKHKAAKLLRQIPCIGPIRAARLIALMQTPHRFRSKRQLWTYSGLGIETRDSAQYCYVHGQLQRTKKPQQIRGLNRNHNHEMKAIFKGAATRASCGVGPLRDFYVALVAKGMKPEMARLTLARKIAAIALTLWKKEERFDAEQLKPQAA

SEQ ID NO: 231206 - protein, 352 aa, unidentified
MMKPSKAQPIKFVGIDLAKRSFHLYAADEAGRAVLSNKLTRARLPGFVAQLPACTIAMEACGSAHYWARRFREYGHEVRLIAPQFVKPFVKSNKNDAADAEAICEALQRPNMRFVAIKSVEQQDIQAIHRMRSLTVGQRTALINQTRGLLLEYGIEIAQGRAALQRRLPEILEEAKNGLSGRFRAELHGLFEELQHLNARVAHYDAQIDQMAQESQQAQALMQLPGIGAKSATALLAAVGEDPKLLKNGRGLAAWLGLVPRQHSTGGKDQLLGISKRGDVYLRQLLIHGARSVLRVAERKDDPLSRWATALKTRRHSNVAAVALANRLARIAYAILTTHAPYDPEKLASTAV

SEQ ID NO: 231207 - protein, 359 aa, unidentified
MSDICIIGLDTAKHVFQVHAVGKEKTILRRRLPRDRVLPFFASFAPCTVGLEACGAAHHWAREIAKFGHDVRLMPPSYVKPYVKRNKNDAADAEACCEAVGRPSMRFVPVKTEDQQAALVRHKVRDVLVRQRTQWVNALRGHLAEFGVTVRKGLSRVAGLVAVIEDEADHRVPTVARAALRIIIDVLAGIDRKIEDLDREVATSAKADLVAKRLMTVPGVGPIIASRIAASFPNPGVFRSGRDFAASLGLVPRQNSTGGKSLLGGISKQGSGTLRRLLVGGAMAALFRSKEWRSDPWLVALRERKPTKVVAVALANKMARAIWAIMTHGGVWRSRPVDGTAVLALVKPEPPMAAAYGRA

SEQ ID NO: 231208 - protein, 318 aa, unidentified
MEFILHNCCGLDVHKDTVVACILKTGNFSVNNNNTEVEKRIRKFNTFPDELMQLKHWLEQEGCRHVAIESTGVYWIPVYEVLETAFDGEIEIVVTNARHMRNVPGKKSDVKDSEWIAELLGCGLLRSSFIPPQNVRELREVTRYRKNIVHDIGMQKNRIEKTLQMAGIKLSSIISDIFGVSGRNLINVLVNKGHLTPEDVEREARYIVKEKQDKIKIAINGNLSQPKRDFLKVQLECLDYLLAHLITVESSIDKLSTPFIEEVERLVTIPGIAKTSATAIIGEIGIDMSKFPTSEHFTSWAGLAPGSNESAGKKKAHI

SEQ ID NO: 231209 - protein, 349 aa, unidentified
MTMVGGFDVHRKQITFDYVDDDGLVHSGEIRPATRTTLRGWLGEHCPSGDAEFAVEGCTGWRYVVEELAMAGVVAHLGDPAEIAGLRGPKKRAKTDRADARLLRTLLVEGRFPESWIPPAHVVEVRTLGRLYCALMEERRAWQQRIHAQLFHQGCPPVTALLSVAGRDALAGAELSRVGRQYVDTALRRIDELGAEIVPLRTQLVNFARHQRGCQALQARHYGIGWLCAAIIWAEIGDARRFSSSDQLVRFAGMDVTVYSSDAKRSPGHLSRQGSPELRWATFEAAKCAARRGSPDYSYYHQLAVKHDGHNGKNPTLAVERKILRRCYHTLRELGDAALSPPQPVREAA

SEQ ID NO: 231210 - protein, 367 aa, unidentified
MKKVSTAATKQGRNISQPTRTIGLDLGDRNSCYCVLDESGQVQLEQRVRTHAKALREIFGGIPRSRIALETGTHSPWISRLLSELGHQVIVANARKVRLIGESRKKDDRLDAQTLARLARIDPGLLCPVKHRSAQAQADRTVIRARAGLVRARTALVNTARSLAKSYGERLRGCNVRNMNPEKAEALSPELQPALEPLLSAIEELSERISEYNERIEALAEESYPQVKLLQQIKGVGTLIALTFLLTLEDPHRFRKSRDVGCYLGLQPGRRNSGQSEPQMHISKEGDPYLRTLLVQGAQHILGPFGVDCDLRRWGLKLAERGGRNAKKRAIVATARKLAVRLHHLWVSGEVYDPLHNSSRVIVSAAA

SEQ ID NO: 231211 - protein, 326 aa, unidentified
MESVVGIDVSKDSLDVVFVNDGRHLHKIFSNHATGHNHLHNWLVAQRSGTVRVCLEATGQYGEGVTEYLYQRGYPVSVVNPARIKHYGESKLHRNKTDKADAALIAEFCQKENPALWTPLPAEVKQLRALVRRLYDLQNAYQQERNRTLAGEQNAWVLEDLKAHLSYLQDRIRTARQAIQQHIDQTPSLKSQQELLVSIPGVGQLTAARLLAEIGDISAFEDAPQLAAYAGLNPKGFRSGSSVHKKTRISKEGRAFLRQILYMPAIVARQHNPIIKEFCKRLADRRLANMAIVVAAMRKLIHIVFGVLKNQRPFDPDYGNQFAFTS

SEQ ID NO: 231212 - protein, 355 aa, unidentified
MNQEKYIGLDVHQATISVAVMDSSGKLIMECILETKAATILEFIAGLRGTLSVTFEEGTSAAWLHDLLKPHVSHLVVCDPRRNALLKDGSKSDRIDARKLAELLHGNKLHAVYHGEHGVRTLKELGRSYLTITKDLTRVMSRIKALYRSWAIPCSGTTVYAVRHRAEWLAKIPEPGVRLRAERLYQQLDLLQPVRQGARRDLMVESHKHHAVKLLRQIPSIGPIRAALLVALLQTPHRFRTKRQLWAYSGFAVETHDSGEYRFVRGKLLRNRERITVRGLNHNHNHDLKNLFKGAALSASTRPGPLCDFYVALVEKGMRPTMARLTLARKMAAITLIIWKKGVDFDAKQLNRQAA

SEQ ID NO: 231213 - protein, 355 aa, unidentified
MSDEKYIGLDVHQATIVVAVMDSTGKLVMESILETEAATILQFFAGLRGTLSVTFEEGTWSVWLYDLLNPHVDKLVVCNPRKNALLKNGNKSDRIDARKLAELLRGNQLKSVYHGETGVRMLRELSRSYLTIVKDLSRVMNRLKAVYRSWAIPCAGRDVYYRRHRAQWLAKIREAGVRRRAERLYEQLDMLQHLRQQARRELLAEGRKHAITAKLRQIPYLGPIRSVLAVALMQTPHRFRSKRQLWAYSGLALETRISAEYRLVEGQVRRSKKLLSIRGLNKDHNHDLKGLFKGAATMASMRPGPFQDFYQAALAKGIKPTMARLTLARKIAAITLTLWKKGENFDAEKLKSQAA

SEQ ID NO: 231214 - protein, 356 aa, unidentified
MIANKVSRRSKKDNSSLTETESYDHYIALDWSERNMAIARLGKKDSEPKIIDVPSDLKELKIYLTNLKGKKILTIEETTTSQWLYVELYDYADKIFICDPYRNRLLSDGPKTDKIDAGKLCKLLKNGMMKEVYHSTSELYELRKLVSYYDDEVRAGVRLLNQKSALYRAENKSWKKKEELEDSRVNKFITAQLDEKIESYHEKKKRYEEEFTRISKKNKALRSLKSIPGLGPISSVTILSIVIDGRRFKSSNHYLSYCGLVKHEKLSGGRSYGKRLPRYSRRLKGVYKSAAVRVASTDNPLREYYEYLLKEKGLPEYNAKHALARYIAKISLGIIKSGEKYKPYKWREGKKGKEAA

SEQ ID NO: 231215 - protein, 338 aa, unidentified
MKITTVGVDLAKSVFTVYGVDEHGKPALRKTVRRGKLLELFAQLPACVVGMEACSGAQHWARELRELGHTPRIMAAEFVEPYRRGGKNDTNDAAAICEAVARPQMRFVPIKSVEQQAVLAVHRLRQGLVEERTALANRIRGLLTEYGLVIGVGLDRLRKALPSILEDAENGVPGIAREVFADATRQLIELDARIGEYDRRIAALARASEPAQRLMKMEGMGPVTATAIVASVGDAKMFRNGRQFAAWLGLTPRQHSTGGKQRLGAMTKHGDVYLRTLLIHGARAVLRVTPTHSDAKSRWAESLRHRRPDNVAAVALAAKHARIIWALLARGQHYRPAV

SEQ ID NO: 231216 - protein, 343 aa, unidentified
MDEISMIGLDIAKNVFHVHGVDASGATVLRRQLKRGQVEKFFAKLPPTLVGIEACGSAHHWARVIGRYGHQARLMHPGYVTPYVKRNKNDGRDAEGICEAVGRPTMRFVAVKSVEQQATLAVHTTRRLLVDQRTAAGNSLRGMLSELGIVAAQGVKGLHTLMQQLEQPSEAIPELMRNALLLLARQWEALDAAERMLGQQITRAAQADREARRLMAVPCVGPMIASTVLAKVPDPGMFRSGRDFAAWIGLTGRDHGTGGKHRVGRISKQGDRMLRTLLINGASAYLLHQKRRGVTDPWLRDLLARRPYKVVMVALANKTARIIWALLTKGGEYRVRASVPAAA

SEQ ID NO: 231217 - protein, 495 aa, unidentified
MALQAYGFYLKKKIMSKSTVKKENEKKRVVTKKKQPKQDFVQMSVVHPNAAGIDIGDTIHAVAVPPGRDKEPVRKFGAFTCDLQAIVRWLKECFIETVAMESTGVYWKPLHALLIAEGFDVYLANATQTKNVSGRKTDMSDAAWIQLLHSCGLVKRSFLPDDHTETLRTLVRQRKALIQDSTRCIQRIQKNFELMNLKIHTVISDITGKTGKAIIEAIIEGQRKASNFLSLIDERIQASEEEILKSLEGNWRTECLFLVKQSYAQYKQLQAHIGDCEKEIEEILQGMVAAANEGVIETGPAHGSAEKKVGGQNQKKKKRKNKNAPGYDVRNYLRQIHGVDVLDIFGISEITALEILSETGTDLSRWETCNHFSSWLNLSPNNKITGGKLVSSKLMKKTPNAAAQAFRAAANGLRRGNNWLGDYFRRMRAKGGHKFAIVATARKLSIIYYKMVRYKEAFIEIDMQEYKEKQRKSKIQYLEKRLAQLKKYESQQAAA

SEQ ID NO: 231218 - protein, 364 aa, unidentified
MIIIGVDFHPEFQQIASVDTETGEFQEKRIGHREEAEKFYRALAASGMKVCVGMEASGHARWFERLLAELDVELWIGNAAEIHAKRVRKQKTDRQDAQLILRLLLEDRFPRIWVPSWENRDLRQLLWHRHRMVQARTRIMNQLQAVALNEGLRSKKRLWGKQGRPQLESFRLMPWASRRRRDLLELLDRLNPTIAELSQAIEHEVEKYPAAQRLMTHPGVGALTALAFVLIIGEAERFQCGRQIASYLGMVPLEKSSGNRRRLGHITKQGSSMLRFLLVEAAQATVRSVPEWRRKYLHLMMQRGRKTAKVAMARRLAVRLYWMMRNEWDYQQVTKFGPHAGQPGNRHGVQQEHRVIDWAPRSSS

SEQ ID NO: 231219 - protein, 430 aa, unidentified
MGFIVPTDMHPERDDQPMPYEWFVGIDWGSQQHQVCVLDGERRRVGERAVDHDGASLAQLAAWLWTLSAGQPQRVAVAIEVPRGAIVEGLLERGFHVFAINPKQLDRFRDRHSVAGAKDDRRDAFVLADSVRTDQPSFRRLHLDEPQLLRLRELSRAEETLLEDFRRSANRFRDQLHRFYPQMLELCSAADEPWLWDLIDLAPTPAHVALLSEEQVQRVLQAHRIRRVKAKEVLTCLQALALPVAPGAAEAAQAHCQFLLPCLRVLAEQLQACSQQVSALLHTLAEEPGDGEGPSDVAIVLSLPGVGRKITAWLFAEAAQPLAERDYQVLRTHGGVAPVTKQSGKRRQVVMRHGCNPRLRHALYHMARVAMQRDAHFSGVYAALRAKGQRHGQALRNIGGRLLRILMAMLRHRTCYDASRMRREPVVQMG

SEQ ID NO: 231220 - protein, 339 aa, unidentified
MKYTPVGVDIAKHVIQVHFINEHTGEVVDKQVRRQDFLAYFSNREPCLIGMEACGGSQHWARELTKQGHKVRLLQARFVKAFVMGNKNDVMDARAIWMAVQQPGKEIAVKTEEQQSVLVLHRSRRQLVKFRTAQINALHGTLLEFGETIHKGRAAMEREFPEALERMKERLPLYLITVLENQYNRLNELDSLIDDIEKQLTSVARQNETCRRLLDIPGVGPLIATAALAIMGKASVFKSGREFAAYVGLVPRQTGSGGKIRLLGISKRGDTYLRTLFIHGARAAALLTKEPGPWITELKKRRPASVAIVAMANKLARTVWAIAAHGRKYDKNHVSIRPY

SEQ ID NO: 231221 - protein, 313 aa, unidentified
MSEETFVGIDVSSDHVNVHILPSDKKGSWDMDAKSIESLVKQLKKASPKLIAMEATGGHEIQLCAALLAEGLPAILANPRRARQYAEGIGILAKTDPIDAYCLARFASEIEFKKRHFSTEEERFLKELLARRRQLIDLRTQEKNRLSRPCSSLVKRSIQTIIRTLDEEIKKIDKDLDDTIKRNSEWSEKCKLLQTIPGVGKVVAITFVADVPELGELNAKEIASLVGVAPYNRESGKLKGRRMIKGGRRNPRKALYMAVVIASRYNPRLRPFYEKLRASGKAAKVALVACMRKMLIIMNAMIKAKKPFQEIFA

SEQ ID NO: 231222 - protein, 408 aa, unidentified
MDVVYSHVCGLDVHKKNVVACVITPQAKEIRTFSTMTEDLLSLLDWIKQHGCTHVAMESTGSYWKPIYNLLEMEGLQTLVVNAKHIKNVPGRKTDVKDAEWIAGLLRHGLLQGSFIPNREQRELRELIRYRRSLIEERAREVNRIQKVLEGANIKLSSVASDILGKSGRAMLEAMIAGETDAVVLSELAQKRLKNKKPELIKALNGLVGPHQRLMLQAQLRHIDDLDALIQQLDEEIKRRMLPFEEDLERLDSIPGVARRTAEHILAEIGTDMTQFPSAAHLCSWAGLAPGNHESAGRRKSGRTTKGNQKLRSTLVEAARSVARMKETYLSSQYHRIAARRGANRAAVAVAHRILTIVYHLLKRKQTYIELGPHFYEERKRQHVVKQAIRKLEALGLKVTVEEVIQPA

SEQ ID NO: 231223 - protein, 422 aa, unidentified
MLGIGIDFAEEFHLVALGRPGDGIIDVARVDHTPAALEALVARIAALEPDPAEVRVVLETSHGALVERLLDAGYVVVPVNPDLIARRRGPARKKDDAEDARIACLLALDRHASLRPLIPHGELAAELRAIARDDERAARDERRLLNRLRADLIATFPAALAIAGDDLGAPTILRLLGRWPSAAELRSAERSELVAFARGAHHGWPERFADHVEAALAIEQFVARDYLVRAKAATICLAASQLLLLGAQRRAWERRMGEILLGAPRTGRAREPRAGERGERFPGGEIYLSFPGLGDRLAARVAGEIGDHPEMFTSPNGLQCYAGKAPVTRRSGKSELVVSTRLACNGHLRDAVQQWAFCSLLYSGWAREFYDGQVAKGKHHHAALRALGNRWLEILWHCLTRGMHYDEAIHVANRNRALQRAA

SEQ ID NO: 231224 - protein, 369 aa, unidentified
MKKTIRFVGLDVHQKTITVAVAEPGSAPAQLLTTLPNDHLALAKCLERIGPAPTLQVCYEAGPTGYGLARWLLESGIRCRVVAPSLVPRDGRRIKTDRRDALKLAHFLRSGDLVAIAVPDAAAEAMRDLERAREDAKNAERVVRHQLSKFLLRHGRIWSGATKWTDAHWRWVRAQQFACPILQRVCDDALQAVEQAGHRVAQLTRNLSEQTANWSQRPLVQALQALRGVQLVSAVVLTAEIGDYRRFASPRQLMTYLGLVPSEHSTGETRRQGRITRTGNTHVRRILVEAAWSYRYRPRLTKVIAARQKDVAPAVRAIAWKAQQRLHRRYVRLLSRGKSKQQVVTAVARELAGFVWAIARQDSLLVEAA

SEQ ID NO: 231225 - protein, 483 aa, unidentified
MAGAHSRSIGTRARLRPVPLLARESLYVGIDVGKHKHVAGFVSRTLLERHGRFEGCPALAFDNTREGFRALVERSTTYTPLEQVFVLMEKTGHYHHALLQYLLDLDVAVHLVHVQERTAGLLKTDKRDALGLANRLYTQLELGAQVADTSQLVRRAVPPTEAAALLRGLVRHRYELVHEATQRKNKLIAICDELFPELAALFKDPNAQGALALREAFPTPHAIATATLADLIALRVGNYPSTAKVRQLQVVAATSIGTHDLGRQRGLGLEQRQLIRELRLLQAHIAELDAEIGSIVATAREGRILTSIPVIGPLQAAAIIAAIGHIDNFASAAALRAYCGWAPKVTRSGKTLDQAKLTRGGTRTMKATLYLVVANAIQQPECEWARLYARLVPRKCSYDELRQRYVGKNKVIARIAGQLVSTIYALLKRDAELLAHRARGSLLPEPELYDPAVHKAHREGHYRASKPKRSHGSITALPVRSDP

SEQ ID NO: 231226 - protein, 381 aa, unidentified
MPVEHRFGHFSPVKQVDNMERPCCGKHSAGYETMSLRTRFRKLAFICTALERTQTNEVVMNKNKTPIVGIDVSKDTFNAYFNGFDGKYANSKKGFQSLLKETPQASVYAMEATGNYHYRLAVFLKTKGYEVKVFNPLSVSLWIKSLKNKAKTDKRDARLIAKYAGTEEARALLSWELPAQKIVEARVILSLLDGLARLERASGNMNHAAKLVLNETNSLLGVMSSVSGVCGEQQEMLEKKLCGLMGEVYPKQFRLLQTIPGIGAKTAACLLASARNIESFETGGRLVSFIGLAPKVEQSGTSVHAKGKIAKTGNTYLRSLLFMCAFTACQFNKPCFELYSRLIAKGKPKKVALVAVMHRLVKIAFGVVKSGEPFRGGEIAF

SEQ ID NO: 231227 - protein, 339 aa, unidentified
MKYTPVGVDIAKHLIQVHFIDENTGDVVDKQLRRRDFLEYFSNRESCLIGMEACGGSQHWARELTKQGHKVRLLQARFVKAFVMGNKNDVMDARAIWMAVQQPGKEIAVKTEEQQSVLVLHRTRRQLVKFRTMQTNSLHGTLLEFGETIHKGRAAMEREFPEALERMKERLPPYLITVLEKQYNRLNELDLLIEDIEKQLTSVARQNETCKRLLDIPGVGPLIATAAVATMGEASAFKSGREFAAYVGLVPRQTGSGGKIRLLGISKRGDTYLRALFIHGARAAALLTKEPGPWITELKKRRPASVAIVAMANKLARTVWAIAAHGSKYDKNHVSIRPY

SEQ ID NO: 231228 - protein, 345 aa, unidentified
MNEVTVIGIDLAKGVFEVCLKASDGLVLERRRLKRRAFESYMEKAARVLVGLEAGPGAHYWARWLTERGFPVKVMSPRAVRAYRTGPHKSDALDADAVGEAAGRAGVRAVAVKSERAQTLQALVRVRDRQVASRTRVLNQLRGLLLEFGVATSRNLLVWYPRVAGTAAVAALPERTRLLFDALFEEARELDRRIKELDRELDRGVRADPLARRLTGAPGIGPINAIQFTAQIVEPGDFANARAMPAYIGLVPRLIASGGTSRLGPITKHGAASLRKSLVLGAHAVITTAQRCPDKGDAIYVFARRLLAKGKPRNVIAVAVANKLARIVCAMLRTGQPYNPQGTPA

SEQ ID NO: 231229 - protein, 329 aa, unidentified
MDIASATFTACIGTSPWQVLVKPETFENHEEGFASFLGWLKESHLPPEKTVVCMEATGVYSEGLAYFLSATGYAVAVEPPLKVQRKFPSPGPKNEARDSQNIAEYACRYVDQLSRWQPRPQILEQIKVLLTTRQQFSVQVTAHKNALHALGRKKVSSPLAQHVQEETIHQLTQHLQALDGEIRRLIDSDPTFRQSVLLLLTIPGVGLQLAAHLLILTQYSLDPRELAAFVGICPYEHESGTSVYRQPTSRHYGPPVIRKLLYLAACSIRTHRQEFKHYFLRKTAEGKPNKVVLNNLQNKLLKIACAVLRSQKPFIPNYVSVNPRLLKNA

SEQ ID NO: 231230 - protein, 341 aa, unidentified
MFIIGCDYHPSVQQIAWVDTETGECGERRLTHRDEAEQFYRELKKKPIPVRVGMEATGHSRWFERFLAELNYELWVGDPAQIKAKRVRKQKNDRKDAEHLLTLMLEKTFPRIWVPSPENRDVRQLVLHRHRLVGMRTRVMNQLQAIAMNEGIRRKRRLWSAHGREQLESLPLLPWTGRRRQELLELLDRFDPSIAQLSQAIEKEAEQLPEVQRLRTHPGVGPITALAFVLVIGTPWRFQCGKQVASYLGLIPCEDSSAESWRLGHISKQGNALLRFLLGQAAQGVARSDEQWRHQYAHLALRRNPAIAKVAMARKLAVRLFWMWRRGWDYQQLKKFGSNVG

SEQ ID NO: 231231 - protein, 411 aa, unidentified
MDVLYPVCCGLDVHKKTITACLRFPSARARAEEVRTFGTTTRELLRLADWLTAAGCTHVAMESTGVYWRPVYHILEASFEVLLVNAQHVKAVPGRKTDVKDCQWLAQLLEHGLLRGSFVPPAPLRELRELTRYRRQLVQEHAREANRVQKVLETANIKLGDVATDVLGVSGRAMLHALIAGERDPERLADLARGALRQKAEALREALVGRFTLHHAFMLQGLLDHIEFLDQQIARFDERIEEQTRPFGPAIERLDTIPGVGRRSAEQILAELGDDMRRFPTAAQAASWSGICPGNHESAGKRRSGRTRKGNAWLRSTLVESARAAVRNRGCYLSAQYHALARRRGDKKAIVAVGHSILVAAWHILRDGVEYRDLGPDHFDRLNRERLVQYHTRRLAELGLTVQLPGAQATA

SEQ ID NO: 231232 - protein, 420 aa, unidentified
MTVYLEQGYAISESVVLNSIEVLMQGVFIMIYVGIDVAKDKHDCYVCDSDGVELYAPFIIQNTREGFEDLFEKVHVVASELSEVKIGLEATGHYSYNILGYLLEKEFRIFLINPLHTNLFRKSLSLRQTKTDKVDARTICMMLHSGMALTPYSKTSYHMEELKSLTRYRFEKVRERARLKQSLSRLVTILFPELEKLVPTLHMKSVYSLLYEFPGAEQVASCHMTHLKKLLYDSSKGRYGKDVAETIRNAARSSIGSHMPAKSLELKHTIDLIRKLDAEIGETEDAIKVIMDDIGSPILTIPGINYRMGAMIIAELGDICRFDSPDKILAYAGMSPSTYQSGQLTSSYSHMEKRGSRYLRYALFNATRYVCQWDESFAKYLAKKRSEGKHYYVAVSHAAKKLVRLIFHLMTTGETYIQAA

SEQ ID NO: 231233 - protein, 423 aa, unidentified
MMKLKYSICCGLDVHKNVIVATIVTTNKDGISEYKQKSFSTINSDIQRFHNWLIENNCYHVCMESTGKYWIPIFNYLENDIDVCLTHPKYVKAIKGKKTDKKDSKWIADLYKFDLVRCSFIPPKDFRQLRELSRYRFKLVCMKSSEKNRIQNCMTVSNVGIASVLSDPFGKTATEIISYLLEHTADSMDEKAVRKFIKKGAKSKSDEIIEAIKGYTIETDQAKKLELARGHLEYLDDMITQTEVELYVRIKPYYKFVEFVSTMPGMTELSSTIVLAETGVDMDIFDDTKHLCSWCGLSPANNESAGKKKSVRIAKAGDYLKPMMVQCALAAIKSKKQPYFAIKYGRIKKRRGHKKAIIAIARMMMVCIYHMVSEKKPFTPTDYEELMNPQNHVERVVLNENNVFAYLESLGYDSSKLVKRNDN

SEQ ID NO: 231234 - protein, 354 aa, unidentified
MSQTPNTAIAVIGIDIGKNSFHVVGHDARGAIVLRQKWSRGQVEARLANIPPCLIGMEACVGAHHLSRKLASLGHDARLMPAKYVRPYSKGQKNDFNDAEAIAEAVQRPTMKFVATKTAEQLDLQALHRVRERLVSQRTGIINQIRAFMLERGIAVRQGIGFLRTELPTLLATRTDALSPRMLRVIEELAGDWRRLDQRIDGLSGEIEALARQDQACSRLMTVPGIGPIISSAMVAAIGTGDVFSKGRDFGAWLGLVPKQISTGDRTILGKISRRGNRYLRVLFVQAAWVVLVRIKDWERYGLKSWIEAAKRRLHHNVLAIALANKLARIAWAVLAKGRAFELTRTDDAGVRPT

SEQ ID NO: 231235 - protein, 402 aa, unidentified
MWYVGLDWADTHHDVEVLDEAGKRVGARRFAHSHDGLNELKQFLLRIAPSPENLVCIVETNHGLLISFLLSAGFPVYPVNPKMANKLRKVAGAKTDQIDAHLLAKMGRFDLDEMRRLEPDSPTVQELKTLPRDQDSLIQMQTRLVNILPACLKEYYPAALNLFSKLHQHSTLVFLQAYPTPQAAKAASLEEIIATLREGRHSNPKGTAPKILKELHAPQLVASELTVRAKSRLMLSLAKQLLVVIEDIASYDKEIEALFLTHPDHELWSSLPRAASRLAPRLLAEWGDDRGRYADANSVQTLAGTAPVPFQSGNYAKAHKRFACLKPLRNHLHQFAWQSTLSEPWAASYYQRKRAEGKTHSMAIRALANVWVRIIYRMWMTKTNYQAETFEAAQLAHAQRAD

SEQ ID NO: 231236 - protein, 435 aa, unidentified
MTGYEFDRAASVVAPLGSKEVKMEVIVPCCAGLDVHQATVVACVNRSGLHGRSQKDVRTFGTMHDDLIALRDWLKDAGCALVAMESTGVYWKPVYEALEDHFDLMVANARHIKNVPGRKTDVKDCEWVSDLARHGLISRGFVPPREIRDLRELNRYRRKLAQVQTGERNRLIKVLETAGIKLAGVASDVFGVSGRAMIRALIEGEETPQVMAGLARGRLRSKRTALARALDAPLKPHQRFMLQTQMGRIEQAEAALEQIDIELNKMIVPYRRQVEQLMSIPGVDWINAVTIIAEIGTDMSAFHSAAHLASWAGICPGNNESAGKKRTGKVRKGNVVLKTTLVNAAIAGFGSRARKGTFLAEKFRRLAARRGKMKAAVAIAHKILVAVWHMLSEGTFYQDLGAGFLDKLDRTRNAKHLVRRLINMGFDVQLVEKAA

SEQ ID NO: 231237 - protein, 349 aa, unidentified
MEYIGMDIHKNYSSVAVTDERGDLVDRCRIDHRHREELVGYFNRFPSKTQVVMEATCGWGWLSELLQDLGLEVKLANPSKVKIIAESQIKTDKVDALVLAQLMRTNFLPEAYLAPAEQREARDLLRYRISLVYLRSGVKNKIHALLTRLGIYHTYSDLFGKAGRSFLSCLELSPVHRQALDGYLCLIDTTHELIGKAEVKIRKVVKESEDGKRLLTVPGIGFILAYLVLVEIGDINRFSSHKKLCSYAGLVPSVYQSGEKSYHGHLSYKANRYLRWGLIEAAQKAKLIDPFLRKKAERIKDKKGTSVATVAIAHQLLVAIYHILKEKTVFRSPNLKYRLSGKPVPTLVA

SEQ ID NO: 231238 - protein, 362 aa, unidentified
MEKVHFTRLAERLSNLSEVTMTEIKYCVGVDIASSTFMASVGEMPWKVILKPEMFVNTEDGYQALLVWFAQHHLSVSETVVCMEATGVYSEGLAYFLYTQGYRVAVQSPLEVKRTFKPYGPKSDAVDSLQIAEYACRHTDKLSFWKPRSEILEQVKALLAVREQFVSQNTAHKNALQAIRRKVVRTPFAEQAYLQLIEQVKQQIKAIDTEVRRLLESDPTFKEMLLLLLSVPGVGLLLAAHFILLVQFSLEYKVLTSFLGISPNEHSSGTSVFKHATSRHFGPSAIRKLLYLAACSVCAHRPQFGKYLARKTKEGKPARLVLNNVENKLVRIMCAVLKSKTAFIENYYSVQPLVFQKTLTVS

SEQ ID NO: 231239 - protein, 352 aa, unidentified
MDEQPTIFVGIDVSKYRLDVYLRPLDEAFHVPRDVKGLEALARRFTSLPVALVVLEATGGFEASVAAALAAAGLPLCIVNPRQIRDFARAMGRLAKTDTLDAEVIALFAERIRQPVRPLPEPERSHFAELVSRRRQIIGMINMETNRRDQAVDKQLSRRLSRHIAFLEKELVELDGDIGQTIKVSPVWCETEALLKSVPGVGDVTARTLLAQLPELGTIGRHQLAALVGIAPINRDSGLMRGRRSIAGGRTSVRGVLYMAALTAIRRGSPFRPFNERLTGRGRPRKVALVAVMRKLLLRSTPSSATARPGGPSRLDLQHSRSVVVALPWRTCPIARPSMRYQSYHHTAGTNI

SEQ ID NO: 231240 - protein, 406 aa, unidentified
MVYDELAEGNVPEIWAGVDIGKTHHHCVVINAEGERLLSRRVVNDESELLALIGDVLEMSRDVLWAVDLNHGGAALLIGLLVSHGQPVAYLTGLAVHRASATYRGEGKTDAKDAFVIADQARVRRDLGLLRPGDEIAVDLRTLTTRRLDTVFDRTRQINRLRAQLLEIFPALERALELTNRGPVMLLTGFQTPAAIRRAGTSRIETWLKNRKVRGAAALAKTAVEAARAQQTALPGEKLAAAMVVRLAKGVMALDEEIAELDALIEARFREHPHAEVIRSLPGMGTRLAAEFIAATGGDMDAFGSPDRLAGFAGLAPRPRDSGRVSGNLRRPRRYHRGLLRTMYLSAMVSLQCCPVSKAFYDRKRNEGKGHKQALLALARRRLNVLWAMIRDGECFHVSPPVTGVA

SEQ ID NO: 231241 - protein, 337 aa, unidentified
MSRARIYKEGYPTVQSDSNAECWVGIDVSKDWIDVVVLVKENRAEQFRCDRAPEPLAGLAQKLLPYGPQGIVLEATGGLEGAVIAALAGAGLPVMRMNPKRVRDFAGAHGLLAKTDALDAYALALFGARMRPPWRAWPEAERQQLAAWVAREQQLIVERATERTRLQQASEPALRKSVERVIAFLGKEIERLGKQLAAWVAASETWSEQATLLRTAPGVGEKTALRLLAQLPELGQVNRRQIAALVGVAPFASDSGKWRGKRSIRGGRAGVRAALYLASWTAIRVEGTLKTFYRRLVSAGKPKQVALIAVARKLLLALNEMMRAGLPWRSANAAISA

SEQ ID NO: 231242 - protein, 427 aa, unidentified
MQSENIRLEKFRKLKKEVRGSAQYLLIGIDVAKEKHIAFLGTATGKTLVKGLVFENNKQGFAKLLTEAEAVRTKNKLSTVVFGLEPTANYHKPLGQYLIGHEQEVVLVSGTAVRRNRELLDGRWDKHDLKDAANVADLISQGKFQYYEHPRIEIRELRGLLSLKRKLKRQEHGLRVRIRNNLLSQYFPEMEPYYNSCERDNLAIIKNCLSPAVIGGMAYADFFKTVVSRKTGLRQDKHLQRIWQLAGQSIGCESDEGTEGEARVVVEQLKSTREAIEQIDEAILKLCGSFSEYEFLISIPGFGPDISARVLAYIGDQYRFEKASQVLKMAGFDLSASRSGKSSQDARPVISKKGKADLRYGLYQAALVASTWNKAFKKYFEEKVRDREKEKGIKTKMRVKLAAKMLVIAWTLMKNKEPFNPEYLITN

SEQ ID NO: 231243 - protein, 351 aa, unidentified
MAMLADSVEVVIGVDTHKHTHTAAVVAAATGQTMVTITVAATPGGYQQLLELAGRQASRRIWAIESTGGYGAGLTRFLAAHQEQVAELDRPKRAARRHGAKSDPLDATRAAREALGRDQLAQPRATGPRAALSVRLAARHSAVQAAGDAQRQLHALVIAAPEALRGRLQDCSTRQLVAACARLRVQTSWDVETATTAATLRTLARRIRELTSEAADHRQAILVLVRAWRPDLLTRTGVGPIVAATVLCAWSHPGRCRSDAAFAMLGGAAPIPASSGQTVRVRLNRSGDRQLNQALYTVALTRLRTDPATRAYAQRRRAQGKTNREIKRCLVRYVARQLYRLLETQPALDPT

SEQ ID NO: 231244 - protein, 424 aa, unidentified
MNLTQNDKIEQIKDETLVVGVDIGKETNYARALDNRGRELKKHVKFTNSREGFRAFDKWVSEISLANEKTDVIVGFEPTGHYWFSFGDHCKKLGHKLAIVNPMHVKRTKELDDNSPTKNDKKDPKTIAMLVKDGRYREVYIPEDIYQELREAVYEKERLTDLTVSINNQVIRWIDIRFPEFTKVFSKWYGHAALMALKNFPTPEKVLKAGVDNIVSKWKEEISRAVGRKHAERLVNAAAESIGRKTGTISSEASLKNLIDQYELIMRQMKEQEALMLELLLRVPNADKLLGIKGIGLIAVATFVSEVGDIRRFESPKQIIKLAGMNLKEDSSGKHKGKTRLSKRGRKRLRHSLFKAMITVLAKNTEFKAIHRRNITREINPLNKMQSIFALCGKLIRVFYAILSKGTEYDPNKLMIEIPSMKAA

SEQ ID NO: 231245 - protein, 402 aa, unidentified
MAAGQLWAGVDVGKEYHWVCVVDDTGAVVLSRKLVNDEQPIRDLVAEIDQLADEVSWTVDLTTVYAALLLTVLAAADTPVRYLAGRAVWQASAVYRGGEAKTDAKDARVIADQSRMRGADLPVLAPDDDLITELRMLTAHRADLVADRTRTINRLRQQLVAVCPALERVAALTSDRGWVVLLTRYQRPKAIRNSGVSRLTKILTDAGVRNAASIADAAVTAAKAQTVRLPGEEVAAGLVAELAQGVIALDDRIKATDADIEGRFRRHHLAEVITSLPGIGFRLGAEFLAAVGDPAKIGSADQLAAWAGLAPVPRDSGKRTGRLHAPQRYSRRLRRVMYMSALTAIRCDPQSRAYYQSKRDQGKKSIQATICLARRRTNVLYALIRDHRTWQPDSPPITTTAA

SEQ ID NO: 231246 - protein, 338 aa, unidentified
MEYGAIDLHKQRSVIRIVDAAGTVVLDQTVPTSRAGFASVFRGRARLRVLIETGTESEWAAQTIEADGHAVVVVDPNYALMYGVRQRVVKTDRRDVAALAEANRLGIFRAAHRVSAAQRERRRQLRVREQLVRVRTQAINLLRAQLRQEGYRLGSGSAETVVARYGRLQLPTTLQTSLQPVIALLTHLRPALAALDTTTAAQALADPITRQLMTAPGVGPVTALTYRAVLDDVGRFADAGRVTAFLGLVPQEDSSGARRRKGGITKAGPARVRALLVQAAWTIWRQRHAGDPLQRWVHAVADRRGRGIAIVGLARRLARVLFAMWRDGLPYRVMPLTA

SEQ ID NO: 231247 - protein, 370 aa, unidentified
MRKSVLYVGLDVHKMSMEVAHAESGAYGEVRHYGRIGGDLEALDKVPRKLQAKGAELRFAYEAGPCGYQVYRHLTAQGYSCLVAAPALIPRRPGDRLKNDRRDALALVRLLRAGELTPVKVPDADDEAMRDLTRAREDAISVERRAKQRTAALLLRHGRRYPGKTTWGRGHWRWLAQQAMEHPAQQIVLQEYLDAVREASARVQRLTEQIRELIPQWRRAPFVAAYQALRGVSRIVAATLVAEVGDLSRFKNPKQLMAYLGLVPSEHSSGASVRRGHITKTGNGHARRVLVEAAWAYRLRARVTRPLLKRQEGLPESVRQLAWKAQLRLCARYRRFQARGKHKNTVITAIARELAAFIWAIGQSVEPVTP

SEQ ID NO: 231248 - protein, 449 aa, unidentified
MAKTKKRKYRKLERSLPVMRPNAGGIDIGATEIFVAVPADRDMETVRSFPSFTQDLHALADWLQQCRVDTVAMESTGVYWIPLFQILEARGIEVHLVNAQHVHHVPGRKSDVLDCQWLQYLHSVGLLRASFRPDQAVCEIRSLMRHRESLVQMACVHVQHMQKSLDQMNLQIHHVISDITGVTGLAIVDAIVAGNTNPEELAKLRDYRIKASVETVTKSLVGDYRGEHIFTLKQSLNAYRYYQQLLTDCDREVQQRIESFETKDGGSGSTGDVGDSNTSTGTFDLRAHFERIFGVDLTAIPGFDVLRVQTIFSELGADLSDFPTPASFASWLNLCPKDGTSAGRKIRGPKIKTKNRVTQVFRMAGQSLHNNKSLLGDIYRGQRARFGAIKAVKNAGHKLSRIFYHVVTTRQPYDETVFAKLEARHQQRRFRKLQSLAKQMGYSLVATPA

SEQ ID NO: 231249 - protein, 373 aa, unidentified
MPRYSTAFGMDVHLRSTTVCALDAETGEAVTRRFRGNPWGEVAEWMSGFPGPSLAAYESGYLGFAPQRELSGLGVDCVVAAVSKVPRSAADLSSKNDRNDAARMAKAILSHDVTPVWVPSPEIEGLRDLAAAHDAATARLAAAKQRLLAFLARRGYVYGGTTPAGNPRKYWTYGFLRWLDGIHPADDGGIRALAALRNEVEAADETREALLAEYRAAVAAGPLSAEVEALQSIKGCGFALAAAFASEVGDFSRFRSGRQVTAYFGLAPSQRSSGDSVRLGGISGAGNALVRKLAVEGSWCYAAARHQPKLMPRDTGVPLEIRMHGRKGSERLLRRREEMLARGMPQAKANAATAAELVRWLWALGTMCREGAE

SEQ ID NO: 231250 - protein, 367 aa, unidentified
MFDYVTAIGLDVHARSISACAFDPMTGEVARARFGYDPASVAEWALGFESPKAVYESGPTGFHLCRALRALGVDCAVGAVSKMHRPAADRGRKNDRRDAEWLARLLACRNVVEVWVPDERTEAARDLSRALEDARDDLQRARQRMSKFLLGHGLVFDETTPTGRRRSNWTEAYRRWARSIEFAEPDDAAACERYTDAADRCGEAKRELERKVVEAASRPEWAPSVDALRPVKGIDVATAFLLAAEAGDFSRFPSAPSFAAWCGLAPSERSSGETESRGGITRAGNSHVRRALVEASWHVPMSTRHPKRPRPGHGVAPAVSRHAAKCDRRLQDRRDAMSRAGKRPCVANCATAREMACWVWAIALMVR

SEQ ID NO: 231251 - protein, 341 aa, unidentified
MPIVGGLDIHRKQITFDCLDTETGELQRGRIAPADRAHLADWLARYLTDRAEAHLAFEGCTGWRYVAEELTRAGVAAHLAEPADTAALRGPKRHAKTDRADSAHLRQLLIDGRLPECWIPPAHIVEARALLETYHDLRVEHTAWVQRIHAVLFHQGAGPCPGLRSAQGQAELATVTADLSAAGQLQVATAMDMLTVLEDHLQRLHRQLISIAGHLRGAKVLRTRLYGVGPVTALALTCWLGGAGRFSSARKAVRFAGLDVTVHSSDGKRSRGHLSRQGPEVLRWCLYEAGMHHARRSAPDHANYAQAHERIDGKRAALSEARVRQACHILTELGEDALTTS

SEQ ID NO: 231252 - protein, 417 aa, unidentified
MSDNIQWFAGVDWASEIHQVVLVDAHGTVAGERTFPHGGEGLSAMCDWILTTSGAPAETIGVAIEVPHGPVVETLMERGFQVHAINPKQLDRFRDRFTVAGAKDDRLDGRVLGDSLRTDRHCFRLLRQSDPVTVELREWSRMAEDLQQERNRLSNRVREQLWRYYPQLLKLTDDAGADWFLALWTLVPTPARAARIHKSTIERLLKTYRIRRIGADEALTTLRQKPIQVAPGTTEAATAHIRALAVRLKVVNRQIKDAHRQLDALCARLAEPGDPAPGQPREQRDVTILRSLPGVGRIVVATLLAEAPEPVRERDYHALRSLCGAAPVTRRSGKRCVVVMRQACNIRLRTAIYHWARVAIQHDEISKRRYRELRKRGHSHGRALRTVADRLLAVACAMLRTRTLFDPAQVGALKQAA

SEQ ID NO: 231253 - protein, 347 aa, unidentified
MDEQQPADRQIVGMDLHRRRSVLVRMNQDGERLETVRIVNDVDRLADVIARAGESPEVVLEATYGWYWAADALAELGANVHLAHPLGVKGFSYRRVKNDERDAADLADLLRMNRLPEGWIAPPATRELRELVRHRAKLVHLRTSLRQQVHALLAARGVAIPVSDLFGVAGNQLLDRVSLSPAARTRVVSLRSLLDALDVEIDAFTKLTAKRLRGDPRYKAVQTIPGIGPVLGAVFLAEIGDITRFPGPTQLASWAGLTPKHHESDTTVHRGRITKQGSVLVRWAAIEAAQCAGKYTRTGQRRERIAQRRGRNIGVTAAARDLLQLVYYALRDGTCAAWNPRHNQHDH

SEQ ID NO: 231254 - protein, 369 aa, unidentified
MATELCGVTVIGGVDTHKHTHYAAAIDDQGRLLGHQEFPATDGGYQALMSWMSGHGNVDAIGVESTGSFGAALTRSLTRAGQRVIEVNRPNRIARRMDGKSDRLDAEQIARAVLGQTSTATPKAKSGTVEVIRTLRVTRASAVKARTQTFNTLWGIIIGAPSPLRDELVVLTKRTLVNRCLGLRPATEDLLSLSGDPERLLLAAVKSSLRDLARRWKALDDEIKGLNRQIEALVEATAPELVGLHGVGVEIAGQFLVTAGDNAERIRNEAAFAKLCGVAPQPASSGRTTGRHRLSRGGDRAANSALYIVTIVRMRHHQQTRDYVARRTAEGLSKREIIRCLKRYIAREIYSNLPRAGHEDLTETHVPAA

SEQ ID NO: 231255 - protein, 338 aa, unidentified
MLFSGIDLHKRTIAIQTVDGEGTVVRQAQLAAQRPALTAYFATLPRPHRAVVECTGMWYWVRDLLSAQGIDLRLGHAKYLKAISYAKVKTDAVDAATLAQLLRVDLIPEAHMISAEQRETRDLLRARLVLVGRVLRCRRSIGALLEKYNVATPAELPELPRLQAALHAEQGTLLTAQIRRLEHVLRDQILPTPNAQRLVWVPGIGKLVAYTLLLEIDDIRRFPTVRHFHSYCRLVPGAHDSGGKTRHKPSRDGNRYLKIAFHHAAIRAIQYFAEIRSEYQRHLRRKGKMIARARIAKELATIVYALLSKEEAFNGKFAGHILTRTKRPQWPRLASPPA

SEQ ID NO: 231256 - protein, 430 aa, unidentified
MTRSQPTPAAAVLVAIDVAKLRNEVLIELPDARRRRKMTVTNTRPEHDRLVAELHALERPVTVGLEPTGHYHRPLAWRLVQAGFDVRLISSVALARTREALHNGWDKNDPKDAQVILHMLRIGAAKAYHDPLEHGINNIQELSMTHEVVSKAKTEALHRIQTHYLPLYFPEVDRFRNNTRSDWFFALLERFPVPASITALSKEAVVAAAWDLAGRKVAKARLLGDIYDTAQTSIALPIPPEAPAITMFRLVIAEARHLIAQRDTIERLAGELLGEHADFRRLQQVPGIGPINALAILAEAGDLRRFGHHRQFLKFCGLDLATHQSGQFRGKTKLSKRGNARLGRTLWMAAQVAIRQRENGFRAKFERYVAKDRDDPDLRRKAFTAITVKMARVVHAIIKGGVDYRPFVEGPVPGGRTPLYRSREGASATL

SEQ ID NO: 231257 - protein, 410 aa, unidentified
MEIVFERCAGLDVHKETVVACVRHPGDGKRQRRGEVRTFSTVTRGLSELASWLQSEQITHVAMESTGVYWRPVYAVLEDQFEILLVNARHIKAVPGRKTDVRDCEWLAQLLECGLLRGSFVPPQAIRDLRDLTRFRKSLVHERTDHVNRIAKLLEMANIKLSSVATDIMGKTGRAILEALIAGQDDPEHLAQLAQGLLKKKTDLLREAVTGRMREHYRFMLRQQLKLIDALDGQISELDAQIELSMLPFAEAYRLLQTVPGVAQRSAQAILAEIGVDMSRFPSAAQLASWARVCPGNHESAGKRQPVSTGHGNRWLREILQEVAWAAARTKRSYYSAFYQRIRARHGTKKAIVAVQHSLLVAIWNMLSKSAAHEDLGADYFERRSKDQIRRHHVNRLKQLGYEVVIQEAA

SEQ ID NO: 231258 - protein, 418 aa, unidentified
MKPWNELTHFAALDWADDHHDLVVVDAGGQVVLKLTFEHNAQGWQQAPQALAQWPGLPVALETSAGPAVDQLLQRGFTVYPVMPKAAARYRERKRPTGPKDDFHDAWSLADALRTDGHAWCALSPLDPLTAELRALCRDEMVLIEQRTALVNQLQAALKEYYPAAVEAFEDWTVPATWDFVLAFPTPAALEAAGKRRWEKFLHTHKLWRPQTASQRLEIFARAAEFSGAAPIVAAKSLLAQSLARLLQALEHQLEAYRARIRQLFNQHPDHELFGSLPGAGAKLAPRLLVELAAVNWTQISQVQARAGTAPVTQQSGRIRRVKIRRACTHWLRATLHLWADLSRHYSAWSAAYYRAHRDKGQSHACALRCLANRWLEIVGAMVRTGTTYNAEKHLVAIQKHGSYVLKLIPCPATQNCE

SEQ ID NO: 231259 - protein, 350 aa, unidentified
MNATTVAVDLAKNVFELALADERWKIIERARLTRAQFERWFDNRKVDRVVMEACGSAHHWARTLRARGIEVRLLPAQYVRAYVKRDKTDAADAQALLEAARANDIRPVAVKSIEQQALQALHRTRSGWMSTRTRRINTLRGFCREFGLVVPEGAATGLACIARYLADDRSGLPELLRPSMRLILDEIRLMEARIGQLEQALSQIAKHSPDCQVLQSVPGIGLLTSTAMVAAVADPRSFDSGRRYSSFLGLTPREYSSGNTRYLGRISKRGDRYIRMLLTHGARSVLRAATVAHRAGRPIDRLKSWALAVQARTNHNKAACALANKLARIAWAVWVKQEKYQSAPIKTLSI

SEQ ID NO: 231260 - protein, 407 aa, unidentified
MRPHIRRLWWLVPCHAGRGLDRLAVQSLKHGGRAVVEHTTTYVAFDNSKETLAVAIADGDARGEVRFWGTIANRAEAVRKLVARLAAKHPALSFCYEAGPCGYGLYRQILSLGHPCTVVAPSLVPTKPGGHIKTDRRDAITLASLFRAGELQAVWVPDADHEAMRELIRARLTAMQEVRRSRQLLLSFLLRHDRAMPTRHHWTRAHRSWLTRQSFAHPAEQIVFEELIQRIEVACARQDRHEDAIRSLLSAWSMAPVVTAIQALRGVALMSAVTLAAEVGDFGRFATPRQLMAWLGLVPKEHSSGSKVARGNITKAGNTRARRVLVEGAWTYRLPARMGEDITRRNDGLPEAIRAAAWKAQVRLCTRYRRMQNTGKPQKIIVVAIARELAAFVWAISRMVQPAATQA

SEQ ID NO: 231261 - protein, 427 aa, unidentified
MRLQEYGRNPNKRKEYVHQPDLLLVGVDVSKAKHSACLGTQTTVSCRKLEFTHTREGFRRFEQTLRAHLVKNKCQRMLIAMEPSGIYWQALYERLKSCGYGVCLVHCQAVRNNRKTMPDGTSKTDEKDAYSIFDLLRQGQFFLPVDRAPELQAASRLMRRHMALKKRVSQLRNHLRAAIHLTFPELNPLVKDLTQPTALRFLQVNPTPTSILRNGQRHFLETWQPRSRCGQWRPEKFQQLYDLAQHSIGLSDPYGIDEFEITALAHDLADALAKQQLWLDKAIALLAPRTDFQVLMQLPRIGQPTATAILTAIGDLSTYTNGKQLVQLAGLDIRLFESGSSIRKLPKISHVGSAYLRYWLYHYALRLVAHEPHFTAYYQRRKHQSPGQGAGQRALRAVCDKTIRMIYRLLTDYEPYDPKKDQRSAEY

SEQ ID NO: 231262 - protein, 429 aa, unidentified
MNYNTQNAKIASITEKTLIVGIDVGSETHYARAFNWRNYEYSKKPFAFSNDEAGFSSFKDWMDDIAEKHGMEAVIPGMEPTGHYWLNLGAYLQEQGMKPVHVNPHHVKKSKELDDNNPSKNDRKDPKTIAGLVNEGRFSYPYIPTGIYAEIRNLSNLRIQTQEEITRIKNRIARWFSIYFPEIKDVYRNPDAVSGLMVIKQAPLPCDIKALGVDGVNKIWRDARLKGAGIKRATTLVTAAEHSIGNTEAPRSARKEIRNLLNDYEIYKNRMDELLEEIEKTLSEIPYIDKLMEINGIGIKTVSCFIAEVGDIGRFDNPKQVQKLAGYAIVADSSGKHNGESRISHRGRKRLRYALYEAAISVIGKNKEFKEIHSYYRTREKNPLKKMQSVIAVACKLIRIFYTILTKGVEYDGQKMLNDIVRPEIQLAA

SEQ ID NO: 231263 - protein, 439 aa, unidentified
MKNSTTFINGGLVSEELVAWIGLDWADNLHQISIYDIASEQVENYALKHSAETLQRWLDDLRKRYNGGKVGVVLEQSRGAVLYALMSCDFVVLYPVNPHALASYRKAFYTSGAKDDPKDATLLMEMVRKHPERFRAWEAEDPDTRSLRLVVEARRKLVNQLTRCTNQLTSHLKSYFPQAIEWAGDLDSRQACDFLLEWPTLEALQQARPSRLRKFYFNYGRPRVETIQARLEQIKQALPLTQDPAAILAGSLMVRALAAQIRPLIAVIEEFDDEIKRLFQKHPDRQVFESLPGAGAVLAPRLLAALGADRERWESAAEIQTLSGIAPVTEQSGKKRFVHRRLACPKFVRQTFHEFARSSIVWCDWAKAYYHHLIAHGKGRHAALRALAYKWIRILFACWKNRTPYQEDIFLKSLAQRGSPLSQLTQAVQQIKPPKKRVA

SEQ ID NO: 231264 - protein, 396 aa, unidentified
MTTIGIDIGGRSHAVARCRAGQPRADREVLRVSQSRVGFATLDSWLERQPEPVTLVTMESSGHYWMPLASHLRRREVPVAVVNPLAAKYFAKSRLARTKSDPADARSLAEMAMRDTPPARDPLVGAELRQAARFAMTLVTEQAKVCQRLIRLVELGFPELGELFDDPTCRTAREVLRVAPTARAATRRRTSTLANANAGPGHRRLGGAKAERLQAAAATSIAVPELDAEVAFEVGLLLDQYDLLEGQIEAADRHVASLLDGELARRLRTIPGVGPSIAATLLAEIGDIERFTDFDQLLAYARVHPAERSSGRKGSNPETAWHMSKAGNAHLRAAAYRMAIVGVQHNPVIAAHYARKRAAGKSKMNALGHCMRKALSIVWGVWRNGADFDPAWRAES

SEQ ID NO: 231265 - protein, 418 aa, unidentified
MEIVYERVAAIDVGKKIIAVAVRTPGQHPGKRRQQVRKYNTFHQTLAEMVAWLVAEGVTHVTMEATGIYWKPIFHALCAAERPMEVLLVNARHVKNVPGRKSDALDAVWLAELTECGLLRGSFIPPPQIAAIRELTRYRKKLIEQRASELQRLGKVLEDSGIKIDSVASTLTTVSAREMIEALINGERDPAVLADLARGVMRKKIPELRMACAGRFGDQHALMCTLHLEHIDHLTDMIARLDTRIDEASLPFDPQIQLLATIPGIGERAAQVIISEIGVDMTRFPTAAHLASWAGLCPGNNESAGRHRSGKTRKGNTELCAVLTECAWAAGRTSTYVGAQFRRFHRRFGKKGGRKAAVATAHTLIVIVWHVLADTTGYQDLGADYFTRRLDNPEARKRRLIRELEALGHKVTVEPAAA

SEQ ID NO: 231266 - protein, 412 aa, unidentified
MERVVERCCGLDVGPKTVAACVRVGAPNGGRQQIICTFSTMTEDLLALRDWLAAHEVTHVAMESTGVYWKPLWNVLEGRFELLLINAQHFKAVPGRKTDMKDCEWLADLLQHGLIRGSFVPPTATRDLRDLNRNRTILVQQRAAISNRIEKLLEDANIKLAAVASHVLGQSGRAMLHAISAGEADVDTLAGMARAKLRNKIPELRVALNGMIRDHHRFVLKQWLLELEAVEKRIASFELEIEQRTEPFQEVVNRLMSIPGVDRITACALIAEIGTKMSQFPTAQHLASWAGICPGNHESAGKRLSGTIRKGNPWVRRILCQAAWAASHTKDTYLSAQYRRLAARRGKKRAIIAVGHTILVIAYYLIARGERYRELGGGYFDQIHSEGLKRHLVKRLEGLGHKVTLESPIPGC

SEQ ID NO: 231267 - protein, 353 aa, unidentified
MTLYIGVDFHPHQQTVAWCETGTGETKTFDLAHDLEKVRQFYSSLPEPAIIGIEASSRAVWFENMLFDMNHKLLVGNPVLIRKRATSRHKNDRRDAELILELLMRDEFPALWRRPHESNQILEILRLRSHLVCQRTQVYNRLQCVAHNAGLPKGRMKTAAFQAVINALELDEADDLSRTHLFALLESFNKQIAELETWLRKKAEADAPVQLLMTQKGVGYLTALSTVHTLGDVSRFTRLGKQVASFVGLDPLERSSAGKTRFGRISKAGSPLLRFQLGQAAQIGARTDPKLKRFYKRLAKKKPKGVAKTSAARKLLVKLAIMLRDNITADEFDRRGRTVGNAREARGPQMTAV

SEQ ID NO: 231268 - protein, 354 aa, unidentified
MENYTIGCDAHKRYSQISVMDSHARVCKRTRIEHTPGAVQKYLAQFPTGTPVALECVGNWYWIVDEIEAAGCVAQLTNAGRAKAMMGHVNKTDKLDADGLAMLSYNGTLPTVWIPGGVLRDERELPRTRMAMSKYRTAVKNRIHATLSKHAIQLEEESDVFSGKGLAALHKSVESLPAETRRCVEVQMVLLKDIQGCIEELENRIREKMQWTPSLCLLKSLPGVGDILAIVIEREIGCVTRFPSAENLASYAGLTPKVNSSGGKTYYGSMRKESNQFLKWAFVEAANVIVRCHHYPGWKSKHVVRLYERTAQRRGHAIAIGAVARHLAEATYWVLTKEETYHEPNSKKDLPKQG

SEQ ID NO: 231269 - protein, 343 aa, unidentified
MNEVTTIGVDLAKNVFQVHGVDASGQVVVRRQLRRSQVLPFFKKQAACVVGLEACATAHHWAREIAKLGHDVRLMPARYVKPYVKRNKNDAADAEAICEAVTRPTMRFVAVKTEEQQSVLMLHRTRQLFVRQRTSLINAIRAHMAEFGIVAGVGRNGVERLLRLIDDGSDERVPPVARECLQALRAQLVLVKRQILEADRRILAWHRSHELSRRLETIPGVGPLIATALVASIPDPHAFGSARDVPAWIGLVPKQNSTGGKERLGSISKAGNRYLRSLLVVGALSVIRRAKQVGYTRRPWLAELMARRPIKVAAVALANKIARIAWALMVSGTRYREPASQAV

SEQ ID NO: 231270 - protein, 348 aa, unidentified
MVHFVGLDVSVKETSVCVVDDAGKVILEQKVPTEPDDIIALLISLGETYGRIGIEAGPLSQWLVNALTAAELPVICVETRHMKALLTAQQINKTDRNDARGIAQMMRVGLFKPVHVKTLVAQEQRMLLTSRKLLQRKLLDVECDLRGTLRNFGLKVGVVSSGRYEARVRELVEGFPRLAAIAEPLLKVRQVMRQQLAVLHKMLLDTVRDDPVCRRLMTAPGVGAVVALTYRATVDQPQRFLHSRAVGAHVGLTPKRYQSGEVDYDGGVSKCGDALLRTMLYEAAHSLLTHSRKWSWLKAWGVRVAQRRGIRRAIVAVARRLAVVLHRMWVDGSEFRWSKGSAAVPTVA

SEQ ID NO: 231271 - protein, 355 aa, unidentified
MVIIGLDYHPSFQQIAFVDDETGEFGEKQLVHGNQEGESFYRELKKRGVRVRVGMEATGHAGWFEKLMTELGFELWIGDPAQIKAKRVRKQKNDREDARLLLQLLMENRFPRVWVASLENRDLRQLLWHRHRLVQMRTRIMNQLQAVAMNEGVRRKKGLWTKSGREQLEAFLLAPWASRRRKDLLELLDRLNPTIAELSTAIEQEAKKHPAVVRLMTHPGVGPLTGLAFVLIIGPPQRFRCGKQIGSYLGLIPCEDSSAGKQRLGHISKQGNSLMRFLLVEAAQIAARHDPNWRRKFLHLAMRRGRKIAKVAMARRLAVCLYWMLRKEWNYQQLLKFGSHAGQLETGHGVKEITA

SEQ ID NO: 231272 - protein, 346 aa, unidentified
MGGEVRYMGEIVNTPEAIAKVVTRLKRGTDRLTFCYEAGPCGYTICRQLRELKQDCQVVAPSLIPKKPGERVKTDRRDALSLARLHRADELSPVWIPDEAQEALRDLTRAREDMKHLQRQAKQRLLSFLSRHGHRYTGRSRWTQPHWRWLEGIRFARPEQQIVLQEYIDTVQACGKRVASLDREVETAAHASTLWPVIEALMALRGISLLAAVTVVAELGDLTRFANAPQLMAYLGLVPSEHSSGKRERRGGITKTGNGHVRRVLIEAAWTYRHAARKTAILQRRAERTAPEVQEIAWSAQKRLCQRFRNLMARGKLKNQVCTAIARELVGFIWAIGQQVALLSRA

SEQ ID NO: 231273 - protein, 344 aa, unidentified
MEVAIGVDPSKSSLAVAAVDPLGRVVGTAEFSNDPRGHRALLGWVGERGPDRVIGIECSLSYGATLSRVLLRSGEDVREVPTTLTHRQRRRRASQGKSDMVDSVAIARIVASGEVLASAHRLEVLADLRALVEYRDQLVRARTQVANRTHADLVNILPGYERQVPNLRAKAHRTTARSLLRGDRSVRGELVRKRLGELSRLEGEIAAMDRRIRATVQKTGTSLTSIPGVGPFIAAKILGEVGDPSRIRSKPAFAVLSGTAPLSASSGQVQRHRLNRGGNRQLNWALHYIALVQCRITPEAQAYMARQREAGKSHKEAMRCLKRQLSNVVYRHLVADARRAELAA

SEQ ID NO: 231274 - protein, 344 aa, unidentified
MTYYAGLDVSLRTVNICIIDDRGERVAETKLASDVQDIIAYLDDLDIEIESVGLEAGTLTQYLTYGLQAAGFEVICMEARQVKAALSAMRNKTDKHDARGIAQLLRTRWYSRVHVKSMQSHHIRMLLASRKAVLSKCVDLENEVRGLFKIFGIKLPPKLGHGAFDATVRDIIEVDETLSHALLPLLDARLVLYQTFRILDNRTRKMAHRDPVCERLMSAPGVGFITALTFKAGVDDPTRFKRSRTVAAHFGLTPRRFQSGEMDIEGHISKCGDADVRCALYTAANAMLTRSSRWSSLKAWGMKLAKTRGHRKAVIAVARKLAVVLHRLWIDDTQFCWGTEGARS

SEQ ID NO: 231275 - protein, 396 aa, unidentified
MTQLNAESASIHTVGAPIWPEQATIHSAYVGLDVHKETIAIAVAEPGRQKPVYEGEIANTPKRVERKIQQLSERYGGGLLQFVYEAGPCGYGLYRQVLTSGHDVQVVAPSRIPKAPGERIKTDRRDALKLARLARSGDLTPVWVPDTEQEAMRDLTRARDDMKAQERKARQQLNAFVLRHGHHWPKGKSRWTQTHFNWLESLRFEHDWQQVVLQEYIEAVKAASRRVADLTVQMERALPQWSLAPVVEALVALRGIDKVAAMVLLAELGDISRFDSPRQLMGFLGLVPSEHSSGSTRRQGGITLTGNSHARRMLVESAWSYRFPARQTMHLKRKAAGAPEEAKAVAWQAQKRLCGRYRDLTRAGKNTKLVCVAVARELAGFIWDIVWRVMPAAQAA

SEQ ID NO: 231276 - protein, 352 aa, unidentified
MLPGIERQPRKKLEPSPERLLAVLHRWRDEAVRAGRTITRIAVAFEAGRDGFWLARWLEARGVEAHVIHPSSVAVSREHRRAKTDRLDTELLKRGFSGWLRGERGHCSMVRVPTLAEEDAKLPNRERECLVGERTRIINRIKATLARLGIRNFKPTPRQAAERLATLHTPEGMPLPPNALAELQRDLARLGLVIGQIREIEKARQKRLEQEPQTKPHAMVRRLARVVGIGIETADMLVNEVLSRPMRDRRAVARYAGLTGAPDESGARRREQGLARAGNARVRRGMIQLAWRFLRFQKQSTLALWYRARTADSRIGTRKTMIVALARKLVIALWRFVTTGEPLEGVALRPAA

SEQ ID NO: 231277 - protein, 346 aa, unidentified
MTIVEDTCVITGGVDTHADMHVAAALDPLGGLLGVREFPATAAGYADLLGWLGGFGDLALVGVEGTGSYGAGLARHLAAAGVRVVEVDRADRQDRHRQGKSDPLDAVSAARAAQSGRASGAPKGRDGAVEAIRALMVAKRSARNERTQAINQARALIVTGPDDLRARFAGHSAAALAEGIAALRPRPGDAAQYAVRVALRELGRRVEFLDAQLERLDDLIVPLVTARAPGLLSLYGVGPDTAALLLVAAGDHPERLRSEAAWAHLCGVAPIPASSGKVRRHRLNRGGNREANHALWRIVITRMSAHPATRAYIERRTKEGLSKKEIIRCLKRYVAREVYHHLRGGG

SEQ ID NO: 231278 - protein, 370 aa, unidentified
MKVTRIGLDIAKQIFELHGVDRRGRVVVRKTLRRERVLEYFSQLPACEVALEACGGARYWQREIGKLGHTVRLLPTNKVKPYLDGNKNNAHDAAAICEASSRPSMRWVEPKTIAQQDLQSLHRVRQVTVRQSTLLANHSRGLLLEYGIAVARGAAALQRARAELLEPDEQRLSPLLKQLLAAQWRMLKLHQQQVKVHHRRISSIAQHDAGCRALLKVEGIGPLTATALVVAAGNGRQFKNGRHLSAYLGLWPGHSNSGNKTVMLPITKRGNRYVRTLLVHGARATLYHARKKADPRSLWLQRLQAQRGHNVAAVALANKNARLAWALLRFGQAYRPNLAHAPTAERGATPCTARLPPIQNPAFFRPALKG

SEQ ID NO: 231279 - protein, 337 aa, unidentified
MKYSGIDLHSNNSVVTVTDDTDRVVAEKRLLNDIAKIVGFLLPWRDELAGVVVESTYNWYWLVDGLQEAGFEVKLANTGAIKKYDGLKHSGDESDARQLAHLLRLGILPTGTILPPEHRATRDLARKRMQLVRSRTSHILAIENILARQRGATINSNAIKRLTATDVNQMGLPEDVALAVESNLAVVTTLGAQIELLERRLQEKLGERPEYVLLTSVPGIGRILAAIILLETGPIERFHAVGNYASYARCVDSQRLSNGKKKGEGNVRNGNKYLVWAFVEAANFALRFNAEAKRFYERKKARTNNVVATKALAHKLARACFHILKERTPFDVRRCFA

SEQ ID NO: 231280 - protein, 387 aa, unidentified
MIYVGIDIAKQKHFAAAMTADGEVLIQPFGFNNDSEGFSLLMSKLKTLDKENILIGLESTSHYGENLICFLYNMGYHIAVINPIQTATLRKSNIRKTKTDKVDTILIIKSMILNNHRIFTKADIESIRLKSLCRFREKTKKAKARLKIQLVSYVDIIFPELQYFFKSGIHIITSYELLKKHSNPNDIAALHLTYLGNLLKKASHGHFGKEEAIALKGLAKSSVGSGDAYLSIQITQTISQIELLEKQINELDESIKSIMLEMDSVILTIPGIGFLNGAMILGEIGDISRFANPSKLLAYAGLDPTVNQSGKFNAKTTRMSKRGSKLLRYALINAAWNVSLNNKTFNDYFMLKKSQGNNHYAALGHVAHKLVRVIFKILKDNVAFNLD

SEQ ID NO: 231281 - protein, 396 aa, unidentified
MLYLGIDQHKAQITINLRNEQGNVIQQGQISTDHAKVDDFFVALKKQATRTKGFMAIVEVCGFNDWLIKKLNDYGCKEIVLMQPDKTSNKKTDRRDANALCELLWNNRKRLQNGERPNGIRRVTIPTQEDAEVRQLANMRQYLVKQRTKCINKIRGVLRKHNMEQDCPTKNYKTKKAKEWLKTLALPLSDCLENKVHLAVWETLEAGLLEVEIELAQRSETNKNVLLLISIPGINHLGGVALLSRIGDIKRFKTPDSLANYFGLTPGCRNSGEMNRPGSITKTGSSLARNILNTAVNHVIRKDKAMKDWHKNIKKRKGSKTARVAVMRKLATIVWHILKRQTTFQFRFDPMANKPTVKSKKKTTSGFLRHSNSNPQKKKLKTPLKNRGKTAVKARA

SEQ ID NO: 231282 - protein, 351 aa, unidentified
MNTQITAQPKLYIGIDIHKRSWKIDCATELFSGKSFTMPPKPELLRDYVLKHFTDYEVSTAYEAGCCGYYAHRAFKSYGWRSLVVNPADIHRKGKEKYTKTDKIDAQLISRELKDGRLDSIVVPDIEREQLRSLFRRRNDLVKDYRRVKSYIKMQLLYFGISIPEEFDNDHWSHNFRSWLDGIVFDYPTARESLSSRMRSFRFIDKELREVSTKMRAYCRKHYKNDYYLLRSIPGIGGIVACGILCELGDLRRFNNIKHLAGYVGLAPGIHQSGDSQKSTGITMRAHRLMRSYFIEASWQSIRTDPVMQAYYRTHIGKNVKTIIIKVARKLLSRTLGVIKTGIPYEIGVVE

SEQ ID NO: 231283 - protein, 349 aa, unidentified
MLIIGCDYHPSFQQIAWVDTESGECGEQRLAHSGGEAERYYRGLNGQRVRVGIEATGHARWFEGLLTELKYELWVGDPAQIRAKRVRKHKNDREDARLLLKLLVEDRFPRVWVPSAENRDVRQLLWHRHRLVQMRTRVMNQLQAIALNEGVRRRKGLWSQRGREQLESLTLANWATRRRKDLLDLLDRLNPRIEGLSEAIEQEAVQRPEVKRLMTHPGVGALTALAFVLIIGSPERFRGGKQIGSYLGLAPCEDSSADRQRLGHISKQGNALLRFLLVEAAQAVVRFDPEWRRHFLHLAMRRHRAIAKVAMARKLAVGLYWMWRKGWDYQQMAQFGSHVGEPVTGHGVQ

SEQ ID NO: 231284 - protein, 416 aa, unidentified
MPSAHGTVAGIDVHKKILVVVILRSTDPDHDLATGRFGTTHCGLEQLAAFLRQHGVTEVAMESTAQYWRGVWMALEGEFQLTLAQARSTRAVHGRKRDLADARRIAKRLLANDLTVSYVPPPEQRDWRLLSRARVAMQESVSRLHSQIEVLLEQAQIKLSSVVSDILGLSGRRILHALVDGIGDPEQLAALAHHRIRASKEELRDALWGRLTASQRLVLKLYLAQIEQIEKDMAALEKRLALEQSAEQDPIVRLCGHPGISALAAQQIIAEVGPRAAAFPSAGDLASWTGGCPGSNESAGVSTSDRSPKGNRMLRRVMSQVAWAAIAAKGSEPQRRYRKWLPRLGPQKAAWAVAHYILRVVWHILHDGVPYRPPDQTSLDRCSVLRKAKRVIAELSKLGYSVTVTAPSAQAEPVTG

SEQ ID NO: 231285 - protein, 339 aa, unidentified
MEVTTIGLDLGKDVFQVHGITADGTVVFNRTIRRRQLLKFFEAIPRCLVGIEACGSAHHWARELIEIGHDVRLMPAVYVKPYVKRGKTDAVDAEAICEAVTRPTMRFVAVKSKEQQALLTIHRVRQLVVRQKTQMLNVIRGLLREFGHVIGNGPVAAMRFIKTFETGDSPDIPDVAKSMLKTLCDQVASLDERVTFYDKLVEHHAKIDERAKRIRTVPGVGPITASAIVATIGDGKQFKNGREFAAWLGLTPLNRSSGGKERLGSISKKGDRYLRRLLVIGMTSQVQRARGYPERVHPWIMQLLERKPVRLATVAMANKAARIIWAILTKDTYYRQAAA

SEQ ID NO: 231286 - protein, 342 aa, unidentified
MMIIGCDFHPGFQQIAYVELETGEYGERRLNHPTEAEQFYRSLAGKQVRIGVEATGGLRWFRRLMHELGHELLLGDASAIRASSPRKQKTDMRDARHMLRLLEENRFPAIWQPPMENEDLRQLLLHRCRMVRMQTRIKNQLDMMAKNEGLVSSRSWSKKRRQQIEALPLSGWHVQRRKDLFELMEELDKRIEPLDKAVLEASKQSPEAVLLMTHPGVGPVVSLAYVLILGDWRRFPRGKQVGSYLGLIPAEGSSGKRQQRLGHISKQGNTLLRWLLVQAATKAQRHDPSWHRQYLRLSIQKHHGVAKVAIAHKLAVRLYWMLRSGQDYKQVKERGSHAGQSV

SEQ ID NO: 231287 - protein, 395 aa, unidentified
MYSLFVGIDISKDSFSVAALDEKAKTVFSMNPLMNAEGFSDFLKMLSSHRKDFSTVVVALESTGPYHLNLYSFLLSKGITTIIVNPLIIANFNRLSLRKTKTDKKDAFTIARYLFLNRDSICNLTSSQVTTDLRDLARERESILKMVASMKNDIRRILQSTFPELEQIADVLCVTMLSFLKGFPSARLINQATSREVAEGFSQKGSGRRISMPYTRIIELAKSSVATTSPSKELILPGKIETLFHLTKRADEITKMLVELCRSIRQAEFGILTSIKGIAAKTAAPFLAELGDHQNFQSYKKMLAFSGLDPTTHQSGKFEGMSMISRRGNRHLRKVIYNMTFCVVRYSGPFRDYFFRRKQEGLPFKKAIMATAHKLVRAIFAMLKSGTCYRTAEVV

SEQ ID NO: 231288 - protein, 337 aa, unidentified
MDVLYQSCAGIDVHQANIVVCILHGPLTSTRPKREMATFDTTTKGLRACHDFLSQFHVEAVGMESTGVYWRPVWHALCDDFKLILAQPAHMKAIPGQKTDKKDAHWIAKLTRIGLLPRSFVPDEAIQELRELTRQRKHYVESRNRETNRIHKILQSGGIKLTTYIEDIMGLSGRNLLQLLVDGTPITPRIVHQSVYTSLKKKVPQLLEALDGYFSDHHRFMLKQSLEIYDFYQKQIELLEERMNVYLSQYENHVEILDSIPGIDVITASVIISEVGVDMSQFPTAGHLASWAGLCPGNNESAGKKRSTKIRHGNSYLKKCLCQAAFAIKKQSTPNLA

SEQ ID NO: 231289 - protein, 429 aa, unidentified
MAAGQAVMCPGRTLLVLESSHAAVVAAADPVFVGVDWGNSHHQLCIVDAAGGIVEQGRFAHDVAGLHLLEGRLRRHADIVGVSIERSEGLLVDALQQQGYRLLCVSPKMSARARERYRLAPVKSDAFDAFVLADSLRHEHRHWRSLAVPSPLLAELRALTRDRERLIWNQRDVENQLRAVVQAYHPTVLHLFSSLDRDISLAFLRDYPTPAHAGRVGPARMAAFCARHGYSGRTKPEVLVERLRDNLLSASSGTTAGKALSAVLFVDQLDLLNSQVRTMSKRIRERLTAHPDAQIFLSFPGMGKITAATMLAVMGEDRMRFPTADVLLAEAGAAPVTQASGRTRRVRFRYAANKRMRHAIDWWTFVSVRENDWAREAYRQARARGQQHNRALRGIGARWTRILWRCWTDHSRYNPELHLNKQPTRPVSG

SEQ ID NO: 231290 - protein, 289 aa, unidentified
MPRKSKDTVAVLGIDIGKNVFHLIGLDKRGAIVLRQKLSRGQLEARLANMPPCLIGMEACVGAHHLSRKLKALGHDPKLMPAKYVKAFLKGHKNDFRDAEAIAEAVQRPTMRFVATKTAEQLDLQALHRVRSRLVSERTAIANEIRAFLLDRGIAVARGLHRLRTALPGILATRTDVLAPRLLHLIEDLIGDWRQLDERIDNVSLEIGVLAQDDTGCERLMTVPGIGPIISSATVAAIGTGDVFCKGRDFGAWLGLVPKQISTGDRTILEKISKRGNKRAGFLMTGALG

SEQ ID NO: 231291 - protein, 350 aa, unidentified
MSVDPAYKVVRSGALAKEAKWKGYRIVIDGVLGIDVSKNTLDASMSSCNKVRAKCFTNSPDGWRHLLDWLIGQKIRRVHACLESTGRYSLGIACKLNEAGHVVSIVNPAQIRDFARTKLGRNKTDAVDASHIREYCELFKPQPWAPPSEAHRRLGELQTIRAGIVAGLTEWKNRKTSGMADAVAQSLADATISHFTSQLGAVEKAIAQAIDNDFDLRRKRDLLLSISGVGETLASVVLAELPGPDVVRSSAEVVAYAGLNPRRHQSGTSIDRLTRISKIGNSVLRAALYMPAMSAMRYNPAIVALVTRLKSRGRLKPKQIVVAAMRKLLVLCFGVLKTGKPFDPALAMGC

SEQ ID NO: 231292 - protein, 375 aa, unidentified
MKNKTGTVSDNKQVQARVRSQSKARVKLGLDMHYRQVTVAMQEEDGAIKALGKMSHDGFSNWVEQKLQAGFELYSCYEAGASGYWLHRDLEGLGVKNLVVAPKAMGQDRRQKTDRRDSAELVDALDRYLRGNRKALNPIAIPSVEVEEKRALIRYHRQIMADRNRCEARGKGLLCAQGIEVRGKWWQSQSWQELKTHPRLKSWMQAQLEGWRKKRLALETEQQSLRRQIEALAPALLPKGVGAYSAVALEYELKGLARFQRARALSSYTGLCPGIHSSDGRGREGSINRCGNAAVRWNLVEMVWRLLKWQPQYEPVRQLARGLLKSKRARKRLAVKAARQLAIDLWRLHTGRATAQELGLIMQPTTQKPTSRTQY

SEQ ID NO: 231293 - protein, 371 aa, unidentified
MDHIGMDVHKKESQICILTEEGELIERRMHTEPQRFAAVLGDRPRARILIEASTDSEWVARCLEALGHEVVVADPNFAPMYATRTRKVKTDRRDARALAEACLLGAYRRAHRLSDPQRHVRGRLLVRDALVRTRTRYISLIRALLRQQGYRVPSGGAEAFPTRVRTLALPGPLLSLIAPLLAVMRHLNRQLAYSDETIERVSAHDERVQRLRSVPSIGPVTAAAFVATIDDVQRFCHAHHLEAYLGLVPREDSSGDTQRRGPITKAGSGRTRWLLIQAAVSILRRRPPEAEAAPDLGPPHRGPSWEARRGRRPRPPPGRDPLCVAPRWHGLHATPTPIAGGYHHAARLRERLSDQPRCRDSTGLAPVRWGG

SEQ ID NO: 231294 - protein, 311 aa, unidentified
MVVLHHPPHICLGCDVAKDTIAVSCGGPATVIANRSRDIRRFLRNCEADLVICEPTGGDETVLIEECLRRGLAVHRADTRRLKAFIRSRGRVGKSDAIDAREMVAYGMERWASLSLWQAENPEEARLKALVRRRADLVAIRVAEQNRAMAPGGRELAVTFKAMLAAINRQIALLDKEIRMLMRSEAFAARASIAMAMTGIAETTAAALIATMPELGTLDRKKAAALAGLAPHPNESGNKIGYRRMRGGRPVMRTILFMPAMQAARGRGEFAAFYKRLVEAGKKPIVAIAAVMRKIVVTLNARFTEKVIQQS

SEQ ID NO: 231295 - protein, 355 aa, unidentified
MNQEKYIGMDVHDASISAAVKNAQGKLLMECVLESKAVTILEFIQGLRGTLALTFEEGTMAAWLHDLLKPHVSRLVVCDPRKNALLRDGSQNDRADARNLAELLRTNQVHAVYHGQHGTRALKELGRSYLTLTQDSTRVMNRIKSVYRSWAIPCAGTSVYSRRHRAEWLAQLVEPGVRIRAEHLYQQLDSLQPVRQAARRELLRESRKHAAVKLLRQIPAIGPIRSALLVALLQTPHRFRTKRQLWAYSGFAVQTYDSGEFRFVRGKLQRNRERITVRGLNRNHNHDVKNLLKGAAISALQRPGPLQDFYAALVEKGMRPSMARLTLARKIAAITLTMWKKGVSFDPKQLQRPAA

SEQ ID NO: 231296 - protein, 365 aa, unidentified
MNLNTATKAGQIIGTMNGLQVIGLDIAKNVFQLHSVDMSTGEIINVQIKRAKVLEYFVNKPPCLIAIEACGGAHHWAREFTALGHSVRLLHAKIVRPFVAGNKTDATDARAIWQVVQQPGVKFVGIKTTEQQATLTLHRQREMMMKMCTMQTNALRGLLYEFGATFAQGRQALFKDVERALEGLADQLPQMVRDSLREQVARIKAVIEDIKTIEQRLKVQLRQDRQMQRIFQIPGVGLLTATAAIATMGEASAFKSGREFCAWLGLVPSQTGTGGKVRLGNITKRGDTYLRTLIIHGARSVLTHTKEPGPWLEAIKGRRPASVVIVAQAAKMARTIWAVTAKEQDYKRDFQSVRPVVAAKASVQA

SEQ ID NO: 231297 - protein, 410 aa, unidentified
MLFVGDDWAEAHHDIEIEDDQGRVLVRRRLPEGVAGLAVLHALVGDHLQEGAEPEQVLVRIETDRGPWVQALIAAGYTVYPINPLQAARYRERHGVSGAKSDPGDAHVLAEIVRLDRAHHRPAAGDSLLAEQVRLAARAHQSMIWMRQRAANTLRSLLRECYPAALEAFSDDLAGRDALAVLTAAPDPATGRRLTPVRVAGLLRKAGRQRNLQTRAEEIVAALRSEQLPVRAELAAVNAASVSALVAVLTTMVAQTALLEEQVRLGFGQHPDAQIYLSQPGLGTILGARVLAEMGDDPTRYADARARKNYAGMAPITRASGTKRIVLARYTRNRRLADALYQQAFSALNSSPGARAYYDRHRTAGDTHHQALRALANRLVGILHGCLRHHQPYNETTAWANQTAPTTIAA

SEQ ID NO: 231298 - protein, 391 aa, unidentified
MSLYFVGIDISKYKHDCCIISATDQKVISKFSIKNDKVGFEELITTFNSLSSPEDIRIGFESTAHYALNLELFLENAHHSFMEVNPVLIKEYKKSTTLRRTKTDSVDCESIARWLMTVEYKPHSKGFYHAYSLKSLTRLRDRLIRQRSFYLVKITNVLDHTFPEFKPFFNERLSKTALYLLENYGSAEKMARMNSVSYEKLRSISRGKFSPQQFIALKELASNTVGVNNSIFDVELNSLLTLYKTLVTEINTLEKEINLLIEEVHPHYLSVPGIGPISAAIIYSEYGDISNFDNPGQMLAFAGIEPGINESGTESHGGRMVKRGSSQLRYALINCCLPLIRFDMTFATYYAKKRAEGKKHRVAITHVAKKLIRVIYALERQDVDFNVQKLR

SEQ ID NO: 231299 - protein, 438 aa, unidentified
MSNKVIFSVDELFISVGIDVGADFSWMSIALPNQQFVGKPYKILHNSMDSLTAAVSKIKEAEELYSLESRIFLESTGIYHYPLFCYLRDKGFNVSVINPIITKNSTNINIRKVHNDRFDSKKAALVGLKPDLKVSLMPSDLALNCRNLCREYYDLMDNRSAYVNKLQGELRMAFPQYLGIFSKVTVNTSLTLLETYTSPAAFIEADRQEIIDAIKSTARFGLTYALNKYNAIIQAANEANEFGYIIDSNIKRIRLYIGFIRKYDEEIKGILGSMHELVDANEATDFVRQIHLIETFKGAGFLSAVSLMGEIGDFSAFSKPKQLFAYFGLDPAVKQSGKFEGTKTQMSKRGSAIARRVVHTLALQSIGTSRTGEAKNPVLRDYYLKKCESKPKLVAMGAVSHKVCNMIFAILRDNKPFEIITPQEHIKKHNAAKCDIAA

SEQ ID NO: 231300 - protein, 342 aa, unidentified
MDHFAGLDVSVKDTSVCIVDEVGKIVREVKVASEPDALLAVLRNPAYHFKRIGLEAGPLSQWLFSALAEAELPVVCVETRHMQAVLKAQINKTDRNDARGIAQMMRVGLYRPVHVKTLRSQKLRMLLTHRKLLQSKAIAIENDLRGTLRNFGLKVGMVGKVKFETRIKELVENLPDLAILVEPLLIVRRTLREQIVILHHRLLAIVRDDEVCRRLMTTPGVGPVVALTYRATVDVPARFRKSKSVGAVFGLTCSKYQSGEIDRSGRISRCGDEMMRVMLYEAAQSMLRSKKWSWLKAWAMQIARRRGMKKAIVALARRLAVIMHRIWVDGTEFRWTREAAVT

SEQ ID NO: 231301 - protein, 345 aa, unidentified
MNKQVSTPQAAVFCGIDVSAASLAVALIATDGSLARREFSNNASGHEALLAWLKKRDGRVRVSLEATGIYSLDLALALDAEACVELMVLNPKRVNRFQQTVCRSKTDAADAMVLAEYSQRMPFCRWQRPAASHLALRTVSRYIGSLVVEQAGLKNRLRSAESTVTTPRAVRVDLKRSLAAMERRVERLRAEALKLVESEAELCQRYQLLTTIPGIGAINALTILSELILLAPAMTVRQWVASSGLDPVHRQSGISLNKPSRISRAGNRRLRAALYMSALSASRYDRHLAAFYRGLRARHKTGLQALMAVARKMLHAIYGIFKSGTPFDGRRLFPNIQTEVESSAG

SEQ ID NO: 231302 - protein, 355 aa, unidentified
MGGVDTHLEFHVAAALDGYGALLGVEAFPTTVAGYRALTTWLRGFGSVTVVGVEGTGSYGAGLARHLHHAGIAVSEVNRPDRAARRRRGKTDAYDAEAAARTALAQHRQQQPPAAKLNQGPIEALRIYKNAHDQAVKQRTATLNLMHQLLVTAPQDLRQELSGLTKHTLPTRCARFRTPHTTAGDPRQAAKATLKRLGRRVLALSEEIDSYNDQITTLTATLAPTLLDQPGVGPQTLAQLLITISSNPDRFTTEAAFAALCGASPIPASSGKTDRHRLNRGGDRQANYALHMIALSRLRTHQPSRTYIATRTRDGRSTPHLRRMLKRYIARELFPLLRNDLHTHSQTNHQPARAA

SEQ ID NO: 231303 - protein, 312 aa, unidentified
MILPITPVYAGLDVAKATLQLHLQAKSIDLDNTPSGHALLVKRLSAIPGVHVVCEATGGYERAVAAALHAALIPVSVMNPARVRQFARALGTHAKTDPIDAQVLSAFGSALTPDSTPPRTPLELKLTAYVNRRLQLIEIRIAEEQRAEVCIDSILAKTFVAALRNLENAIAKIDLLIKELVAAEAKLAERVRRLEEISGVGLVTAVSVLAQLPELGTLSRGQAAALAGLAPYNRDSGTASGKRCISGGRPEVRRCLYMAALSASRSNRVLKPFYERLIAKGKTGKVALTAVMRKLIILMNHILKNPSFALEK

SEQ ID NO: 231304 - protein, 341 aa, unidentified
MTTRKVTPCSPKGNTTGPLDYDHYVALDWSMRSMAIGHLRPRDAAPQVWERPTNLVALKEWLQSLKGTTVLTFEETTTAHWLFVELRDCVNRIIICNPYKNRLLSDGPKTDKIDAGKLVTLLRAGLLTEVFHSDDQLYDLRLLVSAYTDLVRAGVRLQNQRSALERGHSESSTHAPFILEHLQKAIALYTESKEAYVRKFHGCARRIAQIRGLLPVPGVGIISAVTIVAVVVDARRFAHDGKYHSYCGLIKHQKFSGGRHYGKRKPQYSRTLKAVYKIAALAAIQGDNPIREYYESLLAKGFTDYNARHQVARYLATVTYGVLKTGTPYDPYRWRKFAAVA

SEQ ID NO: 231305 - protein, 330 aa, unidentified
MPAFLGIDVAKDTLAVALLGPKSPRKTSVPNTPAGYARLVQWLTNQHVSDVTVCLEATGTYSDDVALALHDAHYRVFLVNPARIAAYAKSQLARTKTDPADAVLIARYAHAEAASLTPYSPPDPALRELRGLVRHLDALQLQRQAELNRQAAGGHPSAVAEALAAHIAFLDKQIAETLRQISDHLEGHPELGKQHELLQSIVGIGSITASRILAEAGDLTRFRDARAVAAYAGLTPRQYSSGTSVQRRTRLSKIGNASLRRALFFPAIVAKQHNPVLQAFCARLAERGLAPKAIVGAAMRKLLQLAYGVLASGRPFDAALGLAHMTPKRA

SEQ ID NO: 231306 - protein, 386 aa, unidentified
MQTVADRPEAPTAIRTDLGAIFVSLELSRSTWLITSLTPGGGEKMSKHVVRGGDVAGLLERFAQLREKTRARMGEVFPFVVIQEAGLDGFWIDRVLQNEGIESHVVDPASIATSRRRRRAKTDRIDGEALVRTLLAYKRGEPRVCAMVKAPTPEEEDRRRVCRERKVLIAERVRHGNRVKGLLFSQGISGYEPLRRDRRGWLDTLQTGDGRLLPDHLKAQVRRELDRLELLLEQIKAVEAERDVLLAAQQAPASAAMLLDIKGIGPEFAAILWSEGLFRHFDNRRQVASYAGLAPTPWQSGSIDREQGVSKAGNPRLRTTLIQLAWLWLRHQPQSALALWFEERVRRNGGRLKKTTIVALARKLLVALWKYVTAGVVIEGAVMKVA

SEQ ID NO: 231307 - protein, 345 aa, unidentified
MELHTIGIDLGKTVFHLVGLNLRGEVVVRKKFSRTQLLRFTSNVHVGLIGMEACGGSHFLGRALREQGHEVRLIPAQYVKPYVKTNKSDYIDAEAIAEAVARPTMRFVPIKTDDQLDMQSLHRVRERWVMRRTAVINQIRGLLLERGITLRKGRCYVGAALPGILEDADAKLSGALRMLLAQLKLELDHLDMLIDEANALIKKTACENEACQRLVAIPGIGPVTATAVIVAIGNGGAFHKGREFAAWMGVVPREHSTGGQQKLLGISKRGNSYLRRLFVQGARAVLQQRTKQSSGLSAWLAQLTSRTHRNVAAVALANKLARIAWAVLAKNEPYRPSVVADVAAA

SEQ ID NO: 231308 - protein, 419 aa, unidentified
MNRVKTKKLRIVNPKTLIVTVDIGKTTDMGYCRAPQGREIKPFEFSNNLMGFEKLWDRICWTQATYHLEEVVVGFESTGAYGEPLVHYLRKKPVKLVQINPMHTKRMKDLEGNSPGKTDRKDPKVIADIIGLGHALSVVIPEGVAAELRRLSQARERSVQRRTALYNQLQELVFIIFPEFLQVMKDVKTRSAQYLLRHYPSPQDMVRCGADALASILRRVSRGKLGRQRAEALYEGARQTVGLEEGRRGILFEIQELVSLIEACEGFIERVEQEMVKGLKEIPYSNSLLSVKGVGEITVAGLIGEVGDFRQFHTLSEITKLAGLDLFEISSGNHKGKRRISKRGRPLLRKLLYFAAINTVRKGGVMRASYQRYLEGGMLKKKALIAIAKKLLRILFALVRDHSQYVESYSERKVLKLAA

SEQ ID NO: 231309 - protein, 342 aa, unidentified
MSYLGVDLHSNSFTVCRRTKQGKNSVRTFQIVRIADFRKTLCKRDLLAVEATGNTAWFVSRIRDRVKKVTVVNPYQFEVIRKSVKKTDKHDAKTLALFLSKDMLPEARMKTKENAQLHSLAGTRDKLVKQRTALINKVHNVLNSYGIKFKKESLGSEKGLKSVWAYEWDEIVRIELEVLIEQIRSLNKSIKTLDGQMTDHGKKLKGHENLTSIKGIAGRSATVLLSVIGDVNDFANENKLAAYLGIVPRVSDSNETVRHGRITKHGSKIGRTTLVQCTLVAKRYNPYLHRYYERIKSHRGSGKAIIATARKFLGIIYNTLKNDWVFEDFPNFVLTSSCVKKE

SEQ ID NO: 231310 - protein, 313 aa, unidentified
MNNPEINVGIDTSSQQLDIYVRPTGQFFSVDNDPAGIKEAVKQLQSLKPTRVLIESTGRLELEFVCNAHKAGLPVVICNPGQVRHFAKAAGRIAKTDELDAHDIAHFGEVMKPQLSSIKPEKLRAVSDLLTVRSQCLDISTMQKNRLKPMPKTVHKPIQAILKTIKKEIETIDKQLDKLVDSIAEWRQKRDLLLSAKGVGKVVAYTLTSELPELGALNRKEIAALVGLAPMNRDSGNFEGKRFIRGGRHKVRTVLFISMMSAIQCHPKLKPMYQRLTAAGKPKKVALIACMRKQLTILNTMVRNNAYWDEKIA

SEQ ID NO: 231311 - protein, 400 aa, unidentified
MLSIGIDVSKGKSTVCGMKPGGEIVYTPFEVQHTREGMSELVSLLRGSGEEVRVVLESTGSYHCPVVAALLENGIFVSVVNSLRMKRFCSQSIRRVKTDQIDAMQIALYGLAYWQELQPTRLPENTYRELQLLARQYYQMTSILIKAKVDFNALCDQVLPGMQELMNDHAGRHKLSDFVLRYRHTTHILEMGETRFRKDYCKWAEKKGYRNRERMAALIFATAQNGIPVLPNAPSTQIVITEAIRVLHTVEASRDAILTQMQALAKTLPEYSLVREMPCIGDTLAPRLIAEIGDVRRFHSKRALIAYAGIDAPPYQSGKFCANNRHISKRGNRYLRKTGYEVMQSYVMHKPANDPIFTFIEKKRSEGKCGKLAMVAGLNKFLRVYYGKVTELYRSLPAIE

SEQ ID NO: 231312 - protein, 407 aa, unidentified
MDLLKTVFGIDVSSRKSNVCIMVNGQKVNDYAISNDMVGFNQLLGDLKQVTKPQIIFEATGVYSRRLQAFLDMHELRYVMMNPLEAKRKTKDDLHQNKTDKLDALYLAKLQSEHPQRLAYVQSKEYQELMANNRIYEQASHDLITNKNRLHKAVQLTFPEIEHLLANPRGKNYWSIALRFPHPDIVLETKEADIIDFLKGLSGIGKKRANDITQSLIRLAKVACPAVKKNSAHVRGLKMAINNILSAEEECQSALQEMAKLAPKRDLEILTSIPGIGENTALRIISELGDIRRFNNPSQLNAFVGVDPQVYESGNLTAHLSISKHGTAIGRKVLYLAINQIQSAKKAGNPCHIADYYEKRKRSSETASHKKAAIASIHKLLRTIFALIKNDQLYSYDVAKHNQRLLS

SEQ ID NO: 231313 - protein, 346 aa, unidentified
MNCMNYIGLDIHKKSMSCYVRQADGTIIQESTITATRDALNEWMRQLPQPWIAGMEATLFTGWIYDHLVSGDAMVKVAHPAMLQAIAAGKKKNDRVDARKIADLLRCDYFPECHMAPREIRDRRRVLRYRNLLVRQAVQMKNKVSGLLMEAGVPYNQQKVHQKKYFAELLQKQKKEMPPSMPELLRLSRSTVEALTGMQRQLIRALESDALLAARVERLASIPGVGRVVALTWALEMGDISRFASVKKAVSYCGLCGAEKSSGGKTERTPISKQRNKHLQTMLIEAAKLAPRWNAELALVYDREKQRGNRNRATLAVARKLVAYLMAVDREERLFDTQVRVAGNAA

SEQ ID NO: 231314 - protein, 390 aa, unidentified
MAAVMIGVDPHKASHTAVVISAAEEVLGELRVHACVAQAERLLAWATAWPQRTWAVEGAGGLGHLLAQQLVAAGERVLDVPPKLGARVRLLAAGDMNKNDPNDARSVAVAALRSADVREVRADDHAAVLKIWSKRYRDLSRTRTQVICRLHAVLCDLVPGGVPKVITAARAARILRALRGGSDAVAAARRELAAAYLDDLRRIDAQQRETRKKLAVAVAATGTSLTGLFGVGPVIAAAVIGDVRDVSRFPGRDHFAAYNGTAPIEVSSGPRKIYRLSRRGNRRLNHAIHMAAITQIHHRHSQGRAYHDKKRAEGKTGKEALRSLKRQMWFLAGVVAVSCMLAVVLGAYGVLAQTSTTATPGRSCTVVQQVSVGLDLTCRWAPAWPGRAAT

SEQ ID NO: 231315 - protein, 340 aa, unidentified
MDDVTLVGIDLGKHSFHLHGQDAKGKAVFRKKTNRKQLVEFFATFHACTVVMEACAGSHRMARELAEFGHTARLISPQFVRPFVKSNENDFVDAEAICEASSRPAMRFVFPKTESKQTLSVLHLVRESMVRERTRTVNQMHGFLLEFGISLPVGNTAVTRLPAVLAMQELPPRLVAILERLHQHFKYLEEQIGEIDQELARQLADDEVGQRLMSIPGVGPVTASALAAKMGDAKQYGCSRDFAASVGLVPGNSTGGKTNLLGFSRRGDKNVSRLLVLCARAYMRGLEKRTGRLADWVRAMLAQRHSNEVACALANKPARTARAIVARQTTFDAGFATRPI

SEQ ID NO: 231316 - protein, 337 aa, unidentified
MTLYCGIDLHSTNSVIAVLDEQDRPVYEKRLDNDLDEILEALDPFKDEIVGCVVQSTYNWYWLVDGLIDAGYRVHLAHAGALPQYAGLKFTNDSADARHLAQLFRLGILPTGYIYPKQERALRDLLRRRLLLVRQKTLHHVSLQSLIARHSGQRLNANAIKKLEEEHLSEYLDSPILLGGEITHQARCWLDGAIARIERELRKHIQPRKDYQLLQSIPGVGPALGTTIALETGIIGRFPSAGNYASYARCVKSEKISNGKYKGQGNKKNGNKYLAWAFMEAAHYSAIWNPRIKQYYQRKQAKAHVLVAKKAVANKLARACYHMLKRGEPFDVKRAFG

SEQ ID NO: 231317 - protein, 341 aa, unidentified
MSVIAPVFSFGLNGYAGSGLALQDKAEKRLMQITIGIDISKETLDAYRFPDNQHIQVANGRAGHKSLVRWIGKQNGSLVVFEATGAYHRNLEAALAANGTAFAKVNPRQARRFAEATGRLAKTDRVDAIMLAKMGAILGLKAHEPKTEALHILRELITARRALMKDKVAAKTRLQTTRQTLLKNQINARLKQIKIQIQQVDAAITEKVAQDEALSNKLDILTSIPGIAETTAFSMLIEMPELGTLEGKQAASLAGLAPMSRQSGKWQGKERIQGGRAFLRRAIYMPALVATRYNPGLKAKYDQLIRAGKSGKVALTAIMRKLVVMANALLRDGRTWSELRP

SEQ ID NO: 231318 - protein, 403 aa, unidentified
MNAVGIDVSKGKSMVTILRPFGEIVSSPFEIKHTSSDILSLIKLIHSIEGESRIVMEHTGHYYEVLAQQFSAAGLFVSAVNPKLVKNFNNDSLRKVKSDKADSIKIARYALDKWQNLKPYSTVDELRTQLKAMNRQFHFYVKQKTAMKNNLINLIDQTYPNANTYFNSPLRSDGSQKWVDFVYTYWHVDCVRKMSLNSFVKHYQNWCKQKKYIFNKSKAEEIYTKATELVPVFPKNEITKRIIRQAIAQLNSTSATVETIRILMNETASKLPEYPIVMQFKGIGPSLGPQLMAEIGDITRFTHKGALTAFAGVDPGVNESGSYAQKSVPTSKRGSSNLRKTLFQVMDVLIKTMPQDDPVYQFMDRKRAQGKPYYVYMTAGANKFLRIYYGRVKEYLCILSESS

SEQ ID NO: 231319 - protein, 270 aa, unidentified
MTFRPHALHLKAELFVKSSRVHVRDDGFTRCNFHLKFFIMVYRGIDISKSSFVAAYPSTNGNPTKTFPNTTAGMRELIGTLAVAEHHCVMEATSNYGCCCTCYIRTVIAVSFAPPQKKQIKHFSRMMMPVTKTDEKDAYMIAMYGEKMNPPIYKMPSQATIRILTTEGFTYFDNAKQLSRFIGICPTYQQSRTSVNIREHINRNDDERLRSLLYIAFWTALRYNSRECYIRLKANEKPFKVALIAVTNKLVRPVLTITTINSIYRWICPG

SEQ ID NO: 231320 - protein, 344 aa, unidentified
MAQVTTARVTTVGIDIAKNGVCIHGVDAHGHVVVKKRLARQKVLPFLAQLPPCLIGMEASGGAHYWAREFTQLGHTVQLMSPQFVKPYVQSQTNDPNDAAGICEAVERPRMRGVPVKSITQQDVQALHRIRERQIKARTALINQIRGLLMEYGIVIPQRASQVRHKLPIVLEDAENGLTATAREWLHALAEELQALDQRIAATDQQIERVFEADEACQRLAQLPGIGPLTATALVAAVGDATECKNGRQCAAWLGLVPRQHSTGGKTTLLGMTKRGNCYLRTLLIHGARAVLRGVDRNTDARSRWLPGVKARRGMNCASVAQANKTARVAWALLAKGDRYRHAA

SEQ ID NO: 231321 - protein, 340 aa, unidentified
MEKRYIGIDLHRNRFTCCIRLENERTYVTEWRLEDLRRFVKKLRPSDEVAVEITSNTRLFHDAVAPQVARVVVVDTNQFRVISQSVKKTDPNDARLLSLYLSKGLLPEVRMKDKEHGQLASLTQTRDTLVKLRTALKNKVNNILSARGLNLAKEALSSEKKLAEVLELPFDEIVRIELRVIVEQIRSLNKSIAELEKTIGEEGSKLEGHKGLSSIKGIGKITGAILLSVIGDVNDFPDEGHLASYFGIVPRVSNSNKTERSGRIHKRGTKLGRTALVQSALIAANYSPYLKRFYEQVKARRGAGKAIIALARKFLGIIYRTLKNQWVFEDFPNFVLVEES

SEQ ID NO: 231322 - protein, 328 aa, unidentified
MQVATIGLDLAKHVFQIHGIDAAENVVVRKQLRRSQVMGFFEALPPCLIGMEACATAHYWARELTKLGHEVRLMPAKDVKAYVKRNKNDAADAEAICEAVRRPTMRFVGVKSAEQQGQLMQHRTRDLLMRQRTQVINALRAHMAELGIVAAQGREGTKALLAIIADDGDERLPVDARASLIVLAAQLQALQTLIGSIEKRIIAQHRASEASKRLATVPGIDPKAFRSGRDFAAWVGLVPRQDSTGGKHKLGPISKQGDRYLRRILVVGAHAVLRRARQHPEKYPWLTRLLARRPFKVVAVALANKMARIAWALLAKGGSYRVPRLAAA

SEQ ID NO: 231323 - protein, 358 aa, unidentified
MSPKSNIKYVGMDVHQETISIAVLDSEGKQLLYSVIPTMAQAIIEFVEGLSGTIHLAFEEGCWSGWLHGLLTKRVAKVVVCNSHKSAPLMASKRNDQIDSFQLADLLRMNRLTPVYHVDHGLQSLKELGGSYTALTRDTTRLKSRLKSLYRSQAIPHKGKTLYGIRRRKQWLEPLANPGLRDRAELLFAAHDAVQQLRRQAAVDLVATGRKHPAWGWINSVPFLGPIRTALLIARVQTPHRFRTKRQFWAYCGFALETRSSADFRFEHGKLKRRQKGTLIRGLNFDHNPELKQVFKGAAVTASAQPGPFREFYLGLLAKKIDPAMARLTLARKIAAIVLTLWKKGERFDPKYLKPQAA

SEQ ID NO: 231324 - protein, 390 aa, unidentified
MERPMQKLNDFSRSLVALEPDSTLIAVIEMSLSSWLVAGIVPGVERQPLKKLAADESALLKLLHRWREEAEKAGRRIERVAVAFEAGRDGFWLARWLKARSIEAHVIHAASVAVSREHRRAKTDRLDTELLKRAFLGWLRGERDHCKMVDIPTIKNEDAKRPNRERESLVSEQSRIINRMKAALIRLGIRGFNPKLKRAARRLEDLRTPEDEPIPPNTLAELRRDIERRRLVRDQIRQIEEARLQRLDHAPGDGPHAMVRLLARVIGVGIETADMLVHEVLSRSLRDRRAVARYAGLTGSPDESGRKRREKGLARSGNGRVRRGMIQLAWRFLLHQKDSALAQWFRARTENARGTRKPMIVALARKLLIALWQLVRQGVVPDGVVLRSAQ

SEQ ID NO: 231325 - protein, 403 aa, unidentified
MSEVKIGVDPHQLSNTIEVVDDNEALLGSGRFGTDKTGHAAMLRYVKTWPNRVWAIEGANGAGRALAQRLIAAGERVVDVPAKLAARVRLFDTGHNRKTDAVDAHSIAMVAIRTRGLRAVVPDAELEVLRMLADRRDELARHRVQIVNRLQRLLVELIPGHHKRDLSALQAKASLAAVRPRDLAGKTRRRMAVEEIADLVAVDAKLRKIKVELKGAVTTRGSRLMQIHGIGPAGAARILADVGDVARFADRNRFASWTGTAPLEASSGENVRHRLSRAGNRRMNHVLHIAAIVQIRHDTEGRTYYRRKLAAGKSPMEALRCLKRRLSDVVYRQLRADAQATPLEDGEAGPGGHCGASQESSAVDLPPHIDTSDQPLPGPAQPTLRPATRRRKTNEETALQPTP

SEQ ID NO: 231326 - protein, 315 aa, unidentified
MHARKTFMVGIDVSKAHLDVAVEGKRTVVRFDNDVPGRAALATAIAGAELVVVEATGGYEMAIVRALMAADIPVAVVNPRQVRDFARASGRLAKTDQVDARVILHFARAMRPAQIPHIDDGRIALAALVTRRRQLIDMAVAEKNRLEHAPQAVAALIGETIAALKAQLARVDAAIALAIEAEPDMAARRDLLLTVPGIGEVGAAVLIAELPELGGIDDKKLAALVGVAPMAHDSGAWRGQRHIAGGRATVRCALYMATLSAIRCSPAIKAFYARLRDAGKPPKVALVAAMRKLIIMINTILKRRTPWSEPQQHGC

SEQ ID NO: 231327 - protein, 321 aa, unidentified
MSISTQSAPKRIIAFEVSKASLTVHLMPEDQQVVIANTPKTINKLLRKFDNLETPFAICEASGGYERHVLACCAAANLPVHRAHGTRTRNFARFPGLVSKTDSIDARMLALFAQKSDGLRLWEPTDPQAEELRAWRRRRDDLAKIMRIEQNRLEHAAVKTVRLSLQRHVRSMTREMTGLDKQIAELVAATPSFKRKAELMQSIKGIGPKTASACLAYLPELGSLTEGEAATMVGLAPYAKDSGTYQGRRHVAGGRKDVRASLYMAALSALRSNPVIRDFAAKLRARGKPSKVILTAIMRKLIVIMNAVLKEGQASNRYGAA

SEQ ID NO: 231328 - protein, 350 aa, unidentified
MNSAILAVDLGKFNSVFCWFEPDSRAQSFRTATTTPENLRRELLRQPVARVVFEACSQAGWAHDLCEELKLPALVASTTGAAWQWKHLKRKTDRDDALKLARLAAVGEVEGVPVPPRALRQWKSLIGLRKRLVSERVRAQNRIRGLLVSQGLSAPMGAKAWTELGLAGIGQFARPLADCPPAELWRGELHLLLERLRFLDTQTREVEARLDTLAASDSRVSLLTTVPGVGPRTAEVIAVHLFDARRFRGADEVSAYAGLVPRQYQSGETDRRGRITRRGPKLLRAALVECAWCSLRYNAWARDTWLRLQANGLSKKKAVVALARKLLVRCWAILRTGQPWRAPTPATAAV

SEQ ID NO: 231329 - protein, 355 aa, unidentified
MNDTKYIGLDVHQATISAAVRDATGELVMEAILETKAETILQFFRGLRGSLQVIFEEGTWSAWLHDLLQPHVARVVVSDPRKNALLKDGNKNDRIDARKLSELLYLNKFNPVYHGEHGLRTLKELARSYLTITKDITRVMARIKAIYRSWGIPCAGQQVYAPGHRREWVAKLSEAGVRARAEFYYQQFDGLAPLRQQARRELLSESRKHAAVKLLRQIPSIGPIRAALLVALLQTPNRFRTKRQLWAYVGLALRTYTSGEYRFEHGQLKRSKKVLAIRGLNRNHNHDLKNIFKGAATWAAGNTGPFQNFYEACIARGMKPHLARLTLARKIAAITLLVWKKGVCFDAKHLTQQAA

SEQ ID NO: 231330 - protein, 344 aa, unidentified
MKLKRIGIDLAKQVFQVHGVDSHEQVICRKQLKRARVLDFFRQCEPCLVAMEACGSAHYWARELRTLGHEVRLIAPQFVKPYVKSEKNDANDAEAICEAASRPSMRYVEVKSAEQQASQAVHRIRSRLIRARTALLNEIRGLLGEFGLIAERSGAAATRRLIRTAQEDAENGLPGQMRELLSGLQDELDEHDAHLSRLDNTIQSQAREDARVKRLLEVEGIGPISATAIVSAVGDARQFSSARQFAAWLGLVPRQHSSGGKERLGSISKRGDIYLRTLLIHGSRAVLRHCQGKEDRRSVWLQQLLCRRNMNIATVALANKNARIIWAILCRGETYQPEREAQAA

SEQ ID NO: 231331 - protein, 336 aa, unidentified
MRRPKDKLIAGIDLHSNNVMLGVINQDGKRVAHRKVDCDLAEVVQFLKPFKAQLQSMAVESTFNWYWLVDGLRAQGYPIDLANPAKIEQYSGMKHVDDKDDAFHLADLQRLNILPKAHVYDPELRPVRDLLRRRTNLVHQHTALLLSFSSLHVRTTGQKLDLGDAKKMEPKQAPKLYEHPANQLIAQVQAEHIQALAKSISRIEKAVLACAREIPLYEKLLTLPGIGRILGMTITMEVGDISRFKTAGDFASYCRMVDAKRLSNGKRKAANNQKCGNKYLAWAFVEAANFARRYDERCRRWYDRKAAKAGKIIATKALGCKAAVIYNGSIRGRDWV

SEQ ID NO: 231332 - protein, 310 aa, unidentified
MEQSFVGIDVSKDRLDVHVRPGGEAFAVARDSEGLAALTKRLAGLSVGLIVMEATGGFEQVVAGALGAVNLPVVVVNPRQIRAFASSFNRLAKSDPLDAEMNALFAERIRPQPRPLPDAQARLLGELVARRRQVIEMIVAEGNRALMLESRKLKKRIQRHRNSLQKELSEIEADLDDTIRGTPIWRETEDLLKSVPGIGNTVARALIAELPELGRLDRKKIAALVGVAPYTRQSGTWDGKRRIQGGRASVRAKLYMAALCASRHNAVIAAFYRRLLLAGKPKKLALTACMRKLLTMLNAIIRDRRQWHHA

SEQ ID NO: 231333 - protein, 404 aa, unidentified
MLTSVMVNNSLIGKSAIRLVDKSGVGEASVASRANTSRRREIGRAQVFKAVTEQDPRRHRGTSPNSRLNRQRPTRSTSSHLQVREKTMSESVYVGIDVAKDTFSVACCPVVLKTCLPNTPQGHRQLRQNLQKFSIARIVLEATGGYERPIVAELLDAGLPVVVVNPRQVRDFARGLGQLAKTDSIDAEVLAKFAQLVQPAIRPQKTAQTSDLAELVHRRRQLNDLRTQESNRLSLVHHREVRKSVRKMLKMLDRQIAEIDELISRHIRSNDDFRQKDRILRSTPGIGPQTSAMLLAQMPELGSLNRQEIAALAGLAPWDRASGKWLGKGHIWGGRKDVRSILYMAALSARNCNPVIRQFAQRLEQEGKAFKVVITACMRKLLIILNTMIRNQSLWTPKIFLKNT

SEQ ID NO: 231334 - protein, 341 aa, unidentified
MSVYVGIDVHRKRSQVAVVAEDGKVQLNKNVVNGSEPMLRLIGDLPAGTPVAFEAAYGWGWLIELLEDYGFDPHMVHPLRCKAIASARLKNDKVDAAILAQLLRADLLPEAWIAPLQVRQLRAQLRHRASLVRLGTQLRNRIHAVAADFGYDRTGSYWTGPGRGWLAELDLPPVSREIVTDCLASIDALAPVIERLDKELHQRAKADPRAKVLTALPGVGEFTALVMLAEIGDITRFASARKLASWAGLTPTVRGSDVTVRHGHISKQGSAWLRWVLNQAAQTAKRSPEFAASYQAIARRRGKKIATIAIARKLLTRAYHLLAAQAAATPGPVSPHPSASA

SEQ ID NO: 231335 - protein, 350 aa, unidentified
MVVLGIDAHKRSHTAVAVDERGRKLGERTTGTTSENHLALLSWAERFGGERLWAVEDCRHLSRRLERDLLGAGERIVRVPPKLMAHARDAARSYGKSDPIDALAVARAALREPDLPMAHLDGPAREIRLLVDHRDNLVAERTRAINRLRWHLHELDPSWAPPARCLWRPQHLGAILKRLAGVDGTVARLAHGLVERCRQLSVEITELAKELTVLVRRQAPALLEPCGCATLTAAKIVGETAGVRRFRSRHAFARHNGTAPLPVWSGNRERHRLSRSGNRQINAALHRIAITQAHYHPEARAFLERRRITGDTKAESIRVLKRRLSDIVYRALLADAEPQAASNPGTPAAA

SEQ ID NO: 231336 - protein, 317 aa, unidentified
MTAVGIDVAKKTLAVLVLLADGRQRQKHCANSPAGHAELVTWLGRYAPGRVPVGLEATGGYQEAVAIALHDAGYAVSVINPHAIAAYSQSQLRRAKTDPTDAALIAHYVLTQAPARWTPPPPELRQLQALVRRLDALIEMRTQELNRLELAAPVVQASIRETVAHFEQQIAQVKAQIATHIDQHPTLRAQRDLMQSIPGIGELTAAIVLGELQNLQRFSSARQLAAYTGLVPHVRQSGTSLRGRGSLSKLGASRLRKSLYYPALTALRHNPPLMRFGARLRAAGKPNLVIIAAVMRKLIHQIFGVLRSGRPFDPARA

SEQ ID NO: 231337 - protein, 349 aa, unidentified
MSHKLNAGIAVIGIDIGKNSFHVVGLDRRGAIVLRQKWSRGQVETRLANLPPCLIGMEACVGAHNLSRRLTSLGHDARLMPAKYVRPYSRGQKNDFRDAEAIAEAVQRPTMKFVATKTAEQLDLQALHRVRERLVSQRTGIINQIRAFLLERGVAVRQGLRFLRAELPRILATPCDALSPRMMRVIEDLAGDWRRLDERIEGLSSEIEVLARRDVGCERLMSVPGIGPIISSAMVAAIGAGDAFSKGRDFAAWLGLVPKQISTGDRTILGKISKRGNRYLRVLFVQAAWVVLIKPKSWDRHGLKPWLEAAKKRLHHNVLAIALANKLARIAWSVLARGRAFEASRIQVA

SEQ ID NO: 231338 - protein, 354 aa, unidentified
MPSKVTKPNTSAQPKLMSIGIDIGKDVFHVVGFDHNGKVVLRRKFRRLALDAEFEKLPRCIVGMEACLSAHFVSRRLRALGFEPRIIPAIYVKPFSKGQKNDYNDAEAIAEAALRPNLKLVKEKTQEQLDLQACHRVRSRLVSRRTATINQIRAFLIEHGIAIRTGANSLRRSLPEILLKRADELSPRMRVLIEELHGDWRGLDARIEALNEDIEEISRQEKSCQNLMTIPGVGPLISTATVAAIGNGEAFERGRDFGAWLGLVPRQYSTGGRTILGRISKRGSKYLRTLFIQAANVILMRPQNWPRYSFGAWLVTAATRLHRNKLATALANKLARIAWSVLRYNERFDDAQTI

SEQ ID NO: 231339 - protein, 458 aa, unidentified
MSQKRSKQIRSGQPEWSLNLEVVHPNAAGIDIGNESHYVAVAPHRDPNPVRQFACFTEDLHRLADWLKSCGIDTVAMQSTGVYWLPVYEILAEKGLEVFLVNARHTKNLPGRKTDVQECQWLLQLHTFGLLNNSFRPPEEICVLRAYWRQRGEHVAAAGACIQRMQKVLTEMNVQLANVISDISGLTGMTIIQAILNGERDRYKLADLADPRIHATREQIARSLEGNWRKELLFILQQERNLYQIYQQQITECDTALAAHLQTLDDKVEPGSQPPAAKPSKRAGSNAPTSFDVRGELYRISGTDLTQIDGINIMTAQTVIAEVGIDMSRFPSEAHFASFLGLCPDNQITGGKVFRRGTRHVQNRAATALRMAASTLWRSKTYLGAKFRRLRARLGAPKAITAMAHVLARLVYRMLKYGEKYVDKGMNYYEEKYREHEIRSIQKKAKELGLEVTLSPAA

SEQ ID NO: 231340 - protein, 342 aa, unidentified
MYYIGLDVHKKTISYCVKDVSGQVHREGQIGATRRELDGWMKTLPPPWMVAMEATIFTGWIYDHLLPHAQRVKVAHPLMLRAIAAAKKKNDRIDAGKIADCLRCDFLPECHMASTAIRDRRRTLRYRHLLVRQMVQMKNRISGLLMETGVSYNKQRLHRVRYFGELLSSNEEVNESIRPLLRLSRDSIVRLQKTEYALVSSLQRDPLLAERIKHLRTVPGVGPITALTWALEMGDVSRFPSIREAISYCGLCGDEKSSADKVTRTPLSKQRNKHIQRVLVEAAKLAPRQDHDLALVYETAKQKGNSNRATLAVARKMVAYLLAVDRGQRDFVPAEAYRNAAA

SEQ ID NO: 231341 - protein, 378 aa, unidentified
MTWGCQAGVETANLIIVIKHYKIKNTESYESIKLGIDAHAKWYYVARQLDGATPQPVQKMDLEGLLHFVARQKRMAREVHTCYEAGAFGYHLHHRLTALGVTNYVVQPQDWDERGKGVKNDRIDAQALCQRLDRYVRGNRKAFSVVRVPTAEEERERAISRQRQQLVRERQRQRLQAMGRSLLAMHGIHVSGKWWQGKTWSKIRSEAPEWVIERLEVFSRLIAPLEAESAKLTSQIEAAAADQKIPKGVGPLTFEVLHREVGDWSRFTNRRQVSSYTGLYPREHSSGGKRRSGSVSKSGNPRVRAMLVEMVWRMTRWQPGYHGLQKWLPVLNDPVRGGAARKKAVVAIARQLAVDLWRVFTGQTTAENLGLVYLPDAA

SEQ ID NO: 231342 - protein, 477 aa, unidentified
MPLLGRNHNHTNMKSKTPKSKKEKKKISVDQGWEAINPQAAGIDIGAKEHFACVPAKATPKNVRSFGTCTADLNALADWFKECGVTSVAMEATGVYWIPVFQILEGRGLAVILVNARQTKNVAGRKSDVQDCQWIQRLHTYGLLQGSFRPEDAYCVLRTYLRYRDELVSARSTQCQHMQKALQQMNVQLVQVLSDVMGVSGMTIIQAILEGKRDPVKLANMVDRRVRATPIQIQKALEGDYREEHLFVLQQAFSLYGTYEEKINACDEQIVRETATLSDKVDPQHKPLPPRKEGRPASKDKMQGQDMREVLYRKFGADLTAIEGIGVTTALVVLTEVGPDVSGFKTEKHFCSWLGLCPDNRISGGKVLSSHTRRVMNRASDALRMAAVTLERSQSALGGFYRRMKGRLGAAEAITATAHKLARIIYRLIKHGEAYVRQGMEDYERKFRERKLHALRKTAISMGFTLIAKQELTSPVS

SEQ ID NO: 231343 - protein, 356 aa, unidentified
MSQKLDTSPAVIGIDIGKNSFHIVGQNQRGAIVLRQKWSRGQVEARLANLPPCRIGMEACVGAHHLSRTLRGLGHDARLMPAKYVRPYSKGQKNDYRDAEAIAEAVQRPTMKFVATKTADQLDLQALHRVRERFVGQRTGIINQIRAFMLERGIAVRQGLRFLRAELPGILATRTNALSPRMLRILEDLSADWRRLDARIADLSGEIEALARQDKGCERLMSVPGIGPIISSAMVAAIGTGDAFSKGRDFGAWLGLVPKQLSTGDRTILGSISKRGNRYLRSLFVQAAWVVLVKIGPKRWDRYGLKSWIEAAKKRLHHNVLAVALANKLARIAWAVLHKGRAFECVKTNEAAYQPA

SEQ ID NO: 231344 - protein, 394 aa, unidentified
MGDYSEAFVGLDTSKLRNAVAIAAAGRGGEVRFFGEIENTPAATAKLVRKLSVKYKRLTFCYEAGPTGYGLHRQIKDLGFECVVVAPSLIPKRPGDKVKTNRRDALSLAKLLRADELTPVWVPDGRHEAMRDLTRARETAMLDLRTKRQHVSAFLLRLGRPYPESRKTWTKAHVSWIASQKLEHPQQRLVLEEMMLAIRQAQERLARLEQAIAATVPEWSLAPVVTALMAMRGIDLVSATTLLAEIGDLSRFRTPTELMAYLGLVPSENSTGDTVKRGPITKAGNRRARRMLVECSWSYQHPPRVGQAKQPKVDAAPPAVREIAWKAQCRLYRRYRTLIRKGKLKTVAIVAVAREHHRTCRGSSGLTGLARRTKRPRPSANQRARRRGSGPAKP

SEQ ID NO: 231345 - protein, 401 aa, unidentified
MKEFNAEQHRVESASALAVVSNAGGAERYAAYVGLDVHKETIAVAVAEPGRGEPVYRGEVANRPKSVEKLVAKLSKAYDGGLLAFCYEAGPCGYGLYRQILASGHDCQVVAPSRIPRTPGERIKTDRRDALKLARLLRSGDLTAVWVPDQEQEMMRDLSRARDDMKVQERKARQQLNAFVLRHGHHWPRTKSRWSQAHYNWLESLRFERDWQQVTLQEYINAAKEASERVAQFDVHLMRALPEWSLAPVVESLIALRGVDKLTAIVLLAELGDISRFDSPKELMAFLGLVPSEHSSGGRRRQGAITRTGNGHARRVLVESAWSYRFPARQTMHLKRKAKNASASAKKIAWAAQKRLCGRYRTLIQSGKNTKVVCVAIARELAGFLWDIVRQEMPRLAPQAA

SEQ ID NO: 231346 - protein, 356 aa, unidentified
MKTDYQKGKILAKGKNVYIGIDVHKEKWHVTAQVAGEEVFNGSMPSNYHSLRKLLDRFENCRIKVAYEAGPCGFWLYDKLIVDGIETIVVPPSLIPIESGNKVKTDKRDSRKLAKLLESNMLKRVYVLSEADRADRELVRTRRQILEHRSDVMRQIKSKLLFHGIKSPFPNKDRWSQRYVKWLKALSFEHQVLKISFDSLIELFEHLSIQLVKISKQIIALSQSEKYSHKVKLLKSVPGIGILIAMELLVELPDIERFKSAEEIASYMGLTPSEYSTGQHVRQGRITRCGNSRARTCLVEGSWHLIVKDPFMRVKYMTIKNRKGAKRAIIAIARNLIVRIRRILLNNEPYKIGLAA

SEQ ID NO: 231347 - protein, 400 aa, unidentified
MPFYAGLDWGGASHAACIVDGTARIVARFDVRHDAAGLADMLARLKRVAPPAELPIAIERPSGLIVDALLAAGHKVIPIHPNVVKACRPRYRAAGGKSDPGDAYMLADILRTDGHRFRPLIAVSDEIKALRALVRGRDDLVVQRVALANQLRSLLEGFWPGATDIFADIDSPIALAFIGRYPTPASASRLGEKRLASFLVQHAYSGRRSAAELLARLRAAPSGLASDAETQTKGEIVRALVGVLERLILAIATLSSRIEQAVEQLPDGRIVMSFPRAGRINAAQILAELGDVRERFPTEDQLAAEAGVCPVTHASGKSRGVVFRWACNKNLRVALTCFADNSRHASGWGAAIYNKARQRGCKHAHAVRILARAWVRVLWRAWQDGKPYDPAHHAGAAHVT

SEQ ID NO: 231348 - protein, 385 aa, unidentified
MLQTLSVFTAVDYNRTLILAIELSSKNWVLAAQVPGLPKSKAGRAINPTVEALMAAIEGYRARATAAGHSVERVIATYEAGWSGFWLARWLAKRGVETHVIQPSSVPVDRRARRAKSDGIDAEMLLRTLLAWLRGEPRVCSMVPIPSEADEDARRSIRERTELISERVSLVNRIGAVLATLGACDYNPLLRSRRRRLGELRTALGDPLPANARDKIARMLDRLELLLAQISALECQRDAVLEDEAPDKAGQMIQHLASLRGIGAQSATVLVREAFVRGFANSKALGSYAGLSATPFNSGGVKREQGIGKAGNRRLRTVMIELAWLWQRYQPGSALVHWYRSRAGATGTRVRKVMIVALARKLLIALWRFVTQGVVPEGTTMKPAS

SEQ ID NO: 231349 - protein, 408 aa, unidentified
MQVLYPRCAGLDVHKDSVVARIRCVSEPPHDEVRSFATTTSALLELNEWLSAHQVTHVAMEATGVYWKPVWHLLEGDFQLVLANAQHIRNVPGRKTDVNDATWIADLLAHGLIRSSFVPPAPIQELRDLTRTRKQLVREISQHSSRIQKILEDANLKLGSVLSDVLGKSGRAILRALIAGETNPEKLADLAQGTARKKRAALLEALHGRVRDHHRGLLKVHLELVTALEQALANIDATVGKTLAPIHQSARLLTTLPGVSDLTAQVMVAEIGVDMSRFPTAAHLISWTGLCPRSDESAGKRRSTRLRKGAPWLKVALVTAAWAAVRVKDSYLQAQFHRLRSRRGAKKAILAVAASMLTAAYHMLKNGVEYKDLGSEHFTRRDRSKMIQRLVRRINDLGCQVQLIPQAA

SEQ ID NO: 231350 - protein, 347 aa, unidentified
MNFYNNTHPYYCGIDLHARSLYVCILDQAGNTCLHKEISASPDKLLQLLEPYIGNIVVGVECMHCWYWVADFCEDRCIDFILGHALYMKAIHGGKAKNDRIDSFKIASLIRGGNFPLAYVYPKAMRATRDLLRRRMKIVRHGADLKAHVANTTSQYNLPPNKVNLKNKDAREQLRSTFPEQSVQKNIDLDMVILDCYAEQLSKVEWYIQQQAKQHKPNHFHLLKSVWGIGPILALTIIYEIGDIERFESVQKFASYARLVKCKAESAGKSYGTQGNKIGNAHLKWAFSEAAVLYLRGNEKAQKYLLKLQKRMSKAKALSALAHKLGRCVYFMLKNESVFDETRFLKG

SEQ ID NO: 231351 - protein, 374 aa, unidentified
MQSIVYVGMDVHVENYTFACYEENKGIYAQNQIKDADWKSVIKYLEKIQKERPGEDIHFVCGYEAGCLGYSLYNELLKAQTKVSLDCIIMAPTTMAVQGNKPKTDRRDAAMIAKNLCYGTYSKVYVVDDADNGVKDFIRMRDDTKARCKSIKQQVLALCLRHGKRYGESTNWTIKHREWLRKLDLGEKNANRALQEYLHQLTQTEEDLERYDREIEEIAQGERYSEKVSQLKCLKGIQTVSALAAIVEIGDFHRFATAERFASFLGLVPGEHSSGGTIIRTPITKHGNSHLRRLMVEAAQSFSRGNIYQKSKKMRSKQAGQDQDIIDYCDRQNLFMGRKYHRLCAKGKNSNVAKTAVARQLACSVWGIMTGNIA

SEQ ID NO: 231352 - protein, 424 aa, unidentified
MKVTYQTCCGVDVHKSFLVATIVKTTGGIEPSYQKKRFSTFNNSILEFKQWLLDNDCHDVCMESTGKYWVPVFNLLEDEINVVIANPKWVKAVKGNKDDAKDSKWIGDLFRLGLVKGSYIPCKKVRILREYTRYRYKLVSCRSSEKNRYQNALTVCNVALDSVVSDIFGKSSTSIIDYLLEHSGISINHEEIASKLLRSLKSKEDAVIESIEGYQMTDAQKYRMRLVRAHMDYITAEINDVDKMIENAISSDPDFENAVQFLCTIPGVKRASAITIISEIGTDMTQFSSSKRLCCWAGLTPGSNESAGKKKSVRITRAGVYLKPALVQCAHAAVKSDKSPYYKKKYESLVKRRGKKRAIIAIARMILTAIFQMLTTGETWNPCDLYKIDMPEALLEKQKQKAIKQAQKLLIREGLLPPTEPIAS

SEQ ID NO: 231353 - protein, 392 aa, unidentified
MVIVGIDISKRSHEAAIINEKGILLEKPFRFLNHAEGLQKLLDKLRDYSIDEVSCGMEATGHYWLPVYSKLSDLGYQVHVINPMQTDSFRNMYIRKSKNDTRDSFLIAEVIRFGRFSESGMPPSILYTLRELSRNRFFLIDMRSDLKRKIVTLLDQVFPEYETIFSNTFGATSIAVLAECPTPEEILQTDATRLCQIVEVPSRKRFGMKKVEELKEKASKSFGISISTDVFSVMIKSYIRHIQFITEQINILEVRMSEILQEFGTTLTSITGIGPVLAATILSEIGDISRFSSSCKLAAFSGVDPTMKQSGEYNGIRNRMSKRGSPYLRRAIWLAATVAAHHDPALSIYFQKKRTEGKPYMTAMGHICRKMVSIIYAVMRDNKVYQPVINME

SEQ ID NO: 231354 - protein, 450 aa, unidentified
MSPLALDVVTKTDKTPVLGRMLSKYVGRKTSSIENGITKARNHSRQRGNIMRVVFGIDVSKASSEVAILVNGEKVHGYTIPNDAIGFNRLLGDLKTVHQPEIVFEATGVYSRRLQAFFEDNSNTYTRLNPLESKKQLDSLRVRKTDKIDAEKLAMSQFILNRKPSYVQEALYQELRDLSRFYQNLTEDIVCAKNRLHKVLQVTFPELENILSAPTGEQYWNLVMTFPCNSFVLELDDAELTAIIRQSTAKRISEKRVTYLVDKLTKLANQSYCAVKKTSPVIEEVKYYAGELLRLSEHRQGVVEEMVTLAQSLPEYEILLSIPGIAETTATSIIGELGDIRRFHSANQINAFIGIDLRHYESGNFLAKEHITKRGNPYARKILFKCIHNIASASHTNPCHIADFYEKRKRQSQVTSTKPHTIASIHRLIRTMYYLITHNKLYDYTSIQNR

SEQ ID NO: 231355 - protein, 343 aa, unidentified
MEAYAGKQFVGIDLHRRRTVIVRTTEAGEVLEAVRIVNDVQRLASVMARAGQCPEVVLEATYGWYWAVDALQAGGANVHLAHPLGVKAFEYRRVKNDFRDAQDLADLLRMGRLPEAWIAPPPTRELRELVRHRAKLVGLRSHCKAEVHAVLAKCGVQVLMSDLFGLAGTELLDRLDLPAPYAARIASLRRVMDDLDFEINVFAGIIRGRMAQEPGYTAVQRIPGIGPTLGAVLVAEIGDVTRFASASKLTCWAGLTPKHHESDTHVRRGRITKQGSRLVRWAAIESVKTVSKGSEVGVLRERVADRRGRNIGSVAAARRQLELVFYALRDGHVRALEHLPRVA

SEQ ID NO: 231356 - protein, 457 aa, unidentified
MVQTKRPRSRREMPAVHPDAAAIDVGATMHVVAVPPDRDPEPVRTFGTFTADLHRLADWLRACRIKSVVMESTGVYWIPIFEILEQKGFDVQLVNARDAKHVPGRKTDVSDAEWLQRLHEHGLLRGSFQPKGEVKALRSYLRQRERLLDSAATYIQHMQKALTQMNVQLHHVVSDITGVTGMRIVRAIVAGERDAATLAAFRDSRCKEPVETIREALIGNYREEHVFALTQALELYDIHQKKVAECDKRIETVLEQLKATRPTPAKPLPAPRHKTKQSNAPNFAARDALYAVLGIDLTQIHGLGPYLALKLVGECGTDLSAWPSAKHFTSWLSLAPRNKISGGKILSSATRRSNNRAASLLRLAAVTVGRTETALGAFFRRLSARIGKAKAITATARKIAVLFYNALRHGMKYTDPGAAYYEERYRQRVLSNLQRRAKAFGYVLQAAASQAPQVGVS

SEQ ID NO: 231357 - protein, 372 aa, unidentified
MTSIIYVGMDVHTINYTLCCYSMEDDRFFAEVQVEPDAKNILKYLARIEKQQSRDCRIVCGYEAGCLGYSLYHQLHAHGIDCVILAPTTMMTKPDKRIKTDRRDARLISKCLAFHTYSPVYIPTEVDNAVKEYIRMRDDANSALARVKQQIIAFCIRHGKIHDGKSYWTNKHLEWLSSLDLGNKILSEVLQEYLIRYYQLREQVDMYDMRINELAQAEPYRQKVEKLGCFRGIAAHTALSFCVEVGDFRRFATAQQFASYLGLVPGECSSGDKQQYTGITKAGNSHLRKLLVETAQVFGRSATKSGKSVALKERQAKCDSLTVAYADKANARLKKKYFKIAMRSKVNIAKTAVAREMACFIWGMMTDNISCA

SEQ ID NO: 231358 - protein, 427 aa, unidentified
MAGVVTARVNRGKKVMTEESFTWFAGVDWGSEKHHACILDTRGTVVGERQFPHSGVGLAELGDWLLSIAGTTATVAVAIEVPHGPVVDSLIDRGFVVYAINPKQLDRLRDRFSVAGAKDDRRDAYVLGDGIRTDRRLFRRLHVADPRIVELRAWSRLTEELQEERVRLGNRVQQQLWRYYPQMQKITNDLAAPWFLELWAMAPTPGKARQLRKSTVEQILKKHRIRRIDADTVLRMLREPAIKVAEGIAEAASIHLRSLIARLHVVNRELRQAEQKLDQLCAGIGETEGAPGECLQGQDIKILKSVPGIGRINLATLVCEASGPLRSRDYPALRTLCGAAPVTKRSGKSQIVVMRYAAHARLRETVYHWARTATQHDAKSRCRYAALRQRGHSHGRALRGVADRLLGLTCVLLQRQTMFDPHFGQAG

SEQ ID NO: 231359 - protein, 422 aa, unidentified
MSYCPVAGIDVSKRFSDMCILSPDNKIFAQEKIYHDETSINRANALLQKAERLFFSKPVIVMESTSHYHLILFQFFSEHGYDVIVVNPLQSNSMKDFSIRKRKTDRVDAFKLAMMYRTKTLRPSQIPQTATRALRQLCRHRAELLNDVSSYKNRLTALLDQTFPGYDKVFSDVGGVTSCAVLVRFPTPTILLVEEESELVDVIAAASKAGYNFAKKKAGLLISAAQKAQTLGIHSCADETLIVCTIQMLRTLSESVLQIETAIDNLLAQIKEMRNNISLLQSIPGVGSHSAALLLGEIGDISLFKKPKQLAAYFGLDPTERQSGSFRGTKNKLSKRGSPYARAALHMGVVNSICKRGKDSAANPVLLSYYEKKCKNKPAKVAQAASMHKLVFIVFAVLRDQKPFELKTPEQHAVEQGFVKAA

SEQ ID NO: 231360 - protein, 341 aa, unidentified
MKNLFIGIDFSKEKVDVAVIFAEGLAETSVRVFNEFKNSVSGYKQLVKWVEKNANGIDSSLWLFCGENTGDYSKPLCNHLYGRGYDMWLENSKCIKDASGIRRLKSDRADAAMIAEYAMRNHDKAIIYEPLSESLTQLREYYLYRQMVIRHRCSFEVRRGEKRLMMEKSAAKTVIAQSGKHIVSELNKEIAKIDRKIASLIESSDELSEVYRIVTSVPGIGTQNAVCLMVYTDNFRKFNYDARSIACYYGIAPFGQDSGTSVHVDPHVHYMANRHIKAMLTQAALAAVRFNPIIAQYYQRLIGRGKKMPVAMNNVKNKLLHIVTSMVKNKQVYKPEYRFSA

SEQ ID NO: 231361 - protein, 407 aa, unidentified
MARVFIGVDPHKLSATIEVVDDRETVLATGRFSTDKAGYAAMRQTVSGWPERVWAVEGSNGAGRPLAQRLLADGELVVDVSAKLSARARLFDTGHNRKTDAHDAHAVAAVVVRTQGLRVLSYDVELEALRMLADRREELTRQRIQTVNRLQRLLSELTPGKAKKDITTLQAKAILATVRPRDLAGKTRRRLAVEQLAELVVVEKKIKTLTKELKVMVLARGSTLMDLPGVGPVVAARILADVGDVARFADRNRFASWTGTAPLDASSGEHVRHRLSRAGNRKMNHMLHIAATTQARLDTDGRRYYRRKLGEGKTRMEAMRCLKRRISDAVYRQLLTDAERTQLEAAVEEVGTGPGGHCGASQESSAVDLPPHIDTSDQPLPGPAQPTLQPPIPVRKSQRTKSPHPTG

SEQ ID NO: 231362 - protein, 348 aa, unidentified
MRTYTTQHLHYCGVDLHARSLFVNVLDDKGRTRLEQDLPASPQAFLDAVKPYRDGLVVGCECMFAWYWLADLCEREAIPFVLGHALAMKAIHGGKAKNDRLDAQKIAGLLKGGFFPMAYVYPKAKRETRDLLRRRSFFVRQRAQLIAHIQNTNSQYNLPPFDKKLTYKGNRTAPIADRFEHPSTRLSITTDLNLIESYDTQIAALERHLVKSAKVDDPATFQFLRTVPGIGPILGLVMLYEIDSIRRFAEVGNFLSYARLVACTHESAGKVKGVGGRKIGNAHLKWAFSEAASLMLRSFPAAKSWMQRQSRKRGVKKAHAILEAKIGRTVYHLWRKQIAFDGKKFLAS

SEQ ID NO: 231363 - protein, 386 aa, unidentified
MEVRLATTSTAGDDAVVRILIAIELSKKSWIVGANTPLKAKTSQFRLAAGDWKALLELIERLRRQVARKLGRPVHEIEAISCYEAGYDGFWLHHLLEAHGVHNHVLDPASLLVNRRAKSAKTDGIDVERMQRALGRHLRGEPDACSVVRVPSVEEEDAKRLHRERKRLVQERVQHVNRIKGLCALHGIYDYQPLRTDRKAQLGGLRTGDGRPLPPRLKAELLRELQRLELVLQMIADVEAERDAIVKEAAPQHPNADKIKTLAALTSIGPEFATRLVGEVFYRPFANRRQLASFAGIAPSPWSSGSIERDQGISKSGSSMVRTTLIELAWMWLRYQPGSARAPGSVSASATARGGCAALPSWRSPVSSWWRYGAISRRVWSRLAPC

SEQ ID NO: 231364 - protein, 348 aa, unidentified
MTNYIKHKAIKTMGIDLAKSIFHLHGVDEQGKVVLRKRLSRSKLAAYMAQLPPCMVAMEACGGSHYWARKFKEMGHDTRLISPQFVKPFVKSNKNDAADAEAICEAVQRPSMRFVPIKNIEQQDIQSVHRAREQVVCRRTAQANQIRGLLMEYGLVISQGRKILCAHIPDILADADNGLSGMFRELLSGLWEEMIHLEQRVSEYDLQIELLSKQSDVCQRLMTVPGIGPMVATALVASVSDGKAFKSGREMAAWLGLVPRQHSTGGKPRLMGISKRGDTYLRKLLIHGARAALRWTDKKHDKRSVWATSLKERRGQNIAAVAFANKTVRTAWVLITRHEEYQMSTVSM

SEQ ID NO: 231365 - protein, 406 aa, unidentified
MEVVYPRCCGLDIHKKSVVACVIKPGGKETRTFSTMPKDLLELKNLLIGLEVTHVAMESTGVYWKPIYNLLEDRFTLMVVNAQHIKAVPGRKTDVKDAEWIADLLRHGLLRGSFIPDRSMRELREMVRYRRSIIRDQSRIINRIQKTLEGANIKLSSVATDIVGVSGRLILQAMIDGVENPKKLAALAKGKLRNKSESLEEALLGLMGPHQRRMLESQLGNLDYLDKEINKLDDDISGRMGPYQHIIEQIDTVNGIGQRGAQEILVEIGPDAVSRFPDAHHLASWTRICPGNNESAGKHKSGKTGHGNPWLRSSLVEAAWAAIRVKNSYFSALYHRLAGRRGAKRAIVAVAHAILTTIYSMLKNNTVFHDLGECFHDLLNPDRIIHRAISRIERLGYKVLLEKAPS

SEQ ID NO: 231366 - protein, 414 aa, unidentified
MARVFIGVDPHKLSVTIEVVDDRETVLTTGRFGTDKSGYAAMRRHVAAWPERAWAVEGSNGAGRPLAQRLLADGEHVVDVPAKLAARARLFDTGHNRKTDAHDAHAVAVVAVRTEGLRVLSYDVELEALRMLADRREELTRQRVQTVNRVQRLLSELTPGRAKKDITALQAKGILASVRPRDLAGKTRRRLAVEQLTELVAVDKKIKALTKELNAMVHARGSTLMDLPGVGPVVAARILADVADVARFADRNRFASWTGTAPLDASSGEQIRHRLSRAGNRKMNHMLHIAAATQIRLDTEGRVYYRRKLAEGKTRMEAMRCLKRRISDAVYRQLLADAQAAAIAAENQQADQSPTEVGTGPGGHCGASQESSAVDLPPHIDTSDQPLPGPATQTLQPTPPPRKTTGRTSLKRAG

SEQ ID NO: 231367 - protein, 406 aa, unidentified
MNYLGIDVSKSTSRYVILDSNGEKASKPFTLHNDQNAFTQLLQRLKELNLQPENLLVGIEATGIWWENIYCFLTEQKIKTIVLNPHQTNKFREALRLKAKTDDIDAYVIAGLLRSGEYAASYIPEETIQVLREIVKLRHQLVTNRQSFERQTQALLGLLFPEYEKTAIKNPFSVASLAILKAYPTAKHLAETKPKNIERIVRHIKGNNFSIKEILNLIETAQSSIYSGRAKDARGLNLNILLTHVETLHQSIAQLDQRIDDVLSPQNPDDAQSFPGANLLSIPGVGPKTLAAILSVVGADGTTYPDGKNFIGYIGFFPKIYESGETRRDNVISKRGPNYIRRALYISAVAGLKHNAEFKALYDRKISQGKPAKQALICVAKKIAHLCLSMLKSGESYNPSRVFMPV

SEQ ID NO: 231368 - protein, 338 aa, unidentified
MEYGAIDLHLRHSQIRIVREDGSVVLERRISTTRESLTAMFQARPRMRVIVETGTESEWVAQTVEACGHEVIVVDPNYTLMYGTRQRRVKTDRRDVAALAEANRHGIYRAAHRVSAAQRHQRRVLRVREQLIRVRTQAINLVRAQLRQEGYRLSSGSAGRVVARYRALAITGALAQALAPVIALLEHLAPAIGGANTDATAAAQQDPIVRRLTTAPGVGPIIGLTYRATVDDIARFRAAASASAYFGLVPCEDSSADRQRRGRITKRGPTTARSLLIQAAWGGWRQRTRDPLQRWARRLAERRGRRIAIVALARRLCRILYAMWRDGTAYQPAMTGVA

SEQ ID NO: 231369 - protein, 388 aa, unidentified
MPKPVDLSKSLAALDQDSTLIVVIEMSQSSWLVAARAPGLARDPLKKLPPEPEQLFKLIDRWREESRRAGRVVRRVCVAFEAGLDGFWLARLLRHHDIEAYVIHPTSIPVKRDHRRAKTDRLDTELLMRAFLGWLRGEADYCSMAAIPTLAEEDAKRPTRERESRVNARSRLVNRLKGALARLGIRGFNPKLRKAAEKLEALRTGAGEPLPPNTLAELRRDMAQLRFVSDQIKQIEKAREARLEKAPREGAHPMVLMLASIKGVGLETAEMLVAEVLSRKLRDRRAVARYGGLTGSPDESGSRSREKGLARSGNARVRRGMIQLAWRFLMFQKESALAKWFEARTANGPSGVRKTMIVALARKLLIDLWRFVEDGTVLVGVELFDSRA

SEQ ID NO: 231370 - protein, 403 aa, unidentified
MSDMITNHADIDVFIGIDVGKHNHHAVALNRDGKQLLSKALPQNETKLKALITRLRKHGQLLVVVDQPATIGALPVAVAQAEAIPVAYLPGLAMRRIADLHPGEAKTDARDAAIIAEAARTMPHTLRGIRIADENVAELSMLCGYDDDLAKQATATSNRIRGLLTQIHPGLETAIGPHLDHPAMLALLAKYPTPKALRHAGKHRVETLLRKQAPRAWKRWAAAIFTALDGQTVVVSGTDAAGLVLPQLATSLAKTRTSRDEVLVRIEQLVQAHPLFGLLTSMPAVGVRTTARILTEVVGKDFESAGHLASYAGLAPVTWRSGTSIRGDHSSRRGNKILKRALFLSAFAALKDPLSRAYYDKKRAEHKKHNQALIALARRRCNVLYAMLRDGTYFHAPEVATAA

SEQ ID NO: 231371 - protein, 353 aa, unidentified
MTSEKYVGLDVHKATIVAAVQDASGKCVMTSVIETKAETIRTFVKGLTGTVRVTLEEGTHASWLSDLIRPLVAEVIVCNPRYNALLQSGNKNDKVDANKLADLLRAGLLKPVYHEAHGTQSLKQLAQCYETLVVDSVRVMNRIKALYRGRGIDCSGNGVYCVSQQKDWLAKLEEPGARSRGQLLYTQLESLKKLRRQARSELIKESRRQAACKLLTPVPGLGPVRVALIMATVVTPFRFRTKRQLWTYVGLAVVTKTSAEYEFVGNRLHKRNKPTSTRGLNRNYNRRLKKVFKSAALDATRTEPFASYYRNLIEKGTSPEIARVNIARKLAAIVLSLWKRGEEYDRQRMKKSA

SEQ ID NO: 231372 - protein, 412 aa, unidentified
MQVVYAHCAGLDVHKKTVSACISVCEGKHTKQQQTRAFGTFTQDLLKLADWLKEHGVTHVAMEATGVYWRPVWAMLEGQFEQMLVNPHHIKAVPGRKTDTKDCEWIADLLQHGLLKGSFVPPTAIQDLRDLTRYRAELRQSQNRVANRIQKVLEQANVKLSSVVSDTLGVSGRHMLEAIIAGKNDPQQLAQLARGQLKKKIPQLQQALEARVREHHRFLLAEFLDEWDALEERIRRIEAEIDTRVYPFESAVGLWRMVPGVDRVTACNLVAEIGVEMKQFPTAQHLASWAALCPGNHESAGKRKSGKTRDGNKWLRRSLCQAAWAASRTKDCYLATQFKRLAARRGLKRGLMAVAHTLLVIGYYILKTGEGYRELGAHYLEQSHKEQLQRYFVKRLQRLGLRVSLEPLSTAA

SEQ ID NO: 231373 - protein, 396 aa, unidentified
MSDARAQQVANDPVTNLFRERSKATAPGLAKEVWVGVDTHKDVNVAAAVDESGRTIGGDQPASISAPTTPEGNSDLLAWARGLGETVVAFAVEGTGSYGASLTRFLQGKSQIVVEATRPKREDKAVRRTLGKSDAIDALLAAQRLHRLELRISPKSRVGDVECLRMLRVARKTAVKARVQAINSMKALVVTAPDDLREQLSGLTKDTLPDKCASFRPKGYTPDAAAKTALRSLARRIHALEDEIKALDTEMAAIIKKAAPKLLARQGVGTDVAAALLVTAGDNPDRMKNESSFAAMAGVSPLPDGSGKTDGRHRLNTGGNRDANNALWRIVLTRMNHDPRTKAYVARRTLEGKDKKFIMRALKRYVAREIYAALMADQPGLAARSSPATALTPDAA

SEQ ID NO: 231374 - protein, 347 aa, unidentified
MKILALDLSKFKSVGCVYASESGEHSYRRVNTRPAELHELLVELAPDRVVMEVSSVSGWISDLVRTLEIELQVVNTNGEAWRWQNVKQKHDQRDALKLARLSAMNQVELVHVPARDIRQWRAVINYRQHLVGRRTQIKNHVRELLVREGVLLARGRKCWSQQGCDELAAQARGWEEVGIDELWRGELQSELQQLRMVQERIREVEGKLTALAAADDRVALLQTIPGVGPRLAEAMVALIDDPHRFRRGQEVGAYMGLVPRQYQSGEMNRMCRITKRGSKLLRSLLVEVSWVSVRHNRWLRSLYERVHRGSKTRRKIAIVAVARHLAIYCWAMLRDGTPWRQPTVAIT

SEQ ID NO: 231375 - protein, 345 aa, unidentified
MTMLADDVEVVIGVDTHKQAHTAAVVDRVGGVSATFEFAANPTGYRKMLGRVAAHGGIRVWGVEGTGAYGAGLTEFLRGAGERVVEVERPGRPLRRNGAKSDAIDAVRAAREVLASKHQIEPRQRGEREAVRVLFATRNGAVVARTKALNHLQALVVTAPQRLRSRLEGLTTTELARQSARLRLGADRPIEDQATVRAMRACARRALACEQEADELEAELERILVGQVPHLLAEPGIGPISAAAIYLAWSHHGRIRNDAAFAALAGVCPLPASSGQTTRHRLNRGGDRQLNRALHTITLSRLSCHPETKAYATRRLAEGKTPREIRRCLKRHIARRIYKLLEHTP

SEQ ID NO: 231376 - protein, 369 aa, unidentified
MAEYSEAFVAFDVAKTKHAVAIADGGRGGEVRFFGEVSSSPAAVERLIRKLAGRYGKLHFCYEAGPTGYGLYRQIAALGHACLVVAPALIPKRPGERVKTNRRDAVTLARLHRAGELTGVWVPDATHEAVRDLVRAREAAADDLRRKRQQLLSFLLRHGRVYSGGGHWTLAHRRWLAKQGFEHPAQQIVFQDAIDAIEDALQRRRRLEQQLVQIVPNWSMAPVVEAYQAMRGASFLVAVTFTAEIGDGKRFDNPRQLMSFLGLVPAESSTGETVRRKGLTLAGNRRARRVLVEAAWTYRYPARVGETLRARLEALPKVVRDIAWKAQIRLCARYRRLSGAGKKLPVVVAAIAREMAAFLWAIGREVAPA

SEQ ID NO: 231377 - protein, 349 aa, unidentified
MTTIIGLDLGKFNSAACTFLTGDGEVRFQSLPTRIAALQQLFERERPDLVVFEACAQAGFTADLCRELGLKFLVANTNGEAWKWKNVKRKTDRDDALKLARLAYLGELPTVELPETATRQRRAFLNFRQLLVSQRVQLQNHLRSVLVAQGLEAPRGHHAWTAAGLAFFDGLARAPYECAADELWRGQLYVSLTLYRSVVVQLNGVESKLDALVRDDAPSQRLLSVPGVGPRTAETIAAYVDRPQRFKNSRQVSAYTGLVPRQYQSGQTDRRGRITRRGPRLLRKMLVEAAWVMLRYNEWARRIVQRISKGQRTRKRQAVVALARKLLVRCWALLRHETTWREPVPLAGA

SEQ ID NO: 231378 - protein, 362 aa, unidentified
MFRPHTLYIRIRIVRKVSEPAFAMKDQDVTDVIRRKQQTAMRYIGIDVSKATFVVAYSSDKGGEIRTFNNTTTGIKQFIGALPKDSSIHCVMEATGNYSAMLLYLLNVAGIAVSMENPLKIKNFARAMLSTVKTDKIDARLIALYGEKMNPQPFKIQGEAILRLRQKRTVIRQLTKQITAMSNLRGSLAYLPVPDKGATHTVDETIEFLEKRRDRLQSELTDLVEVEFSRQLALLTTIKGIGITLATALIITTGGFTYFQNAKQVSRYLGICPTYEQSGTSVNIRGHINRNGDAYTRGLLYVAAWTASRFNTKCGETYTRLRQNGKPGKLAMIAVANKLVRQAFAVVTHDKEYVDGFVSNRP

SEQ ID NO: 231379 - protein, 324 aa, unidentified
MKNIIIGIDISSKTLDICIRAEQINYFTIENKVQAIKRFFKTYVQENVIIAMENTGRYNWNLFEVLDATKGKVYVISPLHLKKSIGLTRGKNDKIDALRICNFIEKNYQEIPQWKPAPQAIKKIKILLTERASRIKMKKQLATQQHDYKIMKSVGLDKQLLKLNINLIKNIEIQICSIEMDIEKIISNDQKLREQQKLIKSVPGVGKVLSWMLLSKTEGFTSITDPRKMACYSGVVPFDFQSGTSIRKRPGVSMLADKTMKSTLHLGAMSAIRHSNDLRTYYLRKVEEGKNKMSVLNAIRNKIIHRVFAVIKNQIPYQKDLVLS

SEQ ID NO: 231380 - protein, 402 aa, unidentified
MIYAGIDIAKNKHAIGATDERGKDAAKPMPFANSTEGFDRCIAYLDGLADSKAGLMVGMEATGHYWLPLFCRLQDEGYPVVVVNPVRTDAMRRFKGSSRVKTDMIDCVLVAETLRCGEFEPSKLGDEAVIELRQLTRLHQELKESVADLKRQVIVALDQVFPEYDSIFSNTFGESSKAFLKRCPTPEECLGIRADSLARTLERASRGKLGRAKADETKEIAKASCGISVAASAFSFQIKLLIGQIDFIEGQIDEVEARVRDGIEAVEPLILTIPGIGHVLGAQTVSEIGDIRRFHSAPAVVKYAGINPSVSQSGKFSSEDNRITKQGSPYLRRALYLAAMAQLKLKTPFYDYYAKKRADGKSHREALVAVSRKLVHVVYAVLSRQKPYDPDIARSPNESRSE

SEQ ID NO: 231381 - protein, 404 aa, unidentified
MTAVMIGVDPHKGSHTAVVIGPAEEPLGEIRVRASAAQAEKLAEWAAAWPERTWAVEGAAGLGRLLARQLVAAGERVLDVQPKLASRVRLLQARDTNKNDPNDALSVAIAALRSRTCRQVAAEDHPAVLKVWSKRHRDLARLRNQVACRLHAVLCDLVPGGTSKQISAAQAARILGQVTPSGAVELARAELAAEFLEDMRHLDAQLRGTRTKLAAAVKVSGTTLTEVFGVGPVIAGTISGDIADVSRFPGRDHFAAYNGTAPVEVSSGNRKIHRLSLRGNRRINHAIHMAAITQIRHKHSEGRTYYEKKLAEGKTHKEALRSLKRKISDAIFARLQADARQAAATRAKGPGGHPGNDSASSAAGSHPARQLFGQATPGPGTSLRPGTTTGTPSKRVSKKTQTTT

SEQ ID NO: 231382 - protein, 348 aa, unidentified
MTIVAEKYAYVIGVDTHAKTHTYAITATTTGTCLGCEAFPVTAAGIKRAIGWIHRNTSGEILAAVEGTCSYGASLTRALVNENLPVVEAKPPRKKTRGSAGKTDAIDAIAAATGILGTEINRLLYPRIEGTRTALGVLLASRRRLEGQSTANRNALNALVRQIDLGLDTREALSDKKVAEIGSWRARPSDTVEQQIGREEATNLALSITAAAGRLKTNETQLGRLCEELAPGLQDQPGLGPVTAGIILAAYSHHGRVRDEAAFASLAGVSPLQASSGNTIRHRLNRTGDRQLNMALDIIAKTRMRCDEKTKEFLERRTAQGLSYRDIKRVLKRYIARDLFRQLEKLFT

SEQ ID NO: 231383 - protein, 431 aa, unidentified
MRNRTNEKLEAITPRTLVVGVDIAKSLQWAQFVDYRGIVQGKALSFPNNRQGFEAIVARIMGICNSKILLEPFDRVVIGMEPTGHYWKPLANYLMKAGYRVVGVNPYHTKKSKELDDNSQTKSDKKDALTIARLVKDGRYFDPYLPQDVYGELRGLTNARVSVMKRNNTVKNTITAILDEYFPEIWTVFKKPLKGKASRQILRVCPFPALILELGEAGVLAEVKKAVKKSVGLKKVRQLIGAAEMSIGVEYGLDAAKMRLGWLLEELELIEKQLAEVELAMEKMLHGTGYAEQLLGIKGIGVVTAASFLGEVGDPLRFDNARQIANYAGYNLVEDSSGKSKSGTCISKRGRKQLRSILYQMAFTMVGTNAEMKALYLYLTTRKANPLKKKQALVVVSKKIITVIYSLLKKRTLYKPERVLGTARKELMAVA

SEQ ID NO: 231384 - protein, 413 aa, unidentified
MEVLYPRCCGLDVHKSSVSACALVREGARTHKKNARFGAMTRDLEELARWLHELGVTHVALESTGVYWKPVWNVLESQFHLLLVNAQHVKNVPGRKTDVKDSEWIAELLQHGLLRPSFVPEARIRDLRDLTRARASLSEEASRVVSRIQKVLEDANVKLAGVATNTVGKSGQAMLDALVLGEDNPEKLAELALGHLRAKIPQLRLALEGKVRDHHRFLLRRLLIQWRFVVEEIAVLDQRLEQIGAQEPSLVAAVARWVTVPGIDRVAAWTLVAEIGVNMAQFPSAAHLASWAGVCPGNHESAGKRLGGRMRKGSPWLRRMVCQSAWAAARTKNTYLSAQFRRLASKRGKHRAIMAVAHTILVISYYMQKNQCDYQDLGTDYFDRLHADGLKRYLVKRLEGLGHKVTLMPQEAA

SEQ ID NO: 231385 - protein, 403 aa, unidentified
MGVDWGDRLHQVYVGDQEGKKVREMKVQESPQGLAEIGRWLDEKRAEGFELWAAIEKPQGRIVDFLLDHGVEVYPVNPKAVDRVRDRYRMSGSKSDAFDAYVLAEFLRTDQAHLRALRPSSEKAQELKMLSRDQRRVVRHKTRFLNQLTTTLKEYYARPLEVFEDLETEIALDFLQRYPTPAHLSALTRKQFNRFATKQHHLSKQRCEELWEKLNKPQLAVPEHVVRAKAQLVEVLIEQLRAAIKAVKIYNHKVESFFASSPAAQFAKTLPGGKSGTLVAAIWAELGDAQGRWESSRHLQAEAGAVPVTKASGKSRVVHFRFACNKHLRYTMYWFSFVSLNHSEWAKLYYRGQRDNGHSHHQALRALGAKWLKIIFVMWRDHKPYDENYHLANIARQMMRQAA

SEQ ID NO: 231386 - protein, 397 aa, unidentified
MYIVGIDIAKRKHEAAVIDGEGAVIIKPFSFTNNCSGYNRLLAMLAKAKLPLDEVSFAMEATGHYWLALFTRLQKEGFRVQVINPVQTNSIRSFYIRQAKTDPRDALLIAEVIRFGHFSESTLHPENIYELRELCRGRHAIVSMQADVKRKVVALLDQVFPEYETAFTNMFSDTSMAILQTCPTPKELSEMPLEELCHLIEVSSHKRFRMAKAQELQELARNSFGFAMAGDVFSTMIRLYAKHLDFLKQQVQEMDRKIAEIMDTLDTPITTITGIGPTLGAYILSEIGDISRFSSAAKLAAYAGIDPTMRQSGEYNGVRNRMSKRGSPYLRHAIWLAASSAVLHDPALKLYFQKKRDEGKPYMASVGHACRKMVSIIYAVMRDNKAYTPCIPNEISA

SEQ ID NO: 231387 - protein, 411 aa, unidentified
MRRRPNERKKVAVSGEAVAGVDWASEVHAVCVIDGDGEVTDQFDVTHDARSIRALVARLRRAGVSRVAIERGDGPVVEELLDADLEVFVVPSRQIKGLRTRYGSAGNKDDRLDAYVLADTLRTDGHRWKPLRADHDDTRALRALCRSRKDLVETRVQIVNQLRANLELAFPGAIGLFCKPESSITLTFLRRFPSAEKAQWLSPKRMGTWLSSVGYTGGIPAAVLYGHIDNAAPGLLGPEGTARGRITLGLVAILETLNAEVQALEHDMEELFRSHRDQLIFASLPRSGMVRAANLLAEIGDCRERFPSDDALAALAGASPSTRQSGKREQTVFRWACNKKLRAAVMDFANGSRSADPWAADIYKRAIDRGCRHPHAIRVLARAWLRVIWRCWQDGVPFDPALHGARQQLAA

SEQ ID NO: 231388 - protein, 421 aa, unidentified
MKKIKTKKTHLINEKSLLVTIDGGKDTHFGYYRCPDGTDIKPFEFLNNRDGFNEFWEQVMSIYRTKTLEKIVIGFESTGPYLEPLTHFLNGKAAVKLVQVNPMHTKRVKELQGNSPNKTDRKDPKVIADIIELGHALSVVIPKGPAAELRRLTQARERTIEKRTALFNQLQTLLALIFPEFMRVMKDVKTVSAQYLLNHYPTPQDIVKLGLPALTSILRKTSRGKLKADRAKALFEAAQTSVGVQEGQSSILLEIKGILRTIEAYQEFILEYEKEMSTFLEQIPYIRSILSLKGIGEVTAAGLIGEVGDFRNFSTISEVLKLAGLNLYELSSGKHRGKRRISKRGRPLLRKLLYFTALNTVRKGGIMHCKYQEYLGRGMLKNKALIAIARKLIGIIFALVRDHSIYQENYLNVSYQYQEAA

SEQ ID NO: 231389 - protein, 400 aa, unidentified
MLSIGIDVSKGKSTVCGMKPGGEIVYAPFEVQHTREGMLELVSLLRSSGEEVRAVLESTGSYHCPVVAALLENGIFVSVVNSLRMKRFCSQSIRKVKTDRIDAMQIALYGLAYWQELQPARLPEDTYRELQLLARQYYQMTSMLIKAKVDFNALCDQVLPGMQELMSDHAGRHKLSDFVLRYRHTTHILEMGETRFRKDYCKWAEKKGYRNCERMAALIFATAQNGIPVLPNAPSTQIVITEAIRVLHTVEASRDAILTQMQALAKTLPEYSLVREMPCIGDTLAPRLIAEIGDVRRFHSKRALIAYAGIDAPPYQSGKFCANNRHISKRGNRYLRKTGYEVMQSYVMHKPANDPIFTFIEKKRGEGKSGKLAMVAGLNKFLRVYYGKVTELYRSLPAIE

SEQ ID NO: 231390 - protein, 414 aa, unidentified
MEGEINKSCGLDIHKHFFIATILSRSGEKQQQRFARDDDGILNLKNWVTSEKCDVVACESTSDFWVPIYGALTDHLPVIVGNARDMKAFTHKKTDKIDSEVIAQLALNKMIQPSRVFPKRHREFRSYVRLRLTLVRKRTDIKNESHAILSSEMLHLGDVLTDIFGKNGRAILAGISSGKNVDQIIESLSPNVRKKAVQIRDILDREISQSAAIRLQICLNLIKHLDDEIETLEREIFNYAYQKHKREMEILMSVPGIGELGAATLIAEIGSFSDFPTGDKLASWLGIVPNVYQSADKYHNGRITKRGSKVARWILTQIAQAAARKKNSRLKEFFNRKKKSIGYAKAIIALARKIATIIWHLITKDEMYQDETGYEKGEVQKRKIVETEIFSVDERITIISGIIAIMGKKEQEST

SEQ ID NO: 231391 - protein, 343 aa, unidentified
MTYDTMIGIDLAKNVFQVHGALLSGEVTFRRKLSRQHFRRFMAGQGASIVVMEACGSAHYWSREMTKLGHEVRLIAPQYVRPFVKRQKNDAADAEAIVTAAQRPGMRFVTPKLEEQQAQALLFRGRERLVRQRTELVNALRSALYEFGHPIPPGIGQLTRIEAMVEAENSDLPELVRDECRDLLLQIAEKTQRIEVKTKQIGALASLTDTARRLQTMPGIGPMSALAVEAFAPPMESFRRGRDFAAWLGLVPRQHSSGGKERLGRISKAGQADIRRLLIMGAMSRLNWLGRRTILERSWLSGMLARKPRMLVAIALANKMARAIWAMLTTGKDYQNPAQTAAA

SEQ ID NO: 231392 - protein, 363 aa, unidentified
MEEERRRYVGIDLGKREYTMAIIRKDGKMNIHQGKTSIQGREALYRRLERTDKVALEAGNLAFIMATEIQERVGCDVRVLNAGKLPFIWDAPTKTDKEDAMKLAHLVEERRDEKLPIVPLPSKKELERRKLLAQYRREMSGRTKLINLLHALFVHQGHTTIVRSNLATGVKRIQAIELLVGQEREEAEWLLRHLALYEQRLQELKVNICQEAKTDEGMKRLQSIAGVGPLVAYAYVAHVGDGSRFNKGAQVSNYLGFVPRLDYSGTIRRQGHITKHGNGYVRGLLVQAAWSMVRSRQGGSLKERFAYATGYQGKSKKKTIVSIGRRLAEIMYSVLKNKTEYEPRPWSGPMDRTALLAEKALCA

SEQ ID NO: 231393 - protein, 360 aa, unidentified
MFIERTSVGLDVHARSVAAAAIDSITGELIQAKLSADPDRVRSWVQGLPGPVAVAYEAGPTGFGLYRTLTASGVRCVVAAPSKLQRPSGDRVKTDARDAVHLARLLRLDEVTQVEVPSVGREAARDLVRAREDCRADLMRARHRVSKLLLRHGMVFEDGPAWTTKHDGWLGRQRLDTVAGRVAFDAEYETVLATKARRDRLDAAITALAFDSEFTPVVHRLGCLRGISTLTGFGLAVEIGDWHRFTGNSIGAFVGLVPSEYSSGATRSLGPITKTGNSHARRLLVEAAWHHRPRYRVGAVMQARWDQAPAAARVRGDLGNRRLHTRWVRFIEHRKRSTVATIAIARELAGWCWSLAVMDD

SEQ ID NO: 231394 - protein, 343 aa, unidentified
MDHYAGIDVSLEQSSVCVVDAAGGIVREAKVASEPEALIGFLGGLPRPVARVGLEAGPLSQWLQAALVKAGYDAVLLETRHVKAALSAMIVKTDRKDARGIAQLLRMGWFRPVHGKSAPAQEVRALLVARKQLQAKMRDVELSLRRLLRGFGLKVGEISKGQFATRVRFLVAGHSMLERIAEAMLQAREALRTEFTKLHRAMLAIVRDDAVCRRLMTVPGVGALIAVTFTSGVDDPGRFTRSKGVGAHFGLTPRKYQSGETDVTGAVSRVGDAMVRTALYEGAHILLTRAVRFSALKRWALEVARRRGMKRAKVALARKLAVILHRMWVNGTTFRWGREAAAA

SEQ ID NO: 231395 - protein, 400 aa, unidentified
MVSVGIDISKGKSTVCILKPYGEIVCSPFEVMHVEKELESLAELLQRLDGEIRIVMEATGIYHLPILTFFQEKGYFIAVVNPYAMKKYAKDNSIRGAKTDKLDSITIANYGIDKWFKLQKYESDEEIYAELKLLGRRYRHYMEQHVKALQELIHVLDYTMPGIKKLLKSWNEANNKDKLSDFVDVFWHFDTITSMGREDFLSAYMEWARERKYHQSQSKATEIYELASNGIPTLSSSTPSTKMLVREAVSVLRIIDSSLSHILARMQELAKTVPEYSTVRAMGGVGDVLAPKLIAEIGDVRRFHSAKALTAYAGIDPPPYESGQFVGSNRRITKRGSSTLRKVGYEVMRVLKSHKEPEDHAVYRYILKKESEGKSKKLAKIAGLNKFLRIYYARVNELYS

SEQ ID NO: 231396 - protein, 484 aa, unidentified
MAAREKKTADAAGAKDAKAQECPAAGEPAEILERVAAIDVAKATGMVCTRVPHDTRAGRRVQKTWNVRACYAGILELAGHLICQGIQRVVLESTSDYWRIWSCLLESRGLQVWLVSARDVRNVPGRPKTGKLDAIWLCKLNERGMLRASFVPPGEIRQLRGLTRLRASLTEDMAACKKRAEKVLEDSLVKMPVAVTDIFGVPGRAMLDDLISGQRDPKVLAQHARGRMRAKTGQLEELLAGRFTDEHGYLIATLLTHIDALQASIDELTGKIEEHIAARLPLAGPVCTACGVIGEHAPGCAGEAAPLLPLLDRLDEIPGIGRHVGQVLIAEPGTGMSVFPTAGHLASWAKMTPRTIQSGASIRHGRTGKGNPWLRSALGDAAMAAGKTQTHLGDRHRSIRHRRGTQKALVATGRGLLEIARCLISDPAARYTDLGVGYRDQLRGRDTTTRKIRELERANPGMKVTLTPISPAAPPDAAGGTANP

SEQ ID NO: 231397 - protein, 313 aa, unidentified
MINIICGVDVSKATLDACIEPGAIFASFDNNATGVAELAAFSRQHGATLVVMEATGGYERRAFLLLWEAGMPCAMTNPRSVRRYAEAMGVLEKTDRLDASVIARFAHAKNLQPTPAPTPAQQRLKALVARLRQVTDDLTVQKQRRASLLDNAEMLASIDEVIALLKRQSRTLEGEIASMIDDDPLWEKLAEAWRSVKGVAGRTVARLMADLPEIGTYSNKAIAKLAGLAPLADDSGKRQGKRSVRGGRAAVRSILFLVAAIAAKYDKTLAAFRDRLRAAGKPKMVVRIALAHKLLVRLNAKARDARAAYANAT

SEQ ID NO: 231398 - protein, 430 aa, unidentified
MKSNTQNAKIEAITEKTLVLGIDVGSETHYARAFDYRGIEYSKKPFKFSNTEAGFATFKEWILDLKERHEKDKVVPGMEPTGHYWFNLGKFLQDNEMKPVLVNPHHVKKSKELDDNNPTKNDRKDPKVIAGLVREGRYMIPYLPDGVYADLRTASNIRFQLQAELTRIQNRISRWFNIYFPEYKTVYGKPDAKSGMLILKAAPLPEDILTLGIDGVNQIWRDAKLRAVGKARAKTLIEAAEHSVGSKEGAVSARMEIRMLLEDYESRNTRLQEVMVLIEELVRKIPMAEKLLEIKGVGIRTVSGFLAEVGDISRFNNPKELQKLAGLALVENSSGKHKGETTISRRGRKRLRYLLFEVAMSLVAKNPEFRELHNYYTTRRLNPLKKMQSLMAIAAKLIRVFYVMLTKGVNYDPKKMVNDIKRPAVYLQTA

SEQ ID NO: 231399 - protein, 369 aa, unidentified
MAQRAEETAVNECKDIILVADYHAENIEFRWFNQASGEERTGKYPTTRAGILRQVEQAAGELAPGGRIVWIMESTTGWARVKDLLGERVNFVLANVLQMPLPPKAKRRKTDKIDTGRIMREYAHGSLPRSFQPSAWWREIRRVVDCRQDLVERQTAIKNWIGSLLHHETWVDRENLWSAKGRQRLLAMSFSPSDRMLVNVKIEQLEQLAKQLAEVEAQMWTIYNAWPEAQWVDQVRGIGMVTAVSLLAHIGPIERFAAAEDLISYAGLAPGMWQSDGTCHHGRIGGGGTDSHLRYLLIEATTWLRQIPRYKPTYERVLAKRGKKIARIVVARLLLRSLHKMLTAKVRFNPAPRLSAKTTEATATAGGSR

SEQ ID NO: 231400 - protein, 356 aa, unidentified
MNKISKLDFKDQQIYVGMDIHKKSWSISILTDNFEHKTFTQPPDVEVLVNYLKRNFPGGSYKSVYEAGYCGFWIHDRLQENGVQCCVVNPADVPTKDKERRSKTDRVDCRKLARSLRSGEIESIYVPSRPKVEDRSLIRTRHGMVKKQTRCKNQIKSILQFYGIQIPDELANSHWSKRFITWIETIRMERASGNFALKAHLEELNNVRKIIADSTRAIRALANSEEYRQNVRILKSVPGISTLTAMTLLTELYEINRFKNLDKLCSYVGLIPDTDSSGETERDTGITKRRNAQLRHILIESSWVAVRKDPALLMTFNTLCKKMPKTNAIVRIARKLLNRIRYVLKTQQEYVPAVVQ

SEQ ID NO: 231401 - protein, 343 aa, unidentified
MKYVGVDLHKQVISLCVVVQKGSQRAVVQRQRLACENSAAIGEFFRSLGPFQVVVEATASYEWFVQLVEPLAERVLLAHPRKLRVIAESTRKTDKLDAQVLAEFLALDMIPQAHRPTPRVRQHRALVRQRQFIQRRITSAKAKVRHILARYNADVKHLFTEEGQAHLAAQKLLPQDRFVVDQLLVDLTHYGQQRRAADRQLAEFAEAAPIAEQEARAVLASIPCVGTVTIDIVLAELGDLRRFRSQKQVAAYAGLAPKVRESADRRKDGGITKEGSGLLRWVLIQTAWRMVTKTRRWGLAYEKLKARKGARRAVVAIARRLLGLMFSLLRRGERYSQGTEILI

SEQ ID NO: 231402 - protein, 412 aa, unidentified
MEGETVIAGVDTHKDVHVLCLLDGLGRKIWSGSFGADPEGYDRLAEAIGDPGSCAVVGVEGTASYGAGLTRRLVELGYNVVEVLRPKRDKARPGEGKSDPLDAERAARKAASGRGCSVPKSQDGWVEAVRQLYVARRLAVATSTSCVACAKSMLTTAPGALRERFRGRERPKDLMPLLARGRKAGDALEESVLASLRSVAAVWKEARSQVESLDERIRALLEANAPALLGVEGCGTTTAAALVVAAGDNPGRLKGEAAFSMLCGVSPIPASSGKTERHRLNRGGNRQANWALYEIAIKRMAYDERTKRYVARRTSEGKSRREAVRCLKRYIAREVYRVLMDPNPDGAAPEGPELAKMRKAMRVTQKQAAEGLGLSAATLGHLEHGRRRSTKLERRYYELLCELKGALPQTAS

SEQ ID NO: 231403 - protein, 319 aa, unidentified
MNETPVFVGIDVAKATLEVAVRPSGAQWASANDEAGIQTLLGQLRALTPALVVLEATGGYEHAVAATLATAGVPIVIANPRQIRAFARATGQLAKTDAIDAQILALFAERVRPTPRPLPDDATQALEALLTRRRQLLEMLVAEKNRLGVARVGVRRDISQHIRWLERRVADLDRELHAGVRASPVWRAQDDLLQSVPGVGPVLSYTVLAALPELGTLGRKQIAALVGVAPLARDSGTHRGRRTSWGGRAPVRTVLYMATLTATQWNPVLRQCYQRLRAAGKPHKVALTACMRRLLLILNAIVRTQTPWRATPTAARATA

SEQ ID NO: 231404 - protein, 335 aa, unidentified
MKSELSVVGIDLAKSIFHLVGTDERGTIILRKRLARGEVLSLMAQLPRVLVGMEACGGAHDWARPLREQGHEVKLMAPQDVKPYVQTNKNDLRDAAAIAEAVTRPSMRFVPIKNVAQPDLQALHRVRERLMGARTALVNDMRGLLAEYGIVLPTGVNAFRHAWAAKLEAEHAQLTPLSQELFGKLWAECKQVEAEGAYDDEKLQALATTHPESPRLWSMPGIGPLTATALIAAVGEVGGFTNGRQFAAWLGLVPKQHSTGGQTRLLGIRKRGDRYLRKLLIHGARATRRWARTKTESRSRWIRGVLERRGWNRTAVAVAHKHARIVWALLSRGGV

SEQ ID NO: 231405 - protein, 322 aa, unidentified
MEGSRKMTGTPTYAGIDVAKDRLDVVLRPSGEYVEATNDERGIRSVVRRLRKDDVALAVLEATGGLEQPAAAALALAGVPVAVVNPRQVRDFAKATGKLGKTDRLDAAVLAHFAEAVRPEPRPLADEHTRELSAVVLRRRQLLAMTTAEANRARTAPKAVSKRIEAHLRWLRKELARVDGELKRVVEESLVWKERAALLMSVPGVGPTLSATLLAELPELEHLDRRRLAALVGVAPLNRDSGTLRGIRTVWGGRSGVRTTLYMATLCATRHNPAIREFYGCLVASGKPKKVALTACMRKLLTILAAISRNRTPWQPRLLPDS

SEQ ID NO: 231406 - protein, 414 aa, unidentified
MESVYRVIAGIDVHKKMLAVVVRKQCGERVEYEKRKFGATRAEIQHVEAWLRAQGVSEVVMESTAQYWRPVWYGLEPHFRLHLTHPLKTRAPRGRKSDFRDAQRLADRWSSGDLEESFVPGAEQRSWRWLTRTRVQLKKKMGVIRCHVEGLLEQGGIKLSAVVSDLFGVSGWAMLEQIARGVSDVEVLAKEARGGLRKKDKQLKEALVGQLEPVYRMLLKQHMEQVRLLRRQVEEINQTVAEAMKEHIPALCRLSKIPGVDLYAAQELLSEIGPKAAAFASAEQFASWVGVCPGSKESAGVNYSHRSAKGNRYLRRLLCQIAWAAIHSKGTFFAGLFARLKPRVEAKGAAWAVAHRIAKIVWLLLHQEVEYRETGAAPPNERTLLRKFKRMLKEFGHLGIDVRALLDQQLPASA

SEQ ID NO: 231407 - protein, 404 aa, unidentified
MKTLHKRCAGLDVHKMEVVACLRVVSNRKVGREVRRFPTTTHGLLELAEWLERAGCTHVAMEATGVYWKPVWHILEGRFVLILANAAHVKNIPGRKSDVSDASWLADLLAHGLIRASFVPPRPIQELRDLTRTRKQLTREIVQHTQRIQAVLEEANVKLCSVITDILGATGRRILNAMIAGETDAQKLAALGSERLGCTRAALVEALTGRVREHHRFLLAQHLRTIMQLEESVAAFDARIEATLAPSRDTVERLKEVPGLGTTAAEVVIAEIGTDMGPFPTAGHLLSWAGLVPRLDESAGKRRSTRVKKGAPWLKPVLVQAAWGAARKKNCYFQAHASKHATGPRKQRSQLPRRSSRPSITCCAMVLATRTSALNISLDATPPKSLPPLPNLPTEFVISAIMLK

SEQ ID NO: 231408 - protein, 391 aa, unidentified
MIYIGIDVAKDKHDCFITNSEGEVLFNAFTIPNNADGFHDLFQKISSLTNDFSNVKVGLEATGHYNYNLLGFLIDKGLPTFVINPLHTNLFRKSLSLRQTKTDKVDAHTIALMMMSGVNLQSYSDTSYHNEELKSLTRYRFDKVQERAKLKTSISRLVNILFPELEKLVPSLHMVSIYALLAEFPSSAQIASCHLTRLTNLLANASKGHYNKEKAIEIRNATKHSIGSNMPAKSLELKHTIRLIQELTSEIDEIECFIKSIMDEIRSPILSIPGINYRMGAMIIAEIGDFNRFSSPDKILAYAGLSPSTYQSGQLDGCYSHMEKRGSRYLRYALFNATKFVCIWDNQFSAYLAKKRSEGKHYNVAISHAAKKLVRVIYQLEKSGQLYHRAA

SEQ ID NO: 231409 - protein, 356 aa, unidentified
MAVYVGIDVHKHYCQAALMDDNGHVVKELRFDNTSEGTSSLVTLARSIDPQVQAVLEPSANFWIRTYDKLEQEGVEVKLSNPLRTKTIAEARIKTDRIDAKTLAYLLRGDLVAESYVPTRKTRERRALIRHRASLIQMRVDIKNRIHALLDKHELTHTYTDLFGKGGMEWLRGLQLPTPDHEILQSSLEVVETLNEQIRTIDIQIAKDATSEEKAKLLMTMPGVDYYAAMVLLSEIGDVHRFNSDEKLVSWVGLAPQVHQSGETQWTGHISRKGSKRARWILGQCAQSARQHDPRMREFYERIERKHGSQKAVVAVARKMLAIMYVMLIRNEPYRGENPELTEQKHKRLDTLANSA

SEQ ID NO: 231410 - protein, 389 aa, unidentified
MKYVGIDLHKKTISGCVVVKERGKKKVAARKRLECRDEAGIKSWFSELGKFEVVVEATASYEWFVKLVEPLAQRVVLAHPKKLRIIAESKRKSDKLDAQVLAEFLASDEIPLAYRPGPRVREHRALVRWRNYIQRRLTSVKNKLRHILASYNADVPHLFTTEGRVHLATVKLSAADRFVAEQLAVELDQHQERLVTANRRLREFATNAPLPEREARAILDSIPNVGPVTTDVILAELGDWRRFHSQADVVCYAGLAPGFRESAGKAKQLGITKEGSRLLRWVMIEFAWRMVGTSRKWGGHYHRLEARVGAKKAIVAIARRLLGMIFALLRTGQKYSLALEIPPPASCRSKSPRDTNPSELACLRGQPRQASSLGAGVYYGVPLSVPETE

SEQ ID NO: 231411 - protein, 343 aa, unidentified
MQAVTTIGLDIAKSVFQVHGIDAEGKVLIRRKLKRRYLLAFFEKLQPCLVGIEACATSHHWSRELKTLGHTVRLMPPAYVKPYVKRQKNDATDAEAICEAVTRANMRFVETKTPEQQSCLMLHRTRQLFIRQQTSVINAIRAHMAEFGIVAPVGRKGVEQLLAIVTDASDQRVPEVARACLAALGAQLRMLKAQILEFDRMIMAWHRSNETSRRLDAIPGIGPALATALVASVANPKAFRSGRNFSAWIGLVPKQHSSGGKDKLGSISKQGDRYLRSLFTAGALAVIRYAKIHGTKHRPWLTALLARKPTKVAAIALANKIARMAWAMMARGERYKEPVALAA

SEQ ID NO: 231412 - protein, 391 aa, unidentified
MAMYFVGIDISKYKHDCCIISAVDQKIVSKLTVKNNKAGFEQLLTVFNSLSNPEDIKIGFESTAHYALNLELFLENAHHSFMEINPLLIKEYKKSTSLRRTKTDSVDCESIARWLMTVEYKPHSKGFYHSYSLKSLTRLRDRLIRQRSFYLVKITNVLDHTFPEFKPFFHERLSKTALYLLENYGSAEKMAKMNSAAYEKLRSLSRGKFSPQQFIRLKELAANTVGVNNSIFDVELNSPLALYKSLIKEIDTLEKEINRLIEEVHPHYMSVPGIGPISAAVIYSEYGDISNFSTPAQMLAFAGIEPGINDSGTESHGGRMVKHGSSQLRYVLINCCLPLIRFDMTFAAYYAKKRGEGKPHRVAVTHVAKKLVRVIYALERQGVDFNALKLR

SEQ ID NO: 231413 - protein, 357 aa, unidentified
MKQTKYIGLDVHQASISIAVRDSSGKLVMESVIETKATTILEFMRGLSGSLWVAFEEGTSATWLHDLLKPHVVKVVVCDPRKNALLKAGNKNDRVDARKLSELLRAGLLTRVYHGGPGVRTLRELGRSYLTITKDLTRVMNRLKGLYRSWAISCAGRKVYSPRHRASWLEQLPESGVRRRAEWLYQQFDTLAQLRREARKELLAESEKHPASQLLREIPRLGPIRAALLIALLQTPHRFRTKRQLWAYCGLALQTRASGEYRFTDGQLSRARQPTVRGLNVNHNHDLKNLFKGAATPAGAGTDPLSDVYRGLLARGMKPAMARLTLARKVAAIALKIWKKGEHFDPEHLKQQSSLSV

SEQ ID NO: 231414 - protein, 356 aa, unidentified
MDRYVGLDGHARSCTLGVIGPSGKRLKSMVVETNGQALVEAVRGIAGQVHLCLEEGTQSAWLYELLAPHVEEVVVVVPPERKGPKDDLRDAWARAEELRTGAIQTRVYKAPQHLAALRNAVRAYGFAVRDVVRAKNRLKSVFLSRGIEVDAGVYEANGRGQWLTKLRRPHRDLAEWLGRQLDGLLPLREAAEEWLRREAKTHPIIRTLSTAPGMGIIRSAQTVAVVANPERFRTRRQFWSYSGLAIVTRSSADWVHDRSGRLMRSQVHQTRGLTRKRNALLKSVFKGAATTVIAQLPDDPLRIAYDRALQAGRKPNLAKLTLARRIAATVLSMWKNQEVYDPDRHRLVTDRTPALS

SEQ ID NO: 231415 - protein, 433 aa, unidentified
MDIVHPRVAGIDVHKKVVWVAVRLPGEGPGERKVVTKRFKTFWRPLQKMAAWLAELGVTDAAMESTGVYWWPVYHALAGAGIEVCVCNAAHMRNVPGRKRDIADCQWIAELHEHGLLRPSFIPAAEVAALRARTRYRKRLIEQRTAEGQRLAKVMEDAGIKIDSVASRLLGKSGREMIEALIAGERNPERLADLAKGVLRRKTDDLQMACDGRFTGSHAQMSRLHLDAYDHLTAKIAELDALIAEAAAPFAAVIARLITIPGIGQRTAEVIVAETGGDMTRFATSARLAAWAGLAPGDNESAGKRRHAAARQGNRHLRAAMTEAAWATARTRTRPGARFRRLARRFGKDHEKKAATAVAHTLICITWAVMAHGQDYADAGEDYYDQRDQRNREHLIRHHQQALARLGCQVNLIPPDDGSPPPGTASPHPGQAA

SEQ ID NO: 231416 - protein, 411 aa, unidentified
MFKVAIRSPGDKPRTRKTEITEFRTFYGVLQEMGREMRRRGVTHVVMEASGIYTEPVYHALAGLGFTEVAVINPAHARALRGHKTDAKDCARLAELFECGLLRGSYIPPQELKEVRDLTRYRTRTVQARTSEIQRLGKALESAGIKLGSVASSITGMASTAMIEALIDGERRGQVLADLAIGRMRSAGKLADLSMALTGRFTEHHALLCRLHLDRITVFDDAVAGLEARIAGKAAPWQREAGLLISVPGFGDAVSQAWLGEIGPAPHQWFSSAGKLASWVSLCPGNHISAGKRKHGRTGRAGTYIKPMLIQAAWAAIRVRGRLQARYNRLVRRFGGDKNRAAKKKAITAIAHTLLKIAYQVLKSGTPYQEPGADFYTRRESPEHKQAWLERQLQKLHPGCTITITISPEAA

SEQ ID NO: 231417 - protein, 412 aa, unidentified
MQDILTCAMGLDVHRDIIVACLVKGAVDAEPEAETRTFSTLIPEMQKLRDWVIESECRNIAMESTGIYWQPIYEMLESCFDGEISILVVNARHMKNVPGRKTDMKDAQWIATLLRAGLLKGSFIPDKAFRELRHLTRYRKSVVHDITAQKNRIDKFLQSSGFRFTAFLSDTFGASGRNIIRHLIEHGSIDREALDKCLKTKTRNRIDEILVALNGSLSEHQRRFLNMVFRHLEDLEAHKHTVEDEITEEVLKHTDTLNLLCSIPGIDVTAAAAIIAEIGTDMSSFPDSQHICSWAGLSPGNNESAGKRKSVHINKGNPYLKSMLCEVAWIMASHRKLYLSGWYWKVKQRKGAKRATIALARKILSIIYTMLKTGTPYNEECFEQRRLRCERKRANRLVNELQKLGDVVVAPD

SEQ ID NO: 231418 - protein, 338 aa, unidentified
MNYMGIDHHKQYSHITLLDERGEVLKSGRVANFRLELEDFLYGIKEVRAVVEAGRSSYTIVDVLDDMGIETKVAHPKEVRTIAKAKVKTDQRDSYKLAHLLRTDYIPEVYKRSRENRSFQRVLRQRAFYVAKQTSVKNRLRALLAQQEEEVRLEVARVENLFTEKGMKVLRGLVLAEREAKMVGALLKTYRHIEERISETNALVKELYGRTAYARLIQTVPGFGVFLSVLVAVEIEDIRRFEDVGKLHAYTGVIPSTHSSGERSYHGKIIKEGNRWLRWAAVEAVWPALRADFDLRCYYERMKRKKGANSAKVSTARRLLTIIYRMLKENRPYIPYKR

SEQ ID NO: 231419 - protein, 356 aa, unidentified
MQQQDNKLDFTNQKIFIGLDVHKNKWVVTIRMNHIELKTFSMEASAGQLIKYLQKHYPQAECSVVYEAGFSGYWIQRHLSSNGIAAIIVNPADIPTTGKEKDRKDDHKDSRKLARELENNTLKGIYIPDEAIEELRSLNRIRTQYVGEKARMKNRIKSFLFNYGKEFPGRNSRYWSEALLEKIKDIKFYTPIAEESIKNYVEHLSTLQEKVKKLEARLKVISKEFGFDQIIGKLETIPGIGFISAITIFTEIMDIKRFRRLDELCSYVGIVPSTHSSGEKEKIGRLTFRQKRYLKNIIIEAAWIAARKDPALTMSYSRLIKRMEPQKAIIKIAKKLLNRIRYVWKNNIEYQLAVVE

SEQ ID NO: 231420 - protein, 406 aa, unidentified
MEVIIDAACGLDVHKETVVACIMGKEIKKETRTFKTMTNNLIELKNWLISNGITHVAMESTGVYWKPIFNILEDSFEILLVNARHIKRVPGRKTDVMDAEWICKCLRSGMLSGSFIPPLIIRELRDLTRYRRKMVNTITQEKNRVHKILEDANIKLSSVVSDLFGVSATQMIDELLEDKIPVEEIAALAKGTLKSKQAELREALNGNFTVHHKFMIQSSLEHINSIKQIIIKIDEEIDKVVKNFNEEFKLLQTIPGVKEKGAANIIAEIGLDMDRFPSEHHLSSWAGMSPGNNESAGKKKSGKTTHGNKSLKATFTECAWAARKTKDTYLQAKYNRLVRKCGKKRAIIAVGHKILIACYHIIKFKKPYDELGSNYFDSFNKDKIVKGYLNKLKKLGYNVKIEKEAA

SEQ ID NO: 231421 - protein, 345 aa, unidentified
MLYAGLDLSRKRLDFHLLEADGATVEVGAAPPDVDGLGGLTQRLARHGEPIRAAIESMNGARFVHDRLELHGWQVEIADAQKVKGLAPLACKTDRIDAWVLAELARRDLVPAIWLPDPQVRAERERARWRLHLVRHRSSLKQRVHAVLLTHGRPCPVSDLFGVRGRQLLVKLGLPEPWQGTIEASLRLIDELEHITSCEAELRRLGADHRYVPLLCTVPGISWVLAYTIAAELGDITRFPSPRKLAGYSGLCPRVYQSGERDLRGPLAKQGPRYLRWALVEAATHACTHPVYRDRYQQTKARIGKQRGAKVAQIDLARRLAEAIWHMLSRGEAFAPKGATDPLAA

SEQ ID NO: 231422 - protein, 426 aa, unidentified
MNQDNQSFAAFIGLDKSDKKINVTLQRCSTARSERSIIQGSAEALHAWVAALCARFPHQQVAICVEQPAAGLIHALMGYDFVVLFPINPVTLARYREAFTPSRAKDDPTDADLLCELVAQHREQLKVWQPDDICTRKLRHLTQARRSSVNMRTRLSNQLKALLKGYFPQALELCGEDLTTPLACAFLQKWSSLQQLKKARPETIRRFYYAQNARRGDVIEKRLTLIAQAVALTNDPALIESSIITVQALTLGLRAVHTAIARFDREIARTFTQHPDASLFAALPGSGTVYSARLLAAFGSRRERFESAEALLNFSGIAPVLKRSGQTTIVHRRYARPIFLHQSFIEYANESIRHSLWARAFYQMHKAAQQSHWVIIRALAYKWIRILFRCWQERTPYDELRYLKSLQKSRSPLLQYIAQPTPKLFE

SEQ ID NO: 231423 - protein, 346 aa, unidentified
MDHYAGIDVSLECSSVCVVDANGKIARETKVPSEPAALIGWFHSLGFDLIRIGLEAGPLSQWLYAAMKQAGLAVELLETRHVSDAFKAMPVKSDRNDARNIAQLMRLGWFRPVHCKSMSAQETRAMLTARKLIQNKLQDIENSLRGILRGFGLKVGKTTKRNFASRTSELVVGHPALETIAAAMLSVHMALLREFNGLEKRVRAMSLLDAKARLLMSTPAVGPIISLTYASAIDDPFRFTSSKRAGPLFGLTPKKHQSGETDYSGRISKNGDASVREALYEAAHIILTKPIKGCAQLKSWAMRIARRAGMNKAKVALARKLAVIMLRMLKDNVPFNSTTTATAAAV

SEQ ID NO: 231424 - protein, 362 aa, unidentified
MTDTMPRVGLDVHANQTHLFSLDLASGEFERKRIEGPPTETLPHLQGLGPQLIAVYEAGPTGFGLARAGAELGLDIRIAAPGLIPKAPTDRVKTDRRDAERLARLLAAGELHFVHVPSIAEERFRDLVRCREDLRGDLMRARHRLSKLLLRHELRYPGPGGNWTQQHHDWLGKLGFDDPAAQMTFIDYLGAVQALEQRRGVLDEAIAELVKESSHAETIARLRCFRGIDTLSAAGLCAEIGDFRRFAKPTQLAGYLGITPSERTSDEKRRQGQITKAGSKHARRLLVEAAHHYARKPVVGATLRRRQEGQNPRVCQVAWRAQRRIHLRWSHLRLKRGKPAGKAAVACARELACFAWEAAVLD

SEQ ID NO: 231425 - protein, 355 aa, unidentified
MRILSLDLSKYKTVACEYEAETGRHQFATVLTTQKALHDLIVDREPDRVVIEICSIAGWVCDLVRSLGIEMQVASTNDERWQWRKVKRKNDRRDGLKLAQLSARNELDLVHVPQSEMRQWRALIAYRHHLVQRRTKIKNHVRELLLREGQLLPRHRSAWTQAGLAALEAMVKPLGEVSMDELWRGELEVELAQFKAVQKQLTEVVAKLDALGAANHNVRLLQTASGVGPRLAEAVVTMFDDPKRFRRGAAVSAYIGMVPKQWDSGETERLGKITRHGNRLVRSLLVEVAWCALRHNPWARETYQRISGGKKSRKKIAIVAVGRKLLVRCWAMLRDQSAWHWEGQSAVVTPPAPTA

SEQ ID NO: 231426 - protein, 375 aa, unidentified
MTTIARLGIDTSKSLFQLHGVDEREGVMLRKQVRRSQFVAFVAKLAPTEIGLEACGASHHWARQLQALGHAVVLLPPQHVKPYAGHNKNDKIDAAAICEAMSRPKIRERFVAVKSAEQSAAQMLLGARDGLLHRRTQLSNIIRGHAAEFGLVTPKGLAHIKPLLERIAGDETVPELAKELFVVLGEEFTELGPRIAHLDKKLKVFQHSNELCRRLVEVPTIGPVIASSMVVKICNPAAFQSGRRCAAWLGLTPKDHSTAGKMRHGGITRAGDEDLRAALVSGATAYIQQVKRGRTRPSPWLAGLLKRKPEKLAAVALANKTARIAWKLMTSGQRYDRARAEAREALGAAQHGGSTPSPSLHPDTAAHGATAMTAA

SEQ ID NO: 231427 - protein, 345 aa, unidentified
MQIKSIGIDLGKTTFHLIALGSRSQVVIRKRFSRSQLLVYTANLPSSLIGMEAGVGSHFLGRALREQGHEVRLIPAQFVRPFVKSNKNDYRDAEAIAEAVERENMRFVPIKTEDQLDLQALHRVRDRLVARRTSVINQIRAFLLERGISFRKGPASLRRQLPEILENADQKLSSRMRRLLDFLWQEWKGLQAQVESLNADLEQIASSDAACVRLQQIPGVGPLVSTAVVSAIGNGAAFKKGREFAAWLGLVPRQWSTGGKPKLLGISKRGNPYLRKMFIHGARAAVLRVKREGSSLGKWMSGLETRAARNLVIVATANKLARISGAVLASGNDYHPTHKTLVFSN

SEQ ID NO: 231428 - protein, 416 aa, unidentified
MDVIVSRCAGLDVHKDTVMACVRTPSPDGGRRSTVRRFRTFTASLRELRDWLVAEGVTQVAMEATGVYWKPVWHVLEAVPEWELLLANAHAVKNLPGRKTDVGDAEWLAQLCECGLLRPSFVPPPVIAELRDLTRYRKKLIEERTRETQRIQKLLEDAGIKLDSVVSDILGVSARQMLEALIAGVRDVDALAELARTRMRAKIPQLRRALEGRFDTHHALMLRMHLDHVDQLSANIERLDVEVDRVIRPFSEQLQRLITIPGVGRRTAEVIIAEVGVDMRRFATAGHLASWAGMCPGNHESGGKRRSGKARKGNRALRAALCEAAWSAARTKTGYLPAQYRHLMHTFGKKGQTRAVFAVGHSILVIAWHLLANNSDYHDLGAEHFNRHTDPEARKHYLIRQLEALGHTVTVKPNAA

SEQ ID NO: 231429 - protein, 393 aa, unidentified
MICVGIDVAKDKHDCFILSSDGEVLADVFTIPNNAEGFGQLLQTIRRCTSPQSKIKVGLEATGHYCYNILGFLLDKGLSTYVINPLHTNLYRKSLSLRKTKTDRVDARTIAAMLMSDVDLKSYTDTAYHNEELKSLTRYRFDKVRERAKLKQSVSRLVTILFPELEKLVPTLHMESVYALLSEFPGAKQVAEAHLTHLKAVLYGASKGRYGRDMATTLRDAARCSVGSVMPAKYLELQHTIRLIRELDAEIEDIETAIQSMMDEIQSPITTIPGIGVRMGAMILAEIGDFSRFGSPDKILAYAGMSPSTYQSGQLSLSGAYSHMEKRGSRYLRYALYNATKYVCLWDPAFAAYLAKKRGEGKHYNVAISHAAKKLVRLIYAMEKSKQSYRNAA

SEQ ID NO: 231430 - protein, 499 aa, unidentified
MPSTKVAAAPILGAMKRKNIFRNESQKLDAAFIEAGLPERVLLVPLDFAKITHYACFCDGRGTYVRKAFTVKNTQEGIDYLVDQIERTRVARSIKSKRHVIIGGEDSASYTRNFMDRLFELGYLTVRLDSKEVHRQAESVDSSTDKTAVRAIAKTMLNRDARQTGGSDLYAQLRGLTRQRRRIVHLSTAVKNRMHTHADCLFPGFLAKDSAVAAFSQASLELMSRNFSASILARKSEKTLTRILSRQGVRGALEVAAKLKEQARNAICADDATVRLSAQLIESELSLFETLQSNLTGLDKEAARILLQLPEVFAVSIKGIGITLASSIFAEIGSLSHVQRCDQINAFAGIAPRVKQTGGPESPARIGGKRRNFNRILKDYTLQAGNHLYLHGPEELLHDAARRKLAGKAVDTAMARRFLRIARALAKSHCIYLPSHLRTGQTGTDAEAEARAQYIIKIWPDLLLKWKRLGLHEEAFAPDTPLGNWRIIVQEIYEIELTL

SEQ ID NO: 231431 - protein, 369 aa, unidentified
MADLGEAFIGIDVAKLRNAVAVAEDGRIGEVRYLGEFDADEASMRRLVKRLAAKHEKVTFCYEAGPTGYGLYRMIRSMGFECTVVAPSLIPRRPGDQVKTNRRDAIGLARLLRAGELTAVWVPDEGHEAMRDLVRGRGAAVETQRVHRQHITSFMLKHGRIFPRKRAWSMRYLRWLQEQRFDHPAHQIALQEMVDALRLASERIKRIEAAIEEFLPSWSLEPLVRSLQALRGVDLIVAVTFAAEVGDVKRFENPRQLMSYLGLVPSERSTGASVRRGGITKAGNSRVRHMLVESAWTYRHPPRIGVKKLYIHERVSPVVREIAWKAQSRLTARYRRLTATGKRTTVVCTAIARELAGFMWSVGRVAQTI

SEQ ID NO: 231432 - protein, 346 aa, unidentified
MRFYTKQHKYYCGIDLHARNLYVCIIDQSGQKLVHKDIAAIPESLHQLVKPYMDDLSIAVECMFTWYWVSDFCLKYNITFVLGHALYMKAIHGSKTKNDKIDSHKIAMLLRGGLIPMAYVYPQAMRSTRDLLRRRMYFMYKRSELLAHIQNTRSQYLVEDFDGPVARKRHRHNILEKFHEQAVAKTIESDLSLLNHYDTVINSLENYLKRVVKEHKYNDFYLLRTVPGIGEILALVILYEIHDIRRFERVQNFTSYARLIKPHKESAGKIKGTSNKKIGNAYLKWAFSEAVLLLIREREEVKQLHLKLKNKHGKATALAILSHKLGRAVYYMLRQRKVFDVHRFVN

SEQ ID NO: 231433 - protein, 341 aa, unidentified
MQKFIRIGVDLAKNYFQVHALVSEGGSAVTRKLTRSKMREFFAQIEPCRIGLEACGSAHYWARELQAMGHEAFLMPPAYTKPYVKRGKNDAVDAEAICEAVSRPGMRFVPIKSAEQQATLTLHKTRDLLVKQRTMTVNALRSHLAEFGIIVAKGIGHVSDLLQLAETDARLPSVANAAVKALAQQIDAIDQSLDDLEKEIANAHSRSEMSQLLVEIPGVGKITATVISASMPDPNVFRSGRDFAAWLGLTPKQNSSGGKPSLGAITKQGNKYIRKLLVLAGTSLLNVVGKRKGVLRDWIVGLLAKKPARLVTVAIANKLARIIWAMMKTGESFRTEMFMKA

SEQ ID NO: 231434 - protein, 426 aa, unidentified
MAYRIAGIDVHKKMLAVVVADVEGEGEYQFDRRQFGTTPDHLRLLSEWFVAQEVEEVVMESTAQYWKPVWGALERYWKPTCQKREGAGPMSGALHLAQAQSNRGPQGRKKDFPDAERLVKRFVAQELTLSFVPDTEQRLWRTVMRRKYQLTCDRVQLQNRLESLLEEAHIKLSSLVSDLLGLSARRMLQALADGETNPTSLAALADKKLRATPAQLCDALSACTELNPVYRRLLKMVLEELQFLEQQIVKLEQEMASLLIQHQEAVQRLAEVPGLGVASAQQIIAEVGAKAATFASQKHLSSWVGACPGDEESAGVSTSHRSPKGNRQMRRILNQCANAAVKTKGSIFEIVYRRLVLRLGHNQTIGAIANRLCRLIWIILHRGVRYEERGQVVCERLKRIRTARMIRQLRGLGYRVEPLTVQVSPA

SEQ ID NO: 231435 - protein, 415 aa, unidentified
MLKIVYPVCCGIDVHKTFVVACIASTNDKGVTTYKSHRFSTFSKGLRELSQWLSEGGCRDVCMESTGKYWIPVYNILEPTCNLVLAHPKYVKAIRGKKTDKKDAKWIADIFKHDLVCGSFIPPYDIRQLRDLCRYLVKLTGFMTGEKNRAQNCLTVSNLQLASVFSDVFGKSASAIIDHLLEHPDDTGFDFMSLVDGRCKASAEDIAAAVDGKLLPEQAGKLTIIRSHMQGLELCAANLQSQILTLAEKYAHQIELVCSVPGILTLSAIRIIAEIGVDMSVFPTSKHLCSWAGLTPQNNESAGKKKTTRISRAGAYIKPLLVQCALAVIKSEKHPEIRNRYLALKKRRGHKKAIIAISRMLLTAIYHILNKDEPYNPELYKKADMPPKHREIPVDQAIFILQRQGYLVTETSVVT

SEQ ID NO: 231436 - protein, 339 aa, unidentified
MNYVGVDLHKKVITVCVMDASRKIVRETTLYPHEPHRIVAFFEGLGEYQVVLEATSSYYWFVELLEPSASEIVLANPAKMRVIAESTKKTDKLDARVLAEFLARDMIPRAYMPTPRQRRHRALVRHRKYLREQATAVKCKIRHVLADHNADRKDLFSAEGVAYLKGLKLDEVDRFRVTDLWKAWESIEGRLKKTAAKIKAFAKKAPRAEAEARELLKTAPGVGVVTAEAVLAELGDVRRFKNAKAVCAYAGLVPTVRQTGGKKSKDGHITKQGSGLLRWALVEAAWRLAASSPRWASTYQRIKKRNGAKRAIVAVARKFLCVLYAMLRDSRPYQSLAAS

SEQ ID NO: 231437 - protein, 334 aa, unidentified
MEKITTVGIDLAKAVFSLHGVDRTGRMVLRRTVRRDQLVKLVAGLSPCLIGMEACSGAHEWGRRFQELGHTVRLMAPKFVVPYRKSGKNDGNDAEAICEAVSRPSMRFVPVKSAEQQALLAMHRVRQGFVVERTATINRLRGLMSEFGVVLPLRSIMVRRQGAAAAENLPELARRAIGDLLDQLRVLDERIDGYDREIEAQAKLCEPAQRLMKIRGIGPTTALAIVATVGNAREFKNGRQFAAWIGLVPGQYSTGGKTRLGHISKRGDAYLRNLLVQGARSVLHTAATHRDPVSRWALELQPRRGYYRTLVAIANKNARIAWALLAKNESLRTV

SEQ ID NO: 231438 - protein, 465 aa, unidentified
MGAGKMNRKQRKELGRRLQSANPGLEVVHPCAAGIDVGNGAHYVAVRPEQDAEPVRRFECFTADLHRMADWLEACEVKTVAMQSTGVYWIPLYEILEQRGFEVYLVNARHTKNLPGRKSDVQESQWLLKLHTHGLLNNSFQPTAEIRVVRTYWRQRGEHVRGASTCIQRIQKVLTQMNVQLANVISDLSGLTGQAIVRAILVGERDPRKLAELSHPRIRAGREQIAKSLEGNWRSELLFVLKQEMEMYDTYQHKIAECDRELEATLKQFAAPERASTEQPKIPNAKKTKRIQRNAPGFNLTSELHRITGVDLSRIDGVNAIVAQTIISEVGLDMTRWKTEAHFASWLGLCPDNRISGDKVLARGTRHVINRAATALRMAATTLIKSQSYLGAQYRRLRTKLGAPKAITAMAHRLARLVFRMLKYGQEYVDKGTQYYEQKHREQQLHLLKKKAATLGFQVVETGVA

SEQ ID NO: 231439 - protein, 355 aa, unidentified
MIVIGADTHKSSHTLVAVDAATGQRIGVCTVSSTSSGALGALGWARRVASTERCWAIEDCRHVSGRLERLLVSAGEAVVRVAPRLMAGARATARERGKSDPIDATAVARAAIREGVERLPVARLAGAELDLRLLLDHHDDLVAARSDQQRRLRWHLHDLYDDLDVPAGGLDRAVWLDRVAGRLRRSQQTARIRIARDLVSSIRAATRRIRELEQEIALLVEELCPQLLDEPGCGPLTAAKLVGEIAGADRFSSDAKLARAAGVAPIPVSSGRRDRHRLDRGGNRQLNLALHRLAVNRARHDPATAAYLARKQAEGKSRMEALRCLKRHLARRVWHLLTDPTHDPARAPQPALALT

SEQ ID NO: 231440 - protein, 400 aa, unidentified
MMTPDDIDVWVGLDVVKSAHHAHALDHDGNTLYDKPLKQDEKAIRTMLGKLSKHGRVLLVVDQPNTIGSLPLTVARNMGIAVAYLPGTAMRRTAQLLPGDAKTDRRDAHVIAWAALKLPETLRDAGPDDETLAALKLLAGHDEALAHESTRHVNRLRSLLLQTHPAFERALKGERITRDATLALLERYGGPMGVKRAGIEDVKDWAKSNGLRAGRIIDDMFKAIGEQTVTVPGTLMAETIIPSIAHDIKTIRDRRREVDRQVEKLLEDHPLLTVLTSMPGIGVRTASNILLGIGGDIANFKSSAHLAAYAGISPVTGQSGTSIKGERPSRRGNKRLKNALWQTAFVASTKHPPSVAYYKRKREQGKHHNAAIICLARRRCDVIYSMLKNGTLYQEPALVA

SEQ ID NO: 231441 - protein, 341 aa, unidentified
MEQKLRALGIDIAKQVFHLVGMDAHGTIVVRKRLYRAQVLVFIAQLPPTCMGMEACGGAHYWARRFREHGHEVKLMAPQFVAPYRKANKNDLRDAEAIAEALTRPTMRFVPVKSVAQQELQALHRVRERLMKARTALINETRGLLLEYGIVVPQGATTFRKHVLEKLATEDAKLTPHSLALFQQLLEELATLEARVATYDAQLAQVAQTHPVCQRLMTIPGLGELTATALVAAVSGATQFKNGRQFAAWLGLVPRQHSTGGKSRLLGMSKHGDSYLRKLLVHGARSCLRWVGRKRDRRSQWVQSLMERRGWNRAAVALANKNARVAWVLMCTEQVYETAVA

SEQ ID NO: 231442 - protein, 371 aa, unidentified
MNESSKMIYVGLDVHKDAIAVAYAPEDRGAEVVSLGSVGPRQCDIDALIRKLQSKGATLVFVYEAGPCGYWLYRYLTRKGLSCHVVAPSLIPRKPGDRVKTDRRDAITLARLMRSGDLSSIYVPGIEDEALRDLSRGREAAMEDLKRSKRRLKSFLLRQDIRYEGRASWNAAHLRWLSEVVCPTPPQQIVFQEYVRAVTEQSERLQRLERELHEAVKGWRLYPVVEAIQALRGVELTGAVILMTELGDLTRFDTPRQLMSYLGLTPSEYSSGARRRQGGITKAGNTHARRALVEGAWAYRYPAKVSRHLQLRLEKLPPEIQAIGWKAQVRLCKRYRQLTARGKHVNQVVVAIAREMAAFAWAIARLVPRAA

SEQ ID NO: 231443 - protein, 461 aa, unidentified
MILRMGIDIAVRAPHQASLADERGELLWSGHRFRTIAADLERLWELLPATDGAEQLTVIMEPTRNAWVPLAAWFRRKGAHVVLVSAERSSDLRAYYAKHTKSDRLDSVLLARLPLLHPEGLHPERGIGPGDPLRRATKLHSTLVKRRTTSLARLDALLEILGPEWHAAFGTHLNNKTPLRFLAAGYADPHTVRRLGRTRLSRFLYRHSRGAFGEEMADAVLSAARATLALWDEDLSFPDLAEDIAIEARLALALTEEIKELDERIEVIVGDRDPEGIITSAAGIGAVTGAVILGRLGDATRFSSLAAARSFSGLVPSLNASGVSGRHGSPTKRGDALLREALFIAANQARRIDPTLAAKYHRLMVENGKHHNSALCHIATTLLTRVVACWKNQTPYQLRDVDGRPVTRAEARAIIAQRYQIPDHIRRTRSTTKGTGRRSKESQRAPSTDPPKTNARPAGAA

SEQ ID NO: 231444 - protein, 426 aa, unidentified
MPEKPVAGIDVSKDFSDMCIITPDNKVFQTVHIFHDATSLRRSLAALEAAAREFREKPVIVMESTAHYHRVIAQFLQSAGYEVMVINPMQSGALKNINIRKVKSDKSDAHRLALLYRLKTLHTTNQPNELLSNIRDYCRQRADIMNSHTAYVNRLTSLLDQAFPGYARVFSRVACKSSLGILKTYPSPAAILAADPEQLAETISKYARRGVTTDYVIKKVAALRRAAENAEEINLKREAYSVLIVTVAELLEGLQRHIETLKKRIIELATEDPSVKFEVSLLQTIPGIGLYSAVLLRAEIGDFSLFQKPKQLVAFFGMDPSTRQSGKFVGTKTKISKRGSPYARAILDICAQSAVHPVKGKEPANPVLANYYAEKVKTKEPKVVKCIIMRKLVNIIFAVLRDKKPELRTPEEHIELLKHPNISRAA

SEQ ID NO: 231445 - protein, 410 aa, unidentified
MASKSAEHLYAGIDTHKDIHVVAVIDGLGRLIATAAFVTTLRGYDELYEWLAGKGQISVVGIEGTGSYGAGIAALLAERGVTVVEVNRPDRQLRRRHGKTDTVDAEAAARSALNGHASGLAKSHDGIVESIRLHRLTLTTLRKSRTALINTLRSVLITAPAAIRDELEPLTAAALFARCSRLRTESAPAADPGKAVKQTLRTLARHLLALDEELARLRAGLTVLAEAANPELMATRGVGVDSASALLVAVGDNPERMRSESAFASLCGASPIEASSGRTVRHRLNRGGDRQANSALWRIAMIRLNTDARTQDYARRRRTEGKTDREILRCLKRHIAREIYRLLTQPRPIIDVHDLRPTRLQLGLPMQAAADHLGVSLTTISRTERGIKPNHELAASYRAWLNSQPAVIAA

SEQ ID NO: 231446 - protein, 482 aa, unidentified
MKKRNIFQNQSQEIFAMFEAAGNRSKVMCVPIDYAKKNHLTMFCNGNGRIIRKPFTIENSLDGKNYLVDQVARSCRHHGIKLEHVFFGGEDCGSYADNFITTLRYENWIVAGVNAHDAKTYRENMQASTDRLDLLGISKMLLNCRGNCSPAQSGIYWNLRALVRQRRKLVNIKTGVKNRIHTIVDRIFPGFLDEKKSGILPFSKCSLLLMEDRFSIHQIQRRRRSTLIKFLSRQAVKHPDRCAEKLQNYAIQVLKPPDKHIGTLQLSLTQQVKLYCCLQDNITQLGEEIAAYLAQTQGAFLTSIRGIGITLAAGVCGEIGNPNMQNSINNLISYSGIIPKVKQTGGTEKKPQMKKVGKRCNRILKDYVVQSASHIGIHGPEDLMFDYKRRNAQGQHADFGMGRRFLRMAMGLMRTSQTYLPESLRGKKSSMKGRGRYYLMSWPKLREKWKNTNALEIAFAKDMPLGQWRNMIQELYGIELTL

SEQ ID NO: 231447 - protein, 408 aa, unidentified
MNTLYVGIDVSSKSNVVYLMLPNGDKHSNFSVANSHEGSTQLVKRILSVLTSHSLDTVLIGLEATSVYGDNLVYFLREDATLAPFNRKIHVLNPKQVKKFHDSYNDLPKNDYVDSFVIADCLRFGRINKEVYMEDYRYKALQNLTRARFFAVQNLVKEKQRFMNVLFKKYSTMTQEKVFSDTFSTTALAVYDEFESAEALANMDLHELTDFIIEKGKNRFPDPDAVAKAIQKAARSSYRLPKTVNDSVNQVLSISITSMKALEVQIKEFDKAIKAQMELLPNVLVSIPGIGPVYSAGIMAEIGDINRFDNQAALAKYAGLAWKQHQSGGFEAEVTKLIPSGNRFLKYYLCEAAFSLVRCDKEYSDFYRLKYKEVNRCQHKRALALTARKFVRLVFRLLKDNRLYCPAK

SEQ ID NO: 231448 - protein, 313 aa, unidentified
MAKRVSKITLGIDVAKDEGVVYNWSTAEILALPNRKKCIKEWLQSLHGDVQIAIEPTSHYHLAWVEEALALGYEVYLINPRQLAHYREAVNVRNKTDPQDAWLLARYLVHEGSQLRPYQPQCRQAQQLWALLKRRAVAVAARKQLQQSFSEISLSAQALFTQFQHLLARFDRRIRKLIQTLGWTNDYRCCLSIPGVGPLNAAALVAAYHRGAFANSDTFIAFIGMDVRLRESGRYKGKRKLTKRGEAEVRRLLYCAAQPARCYQPFEAFYQRQLDKGLPKIAAKVILARKLARIAFSLMNKQQLFIKQATPLA

SEQ ID NO: 231449 - protein, 312 aa, unidentified
MANLVYAGIDVGKDKLFVNIHLDSQVRDFPNTHSGLERLSRFLIKNAVNLVVMEASGGYERLPASDLRARGLSVAVVNPTYVRRFAQGMGTLAKTDTIDARLIAHFAFVKQPKPQQAKTVEEEELAALVERREQLVSLLSVEKNRLSKASDYSKASLQISIQFLTGQIASIETEIKALVAKSPERLARMRCMCSFIGVGDITAVTLLTEMPELGMESGKHIAALAGVAPINRESGKMKGKRRTYGGRARVRRTLYLAALSASRHNPIIRAFYERLLAAGKEKKVALVACMHKMLTILNAMLKKGELFNPEYS

SEQ ID NO: 231450 - protein, 350 aa, unidentified
METILAIDLGKHKSVFCKLDTSSLKPEYFSAKTNPQKFHDIFIELDVENSIVLFEVGSQAGWLSDMLHAIRIKFKVANVNHSAWKWTNNQNKSDKTDAHRLAMMYHHGFFPEVYIPEKAVRQKRSLIYYRQKIVNRMTQVKNGIRALMTTVAIDLPTGKNCWAKKYRKQLEQLALPFDGIEGHCDLWRGQLHMELQQLDALQACLDKTTAKLDELNKQKQSIKLLETIPGIGPRTAEAVVAVIDDPHRFKSCRQVSNYAGFTPRRYQSGQMERSGRISKRGNPLLRALLGQASWSALRFDWARHIYKRVCRGSAKRRKIAIIAVARHLLMRCWAMLRDDKPWYYKIEEAV

SEQ ID NO: 231451 - protein, 410 aa, unidentified
MEVLYERCCGLDVHKETVVACLRAMSGSEVVREVRTFETTTASLMALSGWLAENGCTHVAMEATGVYWKPVWHILDDGDFQLILANAAHVKNVPGRKTDVNDATWLADLLAHGLIRASFVPDTQTQELRTLLRTRKQLVREKSSHILRVQKMLEDANIKLDSVITDVMGMSGRAMIEALIAGESNPAKLARLANYRLRASQEKLREALRGRVTKHHRFLLRLHLNQIDALDASIVMIDEQVEAGIAPFRAAVGQVMTIPGIRDIGAQVIVSEIGTDMSRFPSEGHLISWAGLCPRNDESAGKRRSNRLRKGAPWLKTTLVQCAWAAVRKKGSYLQAQFLRLKARRGPKKAIMAVAASILTAIYHMLKDGTLYQDLGSNHFQNRSKGQQTKRLAKRLADLGYKVALTPLAG

SEQ ID NO: 231452 - protein, 331 aa, unidentified
MNQAGIDVSNETFDIERRCGKGLSQRKFANSNVGHRQAIAWMKGGAKGARICLEATGIYHLQLALALDRAPGIEVMVVNPRASRRFAEAQMVRAKTDKVDAAILRQYVERMPFTSWTAPSEQQLELQSLARRLAQIKKEQVRERSRLHAAQRAGAHTRLAQRDIREHLRYLKRHADRVQAAAIALMKQHDVLAEDLQLLDSVPGIAELSAMKLSAELGLLAEGLSPAQWVAQAGLDPRPQESGTSLRSPRRISKQGNAQLRAALFMPALTAIRKDPNVNAFYNALLARGKRKMQAITAVMRKLLHAIWGILHHRKEWDGAKFYRLQIEFTA

SEQ ID NO: 231453 - protein, 389 aa, unidentified
MVEVTRGAAARVGVDLSKRVFQVHAVDRLGHKVLARPMSPERFFAWCAELPSGCLVAMEACGGAHHVARRLRLLGLDARLIAGHFVTPYRMAGKSGKNDANDAAAICEAAGRPHMRFVPVKTAEQQGQLSVHRLREGYKAERTALINRIRGVLQEFGMSFPQSPEALRRVLADVIEDGGNELTGIARLVLQRAHLHWIDLDLQMKWCDERIEAHTRSDARGSKAAQLQGIGPIGASALVASVGDFKQFASAKQFGAWLGLVPSQNSTGGKASLGRITKRGDDYLPTHAADPGREVGGDDGAQTQRPHQPVAGATERAGGLAEGSGGAGQQERAHPVGGAHARRRVRSKPCSRGTGAALCTEPAPGALKSSIPTRRREAQIVITGQTGGR

SEQ ID NO: 231454 - protein, 387 aa, unidentified
MPQLNDLSRALTPFVQGNTLVAVIELSLTSWLVAGVVPGVERQPLKKLEPDQAGLLRLLHRWRDEAVRSGCTIERIVVAYEAGRDGFWLARWLRTHEIEAHVIHSSSVAVSREHRRAKTDRLDTAMLLRVFMGWLRGERGRCGMVAVPTIDEEDAKRPHRERESLVGERTRIINRMKAALVRLGIRGFKPELRRAPKKLDALRTPENLPIPPNTLEEIRRDLARLAMVREQIDMIEQARLAHIEQAPETGPNAMVRLLASIVGVGVETADMLVHEVLSRNLRDRRAVARYAGLTGSPDESGSKRREKGLAKSGNARVRRGLVQLAWRFRLFQKDSALSQWYRARTGVQGVRKTVLIVALARKLLIALWRIVTTGEIPHGVVLRSAIA

SEQ ID NO: 231455 - protein, 392 aa, unidentified
MYIVGIDIGKNHHEASIVSPEGKQIGRSLRFATTHKGADSLMSFIFKNIGNSPCVFGMEATGHYWYPIYSFLKAKGYTIYVINPIQSDSLRKMYIRQTKNDSIDSFLIAEVIRFGQFGTTSMADENILAMRQLCRYRDSVISSRTEIKLRIGTIMEQIFPEYEKQFSSLWLSTSMGILEKYLTPENIENAPIDELFEIIKDKSHNRLTRAKAISIKEAAADTFGIKIAQDAFSFQLKQLIDRMNFLDKQIEALDCQILEYYEKFDCYLHTIPGIGMIAAATILAEIGDINRFKSSSALVAFAGIDPTVRQSGEFSSTHNHMSKRGSPYLRHAIFLAATTCSFHNSPLNAYYKKKRDQGKHHLTATGAVARKLTTVIYAVLRDSKPYEPKKFC

SEQ ID NO: 231456 - protein, 348 aa, unidentified
MTVYIGVDFHARKQMLSYLTTEDGEIQQIELLHEEDDVRAFYAQLRSLGQVVVGFESSGYAAWFEEMLEELGCEIWVGHAAQIRKCAKRRQKNDRRDADLILELMLRGDFPRIHRYSRANREVLQQLRYRQRLVKMRTMTINSLRFMAASRGVTLRGKLQSQRGQGRVLALALPTPLDQQRHELCRLLMELQQKIETVEEVLTQTAESDGKVKRLRTHPGIGLLTGLGLVHTLASIERFANGRKVTAYAGFDPVEDSTGERRRMGSISKQGSRLLRSLMVEAGQVAARHDDELGQVYRRLLVRRGHATAKVAVARRLLVRAYIMLRDEIDYAEFQRRGVAARSSRRSA

SEQ ID NO: 231457 - protein, 342 aa, unidentified
MKIMTGIDLHSNNAVCGLMDQSGRRVLHKKLPCDLSTILRVLEPYKARIAQVAVESTYNWYWLVDGLEDHGYPVVLANPARMQQYDGLKHTDDVSDAYFLCDLMRLGILPTSHLYNRQSRPVRDLLRRRMLLVQLRTSLILSFKSLNERTLGERVPLARVKAMSIEQAQARFTAPADQLLSGEQVGLMGQLQESIAKIEKHILATAGEWKTFQRVQDVPGIGKILGLTIALETGEPQRFASAGNFASYCRCVKSLRQSNSKKKGENNRKCGNRYLAWAFVEAAHFACRHDERCRRFYERKKQQTNPVVATKALACKLAKASWHVMHGGVPYDPQRVFGGGTA

SEQ ID NO: 231458 - protein, 402 aa, unidentified
MNAVGIDVSKGKSMVAIMRSFGEIVSTPFEIKHTTSDIHSLVELINSVEGESRIVMEHTGRYYEILAHQLSEANLFVSTINPKLIKDFDNDSLRKVKSDKADAVKIARYALDKWQNLKQYSVMDELRNQLKTMNRQFGFYMKHKTAMKNNLISILDQTYPGVNTYFDSPVRSDGSQKWVDFASTYWHVDCVRKMSLNAFIDHYQNWCKRKKYNFSQSKAEEIYGKAKELVPVLPKDAITKLIIKQAVDQLNSASTTVESLRTLMNETASKLPEYPVVMAMKGVGTSLGPQLIAEIGDVSRFTHKSAITAFAGVDPGVNESGTYEQKSVPTSKRGSADLRKTLFQVMDVLIKTMPQDDPVYQFLDKKRAQGKPYYVYMTAGANKFLRIYYGRVKEYLASLPES

SEQ ID NO: 231459 - protein, 339 aa, unidentified
MKLYGGIDLHGNNSVIVLLGDDNRVIYEKRLPNEISLILNELYPHRDQIIGLAVESTYNWYWLVDGLMDAGYDMHLVNTSAVIQYSGLKYADDNHDARWLAKLLRLGILPEGYIYPKESRSLRDLLRKRGQLVRQRTMNLLSLQSILARSVGQNVSCSRIKKMTEEDLEELLPDTDTVRAASSNLRVYGCLASEVRSLEKEVLGRLRLTPEYTLLTTVNGIGNILALTIMLEVGDIGRFRKAGNFVSYCRCVRSERMSNGKRKGTGNRKNGNKYLAWAFVEAANCAIRYDDRIKSYYQRKKSKTKRVIALKAVAHKLARACYHILTDQVPFDVNRAFGH

SEQ ID NO: 231460 - protein, 344 aa, unidentified
MKDVQIIGVDLGKNGCSLVGLDHAGQVVLRRRVRRDGLTLAKLPSAVVAMEACCGAHHLGRLLVAQGREVRLMSPEYVRPYVKAQKNDDRDAEAIAEAATRPTMRFVALKSEAQLDVQVLHRVRDRLVGQRTSLMNQTRSILLERGLVVAQGRRALLDALQAVEEQGEASKLSGRVRLLLADLLDQWHALDSRIAALDEEFTEMARNDPAARRLATIPGVGVMNATALVAAVGDGRTFSRGRDLAAWLGLVPRQATTGGKPKLLGITKRGSKYLRKLIIQGARAALPPLARSPTPLGAWLRGLLARAHGNKVVVALAAKLIRVAWALLRHGTSWSWAPSQLATA

SEQ ID NO: 231461 - protein, 410 aa, unidentified
MDVLYPNCAGLDVHKDTVVACARRVTAGKVIREVRTFKTTTSDLLALSDWLASLDATHIVMEATGVYWKPVWNILSDGDFVLTLANAQHVKNVPGRKTDVNDATWLADLLAHGLIRASFVPDTQTQDQRGLLRTRKQLTRERTSHVQRLQKTLEEANIKLDSVISDIMGASGRAMIEALIAGESDQLRLAGLASSRIKASPALLSEALRGRVTRHHRFLLRLHLQQIASLDRAIAEIDKEVEANLAPFRALIPVLTSMPGIGELAARILLAEIGTDMSRFPTAGHLISWAGLCPKNDESAGKRRSTRMRKGAPWLKTTLIQCAWAAARKKGSYLEAQFHRLRARRGAKKAIGAVAASMLTAAYHMIATGTFYRDLGADHFDRRTKPGQINRLIAKLRNLGYEVEVKPAAA

SEQ ID NO: 231462 - protein, 367 aa, unidentified
MEKVTSTKFGCHYHDPGEERMNKPEYYVGIDVASVQFTAAAGCMDQKWKIVVPAVEFPNDYDSFGQFLHWMQAHKLHPDNAIVCMEATGVYNEVFAHFLVVNHYTVAIEPPLKVKRAFAPVGHKTDPVDSCQIAEYAYRYYDELSPWQPRNEVLEQIQTLLTTREQFSTQCAAHHNALKALKRKKVRTPPAEKAHQDAICELRQHIKTLEKEIEHLIDQDPDFRNMVKLLLSVPGVGLLLAAHMLVLMQSASQPPDPKQLAAFIGICPYEHKSGSSINSKPTSRHYGPPALRKLIFLAALSVRTHRQQFKLYFLRKIAEGKPKKLVINNIANKLLKIICAVVRSGTPFVPNYHSINPGLVKKALTVS

SEQ ID NO: 231463 - protein, 424 aa, unidentified
MKVTYQTCCGVDVHKSFLVATIVKTTGGIEPSYQKERFSTFNNSILEFKQWLLDNDCHDVCMESTGKYWVPVFNLLEDEINVVIANPKWVKAVKGNKDDTKDSKWIGDLFRLGLVKGSYIPCKIVRILREYTRYRYKLVSCRSSEKNRYQNALTVCNIALDSVVSDIFGKSSTSIIDYLLEQSGTSINHEEIASKILKRLKSKENAVIESVEGYQMTDSQKYRMRLVRAHMDYITAEINDVDKMIETLISSNIDFENAVQFLCTIPGVKRDSAITIISEIGTDMSQFSSSRRLCCWAGLTPGSNESAGKKKSVRITRAGVYLKPALVQCAHAAVKSDKSPYYKKKYESLVKRRGKKRAIIAIARMILTAIYQMLSTGEQWNPSDLYKIDIPAPLVEKQKAKAIKQAKNLLQREGILPPDEPLAS

SEQ ID NO: 231464 - protein, 345 aa, unidentified
MNQYKRIGIDTSKAVFTLHGIDQQDRPVLRINLRRAQLIPFFAKLPRTEIAMEACGGAHYWARELIALGHVVRLIPPQYVKPYVKRSKNDRNDAAAICEAAGRPGMHFVPAKSVTQQAQGMVLKVRESLVGQRTLLVNTLRGHAAEFGVIAGKGLAKIGPLLTAIEQETTIPCEAKEMAILLGQQIADLDARIKEIEVKLTAAHKANAVSQRLATIPGVGPVTALTLAIEIDPAAFESGRHLAAWAGLTPTEHSTGGKQRMGGISRAGNERVRVLLVTGATSVIKAAHKPGSRLMTEWLRALLLRKPRKVAAVALANKMARVAWALMTRGEVYRRPVTATGAAPA

SEQ ID NO: 231465 - protein, 346 aa, unidentified
MEHYAGIDVSLELSSVCVVDAQGKIVKEAKVASDPEALVAFFEALGFAVRLIGLEAGPLSQWLHAGLKQAGFETVLLETRHVKAALSAMTVKTDRKDARGLAQLIRMGWFRPVHAKSMASQEVRALLVARKQLLGRLIDVELSIRGILRGFGLKVGPVTRQGFEARIRELVTGQATLECIAGAMLSARAALKAEYEKLHKAILAIVREDAVCWRLMTVPSVGPLVAITYKSAMDDPHRIAKSKAAGALFGLTPKKYQSGEKDITGGITRTGDEMVRTALYEAANVLLSRITRFSKLKRWGMDVAKRRGMKRAKVALARKIAVILHCMWVDGTTYRWAAAEPIAAQA

SEQ ID NO: 231466 - protein, 349 aa, unidentified
MSMVCGLDLHRGQITFDALDVTSGEVWRGRIWQPDRQRVRRWLREELAPRAHGEAVAVAVEGCTGWRYVVEEISSAGFEAHLAEPAETQAARGRKKRAKTDRSDARLQRELLANGELPESWIPPTPVLEWRERVRLYKTLLDQRRMWVQRVHAELFRHGVGLPEAAITSPQTRDWLAGDGVGLSPAGTQRVAVGYQMIDATQAAMVPLRADIGRFGRRQPACKVLVATHYGVGPLTAVVVWAELGDCRRFSNSDDVVRHTGLDVTVDQSDAHRGRGHLSRQGPGTLRWALFEAGMSASRATSPDRAYYQKVKAAHDGKLAAISMARKIARRCYHTLRQLEPDVVYAMPA

SEQ ID NO: 231467 - protein, 423 aa, unidentified
MDILYERVAGLDVHKDTVVACVRIVAEGKTARECRTFSSTTEQLIELRAWLEECRCTHVAMEATGVYWMPVFKILGEGPFELIVANAAHIKNVPGRKTDVNDATWIADLLACGLIKASFVPGEDIQELRSLTRTRKQLVREQTRHVQRIEKTLAEANIKLNSVISDIMGASGRRIIEAMIKGVRQPRQLAELAGKQIKATPKELYDALHGRLTDHHRFLLDLHLKQWDGLDETIRKIDREIDQRIGRLHTKGGSGEVSFRTMIELLSTVPGISTLSASAIVSEIGGDMNRFPTAGHLVSWSGLCPGKNESAGKRKPSRLRKGAPWLKTMLVQCAWAAKRKKDSYYRAQFFRLQSKRGPQKAICAVAASILTAVYHILKNGTEHHDLGASYFDRRPLELKAGRLVARLKKLGFNVQLQPVAEAA

SEQ ID NO: 231468 - protein, 341 aa, unidentified
MKKLFIGIDFSKEKIDVAIIFAEGLTETSMRLFNEFKNSVSGYKQLVKWVEESSNETEPSLWLFCGENTGDYSKPLCNFLYGRGFDMWLENAKSIKDASGIRRLKSDRTDANMIAEYAMRNNDKAIVYEPLSESLSQLRELFLYRQMVVRHRCSFQVRRGEKRLNMEKSPVKTMISQSGRHIVTELNKEIEKIDKRIAELIDSDEELAQVFTIVTSIPGIGTQNAVCLMVYTDNFRRFNFDSRKIACYYGIAPFGRDSGTSVHTDPHVHYMANRQIKAMLSQAALSAAKFNPVIASYYSRLIERGKKRQIALNNVKNKLVHIVTAMVRNKQLFDKDYKISA

SEQ ID NO: 231469 - protein, 340 aa, unidentified
MQITTLGVDLAKSVFQVHGVDAAGAIVLQKKLRRRAVLDFFRKLEPCLIGMEACATSHHWAREIAALGHDVRLIPPAYVKPYVKRQKSDAADAEAICEAVTRPNMRFVPVKTEEQQSVLVLHRSRDLLIRQRTMILNAIRAHFAEFGIISAQGPRKVADLVGRLSDPDDLGLPTLARSALLALGAQLDSLAEEVRNIERQLMVWHRQNAASQRLETIPGVGIITATALAASVSDPTVFKSGRQFAAYLGLVPRQNSSGGKDRLGHISKMGNGYLRRLLVVGATSVTRRAPNTDTRTGVWVRSLLERKPTRLVTVAIANKTARTAWALLAKGESYRIAPAI

SEQ ID NO: 231470 - protein, 414 aa, unidentified
MRVGIDAHKKSCTTCVFADGDVLASSPSETFVFKTTMHGVAEFMEKVPEGSTVVIESSTTGKAISRLLSGRYEVHMISPPERKPAIKTDKRDAERIVKEDMLGYVRRSYIPSQRVEELRLVVSKQMEIGGKISAVKNQIHALLERNLLQSEFEDLSDIFGVEGLERLSSVELPNHEKLPLAMYLEELRLHTSQHRQIETEIAKTAEADADCRNLMSHPGIASFVAVAIKARAGDASRFPTKKHFCSYAGVVPKADNSAGHVSQHSRVKHGDDVLKYALTCGVNSAARARTDSAVKRFYLKQIAKGKSPQDAQVAAARKLACIVWKILTPKQRYVEEDRYLTARKMSRLSQIAGRSLEHTTRPEDVPRLIDDLKSETDVLEKCPKEMHRVGHRGRRGRSKSSIERASEAGGVVAK

SEQ ID NO: 231471 - protein, 339 aa, unidentified
MDITLLAIDIAKNVFHCHGVNGKGKQLLRKKLTRKQLLPYMANFPSCTIVMEACGGANYWYREFIKLGHEVKLINASYVKPYVKTNKNDYNDAEAIAEAASRENMRFVSPKTIEQQDIQSIHRIRKNLVENRTGLSNQIRGLLAEYGVIFPQGIRYIRNQISGVLEDAENDLTMLTRELISDLYGQLCILDEKIKEYDQRVKLIFKQNEACQRISCIEGVGVLTATALIAAVGDPNVFKNGRHFAAWLGLVPKQKSTGGKQVLLGISKRGDSYLRSLLISGARAAMKFLDRKTESKYDWLKAVVGRAGRYKAAVALANKNARVIWALLAFLDVFCSSCE

SEQ ID NO: 231472 - protein, 337 aa, unidentified
MEYFAGLDVSMAETHVCVVTRNGAVVHQAKVPSTPADIAAELAQVPTCRRVLFETGRMAPMLYHGLSQLGLPVVCVESRQAYQALKSLGTHKTDRNDARGLAHLARTGFFKPVHVKSLAAHAVRSLIIARKKLVGQRVTLENQIRGLAVVFGVRLPRALSSTFIRQALQASEGIPGLSAAMQGLVAARTAVLAAIVAIDGDIRRMVRASDACRRLMSIPGVGQLTALAFTAAVDDPGRFRRSRDIGAYLGLVPRRHQSGEIDYSGSISKCGDRRVRTLLYEAANVMLTRYKAPLKLKDWAFAIARRSTMRKARIALARRLAIIMHAMLRHGTEFKPV

SEQ ID NO: 231473 - protein, 387 aa, unidentified
MSEAFDPRKSTTAFDQASTLVVVVELSGKSWRVGANAPGVSRRPLRTVAARDIGAVLEAIERWKGEANKLGCEVGRVVVGYEAGLDGFWIARALTAHGVEVYVMHPASISVERRGRRAKTDRIDVDILLRTLLGWLRGEPRHCTMAPIPSEAEEDMREPGRQREALTAARLKVENQMRSLLARFGIADFRPRLKKAAELLTRLRTFDGRPLPPNTMASLERLLAQHQLLSKQLKEIETAREQVVAVADPDRLQRMIQMLAGLVGVGVETATTLVHEVFSRRFRDRRALAAFVGMTGTPYDSGGSTREQGLSKNGNPRVRRMLTQLMWRWTIFQPQSLLTRWFVARTGGAKGRMKKIMAVALARKLLVALWRYVETGVVPEGARLAAA

SEQ ID NO: 231474 - protein, 438 aa, unidentified
MRKKKNKAIKKVQFESLPLIHPNAAGIDVGSKEHLVAVPPERDPQPVRTFQAFTPDLHELAAWLKRCGIETVALESTGIYWISLYEVLEQYGFEIRVVNARHVKNVPGRSKSDVLDCQWIRKLHSFGLLNGSFRPEAQVRKLRTYMRLKDNLVVEGTQAIHHMQKALFEMNVQLSNVISDITGESGLRIIEAILAGERDPGQLAALCSTRIKASRQTVAKSLHGNWDEALLFCLRTALDTYRFSQKKIQDCDQCIERQLATFEIKTPLPDLKQTLQTQLHQVCGVDLTKIPGIKEQTAQIIISEVGLDMSPWNTEKQFSSFLGLCPNNLITGGKIRRRSTRKVYNRAADALRLCAQSLTHSKSALGAKYRRLRARLGAPKAIVAMAHHLARLVYRMLRYGQNYVEKGIHQYELKFRLQRIKWLKKEARSLNMQLVTAQ

SEQ ID NO: 231475 - protein, 435 aa, unidentified
MAERDDTRKTVKHQTIDDRTVVIGVTLGREFFALCLMNKEGEIPGSCRKLSFTRKGFDAFHTLVEETKQTYGFTHVVIGMESTGHAVRKLAAFAQENGYDVRFIRTAAVRRDASASPDARTIALLVKEGHVLDTRMEEGVYRQLRSVAHTRESVLRHQTASQRALRANLDDGFPELRGIFPSLKSRGLRALLAACPFPDDVLKAGCPGVTELLRKSAGKKAPERAQKILAAAQESVGVTAGKADRMRLAISLDDYTRSEAQLKELHAEIRDLLAGIPFSASVLSLPGVGPVTCGVFFGELGNPACFTHPKKITRYAGYDPREQNLRGTRAVSKQGRPLLRKYLYLMSLGVVKRSSFFKEYYERKQGKQRAKKEALCAVAIKLIRVIFALIRDRRSLTETRVEGGPEAPHRQNGLDEGVVTFHHPLRGSTQEGPLC

SEQ ID NO: 231476 - protein, 346 aa, unidentified
MEHYAGIDVSLELSSVCVVDGQGKIVKEAKVASEPEGVVAFFEALGFAVKRIGLEAGPLSQWLHAGLKEAGFETVLLETRHVKAALSAMTVKTDRKDARGLAQLLRMGWFQQVHAKSMASREVRALLVGRKQLLGRLIDVELSIRGILRGFGLKVGAVTRKGFEARIRELVTGQATLERIAEAMLSARAALKAEYEKLHQAVLAIVREDAVCRRLMTVPSVGPLVAITYKSALDDPSRIAKSKAAGALFGLTPKKYQSGEKDVTGGITRTGDEMVRTALYEAANVLLSRITRFSKLKRWGMDVAKRRGSKRAKVALARKIAVILHRMWIDGTTYRWADAKPIAAQA

SEQ ID NO: 231477 - protein, 344 aa, unidentified
MSSVPSETVFVGLDYHMESVQVCVLAKNGKMLINRSCRNDWRAVVTVVRDRLGSQVGVQAAIESCCGAADLADELIAKADWSVDLAHPGYVARIKQSPDKTDFSDARLLADLERVGYLPRVWLAPEEVRELRRLVRYRQWLTKERRTLKLQIGATLREARQKPPTELNAWTKAWLAWLTNTAVLSPNARLITNCRLSRLAALAQEIRAVERLLADQTAQDPLVQKLMTLKGVGLVTAVTIRAEIGRFDRFRSGKQLTRFCGVTPRNASSGARQADAGLIRAGNPELRAVLVEAAHRLMRYDEKWTRFAARLSLRGKPVSLICAAVANRWMRWLFHQMQPEQLAA

SEQ ID NO: 231478 - protein, 482 aa, unidentified
MKPKSPLGTNKTNDHAMQGRWQEMNRRQRRETMRKIQSEDLSLEVIHRNAAGIDIGNESHYVAVPPSRDSQPVRCYGCTTGELKAMADWLKQRGIQTVAMQSTGVYWVAVYDILEQVGLEVYLVNARDTKNLPGRKSDVQESQWLMKLHTYGLLRNSFRPVQEIRTMRTYWRQRNDLVQSAGRHIQRIQKTLTQMNIQLANVLSDVSGVTGQAIIKAILEGERDPHKLAAFRDSRVKASEGQIARSLEGNWQPDLLFVLKQEQDGYEFCQKQMAECDQQLKQYLQNREDRSQGAALPEEQRKARRQKKKGNKPQFDLRAELFRLTGTDLTRIDSIDVMTATTIISEAGYDMSKWGTENHFVSWLRLCPDNRISGGKIIGKGRLPTNNRATVALRMAASTLRLSDTYLGAQFRRLRTKLGTPCAIKAMAAKLARLVYRMLRYGMKYLDRGAVFYDAEHRRLQIKHLKWKAANLGLQIVEAPAT

SEQ ID NO: 231479 - protein, 366 aa, unidentified
MKKNSTVQVFESEIFKEQKLTIGLDLGDRWSFYCVLDEAGQVILEQKLPTTPEAMKQTFGKIPRSLIALETGTHSPWVSRLLTELGHEVIVAHAQKVQLITKSNRKDDRHDARTLARLARIDPALLGPVRHRSVQAQLHLTVIRARAELVSARTALVNAARGLVKSYGQRLPKCGTYQVSEKLADGLNAELREVLVPLLKEIESLSERVKEYDERMEKIAKDAYPEVSLLKQVKGVGTQIALTYVLTIEDPYRFAKSREVGCFLGLRPGRRNSGESEPQKGISKEGDRYLRTMMVQGAHYILGPFGADSDLRRWGLKLAERGGKNAKKRAVVAVARKLAVLLHRLWVSGEVYEPLRNSQKAMREVA

SEQ ID NO: 231480 - protein, 418 aa, unidentified
MNDSNSFTVRVGIDWADTKHDFCLQVTGSTQREFGTFSHNAEHIDEWVRNLHCRYGGKIAIGLELTKGPLVYALQKYDFLVLFPIDPATLAKYRQAFKPSRAKDDPTDAELALDLLIRHPERFKPIEPQSPTMRALLTFVERRRELVGDKTRFTNRLTNTLKQYYPQVLDWFDHHDTILFCDFITRWPTLEKAQRAHSATLEKFFKKHNARRASLIDARMMAIRAAKPLTLDVAIITPHLLETMVLIEQIKVALKAIERFDDVIARLAPTLPDFELFNALPGAGPTLAPRLLVAFGEQRERFSSANEMQQYVGVAPVTERSGKKSWVHWRWQCPTFVRQTFVEWAGQTINKSAWAGAYYRQQRAKGSSYQAAVRALAFKWLRIIFRCWQTRGAYDEARYIARLKNKGSALASATELVA

SEQ ID NO: 231481 - protein, 356 aa, unidentified
MNEGSWVGLDVHARSVVAGVIDQGSGEVRSLRVPPGPAETVAWLKTLPTPVRVVYEAGPTGYGLARACAGAGISCVVAAPSRIRPAADRVKTDRRDAERLARLLRLGEITPVRVPDPEEEAARDLVRAREDARGDLMRARHRLSKLLLRHGAVYDATAWTRAHDVWLRRQRFQSGPLAIVFDECYGRMLDAKTSRDALDKAITGLAGAPPYADVVERLVCLRGVSTLTAFALTVELGDWNRFRPTSLGPFLGLTPSENSSGERRRQGAITKAGNSHARRLLIEAAWHQRRPPRMSVTLERRREGKPLAVRAKADRSARRLHGRWHALEGRGKPRTIVVVAVARELAGHCWALATMD

SEQ ID NO: 231482 - protein, 350 aa, unidentified
MLIIGCDYHPGFQQIAFVDTETGELQERRLQHREEAEKFYRDLAAQGMKVRVGMEASGHARWFERLLAELNIELWMGDAAEIHRKRERKQKTDRQDAQHILRLLLKDDFPQIWVPSWENRDLRQLLWHRHRMVQARTRMMNQLQAVALNEGLRYKKRLWRDAGRKQLEAFRLAPWASRRRHDLLELLDRLNPTIAELTQAIEREVEKCPEARRLQTHPGVGPLTALAFVLIIERADRFQCGKQIASYLGLVPLEDSSGNRRRLGHITKQGNSLLRFLLVEAAQVTARSLPEWRSKYVHLTMRRGRKIAKVAMARKLAVRLYWMMRKEWDYEQVKKFGSHAGQPGNRYGVK

SEQ ID NO: 231483 - protein, 386 aa, unidentified
MTQPNDLSQSRIPFCQESTLIVVVDMSQSSWLVAGIVPGIERHPLKKLDPDEEALLQLIQRWRDEGVKVGRPITRIALAFEAGRDGFWLARWLRMRGIESYVIHSTSVAVPREHRRAKTDRLDSELLKRVFIGWLRGEPDHCRMVAIPTLEEEDAKRPNRERENLIGERTRIVNRMKGCLARLGIRNFKSTLRKASELLATLSTPEGRPVPPNTLAELRRDMARLRFIMDQIQEIERTRLQGLKQSPEKGPNAMVRLLARVIGVGIETADMLVHEVLSRNLRDRRAVARYAGLTGSPDESGRKRREKGLAKAGNSRVRRGMIQLAWRFLMFQKDSSLARWYRARTEGAPSTRKTMIVALARKLLIALWRLVTTGELPVGVTLRPVA

SEQ ID NO: 231484 - protein, 349 aa, unidentified
MQFLKFNHQYYMGVDLHSRSAYLCIMDWKGKVLLHRPVPCDDPGPFLNAVKPYQHDMVVGVETTFNWYFLSDLCREHNIPFALGHALYMKSIHGGKKKNDRIDSRTIAELLRSGMFPPAYNYPENMRTTRDLLRRRHKFVHHRAALYRHIGLCFYQQGKKPPALANIKKKTQREEIVQSLRGEDLRLSVSSDFEIISSLGRVIVGLEKRIFKRAKHHNRKDLHLMMSIPGCGEISAFNMLYEAHDIERFAKAQNFSSYCRTVKGKHVSAGKTYRSPNQKIGNPYLKWTMSEIAVHAGQYSEKIKKYHEGLLKRFPRGKSWAVLSHKLTIAIYYMLKNGEVFDETRFVGG

SEQ ID NO: 231485 - protein, 434 aa, unidentified
MNSVGIDVSKEKSIVCILKPYGEVIMSPTEVIHTQESISNLIKVINKLDGETRIVMEATGIYHLPLLTELKKAGLFVYVINPLAMKKYASSSIRRGKTDKMDSVRIANYGIDHWFKLSDYNAPEDVYYQLQILGRQYSHSHYIKMKIAGKLALTNILDRTMPGIKKILRGNNSETPTKDKLCDFVEKYWHFDNITKKSEKQFINSYCNWAKKKGYQAKESKAQAIYSLARNSIPTLPSNAASTKMLTLEAVRVLKEINKTLELIITQMQEIARDLPEYETVRAMNGVGDILAPRLIAEIGDIRRFHSGKALIAYAGLDSPPFQSGNFTGDHRKISKRGSSLLRKTGYEVMKCLKTVKPTEDNAVYLYMIKKEEEGKAKKVAKIAALNKFLRIYYARVKSVYNNSIFLDFEPDANTVTAKGGLPFTGDKKAVKSS

SEQ ID NO: 231486 - protein, 309 aa, unidentified
MLTAEADKRKTKAVVNTAAGVQALLAWCPKHGAQPAQLHAILEPTGLYHEQAATALPQVRVSLVNPAQARDFAKALALRSKNDALDSYVLARYGQTLSPALWHPAPLHARQLRALLTRREALSKDLLRELNRKEKSQFSPSAPLVDGSIDKAIAFLREQIKQIERAIDQHIDNHPDLKQDCELLNSIPAIGPQAGNAILAVMHNRHIDSAQSLAAYLGVVPVQRQSGSSLNSCARLSKAGPSQVRATLYMAALVGTRHNPHIRALYQRLLKAGKSKKAALGAAMRKLVHLCFGVLKNRIPYQPNYAMNG

SEQ ID NO: 231487 - protein, 386 aa, unidentified
MLAVTSPSESPAAIRVDLGAIFVSMELSRSKWLITSLSPGGGEKMSKHTVAGGDLAGLFACFARLQEKALARTGRSYRIIVIQEAGLDGFWIHRALEKEGIESHVVDPASIAVSRRARRAKTDKIDGEALVRTLLAYKRGEPRVCSMARAPSPQEEDRRRLLRERKALTTERVRHVNRIKGLLFAQGVSDYEPMRRDRRARLETLRTGDGRELPGRLKTQLLRELDRLELLVDQIKTLETERDDLLARDEAAAPAAMLMQLKGVGPEFGAILWSECLFRSFDNRRQVAAYAGLAPTPWQSGKVNHEQGVSKAGNPRLRATLIQLSWLWVRHQRQSALTLWFEERVRRNGGKHRKTTIVALARKLLVALWKYVAAGVAIEGAVFSAA

SEQ ID NO: 231488 - protein, 339 aa, unidentified
MKVYAGIDLHSSNNYVGIINDQDQRVYQKRLPNQVEHILEALEPFKESMEGVVVESTYNWYWLVDGLQAHGYKLHLANPSAIKQYEGLKHTDDKWDSFWLAHMLRLNILPEGYIYPKEERPVRDLLRRRLLFVKHRTAHILSLQSMISRNRGTGMSVRAIKRLDEGDAEILFDQPHLVLAAKSNIAVIHFLKEKIKTIEKAVKTHIKLRDEFKYLLTISGIGDILALTIMLEVGDINRFPKVGDYSSYCRCVKSERLSNGKKKDENNRKNGNRYLSWAYVEAANFAIRFCPYSQAFYQRKMAKTKRIVTIKALSNKLARASYYIIRDQVPYDPEKLFSQ

SEQ ID NO: 231489 - protein, 412 aa, unidentified
MLKIVYPICCGIDVHKTFLVACIATTNDKGVTTYMSHRFSTFTNDLRKLSQWLSSNSCTHVCMESTGKYWIPVYNILEATCKITLAHPKYVKAIRGKKTDKKDARWIADLFKHDLVAGSFMPPLPIRQLRDLMRYRFKLTNFKSSEKNRIQNCLTVSNIQLSNVVSDTFGKSSMRIIDYLLENPDDKDFDFVPLLHPSMLDKVDKIRLALDGMITPEQQQKMNIILQHFDGLEKCKSDLESVILSLSEPYTKELALVSTVPGFKNPFSAIAVISEIGVDMSVFPTSKHACSWAGVTPQNNESAGKKHSVRISRAGVYIKPLLVQCANAVVKSDKHPEIKNRYLSIKKRRGHKRAIIAVARMLLTAIYHVLKKGEPYNPELYKKAETMPQIRNITVEQAILIAQRHGYSVIKV

SEQ ID NO: 231490 - protein, 418 aa, unidentified
MGKINEFCAGIDVGKRFLLCCALTGAAQDEPRSQTRRFDATVQDLVHLRDWLSSKSITHVVMESTGSYWVPIFNILEGHFIIVLANPEEVKNRKGHKTDRKDAEHLADLLRHDHIRASYIPTKPIRDLRDLTRRRLQLTQDASRERNRIEKLLEHVNVKIGNVLSDVFGVSGKSMLLALLDGSMSAERIAQLALGQAKQKIAQLTEALEGHCMRDHERFLIRSSLRHLACLQEETEEMDAEILRRMQTPPFREAFLLLQTIPGIGQLAAASILAETGTDLSTFPTAEKMASWAGLCPGNRESAGTRKGSQTTKGNPYLRSTLVQSAWSAARKRGSIFQLRFRELAPRRGQKRAIVAIAHQMLTVLYFMLRSNTPFRGADTMPQKHRRLRRAHHHLRCLRRLGLTVEVFGSLEDAPSTG

SEQ ID NO: 231491 - protein, 310 aa, unidentified
MFVGIDVSKDRLDVHVNPGGVAWSVANDDDGHRGLASRLAELKPTLVVMEATGGYQSQVAAELAAHELPVAVVNPRQVRDFAKAIGRLVKTDAIDACVLALFAEAVKPEARPPQDEATQELQAMVLRRRQLVDMRAAEKNRLGSCRVARVRKDIEKTIAWLTRRIKDVEDDIDKQIRKTPVWREREELLTSAGGVGATTARTLLTALPELGTLDRRSIAALVGLAPFNNDSGKMRGKRSIRGGRAEVRTVLYMATVAATRHNPTIAAMYTRLVAAGKVKKVALIACARKLLTVLNAMARNNTPWKAELAR

SEQ ID NO: 231492 - protein, 313 aa, unidentified
MPEVFVGIDVSKARLDVHVRPSGEAISFANNDDGIRQLIGALKQHRPTLVLLEATGRLEALVTAALGAQRLPVVVINPRQLRDFAKATGELAKTDQVDASMLSLFAERLRPEVRPLPDEASRELDAVLTRRRQIVDMLVAEKQRLSGARTGVARQIRAHIKYLERLLGDIEADLDHRIAASPAWRARDDLLRSAKGVGPGLSRTLIGELPELGQLNRKQIAKLVGVAPLARDSGQVRGQRAIWGGRRQVRAVLYMATLSAIRSNPTIRNYYRHLLAEGKPKKVAVVACMRKLLVTLNAMVRTGTPWAPAQQQA

SEQ ID NO: 231493 - protein, 426 aa, unidentified
MQSNTARKLAQIPGRPLVVGTDPHKRTLGNVMINWQAKVCARLKIGNTRREFEHLVRRAEAERVKAGADSIIFAIEAGSHFWRNLAYYLHEQKIAFRLISPYTLKRQREAEDLTKCKNDYRDAMMAAELLLTGKFTETKLLQGDYADLRARNQCYRRLRTAHSRLRNQMKALLDGVFPEFCTEFKNPCGEAAAAVIATCPIPSVIASQSLTEFITAVRQGYVGRRLAIKKLAALHELAASSVGIGADAKAVAGELGLLVEQERVVASQLERVERELREMLHRFDESRYLMSIAGLSELTVAAIMAEIGPFSSYSDARDLVKLAGVNPMQSESAGKSQSHTPMSKKGRSGLRECLWQGAVSMLRSNPEYREWADKMQNRSAAQHPLHRREVLGAAMNKLLRLCFALVTKKQMYRGLETEMTPVAVAA

SEQ ID NO: 231494 - protein, 407 aa, unidentified
MEIVHAKCAGLDVHQKTVVACARIAAKGRVTHEVRTFGTTTRDLLALAEWLTAHGCTHVAMESTGIYWTPVWHVLEASCTLVLANPRHIRNVPGRKTDVNDATWIADLLAHGLIRGSFVPPEPIQDLRDLTRTRKQLMREIARHSLRIQKTLDRANVKLNTVLTDILGASGRAILHALIAGERDPERLAALASGRLKASRVDLVTALHGRVTPHHCFMLQLHLTQIEALEAAVRDLEARLGDALAPFRAAVDRLITIHGIAQTAARVLIAEIGADMSRFPSSAHLLSWAGLCPRLHESAGKRLSTRTLPGNPWLKTTLVQAAWAAVHKKDTYLHAQFLRLKSRRGPKKAIVAVAASILTAAYHILKHGVDYHDLGGDFFDRRDKAKLAKRLIARLHDLGLTVEVRAA

SEQ ID NO: 231495 - protein, 455 aa, unidentified
MPKQKRTRNARTLPVARVLEPNAAGIDIAATEVYVAVPTGRDPQPVRRFSTFTDDLHRLADWLQACRVQSVAMESTGVFWIPLFQILEDHGFRVCLVNARHVKNVPGRKTDVSDCQWLQYLHSVGLLRASHRPTQTICAVRSIWRHRESLVQMAAVHIQHMQKALDQMNLQLHHVISDITGTTGLAIISAVLDGERNPENLATLRDPRIVASRETIARALVGDYRVEHLFTLRQSLQAYRQYQQWIAACDSEIERQLQVLPGNLPDDPKALSKPRDHHKPRRNEPRFDLRSQLYRVFGVDLTAVPGVSSLTAHTLLTEVGPDLRRFPNAAAFASWLGLCPDNRISGGRVLSVVTRKVKNRLTIALRMAAQSLHRSQSYLGQYFRRMRIRLGTPPAITAAAHKLARVLYHLITTRQPYEESTFAAMEERARQRQLLRLTKQAARFGFQLVPGRSVP

SEQ ID NO: 231496 - protein, 467 aa, unidentified
MQLSLGIDIACRAAHQASLADARGNFIWTGRRFRTSANDLERLWALLPEADEPEDITVVMEPTRNAWVPLAAWFRRRGARVVLVPPERSADLRAYYSKHTKTDRLDSRLLARLPLLHPEGLHAEQGLGPGDPLRRATRLHQTLTRRRSQSLARLDALLEILGPAWLEVFGADLSNKTPLRFLAAGYACPDTVKRLGKARLARFFYRHSRGRWGEEQAEALLVAAAETRELWGEDLDFGELADDIAIEARLALHLGEELKDLDERIGIFFAEADSKGILTSVPGVGPILGAQILGRLGDPNRFRSLAGVRSFSGLVPSLDSSGTTGRHGGPTKRGDACLREALFIAADQARRTDPSLAARYHRLMVQAGKHHNSALCHIATTLLSRIVACWRAGEPYVIRDTDGTAVSVAEGRRIIAERYTVPAELRAQRRTVGRGPRNKGTDRRSKESLRAPSTGPSLDHATAAGAA

SEQ ID NO: 231497 - protein, 332 aa, unidentified
MSVYVGIDVHRKRSQVAVINEGGEVLANRNVPNGAKPILSVIGGLPAGTPAAYEAAFGWGWLLELLEGHGFEPHMVHPLQCKAIASARLKNDKVDAATLAQLLRADLLPEAWIAPPAVRQLRAMLRHRAQLVRLRTLLRNRVHAVLADHGHGRPAGCWSGPGRAWLASLELPAVSREVIDDALALMDALQQPIDRLDQEVRQRAKADPRVKVLTQLPGVGPFTALVLLAEIGDITRFGSARKLASWAGLTPTVRGSDRTVHHGHISKQGPAWARWVLCEAAQTAKRHPDFAPGYEALARRRGRKIATTAVARKLITRAYHLLTDASAAGEPG

SEQ ID NO: 231498 - protein, 408 aa, unidentified
MLKIVHPVCCGIDVHNKFVVACIASTDERGITTYKVSRFSTFTSGLVKLSEWLLSNCCRNVCMESTGKYWIPVYNILEDVCRVTLAHPKYLKAIRGKKTDKKDARWIADLFKHDLVAASFMPPADIRQLRDLARYRAKLTAFAASEKNRLQNCLTVSNIQIANVVSDTFGVSSMRIIQNLLDSSGNADIEGLIHGSMVKKADDLRLAVSGIVTDEQKSKMNVILGHYSAVKECKASLESVILTLCKPYERELELVLTVPGISNPFSAIAILSEIGADMSVFATAKHLCSWAGLVPQNDESAGKKHSVRISRAGIYIKPLLVQCANAVVRSDKHPEIKGRYLSIKKRRGHKRAIIAIARMLLTAVYHILLKDEPYNPELYIKADTLPRTRNITVDQAISFVRRFGYSVN

SEQ ID NO: 231499 - protein, 328 aa, unidentified
MSKSVMYFGIDVGASELWISASSKRPLIFAHTKAGIKALHDWSIKQSKGEVVHLCMEATGIYSRHVAIELYNLSDVVISIVNPARIKAFANAQMRRCKTDAVDCDVIRCFAESQRPVVWAPEPVVMQQLRQLVTQADALKATLMQWRNRRHAHRFTNNLSPAVIKSQRAMERSIKRQLQNIEDAIDQLCCENAEMAEQINLLETIPGIARNAASRLLAYGGDWLTKRSPKELVAHAGLAPHHHQSGTSVRGKSRIDKRGNRRLRKTLFMPTLTGIVWNPSLKRFYQNLLKKGKPKMVAITACMKKLLLIIRAMMINNTQYKSNYALDI

SEQ ID NO: 231500 - protein, 361 aa, unidentified
MQAQSNTLNCKEQNIYAGIDVHKKSWTVCIYSQIMEKEHRIFSQPPSAEALRAHLHRHYPGATYYSVYEAGFCGFHVHEELTAAGINNRVVNPADVPTTHKEKANKNDKRDSRKLGRSLRSHELEAIHIPARKTQEDRSLVRMRCTIRKDLSRIKSRIKMLLNFYGIDHPDNFSSPSTHWSRRYIEWLKTIPMTQESGRAALQALISEAVGMRKVLLTVTRKIRVLSQTEAYAKDYELVLSIKGVGLIAGMSLLTEIEDISRFPSTDRIASYVGLTPSCHDTGNKKNHGGITSRKHEILCEMLIESAWKASRDDPALRLAFRELTKRMKPNKAIIRIARKLLNRIYYVLKNKQKYECEVVK

SEQ ID NO: 231501 - protein, 433 aa, unidentified
MQDVEDEPLFCERVAGLDIAKAMVEVTIRVPSDTTAGRRQQETRTFGTTRAELESLGDWLACWGVTRAGMEATGDYWKPVFFVLESRGFDCQLYNAAQVKALPGRPKTDRADSAWLARITERGSVCSSFVPPEPIRRLRTHTRYRRHLTQARTAEKQRVEKLLEDGHLKLSSVISDVHGVSGRDMLDALVAGQRDPKALAQLARGTMRGKIRRLEQALDCSFFTGEHAAVLAMMLATIDHYTTQIQALTARIEALIEPYLNQVEQLDAVDGIGTVCAQDIIAEIGTDMTVFPTAPHLVSWAKWSPQVKQSAGKRKGCNATGRGNPYLSAALGEAAIGASRTHSFLGARYRRMARRMPKKKALVATGNSVLTIIHALLSDPAARYQDLGADYYEQRMHVRRQARNHVRGLERLGYKVTTQAINPETGELLAAAD

SEQ ID NO: 231502 - protein, 384 aa, unidentified
MNKHSMIFIGLDTHKEFHEVAYCEEQRGASPVHYGRISSSKVSVKKLLRQFESKYPGSTLHVVYEAGPCGYWIYRLITSLGHCCYVVAPSLIPKKPGERIKTDRRDALKLVRSLKSEDLTPIYVPEPEDEAVRDLSRAREAAMKDLKEAKYQLKALLLRNNIRYEGTANWSKKHLRWLTELILPHPAQQIVLQEQLQTIEERIRRLERLDNELTHHVHQWRYYPVVKAIQAMRGVRLLVAVGVVAELGDLHRFDHPRKLMAYLGLVPSEQSSGGKRHLGAITKAGNGRARRLLIEGAHSYRYPANVSTELQLRQEGLSKDIVDIAWKAQLRLCKRYQRMSKKGKHYNLIITAIAREMAAYIWAIAKEVVLTPVNPKLRLSRVPA

SEQ ID NO: 231503 - protein, 429 aa, unidentified
MPYRIAGIDVHKKILAVVVSNVEVDGDFHFERRVFGSNPEQLRSLAAWLLEQEVEEAVMESTAQYWRPVWGALERYWKPICEKREGARRRSGTLHLAQAQSNRGRRGRKRDFADAERLVKRLVARELILSFVPDAEQRLWRTVTRKKYQLTCDRVRLQNQLESLLEEVHIKLSSLVTDLLGASARRMLKALAEGETNPATLAALADQRLRATPEQLCDALGACTDLKPVYRRLLKMVLEQLQFLEQQISQLDQETASLLSQHQDAVERLAAVPGLGVDSAHQIIAEVGPTAATFPSEKCLSSWVGACPGDEESAGVNYSRRSPQGNRHMRRLLNQTANAAARTKGSIFEIVYRRSVPRLGHKQAIGAIAHRQCRLIWLILHQGVRYEERGPAVTKQSKQKRTARMIRQLRSLGYRIESPNPQPGQAQPQ

SEQ ID NO: 231504 - protein, 316 aa, unidentified
MSAIYVGIDVSQERLDVALRPSGETWTLPHRPEGLEELIRRLKKLSGLEAIVLEAGGGFVEEVAAALGAEGLPVVVVNPRQVREFARATGKLAKTDALDAQVLAHFAEAVRPKPRPLPDEQTRLLKARVRRRRQLQAMLTAEKNRLRTAPEALRPRIEAHIAWLEEELSELDGDLGAQLRQSPLWREKEQLLLSVPGIGPVVAATLLAELPELGELNRRQIASLVGVAPLNRDSGQRRGQRTTWGGRSGVRCALYMATLVATRHNPVIRAFYHRLREAGKPKRVALVACMRKLLVILNTMLKDGHPWRPPCPSPLT

SEQ ID NO: 231505 - protein, 482 aa, unidentified
MKKKNIYANQSQELLTLFEEAGNSAKIMCVPIDYAKKDHVVMFCNGYGDIVRKPFSVKNTPEGVNYLTEQVTRSCHNRSINPKHVFFGGEDVGSYAENFASTLRSGGWLVAGVNAHDAKKQRSNMQASTDRLDLMGIATMLLNRRCNCSPAQSGIYRNLRTLVRHRRRLVVMTTEVRNRIHAIVDRLFPGFLDEKKSGITPFSKSSLYLMENRFSAKQIRRRKRSALIEALRRLGTPKPDCAATKLQEYAQQVLNTPDEYVSTLQLSLAQHVKHYWCLQENIEQLEREIAVWLSQTQGAFLTTVRGIGIVLAAGVSAEIGDPFQQKPLNNLVSYAGIIPRIIQTGGPEGEIYTGKVAKRSNRILKDYVVQSASHLGLHGPEDLISDYRRRDAAGQHADFGIARRYLRMAMCLMRNSGIYLPPRLRKKGVKPEERAGYYLMSWPYLREKWGKLGALEAAFVKDRPLGRWRNMVQKLYEIKLTL

SEQ ID NO: 231506 - protein, 463 aa, unidentified
MTTIDKRRNRKERKELARRLRSEDPGLEVVHPHAAGVDVGNSAHYVAVRPDRDSQPVRRFECFTADLHRLADWLQSCGVKTAAMQSTGVYWIPLYDILEERGFEVYLVNARHTKNLPGRKSDVQESQWLLKLHTYGLLNNSFQPTSEIRVLRTYWRQRAEHARGIGTCILRMQKALTQMNLQLANVISDLSGVTGQKIVRAIVAGERDPQKLAELSDPRIRASKEEIAKSLEGNWRQDLLFVLHQEVKMYDVYQQRIAECDQQLEKHLAHFADTIPPQATEEAKKNRGKQYKNNPQFHLADELQRITGVDLTRIDGIDVMVAQTLVSEVGLDMSRWKTEAHFASWLGLCPDNRISGDKVLSRGTRHVVNRAATSLRMAATTLLRSQTYLGAQYRRLRTKLGAPKAITAMAHRLARLVYRMLKYGQQYVDKGAEYYERRNRQQQIEFLRKKAATLGLHITLAQA

SEQ ID NO: 231507 - protein, 477 aa, unidentified
MRSTQQQKQGARRPDERNWHEMNRKQRREIARRIQSEDLRLEVVHPDAAGVDIGNESHYVAVPATRDRQPVRRFGCTTAELKDMATWLKQCGILTVALQSTGVFWIPVYDILEEAGLEVYLVNARDTKNLPGRKSDVQESQWLMKLHTYGLLRNSFRPPQEVRRMRTYWRQRNDLVRSAGRQIQRIQKALTQMNLRLANVLSDVSGVTGQAIIKAILTGERDPRKLATFRDKRVKASEEEIARGLEGNWQEDLLFMLKQEQEGYEFCQKQIAECDARLEQYLQQTPDRSQGASLPEEKRKGRLQKKAKNPQFNLRTALFRITGTDLTQIDGIDVRTAATVISEAGWDMSKWENENHFVYWLRLCPDNRISGEKVIGKGRLRTNNRLATALRMAASTLRESDSYLGAQFRRLRTRLEAPVAIKAMAAKLARLVYRMLRYGMQFVDQGAIFYDARHRQINFLRRKAAKLGFQIVLAPAT

SEQ ID NO: 231508 - protein, 317 aa, unidentified
MNETQPTVHLGVDVSKKRLDISAFPGLKPKYPNTPAGVDRLLDDLGGADVVVCAEASGGYEILLLETCLKRGVAASKVPPGRVRHYAKALGIRAKTDRIDAELIARFAEANPPRRLTTHARWKVELAALVSRRDQLVEMRKQEENRLETRLPQAVCRDIAGHLEELAERLDRIDAAIAELVEATAELAGFCERATSVKGVGVQTVAAVMGYMPELGSLSSREAAALAGLAPITRESGEWRGRRFIGGGRAQLRKALYMPAVVAVQHNHVLRAFYLRKRAEGKPAKLALTAVMRKLLILLNRIAANPDFVPDHEPGPC

SEQ ID NO: 231509 - protein, 436 aa, unidentified
MSETIAFSKVHKRAAAIDIGASKIYVSPDGEEVLVYETFTADYRRCVADLQTYGIDQVCMEATGVYWIALYDMLDSAGIKVCLVNPKEVKQVKGRKTDTKDCRWIQKVFSAGLVRESYVPTGKLREIRMMVRERQDIISMGSSYVNKLQKYLELMNIKLTGVLSQINGVSSIKMIEAIIAGERDAKKLLMLCSKSIIENKSEQVLKALEGNYNESTLFMLEQTLKMWKLHEAQVLVIDKKIEELLNDLEQGKPTIEAKSKPKAIRHHAPKIEDLHQKLINIYGVDGNILSGINNYTMLRLLGEVGTDMSRFPSEKHFVSWLQLSPNLHQSGKGFRQVKIRAGSKAGQIFREVAFGLLNSKDVAIGAFMRKLKSRKDSKTAIKAGARKLALSFFYLLTKGGEYVEIGVKKYQELLMDREKKYLQNLAKKHNMIVTQP

SEQ ID NO: 231510 - protein, 339 aa, unidentified
MQKKWIAGIDVSKKTIDVALSLNLSNTAVFTRQFSNNFKGYEQLKKWLKEYEAAIESTLFCLENTGLYHRLMVNWLQKQNGFVWVEMPVQIKWSMGMQRGKNDKVDAARICLYAFRNQDKAQNYTSMDIAVQQIADLMAARQRLLQCLKTLRLPIKELKDAGLSTAAKLVEKSCAKSIKAMEKELEDIEQQLEQIIEQDEQLSTTYRYIKSVRCIGLVASLQLLVYTNGFKRFKNAKQLASYCGVAPFEYSSGTSIKGRPKVSNMANKTLKTAMHMCSVSAVRHNKEMRAYYQKKVSQGKNKMSALNAVRNKLLHRVFACVRDKREYAEHYGRTEVAAA

SEQ ID NO: 231511 - protein, 466 aa, unidentified
MSGKRVRRKGQSRGGKELPKSLRRVNLDAAGIDIGSRSHYVAVPEERDKDAVREFRSFTTDLKRLADWLEECGIDTVAMESTSVYWIPLYEILEERGFEVILVNARDFKSVPGRKTDVLDCQWLQELHMYGLLRGSFRPDAEIAAVRAYVRHRDMLVKNASRHIQHMQKALSQMNIQLHNVISDVTGATGMRIIRSIIRGNHDPEVLAEARDFRCKASKETIVESLTGNYRPEHVFALRQAVELYDFYQQQMCAVDKELEKLLHELEETSPVREELGPGISRRRKGNEPHFDIRTRLYALAGTDLTEIPAIGPYSALKIVSEIGTDMTRWPTVDNFTSWATLAPRNKITGGKLISSRTRSSANRFAEVLRMAAMTIGKTDSYLGAFYRRKAARIGKAKAITATARKLAVIIYYMIARGVPFHDPGLQAHDEQHRKRALKNLKKRAKSLGFQLIPDGPLGNAREAVT

SEQ ID NO: 231512 - protein, 343 aa, unidentified
MLSHTTVRPVYAGIDFHKKSMTVALGDAQGNLIGNTHTLPTDAKLIRRFFLRYSGLKCAVENCRAFDWLVALLREIGIEVHISNPYKTRLIAESTCKTDSIDSTVLMELLAKDYLPTCYFPDLPTRLTKERLRWRKQLVGSSTRFKNRCTVLLDKENKGHGPQYSAVGREVIEQIDLYPERKELVSKHLELIEHLEYSRNQEDRWVKMKANEVPECILLKTIPGFGDVTAVTLWAEVGDISRFPRSNSFTSYLGLNPRLYSSANTRRLGGITKRGQNELRALLVQAAWTAIKQSFVLKKRYQAIAKRRGKKIAIVAIARLLAEISYHILRTGQPYDESKLALG

SEQ ID NO: 231513 - protein, 343 aa, unidentified
MSEVITIGLDIAKYVFHAHGVDERGRAMFSKRISRRKLLDFFAAQPSCTVALEACGGAHHWARQLSRLGHEVRLIPPAYVKPFVKRQKSDAIDAEAICEAAQRPGMRFVVVKSEQQQAAGLVFRTRDLLVRQRTQLINAIRGHLTEYGWVSPKGPSHVARLADLIEEEEMVSSLPEAAHAMFRLMLDLFAGLNGKIADLDKEIARRAREDEVSRRLMSIPGIGPISATAIAALAPPAETFTKGRDFAAWLGLTPLQRSTGGKQKLGATSKMGERTLRRLLIIGSSAVVQQASKRGVPRGSWLDQMLARKPRMLVTVALANKTARVVWAVLASGEVYRTPAAAA

SEQ ID NO: 231514 - protein, 340 aa, unidentified
MNKTNTIGVDLAKNVFHLCIQNDKGHILKKIKLGRSQFKQFLATTPVSRVVFESCATSHYWARVAARYEHQAALIHPAYVKAYLKTNKNDFNDAEAICEADSRPTMRYVASKTIAQQDIQLLHRIRQRQIDQRTALVNQIRGQLLEYGIPIPKGISQVRHQLASILEDGENELTPQARLLFDALRQELCELDSRIKQADKQVKQLADSHPLCQRLMAIPGIGPMIATALISAVGNASNFKNGRELSAWLGLVPKQFSTGGQQRLLGISKRGDGYVRALLVQGALSAITRCKGRTDSQLLWARQLQEKKGLQKAAVALANKMARIVWSVMARDHDYVTIVK

SEQ ID NO: 231515 - protein, 316 aa, unidentified
MTSLTTTFSFFIGCDVGKTSIVVHDSRDGKTSTIPNSPKALRAFAATLECNALVICEATGGYEAVLLDAMLNAGIAAHRADARKVKAFIRSFGTRGKSDQIDAKALAQYGAERAARLVLWQKPAQSRQSLQSLVLTRADLVKDRVAYRNRLGAPGGEAAKTMLREVIKCLDKQIALIEAKTRALVAAQPELIRDAASLRGIEGVGPVIATALLALMPELGTLNRRQAAALAGFAPHPNQSGARDGYRKTRGGGAEVKTTLFMAALSATKSQKPMGRFYQRLIAAGKKKKVALVAVMRKIIVIANAKLRENHEIQLS

SEQ ID NO: 231516 - protein, 399 aa, unidentified
MVGALIRVWAGVDAGKEHHHVTVVGSEGRVVWSRKVANDEAALRGVIAEVSGLAGSVRWGIDLRDGGAALLLALLAAAGAEIVYVPGQVVNRMADAYSGEGKTDAKDARIIADQARMRADLAPLVPGDELVIELRMLTARRTDLVTDKTRAINRLRATMTEISPALERALDFTRTGPLLLISGYPTPEKITQAGPGQLAAWLRERGARNTAALARTAVVAAQQQTVRLPGQDIAAQLAAELAGEVMTLGERIHQIDQLIGERFRRHPAASLITSLPGVGILLGAEFLVATGGDMRAFASADHLAGYAGLAPAPRDSGRITGNLHRPRRYNRMLNRVFYTSALISIRCSPDSRAFYDRKRAEGKKHTQAVLALARRRVNVLWALLRDQRPYTTQAPAKAA

SEQ ID NO: 231517 - protein, 347 aa, unidentified
MVGRLKRQEADMESCGIDLAVRSSAICVMRDGGVIVTERGVPTEEEGLQAAVAGRARMVCVLEASPLAEWAAGVLEKAGHDVVVIDPRKAKGVITSKRKTDKLDARNLARMGLTGWYTEVHRKSPEARAMRTFLKARYGLVQTALAQGARIRGLLRAHGIRLGQVAESQFASRVRQVTKQQVPGLWPMLEPLVKVRRQALEGAERMKKQLERRASAESVPSQLMTAPGVGPLVASAYVATIDDPRRFRSGSQVAAYLGLVPSVEQSGQHEVHGRITREGDGLLRSYLIEAAQVLLTRSRRGCALKRWGLRLWRKKGFKKARVAVARKLAILLYHLWITGENFDPARA

SEQ ID NO: 231518 - protein, 276 aa, unidentified
MYHFAGLDVSVKETSICIVDETGRIVLEVKVASEPEALLQVLGSPIYRFKRIGLEAGPLSQWLFSALAEAGLPVICVETRHMRAVLQAQINKTDRNDARGMAQMMRAGLYRPVHVKTLRSQKLRMLLTHRKLLQSKAIAIDNDLRGTLRNFGLKVGMVGTVKFEARIKELVENLPDLAILVEPLLTVRRVLREQFSILHRRLLAIVRDDEVCRRLMTVPGVGPVVALTYRATVDVPARFRNSKAVGAVFGLTPSKYQSGEINRTARYQSAATRWYG

SEQ ID NO: 231519 - protein, 322 aa, unidentified
MILSMGVDISKKKLDITIYNDVVKKNYVITNSVSSIKRFLKKHTEVDRIVMEATGTYYLKLATIANELGFYVSVVNPYIIKKYGEYKFKRSKTDKIDAELIAKYGYENKPKKYQITDKLRSKLKTLLTTINGLKKQITQNTNRIEALRQFPNNETKYSIEALKKVIEAIKIEKSNIEKEIKKIIKNNFKKTYELLDSIKGLGPGCNAAIIAYYGDFSDFDSAKKVVAFAGMDPVKHESGSSVRKKSKISKRGNKVLKALLYMGGMNAIQYNKHCIKLNKRLDDKGKIGKVRIMAAAHKLLRIAYGVVTSGIKYDPDFLKKSA

SEQ ID NO: 231520 - protein, 410 aa, unidentified
MKIAGIDVHKKVLMVVVVDTSAPEEKPARRRFVTLPSELQRFRIWLQEQGVEEAVMESTAQYWRSVWLELEPHMRLHLAQAYSHRAPRGLKHDFKDAERQVRRLIADELILSFVPEGEQRIWRSLTRMQVQLTRDRVRLQNQMECLLEEMRIQRSILVSNLLGASGLGILHALAQGETDPKKLAELGDERLHCTEEQLVDALTGRVQPLHRGMLALQLQRLQLIDQHMAQLEGMIAQVMKSHQDAVIRLAEVPGLGVDSAQPIIAEVGAQAGTFSSAAELTSWVGTCPGKEESAQHNHSSRSAKGNQYLPPVLNQAAHAAVAKKGSHFQVVFRRLLPRLGYKSAIWAVAHRLCRVVWKILHEGVRFIEQGREVGPREKKQRAQMLARALPKLGYEVTITPINQLAAEPAI

SEQ ID NO: 231521 - protein, 375 aa, unidentified
MTKIARIGIDTSKSVFQLHGVDEKDEVVLQKRVRRRQLRAFLGKLEPTAIGLEACGGSHYWARELEKLGHTVMVLPAQYVKPYAPRGKNDKIDAEAICEAMSRRRIMRHVVAVKSAEQLAAQMLLGTRDGLIKRRTQLSNTIRGHAAEFGLVAATGLTKIAALLARIAADESVPALAKEMFATLGQQFAELGPRIAVLDKRLKAWHRAHEMSRRLAEIPAVGPVGACLLTIKVSNPAAFRSGRRCAAWIGLTPKDHTTAGKVRLGGITRAGDESLRAVLVSAATSDIQQINRGRTKPSPWLAELLKRKPPKLAAVALANKTARIAWKLMVSGERYDATRAAARKGLGAARSAGSAPSPLLHPDIAAHGASAMPAA

SEQ ID NO: 231522 - protein, 345 aa, unidentified
MKLYGGIDLHSNNCVIAIINEHGETLTVKRLNNDMSVILSFLTSYKDKLTGLVVESTFNWYWLVDALMDAEFKLHLANPAAIQQYSGLKHADDHCDARWLAEMLRLDILPEGYIYPRELRAVRDLMRKRMDIVQQSTKNLLSVQSCYMRHLGYKLSSNKIKQMAAIRKGVDTEQVHGDFSSMNTALSVISNLSLIRCAQQQINAIESAILQQTSLSPEFMNLTSIDGIGNTLALTIMLETGTIKRFDSPGNFSSYCRCIKGERYSNGKKKGATNQKNGNRYLAWAFTEAANFAIRYNPTIKKYYQRKLAKTNQVIAIKTVAHKLARACYHVLKDNVPFDEYKAFT

SEQ ID NO: 231523 - protein, 339 aa, unidentified
MQLYAGLDLHSRNTFIGIMDKEFKRVFAKRVSNNLPLIIKTLEPFQDQLQGLVVESTYNWYWLIDGLMDAGYDCLHLANPSAMKQYEGIKHTDDQHDAFFLAQMLILGILPQGYIYPKEDRPVRDLARKRMFLVQHRTAHILSVQSLITRCCGQRFSANEIKKFTVEDLQQVLEQEYIVLSAQANLETIGFLSQHILRLEKAIQKKVKLNKAFQQLLTVPGIGLILAMTIMLEVGDIGRFPQVGNFASYSRCVSSQRLSAGKSKGHGNRKNGNRYLSWAFTEAAHLSRRYNEYFRSYYNRKVAQANTSLATKALSNKLARICYYIMRDQVPFCEELQSH

SEQ ID NO: 231524 - protein, 341 aa, unidentified
MDISVLGIDLGKNSCSVVGLDAIGKVVVRRRMRRETVITYAATLPACVVAMEACCGAHHMGRALARQGHAVRLMSPEYVRPYVKAQKNDDRDAEAIAEAATRPTMRFVELKTEEQLDMQTLHRIRDQLVGDRTSLMNQIRSLLLQRGYIVPQGRAKLALRLGEMLDGDEPVLGSRIHRLVSDMRLRWSALDERIADLDAEFTDAARADERTRRLLTIPGIGALNATALVAAIGDARTFGRGRDLAAWLGLVPRQATTGGKPRLLGITKRGSRYLRKNLIQGARASLPVMSKSDTRLGAWLRGLLSRSHHNTVVVALAAKMARIVWALLRHERTYDPVAQAA

SEQ ID NO: 231525 - protein, 369 aa, unidentified
MQNIMFVGLDVHKATISVALAQGGRGGEVRHWGTIPNRADHIRKLADKLGGDGRQLHFCYEAGPCGYGLHRQLTELGHDCVVIAPSLIPVKAGDRVKTDRRDALMLAKLHRAGELTAVWVPDTAHEAMRDLVRARATSVRVTGKARQHLQGFLLRHGRVYPGKKGWTKAYRRWLTTVRFEHPAQQIVLQDYIHAVTDAEARIERLTGQIAALLPSWSLAPVVEAIQAMRGVAFIVAVTVVAEVGDFNRFDNPRQLMAYLGLTPSEHSSGVSVRRGGITKAGSSLARRALVEGAWSYRMQARVSRKLLDRIEGLPQAVRDIAWKGQLRMCQRYRHLMAAGKPKVVATTAIAREMAGFIWAIARTVTPAST

SEQ ID NO: 231526 - protein, 360 aa, unidentified
MHATTVAVDLAKSVFQLAVADASWKVIESHRLTRHQFERWFQNRAVSLVVMEACGSAHHWARWLNRLGIEVRLLPAAYIRAYVKRNKTDAADARALLEAARCADIAPVRVKSVEQQALQGLHRTRSLWMSTRTSRINALRGFCREFGLVIPQGARTGIEAISRTLADPQTPLPGMIHRAMLFLVEEIRLLELRIGQLERELAELAKHSPACTTLLSIPGVGLLTATAMVAATGGSVSHFKDARHFASWFGLTPREFSSGNSRVLGRISKRGDRYLRMLLTHGARAVLRAAAVSRQAGRSLDGLRTWGLAVQARSHHNTAACAVANKLARICYATLRDGTPYGAPTRLAHKLNRSEFAIAV

SEQ ID NO: 231527 - protein, 350 aa, unidentified
MIIGVDYHPGFQQIAFLFKETGECGERRLNHSDGEAENFYRDLKARGISVRVGMETTGFSRWFERLLAELGFEVWIGDAAEIKTRRAKKQKTDRLDAELLLKLLLEDRFPRIWVPSPENRDVRQLLWHRHRLVQMRTRIMNQLQALAMNENRYWKGKLWSERGRAELEKLPLAPWTSRRRQELLELLDRMNPTIEELTAAATLEAKKRPEALRLMTHPGVGPLTALAFVLIIGTPERFGCAKQICNYVGLIPSEDSSGGRQRLGHISKQGSSLLRFLLVEAAQAAVRCNADWRRRYRHLAMRRQRNIAKVAMGRRMGARLYWMWRNGREYSPSLEFGSHAGKLGTGNGGQ

SEQ ID NO: 231528 - protein, 407 aa, unidentified
MSETSETRDRVSFSGFLGIDISKGSFDGCCIDGEGKVLFHVSLPMNRSGFEKLVTRVYATSLPKMSILIGMESTACYHISLFSFLMALGYSVSVINPLLISNFMKLQLRKTKTDKKDAAVIARFLSAHGASLPQTVADSHIADLRELSRQRESLLHQMTAFKCDIKRVLSISFPELERTMGIFTRTTLRLLCRFPSARALAQADRDELARLLQNESRGRNTPVSAETLLKLAQSSVGTANPSRELILRQKASILVHHEEHLQEITSTLIELCQSALEQDVQILTSIRGIGNKTAASFLIEMGGEIQRFETHNKLIAMAGLDPSVYQSGKYEGHSRITKRGNRHLRRVIWLMTIRVIQFNDLFKSYYRQRIEDGLPFKKAVLATAHKLIRIIFVLLTRKTLFCHLVTS

SEQ ID NO: 231529 - protein, 459 aa, unidentified
MGTRILGIDLAVTAAHKAIVLDVTSNRFVSSVLSFSTDPTEIDRVLTIARAGAVEPVRLVTVLEATGTAWFSVGTYLDRQGVEVYRVNGQQVGELRRIYQRRAKSDRIDARVLAKLYLLCPERLHRLSFPTGLHLALQQAVREVIRATRSMTVSKQRLLAFDQLGWLGQPDGLAPYDEAARWWREHWYNPWRVCEAGEATLTQAWQAASPVQPAETNWLSLLMARARQVTTLYGAPAHLDYDRLQASVTREQARLGEAESLAHDLRLQVVRPLYRQLSPDRHLESLRGVGQDSAAVYIAFIYDILRFPSLREFRGWHGLVPFSRQSGESQARGLHITQAGPDPIKLTAFLNANVARLYDPEIAALYYDQMMNRGKHHLQAVCACATRLLDRVYVVLRDQRPFELRDVDGSPVTKAQARRICQERYQVPDQVRQRNNHRVRQERQERKTEQRYRRQHPRE

SEQ ID NO: 231530 - protein, 402 aa, unidentified
MNAVGIDVSNGKSMVCIMRPFGEVVASPYEISHTTSELNELVNSLKSLGGETKIIMECTGVYHQAIARPLCDAGLFVSTVHPKLIHGFGNNTIRKVKTDKADAIKISNYGLANWLTLQQYTPEDEIRQILKGYNRQYQKYSKLKTMLKNNLVARTEQTFPGIRKHFTSPPRKNDGHEKWVDFVATFWHIDCVGKHSFHAFSDRYQKWCKRLGYQFSTSKAEQIHAAARSQNATVPNRKSAELLVMQAVRQLNAISESLTIIGNEMIRIAEALPEHPVVTGFYGVGRILGAQIMAEVGDVRKFAHKGSLVCFAGLEAPPFQSGNFESRNRHISKKGSPFLRKSLFLVMDCLIKNAPSNDPIYQFLDRKRADGKHYYSYMTAGSAKFLRIYYARVKEHLAAQNV

SEQ ID NO: 231531 - protein, 378 aa, unidentified
MRMTTDQARVTAGVDAHADTHEAAALDERGRLLGTRTFRTGSEGYRELLAWLEQFGELVVVGVESTGSYAAGLVRFLHAHGVDVVEVNRPHAHTRRRRGKSDPIDAEMAARQALSGDASAIPKTTTGIVESIRQLRVARDGAVKARSAALCQLSDVIVTAPDGLRERLSQRKRTRAKASLCLGLRPRTTHLGEPAEAAKLALRSLARRIQNLDEEIAALDKHLGTLVATAAPRTTKLLGISTGHAGQLLVTAGQNIERLRSDGAFAALCGASPVPVSSGRRSRHRLNPGGDRDANRTLHMIAVVRLRYCHRTRAYAQRRSTEGKTKREIIRCLKRYIARETYRTLCADLHDLQQPPRPAAAVTIMCGAGPIGRARRRT

SEQ ID NO: 231532 - protein, 372 aa, unidentified
MGHHTEAFVGIDTSKSRNAIAIADGGRGGEVRYLGEFPATEAAIRKLVAKLAAKYRDLTFCYEAGPTGYGLYRLLKSLGHECLVVAPSLVPKKAGDRVKTNRRDAVSLAKLLRAGELTAVWVPDERHEAMRDLSRARQAVKKDLQGKRQQISSLMLRLGRIYPGKTTWGPAHMNWLMAQKLEHREQRIAFEELLEGIRQESERVERLEKAIREAVPEWSLAEVVAALQAMRGIDLIAAVGVLAEIGDLSRFQNPRELMGYLGLVPSESSTGDKVKRGGITKAGNGRARRILVEAAWSYRYPPRVSREKQPKVEAAPRRVREIAWKAQTRLCGRFRSLERKGKRRTVVATAIARELSAFIWAINRELMAHRQA

SEQ ID NO: 231533 - protein, 432 aa, unidentified
MSEGSQEELMIQNQPEIQYAAFLAIDWADQKHVWSLQDANSGTCERGEVDHMPEAVEAWVAQMSQRFAGRPIAVAVEQSRGALVFLLSKYEQLHIFPVPPAMTANLRKAFYSSGAKSDPTDADLLLDLVQRHREKLRRLSPDTEATRLIQNLVEERRRLVDEKTAQSNRLEAHLKIYFPQIPRWFGDVGSPMVCALLERWPMLEALQKARPDTLRSFFRKQHSRKEELIESRLKAIGEAMPALKDRAVVEAKVAVVKVSVQLIQVLHEGIEGLNRQIQEAAEAHPDFFIFDSLPGAGAVMAPRLLAAFGSQRERYQNAAEVQTFSGIAPVTESSGKSSWVHFRFACSKFLRQSLHEWAALSIPQSKWAHAYYELQCRRGKKHHAAVRALAFKWIRIIYRCWKERVAYDENVYLAALAKHNSPLVAATRAEAL

SEQ ID NO: 231534 - protein, 403 aa, unidentified
MNNVAGIDVSKGKSMVSVLRPFGEVVAKPFSIGHTGSELKELADYLKSLDGETRGVMEHTGRYYEPVARFLHDEGVFVSAVNPKLIKDYGNNTLRKVKTDKADSRKIARYGIDNWAELRQHTPMDTIRMQLKTLNRQQSLYTKTKTMMKNNLIALLDQTYPGVNALFDSPVREDGSQKWVDFATTFWHVDCVRNMSLTAFAERYRKWCKRHGYNFSQSKAVEVHAGAQDLIAMLPRDALTKTMVRQAIDALNAISASMERLKAEMQALAAQLPEYPVVMAMHGVGDSLGPQLVAELGDVTRFTHRNAITAFAGVDPGADQSGTHEAKSTRVSKSGAPELRRALFLVMDCLLKTQPQDDPVYRFMDKKRAEGKPYLVYMTAGANKFLRIYYGRVKEYLASLEGN

SEQ ID NO: 231535 - protein, 366 aa, unidentified
MKKTSTVRVNGNMIFKGHKLTIGMDLGDRWSNYCVLDEAGEILLEQRLATTPEAMKQTFERMPRSLMAMETGTHSPWVSRLLKELGHEVLVAHAQRVELISKSTRKDDRHDARTLARLARIDPELLGPVRHRSAKAQIHLTVIRARAELVSARTGLVNAARGLVKSYGQRLPKCGTQQVSRELATELSAELREVLEPLLKEVESLNERIKEYDVRMEKIAREGYPQVELLKQVKGVGTQIALTYVLTIDDPHRFPKSREVGCFLGLRPGRRDSGQSQPQMHISKEGDPYLRTMLVQGAHYILGPFGEDSDLRRWGLRLAERGGKNAKKRAVVAVARKLAVLLHRLWVTGEVYEPLRNSHKAMRAVA

SEQ ID NO: 231536 - protein, 385 aa, unidentified
MVYIGIDIAKFKHFASVVSQDGKVIVKPFPFENSRQGFMKLIEEIENFQDCLIGLESTGHYAENLIQFLYERNYSVALINPIQTDSLRDSNIRKTKTDKVDTMLIVQCLMLKKYSLVSSKNIDLIKLRRLSRFRLEMVQQQTRIKTQLTACLDIVFPELAHFFKGNLHLKVSYALLEKYSSAKAIRSARIDGLTNLLYNNSRGKYNYEKALQLKFLAKDSIGLDNPAIELQIQCLIKQLRLYQKQISDIDLSIMTIMEIINSPILTIPGVGYTLGAMIISEIDDIRKFSNPSKLLAFAGLDPVVKQSGNFQAEHMKISKRGSTYLRYAIYRVAFSIIYNNETFHNYYLDKRSQGKNHRVVLGHVCNKLVRVIFKILTDEIPFNLS

SEQ ID NO: 231537 - protein, 416 aa, unidentified
MTDQKQFYAGVDWASESHHVFLTDGDGRKIGERVFRHGGEGLAELAAWLTATSGATEAGQIQVAIEVPHGPVVETLIERGCQVHAINPKQMDRFRDRFTLAGAKDDSRDAEVMASALRTDRRCFRLLAAADPVVIELREWSRMAEDLGAERNRLTNRMREQLWRYFPALLELENDLGAEWLLDLWEAVPTPAKAARIRAATIAKLLKRNRIRRVDATHVLAVLRTPPVKVAAGTTEAASAHIATLIARIRLVNRQLKQAHQRLDTLTARLVPTEATEPGQRKQHDVEILASLPGVGRIVLATLLAEAFDALQRRDHAALRSLTGVAPVTKRSGKSCIVIRRQACHDRLANAMYHWARVAIQHDSRSRLKYAALRSQGHSHGRALRSVADRFVNVACAMLKTGTTFNPSLAEQKLSC

SEQ ID NO: 231538 - protein, 360 aa, unidentified
MAKVKPIHSSFVVGGVDTHKDLHVAAVVDQNNRVLGSEFFATTRQGYRQMLAWMASFGTVERIGVECTGSYGAGLLRYLQSAEIEVLEVTAPDKMERRKRGKSDTIDAESAAHAAFSLIRTVTPKTRSGMIEALRVLKVCRKTAVAARRIALQMIQMNIVSAPDELRDQIRHLTRMQLIRTLAAWRPNVTAYRNVQDAYRIALKSLARRYLELHDEIADLDVMITSIVDELAPELIKRKAVGYECASQLLITAGDNPQRLTSESGFAALCGVSPVPVSSGKTNRHRLNRGGDRAANSALHIIAIGRLRTDTKTQEYVAKRVAEGHSKMEALRCLKRYISREVYTLLRNQNRQINSTQITT

SEQ ID NO: 231539 - protein, 316 aa, unidentified
MGEDVTRVLGVDVSKASLDVACSGDGEVQRLANDTAGISAVVAKAQELDVQRITVEASGGWQLPLVAALLHAGLPVVVVNPRQVREYARATGTLAKTDRIDARVLCAFTLAVQPPLRPLKDQQAEALSALLARRQQLLGMRTAEKNRLTLGATGLVRKNLKAHIKWLDRHLRDTDRELKQLIEASPAWQAKEDLLTSAPGIGNTTARILIGQLPELGQLNHKQIAALAGLAPFNRDSGTLRGQRMIWGGRHEVRTALYMATVSAIRANPPIRDFYERLKSNGKPSKVALTACMRKLLVTLNAMLRDQTPWQYTVKA

SEQ ID NO: 231540 - protein, 436 aa, unidentified
MRGCRCSMIMGFTKPIEHFNLQRKKVITMNTLYVGIDVSSKSNVVYLMLPNGDKHSNFSVANSHEGSNQLVKRILSALTSYSLDTVLIGLEATSVYGDNLVYFLREDANLAPFNRKIHVLNPKQVKKFHDAYNDLSKNDYVDSFVIADCLRFGRINKEVYMGDYRYKALQNLTRARFFAVQNLVKEKQRFMNVLFKKYSTMTQEKVFSDTFSTTALAVYDEFESAEALANMDLHELTDFIIGKGKNRFPDPDAVAKAIQKAARSSYRLPKTMNDSVNQVLSIFITSMKALESQIKEFDKAIKAQMELLPNVLISIPGIGPVYSAGIIAEIGDINRFNSQAALAKYAGLAWKQHQSGGFESEVTRLIPSGNRFLKYYLCEAAFSLVRCDKEYSDFYHLKYKEVNRCQHKRALALTARKFVRLVFRLLKDNRLYCPAK

SEQ ID NO: 231541 - protein, 343 aa, unidentified
MLYAGLDLSRRRLETHVLDEDGGTVAKLAVHPDADGLRSLAERFASPVTATIETMNGARFVRDELERHGWDVLIADAAKVKGLAPLAAKTDKVDARVLAILAWRDLVPAVWLVDPDTRAARERARYRLYLVRHRTSIKNRVHATLFTFGHTVPVSDLFGVRGRELLDALEVPEPWDRTLRASLERLDALEAEIRGCEAELSRLGADHPYVPLLETVPGIGPILAYTIAAEIGDIGRFASAKRLVGYTGLCPRVYQSGESDRRGSLAKTGPKYLRWALVEAAVHAASHPRYRTKYQRTKRRLGKQRGSGVAQVELARELATAIWYMLTRQEPFRAAGPLCSLVA

SEQ ID NO: 231542 - protein, 340 aa, unidentified
MLYIGLDVHKEFCQACVIDESGRALSNERFSSTNEELDRFLDRFQDAKFVLESTGIWEFIYEGIERRGFEAVLAHPLKVRAIAEARVKTDKVDAETLAQLLRADLIPRSWIPPKDVRDLRQLVRQRAYLVRDASRFKNRIHAEILRRGVRRPENLKTPFAQRSIRWMRSLDIPTVTSCLNCLENVQAQVQEINAQLLVEFERRPDAQLIATVPGIGFYGALLILAEVDDVRRFHHPEKLCAYAGLVPTVSQSASCVRYGSISKDGSAYLRWILTESVHVHTRYEPGSQLSRFHARVAKRRGKRIATVATARKLLRIVYWMLVRHEPFHSHGFNPVKRVHC

SEQ ID NO: 231543 - protein, 418 aa, unidentified
MTRKDDTRIIEIMHPICCGLDVHKENIAACIIYQDEHGHEKQDIQVFGTFTDDLMRLRTWLIDHECPVVAMESTGIYWRPVHNVLEETVQVVLVNARDIKNVPGRKTDISDCIWLAGLLRHGLIRGSFIPPKHVREWRDLTRLRKKYVHTVGDYRKRTHKLFESANIKIDSVVSDLFGTTGRNLMNLLASGASLTKEDIRLCVRGKLKDKEEELYRSIQGFFSDHHRFILKRLLMTIDMLEGEIAALNARISDMMNDQKDLLNRMGEAPGIGSVSSCDILAEIGPDMSAFPTAEALISWAGLCPGNNESAGKRKSGKSPVRKHHLKTILIEVAWAAVKKKGSYFKDKYYRLKARRGAKKAIVAIAHRILLGIYHVIKHGVRFRDLGVDYLTQRNKAITLVRLRKQAQSLGFILVEEVA

SEQ ID NO: 231544 - protein, 408 aa, unidentified
MTEVMIGVDPHKGSHTAVAIDAAEEPLGKLRVRASAAQADRLVAWAAAWPERAWAVEGAGGLGHLLAQQLVAAGERVLDVQPKLGARVRLLATGASNKNDPNDAFSVAVAALRSKSRRPVTADDHGAVLRVWSRRHRDLGRAKNQVACRLHAVLCELVPGGVPEEITAAQAARILQSAPPSGPAGQARRELAADLLDDMRRLDAQMRESKKKLAIAVRASGTSLTEIFGVGPVVAATVIGDAGDVARFASRDHFAAYNGTAPIEVSSGNRKIYRLSLRGNRRVNHAIHMAAITQIRYSHSGGRAYYDKKLAEGKTHKEALRSLKRRISNAIYAGLQADARQAAAAAASPTGPGGQPGNDSDSSAAGSHPGNRLFGQATPEPGPTLRPATPARPTTPPKPTTGKTRQDP

SEQ ID NO: 231545 - protein, 339 aa, unidentified
MKYTPVGVDIAKHLIQVHFIDEHTGEVIDKQLRRQDFLMFFCNREPCLIGMEACGGSQHWARELTKQGHKVRLLQARFVKAFVMGNKNDVMDARAIWMAVQQPGKEIAVKTEEQQSVLVLHRSRRQLVKFRTMQINSLHGTLLEFGETIHKGRAAMEREFPEALERMKERLPPYLITVLENQYYRLNELDSLIEDIEKQLTSVAKQNETCKRLLDIPGVGPLIATAAVATMGEASAFKSGREFAAYVGLVPKQTGSGGKIRLLGISKRGDTYLRALFIHGARAAALLTKEPGPWITELKKRRPASVAIVAMANKLARTVWAIAAHGSKYDKNHVSIRPY

SEQ ID NO: 231546 - protein, 368 aa, unidentified
MNSEKYIGLDVHQATIVVAVMDSTGKVVMESILETKAATILEFLAGLRGTLSVTFEEGTWAAWLYDVLKPHVAKVVVCNPRKNGLLKDGNKSDRIDARKLAELLRLNNLKSVYHGETGVRMLRELARSYLNLVKDQTRVMNRLKAMYRSWAIPCAGREVYYARHRAEWLAKIREAGVRRRAEHLYQQLDMLQHLRQQARRELLAESRKHSITAKLRQIPSLGPIRVALAVALIQTPHRFRTKRQLWAYSGLALETRTSGEHCYIQGQLRRSKKQISIRGLNKDHNHDLKGLFKAAATRASVQPGPFQDFYQASLAKGIKPTMVRLTLARKIAAITLTLWKKGENFDAEKLKSQARLSVSGEEPPFHLR

SEQ ID NO: 231547 - protein, 381 aa, unidentified
MATETVQSTLPKPITEVLYLAFELSQKQWKLGFTIGIGQPPRIRNITARDLNALHWEIRQARQRFHLPENTSVVSCYEAGRDGFWVHRYLQQQGIANLIVDSASIEVNRRMKRAKTDCLDVTKLLTMLMRYHLGERKVWRTVTVPDEECEDRRHFHRELADLKVERTRHINRIKGLLTGQGVCALIQPDFLDFLSTVRLWNGNSISKELRSRLEREYQRIQLVNQQIDELEAYRRETLRTSQQPHIQQVRQLMRLQGVGINSAWLFVMEFFSWRAFHNRREIGALAGLTSTPYQSGGTNQEQGISKAGNRHIRAMIIEIAWGWLHFQPDSQLSRWYQQRFGQGSSRLRRIGIVALARKLLIELWRYLETGIPPDGAVLQPQ

SEQ ID NO: 231548 - protein, 323 aa, unidentified
MTKHITICAGIDTGKSKLDVAVEGSREQLQVENTSEGHAVLLAWLRRHRVKRVGIEASGGYEQPVVAELRRKRFVVVVFQPAQVRAYAKFHLQRAKNDKIDAALIAACTAAVRKIHPAPDPRLQPFAEQLTMIDQIGEDIARLKNRIESCRNTQIKGLWEEDLARLAKREKVELKALIASICKHPDLAKRLDLINSIDGIGLPTAVAILVRMPEIGQITREQAAALAGLAPYDDDSGEQVGTRHIEGGRKRLRHALYAAALAASFRWNKQLMTLYRRLIAAGKEHKRALVACARKMLVFANTIVARGTPWQDRPPENATLTAS

SEQ ID NO: 231549 - protein, 341 aa, unidentified
MQITTIGLDIAKNVFQVHGIDAAEKVVVRKQLRRAQVMKFFAALPPCLVGMEACATAHYWARELTRLGHQVRSMPAKDVKAYVKRNKNDAADAEAICEAVRRPTMRFVGVKSAEQQGRLMQHRTRDLLMRQRTQTINALRAHLAELGIVAAQGREGLKQLLEIIADKADERLPIDARASLIVLAAQLQALQTMIGTIERRIIAQHRANEASKRVATIPGIGFLGASAITATVTDPNAFRSGRDFAAWIGLVPRQDSTGGKQKLGPISKQGDRYLRRILIVGAHAVLRLAKKNPQNYPWLAQLLARRPFKVVAVALANKMARIAWVLLARGGTYRTPQLAAA

SEQ ID NO: 231550 - protein, 406 aa, unidentified
MPVYLGIDWSQEKHDAAFLNEAGAIIAQLTIPHRPEGFLQLDTTRQRLGVAASECLVGLETAHNLQVDFLWDRGYTQVYVLVPKMVQRSRERYRQSGASSDPSDAFVIADILRTDRNRLQPWFPDSLLTRQIRAKVSLIHHLTESGVRLSNRLQAVLARYYPLALEIFSEPTSQIRLYFLQKYPTPQEAGQLTLETFQDFGRRHRYTRRDILARSFGRLQTRYPEASPEVSQIYRQEAVTLAGLLLELIQARKAAMRELRDVFRQHPDAAVFASLPGTGDLLAPSLLAKFGDDRSRFASPASIQELAGTCPVTKSSGKRRIVVFRRACDRELRQTAVQWARCSLRESAWANAYFESVLPHCRTQSHAFRCLANRWLAIAWKLWQTHERYNEGYHLRQRALRSLPPT

SEQ ID NO: 231551 - protein, 421 aa, unidentified
MEETNEPAELVERVAALDIGKAALTACIRVPHEDKPGRRCQEVREYATTTRALLGLADYLRCQGVTLVVMEATSDYWKPPFYLLEAEGFECWLLNARHVKNVPGRPKTDKLDAVWLAKVAERGMCMPSLVHPQPIRQLRALTRYRRTLIRERAREKQRLEKILEDAQIKLSAVVSDLFGVSGRAMIEALIAGQRNPWALARLARGTLRNKTRILEDALTGHFGDHHGFLCQMMLARIDGLTAQIGQLDARVEQAIAPFARQVTQLDEITGVGTTSAQELIAEIGVDMSRFPTAGHLVSWAKFAPIDNSSAGKKKGSSTGKGNPWIGGTLGEIVLGASRTHTFLAERYQRLARRRGKRRAIVATGNTVLTIAYHLLSDPTARYTDLGPGFYDSKAGRERHARNLIRQLEHLTGKKVALNEAA

SEQ ID NO: 231552 - protein, 394 aa, unidentified
MKLVGIDVGKNSHHFCVMDKETGEFNVTPTSFSNNKEGFDFLINSLKPYSKKSILIGMEDTGHYHVALLKFLLSNGYTVALINPKTTDLTRKMEGGITKNDKLDTITICDVLDTPERKKQYRITKVDRFDLYEQRQLTRHHHNLKEELNVYCNRLQKSIDLVFPEFNTLFSSKYSIVYMNLLKTFGSAEAIASTDIRTIRKCFEIKGRGNRISLTPEKLKECAKNSIGISSEVETIQIKHLVSQITLIKEQIAETDKKIEEFSITNNSPILSIPGISHFSGTSILAELGDIGNYSKPSQIIKFAGVAPYHYESSQYNAQHTAITKKGSKYLRKTLYQIILPVINNNPVFKKYYLLKISQGKGHRCAQGHCIRKLLRIIYHLLETGQSFDPALLR

SEQ ID NO: 231553 - protein, 540 aa, unidentified
MVVSQVVALRGPDGLALLPPAALLGLAFERRADLPGPRRGVAQKRRERHTVLKSGVPATVFTGHQEEGPFMAVVMIGIDPHKASHTAVAISAAEEPLGELRVRACTAQAERLLAWAAAWPQRTWAVEGAGGLGHLLAQQLLGAGERVLDVQPKLGARVRLLTAGDSNKNDPNDARSVAIAALRSAGVREARPDDHAAVLKIWSKRYRDLGRTRTQVACRLHAVLCELIPGGLSKEITAGHAARVLEAITPAGAVEAARCELAAAFAEDLRGIDARIRQTRAKLATAIQATGTSLTGLFGVGPVIAAAVIGDVRDVSRFPGRDHFAAYNGTAPIEVSSGPRKVYRLSRRGNRRLNHAIHMAAVTQIRHRHSQGRAYYDKKLAEGKMPKEALRSLKRQVSNAIFACLQADARRAAARVKGPGGQQGNDSVASAAGSHPRHRLFGQATPGPGDHPTATFSSPAPGPAHGRGTAGHSPVAATPPPPTPQVQVERPQRSEDERSGGAARRRPHSAARKAKAKGSLITPQRPKGTSHPAKKTDGNP

SEQ ID NO: 231554 - protein, 332 aa, unidentified
MSVYVGIDVHRKRSQVAVIDQDGAVLANRNVPNGVKPILGVIGGLPPGTPAAFEAAFGWGWLEALLEDYGFEPHLVHPLQCKAIASARLKNDKVDAAILAQLLRADLLPEAWIAPPPVRELRALVRHRIQLVRLRTLLRNRIHAILADHGQDRPAGCWSGPGREWLAALELPAASRAVIEDDLALIDALQVPVDRLDWELHQRAKADPRVKVLTRLPGVGPFTALVILAETGDVSRFGSARKLAAWAGLTPTVRGSDRTVRHGHISKQGSAWLRWILCEAAQTAKRHPDFAASYQAIARRRGKKIATTAIARKLLTRAYHLLTDASSGGEPR

SEQ ID NO: 231555 - protein, 397 aa, unidentified
MYIVGIDIAKRKHEAAVIDGEGTVIIKPFSFTNNCSGYNRLLAMLTKAKLPLDEVSFAMEATGHYWLALFTRLQKEGFRVQVINPVQTNSIRSFYIRQAKTDPRDALLIAEVIRFGHFSESTLHPENIYELRELCRGRHAIVSMQADVKRKVVALLDQVFPEYETAFTNLFGDTSMAILQTCPTPKELSEMRLEELCHLIEVSSHKRFRMAKAQELQELARNSFGFAMAGDVFSTMIRLYAKHLDFLKQQVREMDRKIAEIMETLDTPITTITGIGPTLGAYILSEIGDISRFSSAAKLAAYAGIDPTMRQSGEYNGVRNRMSKRGSPYLRHAIWLAASSAVLHDPALKLYFQKKRDEGKPYMASVGHACRKMVSIIYAVMRDNKAYTPYIPNEISA

SEQ ID NO: 231556 - protein, 298 aa, unidentified
MTCIPAQDCYIALELSRTKWLVGALLPGRTKVTTTLVPGGDTAALLDVLHHLAARGTREVGTPVALKVCYEAGFDGFWLARFLINRGVQAYVLDPASFLVSRRGRRAKTDRIDVEAMTLTLKAYLAGDRSVCRAVVIPSPEAEDAKRLSRERTQLAAEKTRHTNRIRGLLALHGIREIKGLWGGAWAQALSELRTGDGRALGPYLRAELAREFERLHLVLQHMKALDADRQAALTDETLAFPERHKAASLTRLAGIGPISATALVAEVFHRRFQNRKQLASYLGLAPTPYASGDSERD

SEQ ID NO: 231557 - protein, 344 aa, unidentified
MQNSNVIGIDLAKNVIQVCRIDKHGELKSNKAISPNKLKTLLVKSIPSIVAMEGCGSCHYWARLARKHGHDVRIISPRRVKAFLQGHKTDANDALAVAIASTQFGMVFSQIKAEEQQSLQTLETSRKFLDKELTALNNHIRAYLYEYGITMNKGQKSMRETIPIVLDALDTRLPSCLKNTLTLLWERYQLTVVQLKETEKYRAMLVKQLEPCKRLMALEGIGEVCAAMLYASMGDGREFKNGRQASVYIGLTPKQHSSGGKTYMTGIDKKGGDKALRAALYQGALSVISRLPSEPRTVKEAWLLKLIERVGVKRACIALANKTVRTAWALLATGKSYEPVLLSR

SEQ ID NO: 231558 - protein, 370 aa, unidentified
MYDDPSHGMMEDNMCATHNDDLKYVGLDVSLDMTSVCVVNSVGDILWRGKCASTPEAIVDTLQAHAKGAVRVGLETGQLSNWLTLSLRRRHVPVICLDARHAKAALSLQLNKTDDNDAVGLAHVVRTGWYREVAVKSMDSHALKILLVARAQLVAQRQTMANTIRGILKTYGLRIVRCSGGLFAPRVRDAIGENDVLMAVIEPLLIAWQALREQVAVLDTRVNARAKSDATVQRLMSVPGVGVIVALAFSATIDDPDRFKRSSSVGAYVGLTPRRYQSGEEDRVGRISRCGDALLRSYLFEAANVLLSRHPRECALKTWGLMMAKRIGMRRAKVAVARKIAVLLHTLWRNGDVFNWGNKADRAGALPAVA

SEQ ID NO: 231559 - protein, 437 aa, unidentified
MRTSPNEYVLAFDFSLDTLDAALMAPNGDWIIPHRAYDNNLPGFQKLKQDLLHHLSNLDEVRLTAAGESTALFWWHAFYQIGIDPDFASYDPSLALLNPLYVKNFRRAQPEEDKIDSKDARLVGTYYRTMGVKHYHTFDSRYLPLRQLSRAYFRLTHTLAAEKSCALNLIYLLASDYRRLKPFSDHFGVTSAHVLTEFSDITAIADIPIDSLADELDVLACGHLKDPQESARKLHQVAQNSYPLPDFLAPTVLTVFRMTLDHIRFLERLQKDYKRLIETELDQLPDADLALAESGLGPILVAGCLSEIQDTRRFCTGRKFDCQTKRWRDRVYRDGQAGVARLAGLWWPRNSSGRFEGDDRHLARERNPYLRYWFVQAAHSLKRNREDFAAYYQRKYNEVKKHQHKRALILTARKAVRLIFALLYKGQMARLEEESAS

SEQ ID NO: 231560 - protein, 331 aa, unidentified
MKSADITPSAYLGIDVAKEKVDCMLLVDSHSGYQVFANTPAGFEHLSDWLRREQVSCVHACLEATGCYSDALALYLVEQGHTVSVLNPAVLVTYRQSRNTRSKTDKLDAMLLAHYARERQPRAWHPLPAEVVALRSLLAYRSDIQQTLLQARNRQRSGGLESWVADRLQTQIEQLVKEFKLVEERIWKHLETSTNLSATWFHLQTICGIGQLAAAHIIAQIGEIERFAHPGALVSLAGLAVKQRESGRSLRGRAQMDRHGRGSLRQLLYMCALVAMRWDPHMRAWAQRLKARGKPTKVVLVAVMRKLLHIIYGVWKHASDYDAQLAFPTAA

SEQ ID NO: 231561 - protein, 393 aa, unidentified
MEYIAFDAHKHYTLASVARPDGQLVREQRLPHERGALQQFLARCEPGSPVAVETIGNWYWIVDEIEAAGCVPKLVHARKAKLMMGEINKTDRLDVRGLNRLQRNGTLPTVWIPPGELRDQRDLPRTRMVLVRQRTQLKNRLHATLAKYALHDFTVSDIFGVRGRELLRQRLELLPPHTAYASQHLLRQVEELGGQIRQFEQRIQATFKPTPAIQHLMTVPGVGLTLAVVIALEVGDVARFATAEKLASYAGTTPRVHASGGKTRFGRSRPDVNRYLKWAFVEAANAICVTRRRSACRHVSRLYERIARRKGHPKAIGALARHLAEATFWILSKQEPYREPKISTVSSTGDKREIPPELPEARPLIATSPEITIMPLMTAKIWLRRNGLMIRTR

SEQ ID NO: 231562 - protein, 350 aa, unidentified
MDNGTRWVGIDLHRRRSQIAVIDEDGELTLSRRIVNDRAAFLELLGDAEGTHVALEATYGWEWLAELLEEAGYDLHLAHPLRTRAIAAARVKTDAIDAKTLAQLLRAGFLPEAYVAPREVRDLRELLRHRATLTRMRSAVKNRVHAILAKHGIAREHSDLFGNGGREFLAKLQLRDAPRRRLDSLIALICDFDREIEQTTQEIEQRARADDRVDVLTQIRGVGRYTALLIIAEIGDITRFPTARHLCSWAGLTPTVRSSDGKARLGHITRQGSPALRWALVEAAQKITTGSGPLREKFERIAKRRGRKIAKVAVAREILTLAYYGLRDGEIRCLARRSRASAKEKLAAAA

SEQ ID NO: 231563 - protein, 332 aa, unidentified
MKKNLIIMGIDVSKATLDCFIHGTDGKHFIVENNSKGFVTFLETVLKLKKCKKEDLLICFENTGKYSKMLSVFLHTQEIPFVMVPALEIKKSLGITRGKNDKVDARRIALYAHEKRDKLVQTVLPGEKIERIKSLLPLREKLIKHRTAYKNGLSDLNDCYQEGETIFLRDVQQRMIAILNEEIEAVENEIETIIKQDPLMNKNFELILSVRGIGKVVGYYLIAFTANFTSFIDARSFACYCGIAPFANSSGVITGRSRVHPFANKQLKSLLNMAAMSAIQLKGEYQTYYRKRVEAGKNKMSTINIIRNKLLFRAFAVIKRGSPYVDLFKFVA

SEQ ID NO: 231564 - protein, 370 aa, unidentified
MQEPITSYVGLDIHKDSVAIAIAPAGRGAPQFIGTTVTNLAHVCKVLTRQKCRPNSTLVVYEAGPCGYGWARHLQAHDWHCEVISPAHVVRTVAGRAIKTDRRDALLLARESRAGNLTPIALPDERDEAIRDLSRAREDAIAARLRARQQLKSMMLRHGRSYHSNTWTLAHERQLATVRFDHPAQQIAFDEYRQSVREAHERCERLAQELREQCTGWRMRPVVEALMCLRGFDFIAAITIIAELGDLTRFAHPRALMSYLGLVPSEHSSGNTRHQGEITRMGNRHARRILVESAWTYRFAAHVGREQQIRQQGQSKTVRDIAWKAQLRLTHRYRKLNLGRKMKANKVCVAIARELCGFIWDLARHVPIHP

SEQ ID NO: 231565 - protein, 347 aa, unidentified
MIIIGCDFHTRSQQIAMLDTETGEVVEKKLEHENEEAKEFYEGLKEPVLVGIESTGYTHWFAQMLAELGHELMVGEAGKIRASETRKQKHDRRDAWHIMELMGQGKFPRIWLPSTEERDVRVLIEHRHQLVEIRTRAKNGLQAIALNYGMRRRGRLWSKRGQEELKKIPLREGMGRRREDLLRLLQQLDGRVKALDQRIEQEVARREDAQRLMTHPGVGPLTALETVLVLGPVERFPNALHVTSYVGLIPQEDSSGGRQRFGHLTKQGNRLLRFLLVEAAQTASRFDPGLRRTYRRLAFRKGAALAKVAIARKLSIRLYIMLRDKIDYAEFCRRGSHAGMLGDVALV

SEQ ID NO: 231566 - protein, 405 aa, unidentified
MFDTEDVGVFLGLDVGKTAHHGHGLTPAGKKVLDKQLPNSEPRLRAVFDKLAAKFGTVLVIVDQPASIGALPLTVARDAGCKVAYLPGLAMRRIADLYPGEAKTDAKDAAVIADAARTMAHTLRSLELTDEITAELSVLVGFDQDLAAEATRTSNRIRGLLTQFHPSLERVLGPRLDHQAVTWLLERYGSPAALRKAGRRRLVELVRPKAPRMAQRLIDDIFDALDEQTVVVPGTGTLDIVVPSLASSLAAVHEQRRALEAQINALLEAHPLSPVLTSMPGVGVRTAAVLLVTVGDGTSFPTAAHLASYAGLAPTTKSSGTSIHGEHAPRGGNRQLKRAMFLSAFACMNADPASRTYYDRQRARGKTHTQALLRLARQRISVLFAMLRDGTFYESRMPAGVELAA

SEQ ID NO: 231567 - protein, 404 aa, unidentified
MNSMAVGVDIEKSVFQVHYIDQATGEIVNKQIKRAKFLEHFANRAPCLIGMEACGGAHHWARQLTKMGHQVRLMPAEFVKAFNIRNKNDAADARAIWLAVQQPSKAVAVKTEMQQAMLALHRMREQLVKFRTMQINALRGLLTEYGEVMGKGRIALDKAIPEVLARVAERLPAALVETLREQWSGLTKLDEQIAGIERRMRDWVKEDKAVKAISEIPGVGLLTATATVAMMGDAKTFRSGREFAAWAGLVPKQTGSGGKVNLHGISKRGDTYLRTLLIHGARSVVTRAKDPGPWVEQMTKRRPLNVVVVALANKMARMIWAVLAHDRPYQKDYISVKQDYPFQEGPSRLFVSTILRAHSSTGNSRGGKCCSASAKDTQRNSWCSGRPSSGLIGKATSPRAETAR

SEQ ID NO: 231568 - protein, 338 aa, unidentified
MKLYGGIDLHSNNSMIALLDEQDQVVYRRRLPNDLATILGELAPYQGAIEGVVVESTYHWYWLVDGLMAAGYRVHLANTAAIVQYAGLKYTDDDSDARWLAKLLRLKLLPEGYIYPKAERAVRDLLRKRGQLVRQRTSNLLAVQNLLARNRGESLSANAVKRLSSETVDQLLPEPYLALTVNSNLGVINALDEQITVLEKTIKAHIKPSATFQFLLSVSGIGDILGLTILLETGEIRRFASVGQYASYCRCVGSERISNGKRKGRGNRKNGNRYLAWAYVEAAHFAVRYNAQIKRYYQRKCSRSNTVVAIKTVAHKLARACYYILRDQVPFDVNKALA

SEQ ID NO: 231569 - protein, 343 aa, unidentified
MQAVTTVGLDIAKSVFQVHCVDMQGNVIIRRQLKRRQVLAFFRKLPSCLVGVEACASSHHWSRELQELGHTVRLMPPAYVKPYVKRQKNDATDAEAICEAVTRPNMRFVATKTADQQSCLMLHRTRHLFIRQQTAVINAIRAHLAELGIVAPVGRKGVEELLRVVADGSDSRLPEIARACLAALGAQLRTLKVQILEFDRRIMAWHRSNAASRRLDAIPGVGPALATALVASVADPKAFRSGRDFSAWIGLVPKQHSSGGKDKLGGISKQGDRYLRSLFTVGALAVIRYAKIHGTGRRPWLAALLARRPTKVAAIALANKMARMAWAMMAKAEHYTDPAALAA

SEQ ID NO: 231570 - protein, 399 aa, unidentified
MRKVAGIDVHKDFLEVAYRLPSGRIETKQVEYTLEGISRLIRLLRRHGITDVYMESTGDYYLPLYYALKGAGIRPHVMNAYKIRRPEPNKTDKKDAIWLLEIGESELFSDSYVPDEDIQALRFLIRKRMKLVDRISDIKREINSILWRLGLQAAHYAKKLRSKKKRMLLLALLEGRLRPDSISDSDVRHLYDILSRPEFRAYVFVLRSRLADLAHLESQLEEFDREIVALARKFEDAIRILMSVPGISFILAVGILAEIGDISRFPSPAHLASYAGLVPTARNSGGKRRSGRPSKKSNKYLRRYMFLAGMAAVRSNSRVVREFFMRLLGRGKHYKVAVVAVARKLLCVIWYLLRRGEFWCEDGYFKRPRRLPRGRRVRISVREAIAILVRAGYEVRRKV

SEQ ID NO: 231571 - protein, 391 aa, unidentified
MVCVGIDVAKDKHDCCILDSDGMVRADCFTIPNNMDGFKQLLQTIRNCTKKSDKIKVGLEATGHYSYNILGFLLDNGLPTYVINPLHTNLYRKSLSLRKTKTDRVDARTIATMLLSDVDLKSYTDTAYHNEELKSLTRYRFDKVRERAKLKQSVSRLVTILFPELEKLVPSLHIASVYALLSEYPGAKQISEIHLTKLTNLLATASKGRYGKDKAIQIRDAARTSIGSVMPAKFLELKHTIKLIRELTSEIDEIEVSIQKIMDELNPPILSIPGVGIQSAAMILAEIGDFSNFESPDKILAYAGCSPSTYQSGKLTNCYAHMEKRGSRYLRYALYNATKYVCHWNSVFAEYLAKKRAEGKHYNVALSHATKKLVRLIYALQKSGKAYLVAA

SEQ ID NO: 231572 - protein, 320 aa, unidentified
MSASSAVVGIDVAKAHVDVSVLGAQLNAQRFDNQAGAHSALTAALKLLDVALVVMEATGGYETELACALQAAGLAVAVVNPRQARDFAKSMGRLAKTDAVDARMLAEFAAVLLRREDLARFLRPLADPQQQWLAALVTRRRQLLAMMLSERQRLQITPKGLHPSIEAIVAAIKAQLDEIEGQMVGHVREHFGELDRLLQSASGIGPVASATLIAELPELGRLNRREIAALVGIAPMANDSGSSKGRRRIQGGRFDVRRVLYMAALTASRRNPIVKAFYERLIAAGKLPKVALVACMRKLLTTLNAMVRTNKPWDNSLHGA

SEQ ID NO: 231573 - protein, 341 aa, unidentified
MRPEIPSSKYLDMQIYGIDLASEKFDVSFVDEDGRPRHMVVKNALTQIERFLDNLPADAHIVAEHTGVYGDLLLYLADIRGIAVSYVQAYAIKHSMGLVRGKSDPLDCARIREYGERYADRLILTHFPSESLYMLKELHSTRRLLVDMRKLALAGLHGDQKRPLHSNVAERAKAPAIEELSARIDEVEKEMFRIIDQDPALKKTSEIVRSIPGLGPVTTTELIIKTDNFTRVATAKKCATLAGISPWPNSTGKSDRGCHVSHMGDTELKSLLYMCARSASVYFEKMRIYKMKKLDVEKKHFFVVMNNIANRLLKIIYALVRKGEMFDPNFVTIDPRLEACN

SEQ ID NO: 231574 - protein, 341 aa, unidentified
MNTIYYIGLDIHKKTITYCIKRIDGFLVQQGTVLAERKALSKWLHELPGPWCGAMEATIFTGWVYDFLKPHAVDLKVAHPEMLKAITAAKKKNDRADAEKIADLLRVNLLPECHMLSEALRELRRMLRYRNMIVRTAVKMKNKISGLLMETGTAYNKKRLHGRKYFEALLERVEDVPESVKDLLKLSRSSLEMFEAVQKKLVKTLREDKLIHDRVKRLMTIRGVGEVMALTWVLEIGEPSRFTSARQAVSYCGLCSAQRESAGKEQRGPISKKRNKHLQTMLIETAKLAPHWNPELALLHEKELARGNRNRATLAVARKLVEYMLAVERQGKDFQSPKLAA

SEQ ID NO: 231575 - protein, 339 aa, unidentified
MARTSLWIGIDAGADEMSMCATDDRGAVMFEHCCVTKAKAVHELLKREKRRIELIGLESGSSGTGLTRALRKLGYPVAVFEVRQASKFLSIRRNKTDKNDAKGLADLARLARESVSEVRVKSPECQRMRSTLIMRQKLVQLRVTMEGALRSLISLNGGKLKSSSSARSFEKNVRSEIDRLRKVEKVDLREDTAPLIALSVATRGYVEMLDNRLRREADANAVCRRFMDIPGVGPLTALSLVSAIEDPHRFRRSADVGAYFGLVPTVRESGQLRTKRRISKAGDKLTRTLLATAAQQHMRWADTAISTWAKGLSSRLQKKGVQTAVARKLAVTMVGNVEG

SEQ ID NO: 231576 - protein, 425 aa, unidentified
MKKTPHTQDIVLWVGADWADEKHCFFARKPDGSPGQLHWLEAKPKKLDEFFLKLHHEYPGGKIGVVLEKTRGPLVYNLLKHPFVRLYPINPRCLSDFRGTLKASGAKSDPLDCELACELGYKHGERLRPFEVGDGLTRQLMLLTEQRRDLVDHQTAFSNQLTAALKSYYPLAVELFSDNICGTLCQDFLRRWPTLADVKKAKPQVLRSFFYAHRCRSEERIVQRLEAVAQASALTEDPALISVMQLQALSLCGCLQGVQKAIEAYEKRIAEVFATHAKASVFASFPAAGPAMAPRLAAAFGTLEDNFPTPSHLQCLSGVAPVQKQSGKTKVVLFRWARPIFLHQTFVEYARLSVQKSAWANLLAEQLKEKGWSAFRIYRFLAFKWIRIMWRCWKDGTTYDEIRYLKALQKRGVARYQSLYVNEAK

SEQ ID NO: 231577 - protein, 344 aa, unidentified
MITIGIDPHKASLTAVACDAAGHQLGHLRLAVSPASTRELRQWAVRWPQRQWAVEGATGLGRGIAQKLTTVGEDVIDVAPKLAAQARLLGTGNARKTDRIDAAAVAAVARHRTDLPRVQLEDQITELRLLTERRDDVVRERTRCLNRLHGLLRDMRPGGAPTGLHAKAAAELLRKIRPVTSCDTRRKAIARDLLSDLRRHDNTLTSVDVEISELVRASGSSLTDIHGVGVITAAKILALTGDIDRFASQDHFASYCGTAPIEASSGDIQRHRLSRRGNRQLNAAIHVIAVCQVRDAGPGQDHYRRKIASAKTSAEARRSLKRRLSNVIYRRIRADQQRALSLTI

SEQ ID NO: 231578 - protein, 370 aa, unidentified
MKETITSFIGLDVHKDSIAIAVAQAGRQTPRFIGTVVPQMNSLRKALRGIASAPHTLVVYEAGPCGYGLARHLNAHGYTCEVVAPAHIVRSPMEQRIKTDRRDALLLARESRAGNLVPVVVPDERDEAIRDLSRTREDVLAARLRARQQMKALLLRHGHAYQGKSSWTAAHERTLSTIRLAYPAQEVAFVEYRAAIKDAHERLERITQALREHSSQWRLNPLVQALMCLRGVDFIAALTIVAEIGDPRRFAHPRALMSYLGLVPSEHSSGRSRHQGNITKTGNKHARRILVEAAWSYRYSARISRVLEVRQQGLPETVRDISWRAQLRLTKRFRHLAMGRRLPQNKVCVAIARELAGFIWDIARQVKPLT

SEQ ID NO: 231579 - protein, 312 aa, unidentified
MLSLRRRLVSVIYFTSPANDRSAVENISRWLRLQHCGPEDVHVVMEATGVYHERLATALHDAGFYLSLANPHRSREFARGMGIMTKTDKVDAYMLACYALLKKPHRWEPPAADIRHLSALLRRRDVILADAVREENRLENTPADVISSCIRMAQLLREEVKNIERQIKAHIKASPDLKRDYALLTSIKSVGPQLGMHMLVVLRSHHFESADQAAAFLGVVPVGKRSGTSVRGRPRMSKIGPPQLRAKLYMSALCGKIHNKRMRNIYEEMCLRGKPKMVAIGALMRKMVHWCYGVLKTGTAFCDGGPRAALNS

SEQ ID NO: 231580 - protein, 392 aa, unidentified
MIYVGIDVAKDKHDCFITNSNGEVLFKSFTIPNNRAGFETLFQRIEAVSDDLTKVKVGLEATGHYSYNLLGFLLDKGLTTFVFNPLHTNLYRKSLSLRKTKTDKVDSRTIATMMMSDMNLKSYSDTSYHNEELKSLTRYRFDKVKERAKLKSSVSRLVCILFPELEKLVPTLHMASVYALLFEFPGADAVANAHLTRLSNLLSESSKGRYGKETAVMFRDTARHSIGSHMPAKSPELKHTIKLIQELTIEIDEIEAAIKRIMDEEIQSPILTIPGISYRMGAMIIAEIGDFSRFDSADQILAYAGMSPSTYQSGQLDNCYSHMEKRGSRYLRYALYHATKYVCHWDKSFGAYLEKKRSEGKHYNVAISHATKKLVRLIFAIEKSGKAYLPAT

SEQ ID NO: 231581 - protein, 372 aa, unidentified
MQSTTKFIGLDVSKEKISVAVADAGGESPRYYGSISHTAAALRKLIKELGPAETLSFCYEAGPTGYETYRWISSMGAHCVVIAPSLIPKRPGDQVKTDRRDAEQLARLFRAGELTPVYVPEREDEALRELVRAREAAKEDTHRARQRILKFLLRHQIEPPATIKRRWTKKYRAWLGQLTFPYEPMQVAFDEMLHALNESEQRMGRLEKALVQQAVVGPKADLIQVLQSLRGIGLLTAITLASEIGSFARFRSPAQLMAYLGVVPREYSTGQSTWRGSMTKTGNGRLRRALVESAWSYRHRPAVKGDLAKRLDGMPAEIQLLSWKAQERLHHKYRHLVFRKNKHKNVAIGAVARELTGFIWAVARTVKQPGAN

SEQ ID NO: 231582 - protein, 417 aa, unidentified
MKVVYPICCGVDVHKKFLVATIITSEGITPHYQKKRFSTFNNSILAFKQWLIDSKCFHVCMESTGKYWVPIYNLLEDRISVTVANPKWVKAVKGNKDDTKDSKWIGDLFRLGLVPGSFIPEKPFRILREYTRYRYKLVSCRSSEKNRFQNVFTVCNVALDSVVSDMFGKSASSITNYILTSDSFNPSVCTSFLQRSLKNKADEVVESIDGFMMEPAQKARALMVRDHLKYLDQKIAELDQMIDALVAPYENSIALLCTIPGVDRRSAITIISEIGMDMSQFASSKRICSWAGLTPGNNESAGKKKSVRISRAGVYLKPALVQVAHAAVKSNESPYYRVKYERISKRRGKKRAIIAIARMILTAVYSMISTGEVFNPCDLYRIDMPQALQDTRKEKAIRQAKQFLLAQGILDLQQIPA

SEQ ID NO: 231583 - protein, 369 aa, unidentified
MTNKLRYIGLDVHKDTIVIAVAEQGTASAKFFKTIPYDLARLVKEIRRLAGAGYVVVCYEAGPTGFGVQRALEKAGFDCRVVAPSLIPVQSGNRVKTDRRDASQLGQVLWINRQRLLEGKAVHGLRRVVPSTPEQEENRQLTALRQRIGQLRTRTLNKIQHVLLKHNLQQDCPTKGLQTQTARRWLAKLPLAEIDRLEMDLLLKQWELWESQLKDLEEKIESRQRLDETAAIVASMPGAGAYCSLALSSRIGSIERFPRPGSLANYWGITPGCRNSGDAKERLGSITKQGSVMARFILGQMVLHVLRKDSHMKSWYQRIKKRRGAKIARVAVMRRLACILWHMVKYKQPYVLGGSVHVKKVKETREAIA

SEQ ID NO: 231584 - protein, 343 aa, unidentified
MQTIKTIGLDIAKSVFQVHGVDADGGVVVRRQLKRRYVLAFFEKLAPCLIGMEACASAHHWSRQLQALGHTVRLMPPAYVKPYVKRHKNDATDAEAICEAVSRANMRFVPTKTADQQGGLVLHRARHLLVRQQTSVINAIRAHLAEFGVVAPVGRRGVEELLRIVGDASDQRLPEVARACLAALGGQLRMLKAQILRFDRMIIAWHRGDETSKRLDELPGVGPALATALVASVADPRAFRSGRDFSAWIGLVPKQSSSGGKQKLGSISKQGDRYLRGLFTAGALAVIRYAKIHGTGHRPWLAALLARRPTKVAAIALANKIARMAWAMMARGERYREPVALAA

SEQ ID NO: 231585 - protein, 347 aa, unidentified
MKFYTNMHKFYCGIDLHARSMYLCILDQEGNTLVHRNMPTNDDRFLKAIAPYREDVVVAVECIFTWYWLADLCHREGITFVLGHALYMKAIHGGKAKNDKIDADKIARLLRSNMLPQAYVYPATMRATRDLLRRRNHLVNKRAELLAHIQNTNSQYNLPAFGKNIARQSNREGLSERFIDPCVQQSIKLDMALIDTYDQRLTELELYIVRTAKGHDANTFYRLRSVPGIGKILALVILYEIQDIGRFEQVGHFLSYGRLVKCARESAGKRYGSLGAKIGNVHLRWAFGEAACLFLRNNPEGQTLHQRLVKKHGKAKALSILAQKLGRAVYFMLKRQQAFDMNKIIQR

SEQ ID NO: 231586 - protein, 338 aa, unidentified
MKITTIGLDIAKSVFHFYAVNKMGRFVKKKQLKRKQVLSTMANIEPCLIAMEACGGANYWAREFIALGHQVKLIAPQYVKPYVKGNKNDYNDAEAITEAAQRPNMRFVPIKSVEQQDIQNFHRQRELIKKERNALVNQVRGLLAEYGLVIHKGVAAVRRDLPAILEDAGNGLTVLARECFAELLEALWALDQRFKKCDQRINSLNQNNEVCQRLDEILGIGSLTASATYASVGDGKDFVNGRHFSAWLGLVPRQHSSGGKTVLLGISKRGNAYLRTLYIHGARAVLRHSVNKTDRFSLWAQAVLVRRGHNKACVAVANKMARMAWVIMAKGETYRVAI

SEQ ID NO: 231587 - protein, 357 aa, unidentified
MKEYIAFDSHKHYTLMERENRETGRAVQLRVTHQPGAILSCLRNCEAGSEVAVEATGNWYWIVSEIEQAGLKPQLVHPRKAKLMMGLINKTDKLDVHGLNRLQRNGTLPTVWIPSAELRDQRELTRTRLVLVAQRTRLKNRLHATLAKYGLVVQGYSDAFGTLARSQWPELLGRLPEQTQWVSQQLLEQLDGLEQQIKQCEKRLADLLKVTPEMQRLQSLPGVGLILGASIALEIGTVSRFGSAERLASYAGTTPRVHSSGDKLRFGRLRPDINRYLRWAFVEAANVVALHHLRRPERHVSQLYCRLKQRKGHAKAIGAVARHLAEASFHILSRREEYVDPALPKGRSKAGVSASPS

SEQ ID NO: 231588 - protein, 346 aa, unidentified
MKIKIIGIDLAKSVYQIHGVDEHGKVSVRKQLKRAELSSYFANLEPCLIGMEACGSAHHWARKFEGYGHTVKLIAPQFVKAYVKTNKNDMADAEAICEAVSRPNMRFVAMKTMEQQAILSVHRARQGFVRARTAQANQIRGLLSEFGIVIPQGIGAIAKRIPEILEDGENGLPGAMRNLIDRLTVNLKEMDRQARELEAQIQQWHREHAASRKLAEIPGLGPITASAIVATVGDAREFKNGRQLAAWMGLVPKQHSSGGKQNLLGISKRGDTYLRTLMIHGARAVIRFAERKAEPESWLRKLMGRRNKNVAAVALANKNARIVWALLAHDRTFRPDYTPAAVVAGT

SEQ ID NO: 231589 - protein, 344 aa, unidentified
MEYFAGLDVSLRSCALCIVDGRGKVVLEREMPCEVDDIAACLAGVPHPIERVGFEAGTMSQHLFYGLTAAGFDVVCMEARQVNAALSAMRNKTDRNDARGIAQVLRTGWFSPVHMKSREAHGVRALLSTRKALLKKTMDLANEVRGLLKIFGIRLPKTVKHGSFDGIVRPLIEMDEVLAHALVPLLDARVVLYQHFLELDRRVKRAATQDEVCMRMMTVPGVGPIAALTFKSAIDDPARFRRSRTVAAHFGLTPRRYQSGEHDNPGRISKAGDRDVRATLYAAANALLMRTMAGSQIKSWGMRLIRTKGRRRAVVAVARKLAVLLHRMWVDGTEFRQDQVGGTA

SEQ ID NO: 231590 - protein, 496 aa, unidentified
MKVMYERVAGIDVHKDMIKVGVRSPGDKAWTRKTEILEYRTFYGVLQLMAADLRKRAVTHVVMEASGVYTEPVYYALCEQDFERVEVINPAHAKALKGHKTDAKDCARLAELYECGLLRGSYIPAAELKELRDLTRYRVKTVQARTSEIQRLGKALESGGIKIGSVVSDITGKSATAMIEALIDGERRGTVLADLAIGRMRTAGKLADLSMALAGRFTGHHAMLCRLHLDRLAVFDTAVSGLDERITARAVPWRREQDLLMSVPGFGDIVSQVWLAEIGPAPHQWFSTHEKLASWVTLSPGNNISAGKRRHGRTGDAGTYIKPMLVQAAWSAIRTPGRLQARYGRLVRRFGGAKNPAAKKKAIIAIAHTLLKIAYQVLKSGMPYQDLGADFYTQRESPQQRQAYLLRQLEKQPRLHHHHQPPGGRLNTRRLTRSSCPRHPGGNRRPGTPALPPDNLTPPQTLATTQARVRCRAPAEDPFFVSVGPIFRLCRGFCDG

SEQ ID NO: 231591 - protein, 402 aa, unidentified
MKTSKQYLRFCGIDMAKQKHVACIIEKDGRYLLRPISIRNDAHGFETILNCLKQTGRIKSVLTGMEATGHYWYSLHDFLTRQGYTVAVLNPIQTAQQAKQAIRKCKTDRYDAFHIASLLRTGQYRAAVVPDELAMTCRQITRLRYRIVKQAAMIKQLLNSRLHPAWPEYETLFSSKFGKTSMELLKKAPTPKELMELDPDELSELIHRASKGRFGPAQTQKILQSARNSVGMQRGHYGISTGIKFLIEQIVALEPVRKKMDAEILKLSAKLPQYLFTLPGATELTIVSLYGEVSPIEAFEKPSQLVAFAGLDPKVFQSGQYDAPRRCISKRGSPYLRRSLWQMAYRALITEGDLRDFWRRKHRQNKHHLVATTAVANKLCHVVWRIMTDRRDYIRKGYNPKS

SEQ ID NO: 231592 - protein, 356 aa, unidentified
MPTQVPGGRVIVGVDTHKHLHAAAVLDERGALLATATFDANTSGYRALIDWAGTFGTASSFGIEGTGSYGRGLAAAVRRSGSDVLEVMRPNRQDRHRRGKSDLLDAENAARAVLAGHTEAIPKTDDGTVEMIRHIKVAKNAAVKARTTAMQSLKAVLITAPAELRETLQPLPNMALLRRCASLRPGPTTSVTAAAKYSLRAIAQRWLALNDEVTEHEKLLGTLIEQIAPQLTAAVGIGPDNASELLMALGDNAERIRSEAALAKLCGTCPIPASSGKTRRYRLNRGGHRRANAALHRIVVVRMKYHEPTRAYVARRITEGKTKPEIMRCLKRHLIREIWTLTKHLRQQPTTHQTAA

SEQ ID NO: 231593 - protein, 352 aa, unidentified
MTYYKRIHQFYIGIDLHARSMYICVINNRGETVFHKNMECSTDNLEIVTKTFGTDIVIGVECIFTWYWVADFCAEHEIDFALGHAYYMKAIHGGKTKSDKIDSEKIANMLRGGMFPLAYAYPKKKRTTRDLLRRRLYFVRQRAELSVHLQLTNHQYNINEPLASSKMRSRVYRDTIPEKFSDPMTLKMVNADLYMFDAYHDIITKLESQIEDSMEVQDPVSYAIINSIPGLGFILSLTILYEIDDINRFPDEGKFISYCRLVKCSHESAGRKESGRHNKIGSVHLKWAFSEGAVLFLRNNESGQKWHDKLVQRYGKARAMSMIAQKLARTVYFLLKRKESFNAEQFYGLKKT

SEQ ID NO: 231594 - protein, 395 aa, unidentified
MFIVGIDIAKRSHEAIIIAEDGQVVRKAFSFRNNCTGYNLLLEQVRRLTLVKSQIVFAMESTAHYWLALYARLLKDGYAVMVLNPIQSHSLRELYIRKAKTDARDSLIIADLVRFGRCKASNVPQDKILALRELCRSRAYLVDMAADLKRKLIALLDRIFPEYESLFDSVFSKASIAVLSKYSTPQKVKNANLRKLTDILMESSNGHFGEWKAHQLKEAACSSFGIDDSDGVYSTLLGMFLEQILSLTAQADSLEKQISVFFQEFNNPLTSIPGVGTVLAATILSEIGDITRFSSADKLLAYAGLDPSVKQSGEFKSNQNRMSKRGSPYLRRAIWLASTVAVHRDPMFQTYYEKKISEGLHYMNVIGHVSRKMTAVIFAVLRDGQPYQPILQSAG

SEQ ID NO: 231595 - protein, 450 aa, unidentified
MQQTMSVIDNEKKQTQLYAAWIGLDWADKKHFWSLRTAEGKLQRGVLENTPEAIELWASELSKHFAGRPVALAIEQARGAVISMLSKYAHLVLFPVHSTTVANYRKTFAPSGAKSDSGDSDLILDLLIKHPERFECLRPDTAETRSLRFLTEERRKLVNLHTSELQYLIDWLKQVFPQILVWFDHLSSPLVEDLLLRWPTLPQLQKASPKTLLKFLLNHNCRSEERNQQRLAEFRQAVPASEDPALKSAGVLCIQNAVRLLAQMRAGIEAFDSRIAEVFASHPDRFIVESFPGAGPALEPRLLAAVGTQRDRFASANALACFTGIAPVTESSGNSRWIHWRWACPKFIRQTFHEWAGCSIRTCDWARAFYEKKRAEGKGHHAAVRALAFKWIRIFFRCWRDRVPYDEQRYLESVHARLPKTTPAATPAPTKPTIVWKTCGDFKKLGQISY

SEQ ID NO: 231596 - protein, 348 aa, unidentified
MLADELDYVIGVDTHRDEHVLAVLTAPTCAIVAGDAVKTTAGGYQKAVRFADRYAPARRAWAIEGTGSYGAGLARYLARRGERVLELSRTPRTERRLRGKDDVLDAARTARAALASETLALPRAGERREALRLLLIARRSAVDVRREGLTQLRAVIVTAPERLREQVRALPTGQLLDRCSRLRRSSSANADEFATRLVLRSLARRIQAATREADQLERELLGHVRALAPALLDEPGIGPVVAAQLIVSWSHHDRLRSEACFARLAGVAPIPASSGQTQRHRLSRGGDRQLNRALHTIALHRRHHDQQTKDYIAKRIAEGKTRRDATRLLKRYLARHLYRLLQQQPQMT

SEQ ID NO: 231597 - protein, 356 aa, unidentified
MEYGAIDLHKKESQVRIITADGAVIDRRILTTRDRLTAVFGGRARMPILIEASTESEWVAQHLESLGHEVIVADPNYGAMYARRSRRVKTDRRDAVALADACQHGNYRPAHRRSARQRIVQSMLNVRRELSDSRTRGISVARAITRAGGFRVRSGRAETFLERLAALELPASMTATLLPLRHVIDVLDDEIAIADDQFEKVAAEDPVTTRLMTVPHIGPITATAFVAALDDAARFDGAAQVTSYLGLVPREYSSGEHQHRGRLLRSAHPHVQSLLVQAAWRISRSSDAKTAGLRAWADAITHRRGKKVAMVALARRLARLLFAMWRDQTEYQAKRVPMIRRPAATIRDGAAAAAVV

SEQ ID NO: 231598 - protein, 320 aa, unidentified
MRNAVGLDISKLTFDASAMVGKTEHSAKFDNDSKGLDQFSDRLKSLGCQNLHICMEATGNYYEEVADYFAQYYSVYVVNPLKISKYAESRFKRTKTGKQDAKLIAQYCRSAQESELVKRQKPTDEQYRLSRMIAAYAQIKSECAAMKNRHHAAKDEEAAKAYAQIIKAMNEQLEVLKEKIKEQTEKPNCKEGVKRLETIPAIGRMTAAVLFHHLTSSKFETSNKFAAFAGLSPQQKESGTSVRGKGKLTKFGNRKLRAVLFMPAMVAYRIRAFPDFIKRLEEKKKPKKVIIAALMRKLAVIAYHVHKKGGDYDPSRYKSA

SEQ ID NO: 231599 - protein, 331 aa, unidentified
MKIKQTIGIDISKLTFDVRIHSNQYYQVFDNNLKGFKELIKWVEKNNSSSKEQTLFILEHTGIYSEQITLFFDEKKISFALISGLEIKKSLGISRGKDDKVDATKIALYGYRLRDEIKPYKLPSKSINQLKRLLTLRERLVKQRTGHISTLKEQKRIYTKKDNKLLLETQEKMIQYLTKQIKNLELEMNEIIKSNQQLKQQYKLIVSIKGIGNQTALFMIVTTNGFTRFKSWRKFASYCGIAPFPSTSGTSIRGRTKVSNLANKKLKSLFDLCAKSAIQNNPEMKIYYRRRIEQGKNKMSTINIIRCKLLARIFATVKRQTPYVDTLKYAA

SEQ ID NO: 231600 - protein, 427 aa, unidentified
MNYTQNDKIMSITEQTLVVGVDIAKKVHYARAFDYRGIELGKVFKFENTREGLKSFRDWMVALEKKEHKSSSVVGMEPTGHYWLNLGHFLKDQEIRLVLVNPFHVKRSKELDDNTPSKSDSKDPKTIAKLMIDGRYSEPYIPEGVYSELRTVMNLRDSISKSLIRIKNQVIRWLDQYFPEFMVVFKDWEGKAALMTLREFPTPDKIVSMGIDGVVTTWKRDISRGVGVKRATQLVKVAKGSIGIREGLRMAEKELSMLLGQYDLYKEQLAEIEHEMEKLALQIPGVQEMLTIKGVGITTAAGFMAEVGDVSRFSHPKQIQKLAGLNLVENSSGKHKGNTTISKRGRSRLRAVLFRAVMPLVSKNEEFKALHNHYTTRRENPLKKMQSLILLCCKLIRIFYALISKQVAYDSERVIRDLNFLQLQDAA

SEQ ID NO: 231601 - protein, 338 aa, unidentified
MKITTIGLDIAKLVFHAVAVNKAGKLVRKKMLKRKEVLGFFAKLEPCLVAIEACGGAHYWNREITALGHQVKLIPPQYVIPYRQGNKNDYNDALAIAEAAQRPNMRFVPAKSIEQQDVQMLHRVRERLTQQTTALVNQVRGMLAEYGIVLAKGKTAFRSQLPDILEDGENALTAKGRAIFHGLYNEFVELVNRLKGCEKQVLQENADNPICQRLGTVLGVGPVTATAFYAAVGEGKAFHNGRHFSAWCGLVPRQHSSGGKDNLLGISKRGNAYLRTLFIHGARSILRHCEHKTDKLSLWAKALVERRGFNRACVAVANKLARIAWVIAAKEETYRPAT

SEQ ID NO: 231602 - protein, 312 aa, unidentified
MYYIGIDVSKKDLSVFDGKKDLKFINKEGLKSFKKYLKKKVNFSDLVIIFEPTGIYSFYLKEFCAENSIKAYIVNPKKSHNFTRALGKRSKTDKIDARILYQFHKLIEAKDIQVPKVDQQAKALASYLTSYEFALKQRISLSNHLESLRDKSLIALIKKDLKRAKKLEDKIFNDILEYVSKNQNLKEDYQRLLTISGVGDKAAIALLTLFKTYQGTNRAQITALFGLDPTRRESGTSVKGKVKISKNGKGIYRKILFLPTVCATVHNQKIRVFYQRLLAHHKTKKLAVIASMRKILLIAHAMYRDKTEYIAV

SEQ ID NO: 231603 - protein, 352 aa, unidentified
MERYIGLDVHLQSCTLVVMGPSGRRLSSTVIETNGKQLIGAVKQVPGEKHLCLEEGTQSAWVYELLEPEVEDLVVVMPPKRQGTKSDSLDAWDLANQLRIGAAQRRVYKHQGPFRGLRQAVHWHLMVTSDVVRAKNRLKAVYRSRGLHKAGDELYRAETREAWVEKLPVAHQTVARALGKELDGLEELREEAEKWLRAEGHRHPDTRLVATAPGIGPIRAAQIVATVVTPHRFRTKRQFWSYCGLAVTTHASAEYCRAGPGILKRQRQPRTVGLNTNRQPLLKSVFKGAAHQIVTQMATHPLAQQYCRAVEGGADPAVAKVTVARRVAAAVLSMWKHGEVYDPAKHQLKPNA

SEQ ID NO: 231604 - protein, 333 aa, unidentified
MQSLLWSEARRVFTLNFWVAANTMGIDMSKDSFHAAFDEFSVRQFHNTEEGIDSFLAILAEQRMRSDETTLGVEATGVYHLLLCERLRIAGWDIRVINPLLTHRLARSSRRKLKTDHADALLIRKALVAGLGYPHTDTPQIQTLKAILAQREALVRMRAMLKQQRSAYTVRVQVAGVTPHNGFQEILMVLKTQLQTLEREMANHAPATQRLPRTIPGIGAISAAALVAVVGDMRRFANPEKLTAYTGLDCRRHQSGTSIHGKGYITKRGNAYLRYILFNAAFIARQHDAELKAYFEKKVSEGKHYCSAVCAVERKLVHRIYAVWRRGRPYETR

SEQ ID NO: 231605 - protein, 349 aa, unidentified
MITLGIDAHKRTHTVVAVDEVGRQLGSKTTLATTSEDHLTLVRWADRFGCERNWAVEDCRHLSRRLEADLLSAGERIVRVPPKLMAQTRDSARTYGKSDPIDALAVARAALRHPDLPAAQLDGPARALRLLVARREHLVAERTRAVNRLRWHLHELDPAWDPAPRSLTSYANIEAVTIRLATMDGLVAEIASDLAHDIRSLTERERALHKRIAERTAVLAPHLLALVGVSSLTAAKILGEVADVRRFKDRNAFARHNGTAPLPVWSSNKERHRLSRTGNRQLNAAIHRIALTQARCHEEAIAFLKRRTEMGNTHSEARRALKRRLSDVVYRNLLLDAEPIRSAVLEQAA

SEQ ID NO: 231606 - protein, 340 aa, unidentified
MNEITTIGLDLAKHVFQVHGVDASGVTVVRKRLRRSEVLAFFTRLPRCLIGLEACATAHYWARELQAIGHEVRLMPAQYVKAYVKRNKNDAADAEAICEAVQRPTMRFVPVKTAEQQAALLLHRGRERLVRQRTALVNALRAHLAEYGVIAPLGLRNVARLIAIVRDEIDTRLPAPARQVLEVLATQVEQLEAAVAALEKQLIAWHKANPVSQRLATIPGIGPIIATAVAATVVEASGFRSGREFAAWLGLVPRQHSTGGKARLGGISKRGNRYLRRLLINGASANLLCSKATNADPWVIGLRRRRPSLVVAVALANKTARIAWAVMHRQENYQRMAAAA

SEQ ID NO: 231607 - protein, 354 aa, unidentified
MSRSVKYVALDVHQATTVASVREERGRVIARSVVPTEAAALLEFFRGMRGSIHVAVEEGTQAQWLHELLVPVVDRVVVCDRRGQAHRGNKGDQVDADQLSEELWRGGLRAVYHGNGRYATLKELTRTYQNLVEDSTRVMLRLKALFRARGIRTPGQRVYQPAGRAQWLAQLPEPGARFRAEALYAELDVLRALRPRAKTAMLAEARRDPAWGVLQTIAFFGPVRVALLLATMQTPWRFRTKRHLWAYAGLAVVSRSSADYQLVAGRPVRRRRAPLTRGLNPNHNRVLKDVFKGAATAATARPGPLQDYYLAMTARGMREDLARVTLARKLAAIALRLWKQGERYDPAMLTMQAR

SEQ ID NO: 231608 - protein, 341 aa, unidentified
MESISTIGLDIAKSVFQVHAISEAGEVVVRRQLKRRQVRQFFAGLRPCLIGMEACATAHHWARELTKLGHDVRLMPPRYVKPYVKRNKSDAADAEAICEAVTRPTMRFVPVKTVDQQSVLMLHRTRQLFIRQRTTLINSIRAHLAEFGIVAGVGRNGVEVLLGLIAKGDEDIAPAEARVCLLALAAQLELVKHQILEMDRRVLAWHRSSSLSRSLEAIPGVGPLISTALVASIPDPRVFRSGRDLSAWIGLVPKQNSSGGKEKLGGISKAGNHYLRQLLVVGALAVIRRAKQLGYTRHPWLVKLMERRSAKVAAVALANKMARIAWAMMARNEPYRASLPA

SEQ ID NO: 231609 - protein, 408 aa, unidentified
MEVVHERCAGLDVHQHNVVACARTVASGRIEQEVRTFDTTTKGLLELSDWLSERGCTHAAMESTGVYWKPVWYVLESSFELVLANAMHIKNVPGRKTDVNDAMWIADLLAHGLIRGSFVPPTPVQELRDLTRTRKQLVREVAQHTQRIQKTLEDANIKLTGIISDVLGKSGRAMLEALIAGETDPEKLVALTSRRLKATRAELVEALRGRIREHHRFLLKLHLGQVDALRTAVRAVEARVGETLQPFCDLAELLTTMPGVSDTVAHVILGEIGIDMSRFPSAAHLVSWAGLCPRSDESAGKRRSTRVRKGAPWLKTVLVQAAWAATRVKDSYLRAQFLRLKGRRGPMKAIIAVAASMLTAAYHMLRDGVAYQDLTASYFDTRDRTKLAKRLIRRLEDLGLTVEVRAAA

SEQ ID NO: 231610 - protein, 415 aa, unidentified
MNVMHRRCAGLDVHKESISACVLIATKGKRGSVQVERQTFGTLTGDLHALKQWLQHWRVTHLALESTGIYWRPVWNILEGGGYEMILVNPQHFRSVPGRKTDQKDCEWLAQLLQHGLLRSSFVPAQETRELRDLTRYRVKLMQERNRVQNRIEKVLQDANLKLSSVVCDVWGVTGRAILAAILQGEEDPERLAEYAKGRLRQKKAQLRMALCGRFTAHHKFLLRELMDDLNYLELKVARLEQVIEAHLWPHMEVVYRLCTIPGVYRHTASTLIAELGVDMAQFPDADHLASWAGLCPGACQSGGKRKSAKTRNGNPHVRRALCEAAWAATRSKRSYLRALFHRITARAGRKKALVAVARRLIIIAYHVIRGTHGYRELGPNYFDTLRPQRTALRLLQRLRDLGHEVILCPKTELQ

SEQ ID NO: 231611 - protein, 375 aa, unidentified
MTKSNILFIGMDVHKESIEIALADDGAHGEVRRYGRIGGTLDALKKTLRKLVSEDKTLHFCYEAGPCGYELYRYLTDQGHVCIVVAPSLIPKKPGNKVKTDKRDAVQLVRLFRAGELTAVYVPDREDEAMRDLSRAREDAMIIQKSARQRLKSFLLRHNIRYPGRANWSEKHLRWLADGVRLPTPAQQVVFQEYVNTVTEAACRMERLVAEIHHHVKTWRLYPVVQALMAMRGVRMIVAVTVIAELGDLTRFENPKQLMSYLGLTPCEYSSGERQRRGAITKTGNHHARRILIEAAWSYRFSPKVSPAIQKRQEHQPLLIRDIAWKAQLRLTRRYKTMTQRGKMRNVVVVAIARELAGFMWAIAQAVPISNTSST

SEQ ID NO: 231612 - protein, 347 aa, unidentified
MEFFAGLDVSVKETSVCIVDYSGKVVREKKLPTEPEALLAVLSDAAFRCKRIGLEAGPLSQWIYSALAEAELPIVCVETRSMKAVLKAQSQINKTDRNDARGIAQMMRVGLFRPVHVKTLRSQRLRMLLTHRKLLQAKAIDIENDLRGTLRNFGLKVGPISTPKFEERIRELIEGLPDVTSFVEPMLVARRVLREQFAVLDRRVLNLAREDGVCRRLMTVPGVGPVVALSYIATIDVPARFKKSRSVGALLGLTPSQNQSGETNRIGRISLCGDGMMRTLLFEAAMSLLTRVKKWSWLKAWAMNIAKRRGVNKAAVALARRLATVLHRMWSDGTEFRWTRDELQQAA

SEQ ID NO: 231613 - protein, 536 aa, unidentified
MADKKRNTQRKHIRSEGAYSLDEIRSLTMDDGTRVITSADGDIKRPVCAGIDVHKEILMAAVCKTDPKTLNAVFYVRQFKSTNSDIRTMGAWFQSHGVQDVCMESTGKYWIPVFNILEQCGQRPVLTHPKYVKQAKGQKTDFRDAVHIASMFRMDLVVASFIPPADIRDLRELCRYRLKLTYMRTSEKNRFQNSMTVSKVRLDCVFSDPFGKSASSIMEYLIMTEPEDVSDKQILSMVDRRVKASGEDILDSIHGYEFIGIQRDKLKVINLHLGQINECIRLIDEKLDYFRQKYSRIIRHLATMVGVTEESALYILGEIGTDMSVWRDDASLASWAGLSPANNASAGKKKSTRTGDGGHYLKPLLVQCALAAAKSTKKDPYFHYKYETLKKRRGHKKAIIAIARKMLVAIYHMIRDDADFLPVDHEEVLHSTKKQKGLNLDNVIAFLKEQGADDDTLRLVERQCGAQEMDAAEEMESVSSAEKKQSVSGSAATSQPIQESVNGSPVLISGSKQGRALNHHPKDSAVATATAQNELL

SEQ ID NO: 231614 - protein, 352 aa, unidentified
MGVDPHKQTHTAAAAKQTGEAVAEVTVKARLKAHQRLLSWARELYDQRVFALEDCRHVSGNLERFLIARGEKVVRVPPKLMAGARRSARTSGKSDGVDALAVAHAALREPDLPEAHLEGIERDIRQLLDHREDQVWERTRIQQRLRWHLHDIDPSLEIPERALDRYCWLDRVEAHLASLAVSTQVRIALELVEDCRRITRRVSSLERELSSLVERHFPRLLALPGCGALTAAKLVGEIAGIERFSSDAKLAMHAGVGPLEASSGQRQRHRLNRKGNRQLNTALHRIAVTQCRVHAPAKDFMAKKMREGKTKREALRCLKRHLVRSIFRILGGHKTRDLAANSTALDLRPVAA

SEQ ID NO: 231615 - protein, 349 aa, unidentified
MRTKPKPNATAYGIDIGKKVFHVVSLDADGRPLQRAKFSRETLMNFFEAADSALIGMEACAGSQWLARKLAAFGHDAKIIPAKFVKPYAKSNKSDTIDAEAIAEAVTRPTMRFVQVRSEAQVDLQALHRIRDRLIRNRTGLMNQARAFCIEYGLAMRTGAGGFHADIRRHLADSENDLTGTMRALLTDLLDDLAHIEKRVAELTKEIEAIAHSNETVRRLLTIPGIGALGATALVAAAGDGRQFRKARDMAAWLGLVPAEKSSGGKQTLLGISKRGNGYVRRLIIHGARSCFLHLHRETHALGRWLSALEERTHRNKAVVALANKLTRIAWAILTRPGENYLRTKGAAA

SEQ ID NO: 231616 - protein, 475 aa, unidentified
MGRDSGKQKKENMKALSPEQEAGLKQKAEEISKGLQSYTWRDLETGGKFTHNDKLTFIRDDMLIVGCDIGSERHYARAIDAKGRELSKGAYSFENSAEGFQSAKDWALCLAAQHGKNQIVLGVEPTGHYWFSLAAWMIAKGISVVQVNPYAVKQTKELADNSQAKNDAKDPKLIAELVKNGNYGVPYLPEDVYAELRVLCTLRDQLMEDRVRNMNRLHREMKIVFPEYREAFGKIDGIFTLSVLANAPLPSELVALGEDGVKDIWHAEKLRGGGYKRAKEIVRLAGVSAGLTQGAEARKIAIVSFVGKVMELGAELEEIEAQIALKCREIPRADSILEIHGLGAATVSGILAEMGDIDRFDAAKEIQKLSGLGLVACSSGKHQGQTKISHRGRKRLRYWLFQGALSVVSHNEAFRQIHAYYTTRAENPLKKMQSITVIACKLLRIIFTILKKGVRFDPDKMLSDITHPAPLDAAA

SEQ ID NO: 231617 - protein, 363 aa, unidentified
MEYIAFDAHKRYTLASVVRPDGEVVREERIEDDRGSLRGFLERCERGSPVAVETIGNWYWIVDEIEAAGCVPKLVHARKAKLMMGEINKTDKLDARGLNRLQRNGTLPTVWIPPGELRDQRDLPRTRMVLVRQRTQLKNRIHATLAKYALHDLEVSDFFGVRGRALLRQRFDLLPTHTAYASQQLLEQVEELDRQVRAFEQRIQATFKPTPAIQLLLTLPGVGLTLAVVIALEVGDIARFVTAEKLAAYAGTTPRVHASGGKTRFGPSRPDVNRYLKWAFVEAANAICIARGRVPHRHVSRLYERIARRKGHAKAIGAVARHLAEATFWILSKHESYREPKASAVSSTGDKRGWPLSSRKLDR

SEQ ID NO: 231618 - protein, 347 aa, unidentified
MSEQHHVGLDVSVKETAICIVDPHGKVVHRATVESHPEVIGRHLIDLGHSYARVGLEAGPLSPWLYAGLVEAGLPAICVETRHMHAALSARINKTDRNDAMGIAQMMRVGLFKPVHVKTPASQQRRLLLTSRKLLQRKAYDIESDLRGQLRNFGLKVGVVGAAGFEQRVRDLVLDLPFVAAVVLPLLEACTALRTQLAKLHKMLLDQVRTDPVCRRLMTAPGVGPVVALTYRTCVDNPARFGRSQCVGAHYGLTPRLYQSGETMRVGRVSKCGDTMMRAALYEAALVLLTGPRVRWSSLKVWGLAVAKRRGMQKALVAVARKLAIVLHRMWRDEKDFRWSTGAATAA

SEQ ID NO: 231619 - protein, 409 aa, unidentified
MERVIERGAALDVHKKSVTACVRVPGPEGGRRQEVQTFGTTAAALLALRDWLSAHGVTHVAMESTGVYWKPVYYVLEEVFTCLLVNAAHVSKVPGRKTDVRDCEWLAQLLEHGLLRGSFVPPVPIRELRDLTRYRSVLVQDRTREANRLHKVLTDAGIQLASVASNVLGKSGRAMLAALVEGTSDPESLAELAQGKLRRKLPALREALAGHFRGHHAFLVSQLLAHLDYLDEALETLTAQIQEALSPFASEAARLDVIPGVGARTAEVLIAEIGVDMRQFPTARHLASWAGLCPGTHESAGKRRAVRTRKGNRWLRGALIEAALAAINVRDSALAARYRRLVRHCGHKKAIVAVAHKMLTTAYLLLADGRTYQEPGAGYYDAQRKDRVVRRALQTLERQGYRVTLELAA

SEQ ID NO: 231620 - protein, 392 aa, unidentified
MTVSVGIDVSKDKHDCFIQSAEGEVLMDVFMISNNMDGFRTLLEKIRVCVSHQDKIKVGLEATGHYSYNLLGFLLDNGLPTYVLNPLRTNLYRKSPSLRKTKTDRVDARTIASMLLSDVGLKPYTDTAYRNEELKSLTRYRFDKVKERAKLKSSIARLVCILFPELETLVSSLHIASVYSLLEEFPGANQVAAAHLTRLKALLETASKGRYKRNMALEIRDAARNSIGSWMPAKSLELQHTIRLIRELDNEIAEIEEQIQSLMIELDSPITTIPGLGFRMAAMILAEVGDFTRFASPDKLLAYAGMSPSTYQSGQLKNCYPHIEKRGSRYLRYALYNATKYVCHWDPTFAAYLAKKRAEGKHYNIALSHAAKKLVRLVFAMEKSRQPYCSAT

SEQ ID NO: 231621 - protein, 344 aa, unidentified
MTYYAGLDVSLRTVNICIVDNEGERVAETKLASDVQDIIAYLDDLNIEIESVGLEAGTLTQYLTYGLQAAGFEVICMEARQVKAALSAMRNKTDKHDARGIAQLLRTGWYSRVHVKSMQSHHIRMLLSSRKAVLSKCVDLENEVRGLFKVFGIKLPPKLGHGAFDAAVRDIIEIDEMFSHALLPLLDARLVLYQTFRILDNRTRKMAHLDPICERLMSAPGVGFITALTFKSGVDDPTRFKRSRTVAAHFGLTPRRFQSGEMDIEGHISKCGDADVRCALYTAANAILTRSSRWSSLKAWGMKLAKTRGHRKAVVAVARKLAVVLHRMWIDDTQFCWGMEGARS

SEQ ID NO: 231622 - protein, 418 aa, unidentified
MTVDSVARKRSVINPDALVIGIDLAKHTHVARARFCDGSYTRPVKVPNTRAGFLALIEQIGAWKARPDSAVIVGVESTGSYGVNLVRWLSEYGCQVVLVPSLHVCREKELLDNGRGTSDDKDALIIADLVARGQYLGFVELSGACLELRPLVSLRARLVREQTAWLNALHQTMDVLFPEFETIFADLKRPTARLVLGRFGTVGAARAHSPTAMRRLLVRDGAARVSLAKLKRLQAAAAESIGPLAVSAGQERSLHEMLETLATLDERITGLEAEIVRLLEQLPEAEYLMSLKGVGAMTTAIILAETGGLKQYSCAAAVLKLAGLNLYQNSSGQYQSGRRISKRGRSQLRRALYMVAVQHAKRGWPLRPYYAALVARGKPKTVALTAVCCRLVRLLYALVRDGRCYSECPPNVDRPAAA

SEQ ID NO: 231623 - protein, 338 aa, unidentified
MIVIGVDVHKQSVTAVAADEVGRLVAERTVASGSDELLEWAAALDAERLWALEDCRRLTRWLERQLLAAGEQLVRVPPKLMAPERRHGRTRGKSDPIDALAVARAAIREPALSRPRPDEEPYRELKLLVDHRDAIVDERRRVHQRLRWHLHQLDPTYQVPLRMLARSVQLERVGRWLARQEQQLQLRLARELVASCRRLNREIAELDRELELRTATLAPALLDLPGCAAITAAKLLAEIGPIDRFHTDAQLARHSGVAPLEASSGRIQRHRLDRGGNRQLNAALYRIAITQARVHEPARAYLERKRTEGKSRREAIRCLKRLLIRLIFQTMKASPALT

SEQ ID NO: 231624 - protein, 412 aa, unidentified
MNIVYERCAGIDVHKRSVVVCTITPDQQGQRHKQRDTFSTMMPDLLRMRQWFQSLGVTHVAMESTGSFWKPIFNVLEGHVEVLVVNAQHLKAVPGRKTDLKDAEWIADLLQHGLLRPSFVPPAFQRELRELTRYRSSVVEERSRTINRLQKILEDTNLKLSAVATDLMGLSAREMLAALLAGETNPTVLAELARGKMRAKRDLLVQALQGQFKPHHHLLISEQLTHIDALDEEIERLSTDIAQRLLPYEAQLKRLGTIPGIKRRLAEVILAEIGPDMQRFPSARHLASWAGMCPGNRESAGKRLSGKTRKGDPWLRTALVEAAHAATHCKDSYLSAQYHRLVLRRGGKKATIAVGHTLLVIVYHVLADEKDYQELGGNYFDDYDRQAVQKRLVHRLEKLGYEVILAPTSPAP

SEQ ID NO: 231625 - protein, 347 aa, unidentified
MYTFYLGVDLHLKRSYVVMMKDDGQIIDQRGLPNDRMKEYLIKHVPRSTYAVLEATRNWPFMYDLLAKHVERVELAHPKDLKAIASAAVKTDQIDARVLAHLARLNYLPTAYAAPMEIRDLRQYTRHRTSLVGLRTQAKNRIHAVLAGYNLVSPVSDLFGVQGREHLAQWMKDALRPAAVRVIQDNLDLIDTIHQQLEFLEKNIQLSPEGEQAVRLLMSLPGVGKITATTIVAEIGDITRFGSSRSLCNWAGLTPRVRKSDEIVRHGKISKEGSPYLRAAMVRAATAAVKKSSRWRTVHKNLSRRSGKSAARVAVARRLLTVAYYMLQRNEPYQEDYEQKGHSDRGA

SEQ ID NO: 231626 - protein, 351 aa, unidentified
MIIVGVDYHPSVQQVAFLDTETGETGERRLNHSDGEAERFYRDLQRRQVKVRVGIEATGHARWFERLLAELKFELWIGDPARIKAARVRKQKTDRQDAQLLLRLLVEDRFPRIWVPSPENRDLRQLIWHRHRLVQMRTRAMNQIQAAAMNEGVRRKKTLWSKTGRRQLEALPLAPWATRRRQDLLELVDRLNTTIDELTAAAEQEARKRPEVLRLMTHPGVGLITALAFVLVLGSPDRFGCGHQIGSYLGLFPCEDSSADRQRLGHITKQGSSLLRFLLVEAAQAAVRWDPDWRRRFVHLAMRRDRRIAKVAMARKLAVSLYWMWRKGFDYPQTLQFGSHAGEPGFVHGVK

SEQ ID NO: 231627 - protein, 335 aa, unidentified
MKNEDGRVEGRGTVNNTKEEVQQFLEPYRPGMVVVEATRNWGLIYDWLDEVLDDVTLAHPLKVKAIAEARIKTDKISADILADLLRADLLPKAYAPSKPTRDIKNILRQRMFFVRIQTMVKNRIYDILDRHPEVLAQVPEASDLFGAAGMQWLGQTTLSGEDNMLLSSELRLLKYLKEEITQSNSIVKKLAKKDARAGLLQSIPGIGPFFSVLILYEIDDISRFRDEKKLCAYAGIVPSTHASGGKVFHGRITKTGNKWLRWAAIEAAQTAVRSDSEFRAYYQRIKVRKGTNAAKVATARRLLTIVYRLLRQGRFYERRTTPQEKIIIPAALVTS

SEQ ID NO: 231628 - protein, 343 aa, unidentified
MRKDIILAVDYHQKECVVRRLNSATGEEKMMKDLATRAPMIRGLLRDARAQLAPGGQVVWIMESTTGWPRVKALVEKEGAAFVLANVLQMPLPPKAHRKKTDKLDTGRLMREYLNGSLPESFQPDADWRRLRRLTGLREDLVRRQTAVRNWINRYVAHETWAPSPRLNSVRGRALLRRLALAGTDGFVLHSRLDELEQIEARLKPVEEEIGRVCAAWPEAQWLDEVKGIGEVTAVSILSRIGPVERFADAEKLIAYAGLAPGVRQSDQTCRTGRLGGGGTDASLRFYLIEATIWARRVPRYQAVYERVRRKRGKKIARLVVARALLRSIYRMLKDRVPFSSVA

SEQ ID NO: 231629 - protein, 308 aa, unidentified
MTIHPCFIGCDIAKHHLDLFDESRGEGFRIDNTQAAIAAWLSSLDIGGAFVAFEATGPYDRRLLHALEQAGCRFVRINPGRARDFARATGRLAKTDAIDARMLAAMARMLALAPDAATDPTRNALVSLHKRRDQLVEMRAAERVRGKESDDPTGSLARHLAWLDEEISTLERQIAQALRADQELAAMQALLRSAPGVGPVTATTLIALMPELGHCSPKAVAALAGLAPFNNDSGRQRGRRSIKGGRRRVRRALYMAALAAIRTSDRFKAFYTSVKARSAATKVAIIAVARKLLTVLNAMVKTKTAFQP

SEQ ID NO: 231630 - protein, 411 aa, unidentified
MVKENFIYVGIDLHKETHTAVMIDCYNQKLGEITFPNRPAAFPKLVTKVKKCNTDGKEVVYGLENAYGYGRALAVWLIDKGYLVKDVNTAISHRQAKHRGAMYRKSDSDDAKAIALATLNMLDKLPDACPNDAYWSLGQLVHRRDNIMKQRTRLVNQLHEQLCIAYPSYKQFFNDISRPTALYFWEHYPSRKYLKGKSVEDLRAELVPVSHNKCSTKTCEKILDAVASDKVKNNAYQDARDMVTLSIVSDLQHYDSQLTEVDKMLEQMYKMLGCTLTTIPGVNVITAVKILAEIGDIKRFSNANKLAQFAGIAPLHLSSSGKGKDVATKQGNRRLQATIYFLAIQMVQVSSKGTPRNSVVRAYYEKRKAEGKTSQQALICISRRLISVIYGMLKNGTEYRMPVVENAGEKL

SEQ ID NO: 231631 - protein, 343 aa, unidentified
MAQYIGLDVSLKDTSISVRQEGKRVWRGKCASDPKLLAEVIRKRAPNAERVVFETGPLSVWFYHALTAEGLPAICIDARHAKAALDMAANKTDANDADGLAHLAEVGFYREVRVKGFDSMLMRTLITARRQLLKMRVQMSNQIRGLMKTFGLVLPKGAGSVFERNVVTLLEGEDDLARIILPLLQAWRDIRLRAAELTKQLVAMAGSDQRCRLLTSVPGVGTVTATAFAAAVEDSINFKNSRAVGAWVGLTPKRYQSGEVDFEGHISRRGDAKLRSLLYEAASVILNRLSDTSTLRTWALALRERVGFKRAAVALARKLTVIMHAMLKTGELFDPKAGVALPA

SEQ ID NO: 231632 - protein, 324 aa, unidentified
MTDAVLGIDVSKNTFDTNLGAGTKARSKSFANSPAGWHHLIAWLGEHKIGQVHACLEATGRHGLGIALALHEAGHVVSIVNPAQIRDFARTKLGRNKTDQVDAVHIREYAELFKPRPWTPPSPAMRRLCELQTIRAGTVAGLTEWKNRRRSGIMDDLALSLAKTTIQHFASQLEAVDQAIAETIDNDVELSAKRDLLVSVNGVGEALAGIVLAELPGPDILGSSAAVTAYAGLNPQQHQSGISVKRPVRISKIGNAVLRTALYMPALSAMRYNPAVAALVDRLKAQGRLKGKQIVIAAMRKLLVLCFGVLKTGKEFDPAMAMGK

SEQ ID NO: 231633 - protein, 370 aa, unidentified
MLNTTTFVGLDVHARSIKAVALDAMTGEVRSATFGYDAAEVAGWVSSVDPSAKCVYESGVTGFDLQKRLSAMGIDCVVGAVSKMIKPPADRKRKNDRNDAEFLARMLSVGNVVEVWVPDDGCEAARDLSRALDDAREDLKRCKQRLSKFLLRHGYVFSETTPTGRRKGNWTAAHWAWIKSISFPEKADNDVLAYYVDAVRQAMEDKARLERLVEAEASKPRWKRRIDSIRCLKGIDVTSAAGLVFEAGEFSRFKSARSFAAWLGLTPSEHSSGESVRQGGITKAGNKHLRRVLVESAWHYLGCSPHSKDLAKGQVPDPAARRHAAKGVRRLVERRRAMLERGVHKNKANVATARERACWCWAVGRMIENG

SEQ ID NO: 231634 - protein, 341 aa, unidentified
MKKFIRIGVDLAKNYFQVHALESENGRAVTRKLKRSKVHEFFSQIEPCLIGMEACGSAHYWGRELKAMGHEVLLMPPAYTKPYVKRGKNDAVDADAICEAMSRPGMRFVPIKSPEQQATLMLHKTRELLVKQRTMSVNALRGHLSEFGIVAAKGIGRVDELLDLAESDATLPNAARASVKVLAQALEGLDKAIDDLEKEISSAHAQNEMSRLLDKVPGVGKLIASVIAASVPDPSVFKSGRDFAAFLGLTPRQNSSGGKQTLGSITKQGNRYIRKMLVLGATSLLNVVGKRKGALRDWIVGLLAKKPARLVTVALANKLARILWAMMKTGECFRTEMFAKA

SEQ ID NO: 231635 - protein, 312 aa, unidentified
MAKPVEKITLGIDVAKDQLVICQWGCEQLLTLVNQPAAIQAWLETLCGPVRLAIEPTSHYHLAVVEAALACGHQVYLVNPRQLAHYRQAVNLRHKSDPHDAWLLARFLAHEAAQLRPFRPQDRRAQRLWALLTRRATVVQSRQQLQQSFAEVRLSIQALLSQFQQLLQRLDQQIQQLLRELGWWPDYLRCLSIPGIGPANAAALVAAHHRGAFANSDTFVAYLGLDIRLRESGRFKGQRKLTKQGEPELRRLLYCGSNAACHHPRFAAYRQRQLDKGLSKIAARVALARKLARIAFTLMKNQQSFTDQPKIA

SEQ ID NO: 231636 - protein, 380 aa, unidentified
MIYVGIDIAKLNHFAAAISSDGEIILEPFKFTNDADGFQLLVSKLESFDKNSIIIGLESTAHYGDNLVRYLVAEFYQVCVLNPIKTCQMRKNNVRKTKTDKVDTYVIAKTLMMQDDLRFIGFYDLDMMDLKALGRFRQKTIKQRTRLKIQLTTYVDQVFPEIQYFFKSGLHQHAVYALLKEAPSPNEIASMHMTHLANLLKVNSHGHFTKEQAKELRVLAQKSVGANDSAISIQITQTIQQIELLDSQLEKIEAEMTDIMKFNDSVIMTIPGIGYINGGMILGEIGDIHRFSNPNKLLAFAGLDPSVYQSGNFQAKTTRMSKRGSRVLRYALVNAAWNVVRNNATFKAYYDAKRAEGRSHYNAPWSLCRQACQSHLEDAH

SEQ ID NO: 231637 - protein, 345 aa, unidentified
MQITTVGLDLAKRVFQVHAVDASGSVVVRKALRRSQVLPFFTKLLPCLIGMEACGTSHHWARALTDLGHEVRLMPPAYVKPYVKRGKNDAVDAEAICEAVTRLTMRFVAMKSAEQQAALSIHRTRNLLVKQRTQLVNMMRSLLAEFGIDIPEGLERALGLARQIAAKKSTLDVPAMAMQILCLLCDQVLDTHARLQTIDRSILVQQRTNEVARRLSTIPGIGPIGATALAASVGDPGQFRSGREFAAWLGLTPSQNSSGGKDRFGHITKMGDRYLRKLLVIGATSLIRRARYKPEAADPRLLALLARKPARVASVAMANKMARVVWAIMARGETYQARHTPNLAA

SEQ ID NO: 231638 - protein, 379 aa, unidentified
MKKDNKSVTGVKNLKAPKSEKKKVEEEAVTIGIDLGDKSSRYCVLNAGGEVTGERSVATTKTGMAQAFGALKRSRIALEVGTHSAWVSRLLSGFGHEVIVANARQVKLISASSQKDDKFDARTLARLARVDPQLLRPIRHRSEKAQMDLMRIRVRAALVETRTSLVNTARGLVKALGERLPQCDADQMGVKQAQGLPKEWQEELKPLLEEVESLTEKIKASEAQLEQIARTEYPETELLKQVKGVGPLIALTYVLTVEDPQRFEKSRDMGCYVGLRPKRRDSGESRPQLGITKEGDGYLRKMLVQGAHCILSRRGPDTDLKRWGLQLAERGGKNAKKRAVVAVARKLAVLLHCLWVTGEVYEPLRNSNAHAAVSSPAAA

SEQ ID NO: 231639 - protein, 347 aa, unidentified
MATMPDPTRYVTGGVDTHRDSHTAAALNHLGAVLGTATFPVTGAGYRQLLSWLGSFGPVNAVGVEGTGSWGAGLARHLRTVGVEVREVIRPNRQHRRRYGKSDPADAVAAARSVLNGEADGLPRGGTGPIEGIRLLKIARNSAVKQRTQAANQIRSVIATAPASLRASLEHKTLAQVAKTAIGYRPGNPTDPYQAAKLTLKVLSSRWQRLGKEITGLDTHLDALVQTVAPPALLDEPGIGTQTAADLLITVGDNPQRVRSEASFAALCGTSPVDASSGLQLRHRLNRGGDRQANATLHRIIIVRLRYHQPTRKYMARRLAQGKTKKEIIRCLKRALARQVYNHLTTS

SEQ ID NO: 231640 - protein, 353 aa, unidentified
MVEFSKVEAQEVVGLDLGDRSSQICRMDRKSGAVLEERRLSTTTASVQRYFSTLAPQLIALESGTHSLWMTRLLKSLGHEVIVANPSQVRAISSSLKKTDERDARFLAQLVRVDPQLLSPVEPRSEESQQAIAVVRAREGLVKARTMLINQVRGVVKSFGYRLPAGSSAAFAHQARQDKTLPSSLKETLEPLLRVIAEASQEIARSDKEVEALARRWPVTLRLRQIKGVGALTALVFVLTLGNPLRFARSRAVGAYLGLVPGSRSSGQSTPQMPITKQGDRLLRRLLVQASHYVLGPFGQDSDLRRFGLRLAERGGKSGKKRAVVAVARKLAVVLHRLWVSETDYEPLRKAAA

SEQ ID NO: 231641 - protein, 407 aa, unidentified
MELLRSHCAGLDVHKDLIVACARITEGGQIRRESARFGTSTRELLRLQEWLHSRGVTHVGMESTGVYWKPVWHILEGSFELILGNARAMRNVPGRKSDQSDASWISDLVAHGLIRSSFVPPEPIQALRDLTRTRTQMMHERGRQVQRLQKVLEDANIKLASVLSDITGASGRKMLLALANGATDARAMAQLADRRVKASEQEIRYALEGCLNEHRRFMISFHLRHIDELDALVASLESRIEEELTPFRRVVEHLITIPGVKKDAAAAILAEIGVDMSVFPSAGHLAVWAGVSPGLNETGGKKKPARTKKQRWLKAKMTQCAWAAVKKRDSYLCARYHRIRARRGKQKAIVAVAATILRAIYHMIQNDVDYQDLGADHFNRFDRERAAKRLRKRLEKLGYGVDLQKAA

SEQ ID NO: 231642 - protein, 425 aa, unidentified
MNYKQNEKINQVKESTLVVGIDIGSTKQYARAFDWRGIGLGKVFTFSNSREGFEAFKAWMQHLQDKYRKSDVIVGIEPTGHYWFDLGAYLEDEGILLVMVNPYAVKQTKELDDNSQSKNDRKDPKVIAKLVTEGRYSAPYTPDGVHADLRIMVTNRKRLIREMTQIKNRFARWFAIYFPEYTDVFGDYEAQSSMLLLKKVCTPEAIVELGAEKINKIWRDAKLRAVGMKRATTLCETAKRSIGLKKGSSAARYEMKLLLEDYEYKKAQLDAVMEEIEKLCRKIPESEQMLAIKGIGVITVAGFLAEVGDVRRFESPRQIQKLAGLSLRENSSGKHKGQTTISKRGRSNLRAVLFNAAIPLIGTNPEFKSLHEYYTTRANNPLKKKQSVIAISCKLIRVFYAILANGVTYDAQKMLSDIHRQPQAA

SEQ ID NO: 231643 - protein, 358 aa, unidentified
MGEITRVGVDLAKRVIQVHAVDATGRVVVAKQLQRDGFTAWCAQLPPGCLVAMEACSGSHHWGRRLRAMGMEVKLIAPHFVSPYRLSGKTGKNDAADAAAICEAASRPSMRFVPIKSVEQQSMMALHRLREGYKEERTACINRIRGLLAEFGLVFAQRPEVLRAVLSEVVEDAGNELGAIARMALQRAHLHWIELECHIAWCDERIGVHVRRDEQAKAAAQLCGIGPVTASALVATVDDFKQFKNGRQFSAWLGLVPRQRSSGGKAVLGEITKRGDEYLRTLLIQGAKSAVFTAHRRSDRLSRWIVQLRERVGWQKAAVALANKHARILWSILVNGQSFDPEHVPTKHRMPSLAAAAG

SEQ ID NO: 231644 - protein, 419 aa, unidentified
MPEEFRVWVGIDWATEAHQVCVLDPNGRVLSERSVAHEAQALQSLADALIALAGGDGAAVAVGIEVPHGAVVETLVERGVVVFALNPKQLDRFRDRFTVAGAKDDRRDARVVADALRTDLRAFTRVRVPAAHVLELREETRIHDELRTEWSRATNRVREQLGRFYPQLLQLGDVDEPWVWELYELVPTPALAPHVRRARLVQLLRTYRIRRHTADSILAVLRTPALTVAPGTVEAAQRHIALLLEQVRLLHRQRQECDRRLATLLTREEFGAPPSAEGPRPAHSDLEILLSLPGAGNLVAAPMLAEAGDAITDRDYITLRTRTGVAPVTRRSGKMLMVLMRYACNQPLRNACHYWAQGAIRWDPRSQQHYARMRAKGHSHGRALRGVADRLQAMLIAMLRTGTLYDPARHGVQGVHAAA

SEQ ID NO: 231645 - protein, 354 aa, unidentified
MKHQAIQYLALDVHQSTVVATLRDAQGDIILRATVATNAKAILALIRSAGARVHVAFEEGTQAQWLHDLLTPHADRVVVCNTRGREGQGNKSDRIDADRLSEQLRLGSLRSVFHGAKSVRTLKELVRNYSTLVEDSTRVMLRIKALFRGRGILTPGVSVYRPSHREEWLKQLEGGARVRAISLLAQLDVLLELRPKAKTAMIAEARRQPGWKVLRSIPFLGPIRVALIMAIVGTPFRFRTKRNLWPYVGLAVVTRSSADQEFQGGKLRRRQKTPLTRGLNHNHNPLLKSVFKGAANAATGRPGPLRDFYEASLARGVRDELAKVTLARKIVSLTLRLWKKGELWDPKKLTMQAT

SEQ ID NO: 231646 - protein, 408 aa, unidentified
MEVVYRCCCGIDVHKKIIVACLNQGGEQSLREFGTTTSEIKSLATWLTESGCEIIAMESTGVFWKPLYNLFELMDLDAIVVNAAHMKALPGRKTDVKDAEWIADLLRHGLLKASYIPSREQRELREITRYRKSLTEERCRETNRLQKILEGANIKLDSVVKDINGKRARKLLEKIIEDDVPTSEEEISKMIHGRMRSKLGQLVTAIEGITTPLQRKLLAQVIDHIDDLNRRIADLDKLVQDYMDEYEAAITALCDIPGIARRSAEVILAEIGLDMSRFPSAAHLCSWAGVCPGNCQSAGRRKHGKTTKGNKPLKTILTQCAKSARSVKGSYFSAQYQRIAARRGKNRATLAVAHSMLIAIYHMLRNNVPFRDLGSDYYDSFNRDRKIHGYLKRLKALGWEPDALPGSA

SEQ ID NO: 231647 - protein, 364 aa, unidentified
MFTERTSVGLDVHARSVAAAAIDGVTGELFQSKLTPSYAHIRSWLQGLPAPVAVTYEAGPTGFGLYRSLTDAGIRCQVAAPSKLQKPSGDRVKTDARDAVHLARLLRLDEITSVAIPTVEQEAARDLVRAREDCRGDLMRARHRLTKLLLRHGIVYDGGNPWTGKHDTWLRTQALPQLISRATQLTFDNDYETVRTTWARRDRLDAAIEEMAADSEFTPVVRRLGCLRGVSTLTGFALAVEIGDWHRFTGRTIGTFVGLTPAEHSSGESKNRGSIAKTGNGHARRLLVEAAWHHRPRYSVGKTMRDRWGLAPAAARVRGDEGNHRLHQRWVRFIDHRKRHNVANIAIARELAGWCWSLAILDDS

SEQ ID NO: 231648 - protein, 458 aa, unidentified
MPQRRNKSRKRRKTLKGLPEHLRHININAAGIDVGSDRHFVAVPEGRDTESVREFGTFTTDLEAIGDWLEKCGVTTVAMESTGVYWIPLFEVLERRGFDVKLVDARHVKNVSGRKSDILDCQWIQQLHTYGLLAGAYRPPDEICILRGYVRQKEMLIQASSMHIQHMQKGLQQMNVLLHNVVSDITGQTGMAIMKAIIAGERDPDRLAENRHENCRNSKETIAKSLKGNFREEHLFALKQALELYEIYQCKIAECEEAIAAQLAKQPDVTDEELPPGGKQVKTRDFMRGNLDVRQKLFKLTGVDLFNVPGFAADTLLTMTSEAGVDMSPWKTGKHFTSWMSICPGTKKSGGKILSKRTKRNANRAAQAFRLAAASLARSQTSLGAFYRRIRARSGAIQAVTATAHKLARIYYAMLTTRKPYVEAGLHAYEERYKQRRIAALRKQAHALGFQLSPSVAA

SEQ ID NO: 231649 - protein, 341 aa, unidentified
MSQNCSISYAFFVGIDMSKEKFDVGILNSNGEKIAHKVFKNNYLGFEDCLIWIKSLVGDEQTIFVMEHTGLFSRLLWFFLQDNSCSLWMESGFEVKRGMGLAKGKNDKKDSYRIAEHALNRRHKIKITPNYDEDLVLLHDLLSNRNRLVTDLNRLETPLAEMKKHGNKRSYEALVKVNASAIKGLKSSIKEIEEAINELISTQEEWQKNIELASSVKGIGKWTCLWILVYTRNFSKEFNSRNFASMAGVAPFESSSGSSIRNGSHNSHFSHKFLKGILHTAAMAAIRFNPAMKEYKERKKKEGKKGFLVMNNIKNKILHQVFAVVRSGEMFKLDYKHPMAA

SEQ ID NO: 231650 - protein, 366 aa, unidentified
MKKISTMQAFGNEILQEQKLTIGVDLGDRWSFYCVLDEAGKIILEQKVATTPEAMKQTFGKTPRSLIALETGTHSPWVSRLLTELGHEVIVAHAQKVELITKSNRKDDRHDARTLARLARIDPELLGPIRHRSAKAQIHLTVIRARAELVSARTALVNAARGLVKSYGERLPKCGTQQVSGKLAEGLSAELREVLEPLLREVESLNERIQEYDERMEKIAKAVYPEVALLKQVKGVGTQIALTYVLTIEDPYRFPKSREVGCFLGLRPGRRNSGESEPQKKISKEGDRYLRTMMVQGAHYILGPFGEDSDLRRWGLKLAERGGKNAKKRAVVAVARKLAVLLHRLWVSGEVYEPLRNSQKAMRAVA

SEQ ID NO: 231651 - protein, 376 aa, unidentified
MGDHSEAFVGIDTSKLRNAVAIADAGRGGEVRFLGEIENTPVATAKLVRKLAAKYKRLTFCYEAGPTGYGLHRQIKGLGFECPVVAPSLIPKRPGDKVKTNRRDALSLAKLLRADELTAVWVPDGGHEAMRDLTRARETAMLDLRTRRQHVSAFLLRLGRPYPESRKTWTKAHASWIASQKLEHPQQRLVLEEMMLAIRQAQERLQRLEQAVAAAVPEWSLAPLVTALMAMRGLDLIAATTLLAEIGDLSRFQTPTELMAYLGLVPSEDSTGDTIKRGSITKAGNRRARRMLVECSWSYQHPPRVGQAKQPKVDAAPPAVREIAWKAQCRLYRRYRTLIRNGKLKTVAIVAIARELAGFIWAVARAVTTTRFAAAV

SEQ ID NO: 231652 - protein, 324 aa, unidentified
MGVVIGIDIAKHTFDIATLQANGKYRTKAKLGNDQGGFEVLQQWLSKYAEPQAWVVMEATGIYHEALAQWLYERGYKVCVLNPSQTARYASSQLQRVKTDKVDAKMIAEYGRRHQDKLRAWEPEKPKIRRLRALTHRLKDLQELEQMEQNRLDVTHDDKAIELIQSMLKHIRQQIQDTLAAIEKHFDDNDDLKGQRNLLKSIDGIADRTAGLLLAELGDIQRFEDSRAVTAFAGLNPKLQDSGTLKGHVRISRMGSARLRAGLYLPAVVSLTYNPAIRALAERMRSAGKAGKQIVCAAMRKLLCIAYGVLKSGEPFDPKLAIAK

SEQ ID NO: 231653 - protein, 339 aa, unidentified
MQVTTIGLDLAKTIFHVHGITSEGSVAFNRALRRSQVLAFFEKLTPCLVGIEACSTSHYWARELSRLGHQVRLIPPAYVKPYVKRGKSDAADAEAICEAVGRPTMRFVEIKSEEQQALLSLHRARDLIVRQRTQTVNMLRGLVAEFGHVTARNIERASALAKDIMTGDGPELPEMAQAVIESLCQQLLLLNDRIRWFTRQIVAASRCDQRIRLLQTIPGIGPITASAIVATVGTADQFRGGREFAAWLGLTPLNRSSGGKERLGRISKMGDRYVRRLLVTGMTARIRAARTRPDRADPWMISLLERKPVRLVTVAMANKTARIIWAVLTRNEAYRSAAA

SEQ ID NO: 231654 - protein, 361 aa, unidentified
MKNPAQHLIAEVPRRQAKVEITIGIDLGDVWSHYCTLNQDGEVVDRGRFRTTPKAIEKWFTDVPSARVAMEAGTHSIWISAQLQELGHEVIVANVRELRAISHSDRKSDQVDAEKLARYARLDPNILRPIAHRTVAQQEALTLIRARALLVRLRTAAVNAVRGLTKSCGYRMPASATTCFAQRCLAVMPPGLAQALGPVLQQIAEITVKIKQYDRQIQQLGQTEYPETQALLKVHGVGHLTALTFVLTLGSKERFGRSRDVGCYLGLRPRRSQSGDHDPQLGITHAGNAYLRSLLIECSNHILRPHGRDSALRQWGLHLAGRGGKQAKSKAVVAVARKLAVLLHHLWSTQEPYVPFYEQAA

SEQ ID NO: 231655 - protein, 336 aa, unidentified
MRYLGVDLHSNNFTICLLAEDGAHTFEKYPLKELEAFKSTLRPDDHVAVEATGNSRFFHSQISPLVAECIVVNAGQFGVIKQSVSKTDRNDARALAQFLSKGMLPASRVKDELHAQINSLAQTRDKLVKLRTALLNKVHAHLKANGRESCKEAYDHPGNLRKVLSEQWPASVRLELEVIAAQIGSLSEGIKKLEYEICELGKRLEGRDNLMSIKGIGPYSAAVLLSIIGNVNDFADEDKLASYFGIVPRVKDSNQTQHHGAITKRGSKLGRLVLVQCTLTAKRFSPYLKQYYERIKERRGSGKAIIATARKFLGIIYQTLKHKWMFSDFPNFVLAE

SEQ ID NO: 231656 - protein, 462 aa, unidentified
MEAGREGKADQTNRRQLQGLPLLRTNVAGIDIGSEKHWVCAPALDGNGREICDFGGTTSELIRMAEWLQARHVESIAMESTGVYWIAPHEILEAHGMKVLLADTRQLAQVPGRNKKTDPTDCEWIQRLHSCGLLRGSFRPEEGICMLRTLVRDKAALVAESGDWVRRMQKSLDQMNVRVHRAVSDISGTTGMAIIRAIAEGERDARKLAELRDPHCRKSEVEIAEQLTGHWREDHLFSLCQGLKMYDAIEARISAYEKEILRKLGEMEKEGHGGKDAPPLKNGNKARMIKNRGQGPKRQALYRMSGVDATQIDAIGVETVEVILSEYGPDLSCFPTAEQFVSHATLAPHVAQSGGKPLKKKRRNSTSTRVAAALRMAAQSLRHSDTALGAYYRSTLRRKGPGIATFAAARKIATLIYRLLRWGQPYVDEGAEAYEERYQLQRIKGLESRAKQLGFRLTPLPA

SEQ ID NO: 231657 - protein, 338 aa, unidentified
MYIGMDLHKKYLQIAALDENGKLISNSRIDNNLVEVDKFFKDINNENPKVVMESSGIWYNIYEYLSKQKHLDVVLSNPIKTKAIATAKIKTDKLDALKLADLLRGGYIAECYIPDKKTMDLRELVRHRFTLVKMRTKMKNKIHSIILMKGVRITGGIHPFTRKHIEKLKEVKDYRIDGYLRMIESLDSEINDVSRKIKTCVNESDIARLLMTIPGIGYYSALVIVSEIGGDINRFPDSSHLCSYAGLVPSTHSSGGITYHGSITKTGSKYLRWVMIECVRAHIRNYKNTSITKFYERLARSKGNSKAVVAAASKLLKVVYWIIKERREYVPNIAVKES

SEQ ID NO: 231658 - protein, 415 aa, unidentified
MKKHNYRTKKVNDINWSQLREQFAGQTLVFAVDVAKKQQFALLSNTELSESVLMQWNHLEQTVELINELKQLNTPITVVMESTSTYGDAMRYQFRQAGFAIHQASAKRVHDAKEIYDGVPSLHDAKAAWLIARLYQEGLTKPWHELDDKERELNAYRREYELHQSQHERNQNRLEAFLSRHWPEVLPLLALDSVTLESLLIDYGSPEQIAAGAEQAAKAMRHWGKSYLSTEKIESVIHSAATTLGQPCIEAERRYLQALAEELRHSRKQAKNAKQALEAVVKAEPGLKEMGLTIGMVTTAILIGLHLDPRHFGCARSYLKALGLNLKEKSSGQDHGKLKLTKRGSALARKYLYFAALRLINSDPVVSAWYQNKVDPRAKLKTVIALMRKLAKALWHVARGQRFDARKLVMTTVVN

SEQ ID NO: 231659 - protein, 410 aa, unidentified
METIVERPAGLDVHKAQVTACVRVPAAGGGREEQVAEFATTVRGLLALRDWLAAHRVSQVTMEATGVYWKPVWAILEDEFELLLVNARHVKQVPGRKTDVSDAAWLCRLAEAGLLRASFVPPKPIRALRNLTRYRKTQIQERAREANRLHKALEDTGIKLDCVASDILGVSGRAMLAALIGGTTDPLVLAELARGRLRAKLPALREALEGRFDRLHAVWVGAILSHVDFLDEQIDRLSDAIEEQLVPFAPAVELLRSIPGVQTRTAQVLVAEIGTDMSVFATAKHLASWAGQCPGNDQSAGKRRSGTTRNGSKWLDWALEEAALAAVRSNDAYLAAQYQRLRPRRGHKKALGAVKHSIICACWHMLTTGELYRDLGGDYFQRRDPDRTTKSLVAKLEALGHTVTLDPVAA

SEQ ID NO: 231660 - protein, 315 aa, unidentified
MTQTKTTLSIGIDVAKKHLDVHCHQDQTYIRVCNTCAGIKKLLKWMQDKEGSAFIVLEPSGGYEYLIEQTVLSMPHIKFAKVNAKQIRDFARSKGQLAKTDAIDAQIIAEYGALMSPRVSVVTSEQQRELSGLVRRRRQVVKTLSDEANRLEKSKLPAAKDSIENLMSFLKSEVKALDKMIRDIIKSHDELQSLYKLAQELRGIGPIVAATLLAGLPELGRINNKAISSLIGVAPHNVDSGTMRGTRHIQGGRSYVRQSLYLAALTATRYDGPIRDFYISMLARGKKPKVAIIACMRKMIVTLNAKTRDFYAMNA

SEQ ID NO: 231661 - protein, 394 aa, unidentified
MKLVGIDVGKNSHHFCVMDKETGELNVTPSSFPNNKEGFDFLINSLKPYSKKSILLGMEDTGHYHVALLKFLLSNGYTVALINPKTTDLTRKMEGGITKNDKLDTITICDVLDTPERKKQYRITKVDRFDLYEQRQLTRHHHNLKEELNLYCNRLQKSIDLVFPEFNTLFSSKYGVVYMNLLKTFGSAEAIASTDIRTIRKCFEIKGRGGRISLTAEKLKECAKNSIGISSEVETIQIKHLVRQITLIKEQIAEIDKKIEEFSITNNSPILSIPGISHFSGTSILAELGDIGNYSKPSQIIKFAGVAPYHYESSQYNAQHTAITKKGSKYLRKTLYQIILPVINNNPVFKKYYQLKISQGKGHRCAQGHCIRKLLRIIYHLLETGQSFDPALLR

SEQ ID NO: 231662 - protein, 359 aa, unidentified
MRIIGCDLHARQQTLAMLDTETGEMVNLTLMHEGDKVREFYAQLPRPVLVGIEAIGSMHWFLNLMEELGIEFRVGHPATIRAAEPRKQKHDRRDADLILKLLAENRFPTIWLPTKELLDLRALLLHRHQWVRMRTRIQNSLQAIALANGLRRGPGLWSYDGQAKIAFLPLLPHAAYRRSALQAMYKLMESEIENLTQQVAEQAGQRSGARRLMTHPGVGPITALATDVFLGDPNRFVDGKALASYVGLIPREYSSGEHQRLGGVTKQGSPLLRFLWCEAGAHAVRRDPDLKRFYRRKLVQKGLGKARVAVARKLGIRLWIMLRDEIDYQEFCRRGQKQKSSAACAGMPETGNGVKSPAD

SEQ ID NO: 231663 - protein, 431 aa, unidentified
MLKINPLSTLYVGIDVSSKSNYVCALDFYKNKYINSSFANNQPGAEELALKILECLKEHPDITTIVAALESTSVYSIHIANYLSSCEELMRFKPYVFVLNPKCTANYKKSYIGLGKSDPIDAFVIADYARAGTIESEPWRGSQFLALKRLTRHRLHLVECMTREKTYLVSNLYLKFSELQMLEGDDQPFCDIYGATSSSVLMEYLSPEEILVSSEEDLIAFLAEKSRNRIKDISKTADLLKKAARDSYRLDKALYEPLNVSIASSFNCIETFKREIKVIDNAIEKEIKGLNPNAFIILQSIDGIGPVFAGGIIAEIGDITAFHSSDALAKYAGLTWKSNQSGDFDGEDTPMIKAGNRYLRYYLGEAANSMRKHNVEYGAYYRKRYNEVPKHQHKRALALTSRKFVRLVYGLLARNQLYSGVSLDTSIKDSN

SEQ ID NO: 231664 - protein, 327 aa, unidentified
MNAAGIDVSAKTVTLVISREGRTGKPREFANTPQGHAALSKVLHKAQVERVCLEATGLYHLDLALALDDAGLAVMVVNPKAAKRFAEAMQTRTKTDAVDAALLAQFAQRMPFKPWERPDDLALGIRACARRIAALNKQRTQTKNQLHAAQQTALTPDFLLANLRHNIEYLDAQIEHLRQRVLDLIAADAHLQQSFDLLTSIAAASAIQLLGELLVLPPDMKAKQWVALAGLDPQVHDSGSSVHKKPRLSKAGNRYLRIALYMPALSAASHNPHVRGYYRHLIEDRGLKKIQAVCAVMRKLLHAIHAMLKTRSTFDSSRFYSLTETPA

SEQ ID NO: 231665 - protein, 409 aa, unidentified
MCIIGLDIHRAFAEAVAWEDGRLRRLGRVDMRRDLLGAFAAKLSPSDIVVIEATGNASSAAAVVAPHVKKVVIANPKQVRIIAYAKIKTDTIDASVLAQLYASGFLPEVWIPDEPTQALLRQVTRRNQIVRQRSRLKNVIQSILHSHLIPSCPHADLCGARGRSWLSEQIVPEDERLAIDRHLREFDRLGDDLQVIERDLARSALEDEGVKRLMTIPGVDMTVALAMKAAISDVSRFDEPQKLVSYLGLNPSVRQSGPGPAYHGRITKQGRGHARGMLVEAAWAAARAPGPLRAFFLRVRARRGQHVAAVATARKLAVIIWHLLTKSESYAWARPSLHAKKLRDMELKAGSKAVRGQKGAAHAYNIKSHRDEERRWVEQAEGAYARFVAGWNPRGPKKARTDAANEVRR

SEQ ID NO: 231666 - protein, 379 aa, unidentified
MTVGEFFRQCVGIDISKKKFTACLYMYDRASDAGCCTQSVDFANTKTGFNQMVKWSRKEAVKGQPLTYLMEPTGSYYEKLAYHLNKIGLTVYVVLPNKARQWCEAEGVKTKTDAMDARCLALMGCASRKLSPWSPPAAIYRELRQITRFHADLCKVRTSVANRMEALDNMYGPDKSVRKHCEKLLEEIDNLMEKNDEALLCKLAEDKDLKSKVERIAGAKGVSIQTVACVIAETDGFHLIRNRKQLTSYAGFDVVAKQSGGQDPKHKISKKGNANIRAALYMPALVATRYNKQMKAAYDRICQKHPSEKKIGVTAVMRRILLLIYTLWKNGEEYDENKDKANAKGKKKQAQEHGPEDCLAVNEEHVEGVAEDENGQPSS

SEQ ID NO: 231667 - protein, 343 aa, unidentified
MQAVTTIGFDIAKSVFQVHGVDSVGQVLIRRQLKRRQVIAFFQKLPACLVGIEACASSHYWSRELQALGHNVRLMPPAYVRPYVKRQKNDMADAEAICEAVTRANMRFVPTKTAEQQSGLMLHRTRHLFMRQQTSVINAIRAHLAEFGIVAPVGRRGVEELLRVVADPSDKRLPEIVRACLAALGSQLLSLKKQILDFDRMIMAWHRSNQTSKRLNCIPGVGPLLSTALVASVADPKTFRSGRNFSAWIGLVPKQRSSGGRDKLGSISKQGDRYLRGLFVAGAFAVIRYAKIHGAKHRPWLTALLARRHTKVAAIALANKLARMAWAMMATGERYNYPASLKV

SEQ ID NO: 231668 - protein, 323 aa, unidentified
MMGLPNSLCIGIDVSKMSLDIAANQQIAPFTVSNDIDGFDTIITELKRHSIALVLMEATGGLEAAVACSLQAEGFDVAVINPRQARDFARSMGYLAKTDRIDAVMLAQMTEVINRHPERARFIRNLPDAKREVLAAMVVRRRQLITMLTAERNRLYPSHPQSRKSISTIIDALKDELSRINKSMEVHISTHFKTLAEILGGVKGIGAATVATLLAEVPELGHLSRREISALIGLAPFNRDSGNLRGRRTIFGGRANVRSALYMATVVATGHNPVIKQFYDRLVDSGKVKKVALVACMRKLLTILNAMLRKEEEWDPKYHSVNP

SEQ ID NO: 231669 - protein, 426 aa, unidentified
MRVLYDRVAAIDVHKDMVKVAIRVPGAKRGTRKTDVLEFRTFYGVLQEMARELRRRGVTHVVMEASGVYTDPVYYALRELDFEEVMVINPAHAKALKGHKTDAKDAIRLLDLYECGLLSGSYMPDPDLREVRDLARYRMKTVQARTSEIQRLQKALETAGIKLDSVVSDITGGSATAMIEALISGERRGSVMAGLAQTRLRTAGKMADLSMALAGRFTDHHALMCRLHLDRIKLFDDAVKDLDARIAPKVACHDREAGLLKSLPGFGDVVVAGWLGAIGPAPHQHFATASRLASWATLCPGNYMSAKKSKGGRTGNGGAYIKPLLIQAAWAAVRVPGRLQARFRRLVRKFGGPRNKGAQKRAITAIAHTLLKIAYSVLKTGKPYADLGADFYTRRESPDARQDYLMRQLQKLNPGCVITITPAEAA

SEQ ID NO: 231670 - protein, 359 aa, unidentified
MQTQSNKIDFTGQNIYIGFDVHLKSWTVTVMTERLTHKTFSQPPKPEVLYNYLAKNFPGATYYSAYEAGFCGYWIHNKLVELGVNSIVVNAADIPTTGKEKVMKTDPRDSIKIARSLRNGDLKPIHVPSIKTLEERGLIRMRSTLVKDLTRYKNRIKSFLYFHGIEYPEVFNRPKTHWSNRFNQWLEAIEFNDLISKATLDMLLGQSNSLRGSVLQITRQVRELAKTDRYKMQEKLLRSIPGIGILTAMIILTEIETINRFSNIDQLCGYIGLIPSTCSSGDKEVIGDLTPRGHSILRTAIIESSWVAARLDPALNKSYHDYCKRMEPNKAIIRIARKVSSRIRFVLKNNQPYVFSVVK

SEQ ID NO: 231671 - protein, 347 aa, unidentified
MVADEHDVVGVETHKHTHTAAALHPTGAVIDHVTVLADRAGYRRLIAFAVQHGERRLWAVEGTGTFGAGLCAALLGHDEAVVEVDRPQRPARRAGAKSDDIDAVRAARQALAGIGLSEPRSRGDREAIRVLLTTRAQAIEFRTRAICALHALVTSAPDRLRDRLRALPLGELLTTCAALRGSTTHSSEEFATTMALRATARRALACQAEAAELETQLAALVRQVAPSLLERAGVGPVVAGQIVASWSHRGRVRSEAAFARLAGVAPIEASSAPSPGTASTAAVTANSTEPCTPSCSSTCVDGRCERPGSVRGSADRSRRPRAVTDLPLMQTGPGTVPPWQGRGCAGC

SEQ ID NO: 231672 - protein, 356 aa, unidentified
MSRDIKYIGMDVHQEAIVIAVLNGSGKLVMETILETKASSILQFIHGLRGELHVTWEEGTWAAWLYDLLQPQVQQVLVCNPRRNALLKEGSKSDKVDARKLAELLRTGMLRAVYHGENGLRTLRELGRSYQTLSKDLTRVMNRLKALYRGWGIPCAGTQVYAPRYREEWLSKIAQAGVHRRAELLYQQLDGLQALRRNLRPEFLAESRKHKAAKLLRQIPCIGPIRAARLIALIQTPHRFRSKRQLWTYSGLGIETHDSAQYRFVRGQLQCSKKPQQLRGLNQNHNHEMKEIFKSAATRASCGRGPFHDFYAALLAKGMKPEMARLTLARKIAAITLTLWKKGGRFDTEQLKTQAA

SEQ ID NO: 231673 - protein, 463 aa, unidentified
MSPRHKNKIKSKQNSRSVAQTPTSLPVLQPNAGGIDIGAREIFVAVPPGRDPRPVRAFATFTADLHALRDWLQACGVTTVVMESTGVYWIPLFQILESAGIEVCLVNARHCKNLPGRKTDVQDCQWLQYLHSVGLLRGSFRPADQVCAVRSLLRHRDGLVRAAATCVHRLHKALTQMNVQLQHVIADVTGVTGLAILEAILAGERDPVALAKLRDGRIRASTDTITKSLRGDWRSEHLFTLRQGLETWKHYQAQLTACDAETARLLAAFDAKVDGAAHPLPPRTSTHKSPQKNEPRFAAREELYRTCGVDLTQVPGFQSGTALVLVGELGPDFAERFPTAKHFGSWLGLCPDNRITGGKIMSSSTRDVNSRAATALRLAAQGLNKAQNYFGDLYRRWKARLGTPKAITAMAHKLARILWHLFKYREAFNPEVFRKEAEKMKRKKLARLHNTAAALGLKLVPAQ

SEQ ID NO: 231674 - protein, 346 aa, unidentified
MDLFIGLDVSLASTAVCVLDAHGAVVKETTASSEPEALVAFLRSLPGTAIAVGLEAGPLSQWLHKHLTEAGFETALMETRRVKGALQAMPIKTDRRDAEGIAKLLHLGWFRPVHCKSVSSQETRAILTSRTAIRQGITNVELSLRGVLRNFGLKIGAISRTGFEARVRDLTEGNVMLIAAVEPILRARAALRKELACLEKQVRDLAKADSASKLMMTMPGVGPVVALTVRAAIDDPERFRSSKSIGPWAGLTPRRNQSGEMDVVGQITRAGDAGLRTALYQAATVMLNRAGSNSWLTGWALRVAQRRGKKRATVALARRIGIVLHRMWRDETEFRFTRDVATSATV

SEQ ID NO: 231675 - protein, 286 aa, unidentified
MEHYAGIDVSLELSSVCVVDAQGKIVKEAKVASEPEAVVAFFEALGFAVKRIGLEAGPLSQWLHAGLKEAGFETVLLETRHVKAALSAMTVKTDRKDARGLAQLLRMGWFQPVHAKSMASQEVRALLVGRKQLLGRLIDVELSIRGILRGFGLKVGAVTRKGFEARIRELVTGQATLERIAEAMLSARAALKAEYEKLHKAVLAIVREDAVCRRLMTVPSVGPLVAITYKSAMDDPSRIAKSKAAGALFGLTPKKYQSGEKDVTGGITRTRDEMVRTKLPMFCCRG

SEQ ID NO: 231676 - protein, 367 aa, unidentified
MKKTSTAVAKQSRNISRQRLTIGLDLGDRNSWYCVVDEAGQVQLEQCVRTNAKVLQEVFGPMPRSRIALEIGTHSPWISRLLSELGHEVIVANARKVRLIGQSRKKDDRLDAQTLARLARIDPELLYPVKHRSAQAHADLMMIRARASLVRTRTGLVNAARGLAKSYGERLRGCNVRNMDAEKAEGLSPELQRALEPLLAAIAEVSERIVEYNDRIEALAQTSYPQVELLKQIKGVGTLIALTFLLTLEDPHRFPKSRDVGGYLGLQPGRRNSGASEPQLHISKEGDPSLRTLLVQGAQHILGPFGIDCDLRRWGLKLAERGGRNGKKRAIVATARKLAVLLHHLWVSGEVYEPLHNSNRMAVAAAA

SEQ ID NO: 231677 - protein, 423 aa, unidentified
MSPSTLCVGADVHLDEIVLCAVDKAESHEVCERFRVTNNLPGAQAAATTIAAIAESLGYSSIEIGWEATGMLWIPFHRYLSDCPQLQSLETKLVCFNPQLVSKFKDGLVLRHPKNDKRDASTVAARLRVGEVPLSYVPGDFWQGLRRLTRYRFQLSRNLSREKMRFQAYAFLKCSDWKRVKAFSDVFGATSIALLTEYTVAELNQMAHDQLVDLIRCRGRGHFEDPTATARKVREVLRTSYPIDPQMDEMVTAALATAWDHIRFINRSMKRLDRHIAHYIDPIPNPIITVSGLGAVITAGLLAEIVDIQRFAEHKHLAQYCGLTWEKRSCGNFVSQNTRLTKVGSKYLRYYFVMGANTLRRFNLEYKAFYWRKYNEVSKYQHKRALVLTARKLVRLVHALLTKNVPYVRPQALAGIEEVGSLQ

SEQ ID NO: 231678 - protein, 355 aa, unidentified
MTSSKYIGLDVHKESISIAVRNSAGKVVMESVIETKASMILDFIDGLRGEIHVTFEEGTWSAWLYDLLRPHVTRLVVCDPRRNALLQEGNQNDRVDARNLAELLQNNQLRPVYHGDHGLRALKELVRSHLTITKDLSRVMTRVKAIYRSWGIPCSGTQVYTACHRAEWLEKIREPGVRRRAEIYYLQLDGLRLLRLQVRKDLRAESKKHQVWKRLCGIPSIGPIRAAVLLGIVQTAHRFRTKRQLWTYSGLGIEVHSSADHQVVKGQLQRKKKPIEIRGLNKNCNHHLKSLFKSAAITASTKPGPFQEFYAALLAKGMRPEIARLTLARKIATIVLMVWKKGERFDANHLKPQTA

SEQ ID NO: 231679 - protein, 489 aa, unidentified
MAKRTSAYERLTKGNRKQRKELQRRLYSDNPGLEVIHPHAAGIDVGNESHFVAVPPARDAEPVREFGSWTADLERMAAWLKSCGIETVAMQSTGVYWFAVYDVLEKQGLKVFLVNASHTKNLPGRKTDVQESQWLMKLHTFGLLRNSFRPPEDIRPIRAVWRLRERHIQDAARSIQHIQKALTSMNVQLANAISDISGVSGQAIVRSILDGERDPRKLARLRDRRIQASEEEVARSLEGNWQEDQLFELQQAVDEYDFRQKQLTECDSKLQAYLAVLPTRSVPPVDADPVAPAPPAALPGKKKKRTKKVGGGNAPQSFDLAGELKRVTGVDALSVAGINLMTIQTVVAELGTDLGKSWPSEQHFASWLGLSPKRDVSGGKVIRHTHEKNRNRVAEILRMAASSLVRSDSYLGARYRSLHARLGAPKAIKAMARHLACIIYRLFTKGQAWVDRGAAQFEQNRQTRDLARLQAQASSRGFRLVPDSKPITA

SEQ ID NO: 231680 - protein, 387 aa, unidentified
MQKPHDNSKASPAAFVQDNTLIAVIELSLSNWLVAGLIPGVSREPLKKLEPNPEDLLKLLHGWRDEAIKAGRPITRIAVAYETGRDSFWLARWLRERGIDAHVIHATSVTVSREHRRAKTDRLDTAMLKRGFLGWLRGERGHCTVAIVPTMEEEDAKRPHREREGLVHEQTRAVNRMKSALIQYGVRNFNPKLRKASVKLETVRTPEGKSLPPNTIAALRRDMERLKIIKEQIKAIEQARLQQFEQKPEALVNRMVYLLVRIYGLGLETADLLAHELLSRKLRDRKAVARYAGLTGSPDESGSKRREKGLSRSGNARVRKIMIQLAWRMVRFQPDSALVQRFKQRTENAKGSRKPMIVALARKLIIALWRYANDGVIPEGFKLHSAA

SEQ ID NO: 231681 - protein, 343 aa, unidentified
MEQYAGIDVSLESASICVVDANGRIVREVKVASEPEALIAWFRMLQVTPTRIGLEAGPLSQWLYAGMREAGLPVELLETRHVRDAFKAMPVKTDRTDARGIAQLMRLGWFRSVHCKSLPAQELRAILTARKLVQSKRHDLEMSLRGILRGFGLKVGQTTPRSFEARVRELTDGHVTLLAVADALLSARAVLAEQLGRLQKRLVSLARQDTRARLLMSTPGVGVLVALTYVAAIDDPARFKSSKAAGAHFGLTPRKYQSGETDVTGRISKIGDASVRTVLYEAANVILTRPVKGSSLKSWAMRVAKRAGMRKAKVALARKLAVVLHRMLVDGTEFVAARAAARA

SEQ ID NO: 231682 - protein, 881 aa, unidentified
MVVTPSGIDRKYYEICAMNELKGALRAGDIWIRGSRRYKNFDDYLMPRDDFEKLLNNNLLNLPVGTECGAYLNARLTLLASRLEEVNAMAAAGELPDVEISDKGVKITPLDNSVPSTVSPLADLIYNMLPPPKITEILDKVERWTAFSRHFTHLKNPLIRPQDNRLLLTTILADGINLGLAKMAESCPGTTRASLENIQAWYIRDETYSAALAELVNAQKSRPLAALWGDGSTSSSDGQNFRVGSHGRYAGQVNLKYGQEPGVQFYTHISDQYSPFYTKVISRVRDSTHVFDGLLYHESDLEITEHYTDTAGFTEYVFALMHLLGFVFAPRIRDLHDKRLFIQGKADNYPALQSIISTTPLNLKEIKIHWNEILRLATSIKQGTVTASLMLKKLASYPKQNGLAKALREIGRIERTLFMLDWFRDPALRRRVQAGLNKGEARNALARAVFMHRLGKIMDRGLENQSYRASGLTLLTAAITLWNTVYIENAINLLKKKGLHINDQLLSHLSPLGWEHINLTGDYIWRNNKKLAKGSIVLCEQLMSVSTRNNLNEWKELPLDMRRINSCAIMGVNIAPEGFVMTITTVGIDLAKNVFAVHGVDQNGKTVLVKPRVSRAALPELIAGLPPCVIGMEACSGAHYWARLFRQYGHEPRLMAAKFVSPYRMAGKSGKNDAADAQAICEAVRRPHMRFVPVKDESQQAMQCLHRTRQGFIEEKTAIYNRLRGLISEFGVIAPQSTDALRHMVSQQKSSLPLQVQQCVDDLLEHVARIEANIAEYDRILSRMAKTDHRSQRLMELKGVGPTTACALVASIGNAHDFKNGRQLAAWLGLTPSQYSSGGKSKLGGITKAGDSYLRTLLVQGARSVLIGAEKRTDSFSRWVC

SEQ ID NO: 231683 - protein, 342 aa, unidentified
MSRYFGVDLHRNCFTVCTRLENGREYLGSYKLEHLPKFTSRLRGDDAVAVEVTGNTRLFYDAVLPHVSRVAVVNPSQFEVIRKSVKKTDDHDARALALFLSKDMLPEVRMKDHEHAEMASLTQTRDTLVKSRTALKNKVNNLLSARGINLARESLASEKGLLEVLGLFFGSTVDVELRVLVEQIRSLNRSVAELEKAISEQGPKLPGHENLTSIKGIGDVGAGVLLSVIGDVNDFADEGKLAAYFGIVPRVSNSNETQHSGRITKRGSKLGRTVLIQCALIAKRYSEYLQRYYERIKARRGAGKAIVALARKFLGIIYRTLKDNLIWEDFPNGVIRDAQAPS

SEQ ID NO: 231684 - protein, 320 aa, unidentified
MEANGYIGIDVAQEWLDIAARPNGDAWRARNDETGIGELVGQLVERAPRLVVLEATGGLETALAAALTAAALPFVIVNPRQVRDFARATGQLAKTDAIDARVLAQFGEAVGPEPRPLPEAVTRELAALMARRRQVVGMLTAEKNRLRSAARPVRRDIQQHIHWLERRLAGLDGDLGKTIRQHAQWQDRDRVLRSSPGIGPVSSGTLLANLPELGRLNRKEIAALVGVAPLNRDSGTLRGRRTCWGGRSHVRSALYMATLVGVRCNPVLRAFYERLLAAGKPKKVALTASMRKLLTILNAMARSNTSWQDPAPTLALQDSC

SEQ ID NO: 231685 - protein, 347 aa, unidentified
MSITMIGLDTAKSVFQIHGVDETGKTEIRRKLSRNDLISFFKKHELCTVVLEACGAAHHWARILTGLGHDVKLIAPEAVKPFVKKGKKNDAADAAALCAAASRPDMRFVPAKSLEQQGILALHSARSLLVKQQTMLANAMRGLATEFGLTVPKGIGKLEELAVLVEEDETFPMKARQAFTGLFDQCKALTESIMTFEAEIVAHARHDETARRLATIPGIGPITASLIAATVGDISMFKSARHFAAWLGLVPRQHSTGGKTRLGRITKTGNREIRKLLVLGATSMVYRAPQWNSAAGQWVRGILDRRPVRLATVALANKMARIAWALMTRKEVYQAKGRVTAVADAIA

SEQ ID NO: 231686 - protein, 339 aa, unidentified
MYPFYLGIDLHLKRTYMVLMDAKGEILNKGRISNQEITKYLQEKVPQETYAVLEATRNWPFMYDLLHEHVQRVDLVHAKGVRAIANAAVKTDQIDASALAHLARMNYIPKAYAASKEMRDLRQLLRHRGWMVNQRSKAKNRIHAALAAYNLISPVTDLFGVTGREYLAEVMEKELRPSARQVVEDHLAMIDHLTERIHAIEKNISLNERQNHIVNILKSMPGVGRLIALILLAEIGDISRFHSPKALCSWAGLTPRVHNSDAVVQHGHITKEGSRYLRTAMVQAATTACRVSPKWYRVHEHMALRCGRRAARVAVARRLLTVIYYMWKKDQPYQENYGQ

SEQ ID NO: 231687 - protein, 430 aa, unidentified
MKSNTQNAKIEAITEKTLVLGIDVGSETHYARAFDYRGIEYSKKPFKFSNTEAGFVTFKEWILDLKDRHEKEKVVPGMEPTGHYWFNLGKFLQDNEMKPVLVNPHHVKKSKELDDNNPTKNDRKDPKVIAGLVREGRYMIPYLPDGVYADLRTASNIRFQLQAELTRIQNRISRWFNIYFPEYKTVYGKPDAKSGMLILKAAPLPEDILTLGIDGVNQIWRDAKLRAVGKARAKTLIEAAGHSVGSKEGAVSARMEIRMLLEDYESRNMRLQEVMVLIEELVKGIPMAEKLLEIKGVGIRTVSGFLAEVGDISRFNNPKELQKLAGLALVENSSGKHKGGTTISRRGRKRLRYLLFEAAMSLVAKNPEFRELHNYYTTRRLNPLKKMQSLMAIAAKLIRVFYAMLTKGVDYDPKKMVSDIRRPEAYLQAA

SEQ ID NO: 231688 - protein, 343 aa, unidentified
MQAITTVGLDIAKSVFQVHGIDAGGQVVIRRQLKRRYVLTFFQKLPPCLVGIEACASSHHWSRELQALGHTVRLMPPAYVKPYVKRQKNDATDAEAICEAVSRPNMRFVATKTPEQQSCLMLHRTRHLFIRQQTAVINAIRAHLAELGIVAPVGRQGVEQLLGIVADPNDKRVPEVARVCIAALGTQLRVLKAQILEFDRMIIAWHRSNETSKRLDEIPGVGPALATALVASIADPKAFRSGRDFSAWIGLVPKQHSSGGREKLGGISKQGDRYLRSLFTAGALAVIRYAKIHGTKHRPWLTALLARRPTKVAAIALANKIARMAWAMMARGERYKEPVALAA

SEQ ID NO: 231689 - protein, 384 aa, unidentified
MKIDRTDTPTKAEYGTVYVAFELSKAKWKLGIVVPGSEKMSRFTIAGGDVAALAARLAAARAKAERHCEAVRIVSCYEAGFDGHWLHRWLLEHGVVNHEIDSSSIEVSRRARRAKTDRIDLDKLMRAFLAHLRGEPRACSVVRVPSVENEDCRRGTRERERLLKERTAHTNRIKGLLHGQGIRDAMPRKPGFIGSLADLRTGDGRPLPRRLKEEIEREHQRLCLVDKQLSDLEAVNRGELRAAAPGSNAGKVVQLAGLKGIGVAGGQKLVNEVFYKKFDNRRQVGSYLGAVGTPYDSGESRREQGISKAGNHRARATAIELAWLWLKHQPDSELSRWFQARVGDIKGRIRRITIVALARKLMVALWRYLETGVVPTGAVLHPSI

SEQ ID NO: 231690 - protein, 451 aa, unidentified
MLKLAIIISRMHECVFERAWENVPFEDDNSCPYQEQNKMEKQKNIVCGADIHKKFIMATILSRDGNKIRGRFGMTLDEILRFKEWVINNNCEAVAIESTGIYWISIYTVLEGSVEVILANAYKIKHTPGRKTDKRDSKWLAELCLNGMIEPSRIFPKDDRELRALTRAREKLVNNSTQMKNRIHKELESACIKISSVLSDIFGVSGMKIINGLLEGKNIDEIIKMITSKRILKKEQELRKAVTNSLDPARILMIRTYLGLIEKIESEIEILNKEIMNRMQKLKEDLEIAMSMTGMGFSSASTILAEIGNYKDFETAEQLASWCGLTPKVSQSADKLVTGSITKQGSKHVRRMLVQVAHAIAKTKNSKLKKFFLHILAKKGKKKAIVALARKVLCILHHLLVNREKYQDAEMSKTMKVKLNWASSPVQMTEQDMINVLVGAGYTVQKMRECV

SEQ ID NO: 231691 - protein, 432 aa, unidentified
MNDLLKYIVKQNNIFTHYKDSIAMKRYNKNKEIDSQTAIVTADIGKTNHYGYIRSTTKEVKTFRFSNDKEGFDMLWNKVEEFKKSNNLEEIVFGFESTGSYGEPLKLYMQQKGATLIQVNPMHTKRLKELSDNSPNKTDKKDPRVIADILMLGHGLTTIIPEKKIADLREQVQSRENRLEDINRVKNRIEALLAKHFPEFLLIMGLNTKTSMYLLKHYPTARAIGKKRKNKLAWKVYKISRSKIKYSKVVKLHQSAINSVGVKEGQHAYRAEIRRQLEQIELLEDQLREIEKQIKAILEQLPEGRILRSVKGIGIITAAYLISEVVDFKAYSVQKEIEKLAGLNLYEISSGKHKGQRRISKRGRALIRKVLYMVVLNMVKKSGIYYEDYQSYLKRGLKKIEALVIVMKRLLRTVYALVRKNEIFRENYRVAA

SEQ ID NO: 231692 - protein, 406 aa, unidentified
MPCGLQAEIGPIRTHDVLVIDETSRQVSSCRVTHTVEGLRQLQAFLLSICGPARKEEMACIIETTHGLLIAARLPAGFPVYPVNPKTVDRHRRASGAKTDQIDAYLLAKHGRAEWADLRRLEPDSSIVAELKALTRDQESLIQSQTRLVNQLTACLKAYYPVALTLFSKLHQRSTWLFLQTYPPPEVAMAASAQQITLVLKKAKHPQAEQVAAKIYHKLHQPHLRADAITTRTKARLMPVGIKQLLPLLEEIATYDEEIERLFLMHEDNEVFSSLPRAGKRLAPRLLAEIGDDRTRYAKTASLQALAGTSPVPYESGNYSKPHRRYACSKPLRNALQQFARPRTQTEAWAQDYYRRKRQEGKSHSEAVRALANLWVRIIFAMWNKKEKYQTRTFEEAQRLHAKRTA

SEQ ID NO: 231693 - protein, 413 aa, unidentified
MKTWKEITHCGGLDWAKNKHYLVILNAEGRIVAEFGFEHSAEGWSQFREKLRAFPAVAIAVETNQGAAVENLLQTDCTVYPVNPRSACHYRERKRPSGDKTDAVDAWGLADALRLEGATWKPLTPEDPHIVQLRLLCRDEMALIAQRTALVNQLQQALYEYYPAALEAFEEWTQPAAWAFVAAFPTTHALIQAGRRKWEKFLHVHRLWRPTTAEKRLEIFARADQFCGAEAVTAAKSRLALTYVPMLQVLQKRLDEYRVRIEELFRQHPDHQWFGSLPGAGAKLAPRLFSEIGSDRGRFEDANGLQCLAGTAPVRYQSGQINRARLRYACNKHLRYTVHLWADLSRASCPWAQSYYEHHREKGRGHADALRRLGNRWLKILWKMWQTRTCYDADQHTRNQTEHGSWVLKLENA

SEQ ID NO: 231694 - protein, 317 aa, unidentified
MSELLAGAKPARLRVGVSPRPPWAQKPGTELGAAPTLAVPNPDSRLGLSPHSQGRVMDELSAVFVGIDVSKDRLDVHLRPTGDAFCIPRDAKGLDSLTGRLNDLPIALVVLEATGGFEATVAAALAGAGLPLCVVNPRQIRDFARAMGRLAKTDTLDAEVIALFAERVRPQARPLPEPERSHLAELVGRRRQIIEMIGMETNRRGHVVDKHLAKRLERHVLFLQKELAAVDHDIGQAIKTSPVWREAEALLKSVPGIGDVTARTLLAELPELGTIGRHQLAALVGVAPINRDSGLMRGRRTIAGGRTSVRTCCTWRR

SEQ ID NO: 231695 - protein, 344 aa, unidentified
MDHFAGMDVSVKETSVCILDDAGKIVKEVKVASEPQALLKVLGNPAYRFKRIGLEAGPLSQWLFSALAEAELPVICVETRHMQAVLKAQINKTDRNDARGIAQMMRAGVYRPVHVKTLRSQKLRMLLTHRKLLQSKAIAIENDLRGTLRNFGLKVGMVGMVGFEARIQALVATIPDLAMLVEPLLVVRRALREQIVILHRRLLAIVRDDEVCRRLMTTPGVGPVVALTYRATVDVPARFRKSKSVGAVFGLTSSRHQSGEIDWNGKISRCGDEMMRVMLYEAAQSMLRSKKWSWLKAWAMQIARRRGMKKAIVALARRLAVIMHRIWVAGTEFRFTREQAAAAA

SEQ ID NO: 231696 - protein, 413 aa, unidentified
MSQKAYLGIDLAKGPSKVAAIDEDGDEIVSPFSISNSREGVEKLMSKLHSYKKSDIICAMEVSSNYWENMYSYLNQKDISCILLNPYQVKKYRQALGSKIKTDSIDAAAIASLVRAKKYDSLCVSDEAVLELRELVRMKHSFGRRVKDLKRSVLALLYLTFPEYTKIISYPFSKVSMQILSKYPTSFHMAKDGTVGRLVKIFRRYQGCNFGADKAKELIAVAKDSFYSGKASRSRGMSICMQIEEIASLSLKISEIESEIKSILNPDDPKDGYRQDFDILNSIKGVGIGTIAAFIAAVGDVSRFSSSDKLVSFIGFYPKIFESGKYKKKNPTIVKAGPKDLRYMLYMSSVAAVKHNSHLKKYYYDMVSAGMPVKKALIKVAVKIARMMYSMLKYKQYYDPCRVFLQQAPAVAA

SEQ ID NO: 231697 - protein, 379 aa, unidentified
MATTTMTHPTRDVTTTRSQRTHTKNTPTVGGVVGGVDTHRDTHTAAALDSTGRLLGTATFPATPTGYQALLAWLQGFGLVNEVGVEGTSAYGTGLAGYLHAQQITVFEVDRPDRRTRRARGKSDPIDAEAAARAALAGQRVSTPKHHHGATEALRIVRVARHSAVFARAVVLQQIHALLVTAPEPLRGQLRGLRMTALITRAAQDLAVLTDPAGVGDPTLATRLTLHRLACRHEYLSREITESDRVITALINQINPALLGVFGVGPDSAGQLLLTAGGNPARLRSEAAFAHLCGVAPIPVSSGRTDRHRLNRAGDRQANAALYRIVLSRLRWDERTRGYVERRTAQGLSKKDIMRCLKRYVAREVYTVLTSTNTTTSAT

SEQ ID NO: 231698 - protein, 399 aa, unidentified
MIAVGVDVSKSKSTVAIISDTGEIIQSPKEYCHTYSQLQPLIALLKKQCDEVKIVMEATGHYHYPILKIFLENHFFVSVVNPYIIKKYNDNTLRKVKTDKQDALRLAFYALEKSHCLTAYTAREAKYADLKFLYQQYTQRLHTIQKEKVNLCHILEESMPGLYDVLATSVRNPEKNLLYAVVKTFKSFEYIKQMSPERFFNRYSKLATAIGSRKRKNYALLIYEMAQNSICTRGNDPYTSIALEECLNSLILAEKAANRLCEQMNFIANTLPEYITVRAMHGVGDKLAPQLIALIGDVRKFKSGKALNAYAGNDAPPYQSGQFESKNRHISKRGSTELRKICFEIMCCIKVHKTTEDPIYCFMEKKEEEGKAKKVAIMAGVNKFLRTYYAKVMEVYKDI

SEQ ID NO: 231699 - protein, 334 aa, unidentified
MEKITTVGIDLAKAVFSLHGVDGAGRVVLRRTVRRDQLLEVVAGLSPCLIGMEACSGAHEWGRRFQGLGHTVRLMAPKFVAPYRKSGKNDGNDAEAICEAVTRPSMRFVPVKSAEQQALLAMHRVRQGFVVERTATINRLRGLLCEFGVVLPLRSVTVRRQAAQAAENLPELARRAIGDLLEQLRVLDERIGGYDREIEAQARLCEPAQRLMKIRGIGPTTALAIVATVGNAREFKNGRQFAAWIGLTPSQHSTGGKPRLGHISKRGDAYLRNLLVQGARSVLNSAGRHQDRMSRWILELQPRRGYYRTLVAIANKNARIAWALLAKNETLRAA

SEQ ID NO: 231700 - protein, 338 aa, unidentified
MGYFVGIDLHGDNNYIGILDEEDRRVFKRKNRNDIKEITRVLEPYQEEIEGIVVESTFNWYWIVDGLMEAGYRVHLANTAAMQQYEGLKYIDDTRDSFWLAHMLRLEILPEGYIYPKEKRAVRDLLRKRMMLVQQRTAHILSMQTMVNRNKGVPISSDTIKKMSDEEVEGLFSDEHLVMSAQCDHKVIGVLSEQIDKTEKAVLKEVKLKKPYKKLLTVPGIGEILAMTIMLETGDIGRFREVGKYSSYCRCVSAKKVSNGKNKGKGNRKNGNKYLAWAYVEAAHFHVRYCEEARKWHQRKASKSNAILATKALSNKLARACYYIIKEQVHYDKKRMFG

SEQ ID NO: 231701 - protein, 412 aa, unidentified
MDVIYPQCCGLDVHKKTVTACLITSIEGLEPVKEIRTFRTMTADLLALADWLQEAGCTHVAMESTGVYWRPVYNLLEGQFELLVVNAQHIKAVPGRKTDVKDAAWIAELLRHGLLRGSFIPSKPQRQLRELTRYRSTLVQDRARTLNRLQAVLEDANLKLASVVTDIYGVSARAMLEAILAGERDVEALADLARGRLRAKRDQLKEALEGRVTAHHSFLLTEHLSTLEYLDEAIARVSGEIDQRLIADQEAIALLDTIPGVGQRAAEILIAEIGTDRSRFPSAKHLASWAGMCPGNYESGGKRLSGKTRKGSRWLRQVLVEIAHVAAKTKNTYLAAQYKRIAARRGKKRALIAVGHTILTIVYMMLTRKQPYQDLGAAYFDQREQQRVERRLVQRLERLGYEVSLQPRALAS

SEQ ID NO: 231702 - protein, 343 aa, unidentified
MERELFIGVDVSKRWLDLAYYDGVDVDWKHGHIRVDNKESGFVQIGKWLNGLGADKDSVLFCMEYTGLYCQDLRAWLEKEGFVYGMVNPRKMHRFEPDLAAGERALDRIKTDEMDSFRIAMYCEKHCRKIRSQPSRLPAPAYFKLKRLIAERRQYVVQSALYKQQLHDVCDYDTDGSVCRKKEELKSLMAHVRQTDAEILSVMEEDACIKKNYDLLRSVTGIGIVVATETIILTENFTSITNPRTYACYIGIAPAKKESGDSVRGGEHVSRKGFTQAKADLSMACLKAIQTDANIKSYWQRRKTDGKKGGVVLNAIKFKLVLRMFAVIKRQKPYVEIDGYRKN

SEQ ID NO: 231703 - protein, 358 aa, unidentified
MRVQSKGLNFKGQNIYIGIDVHKKDWKVRIQSDELTYRTFAQPPSVAALVEHLHRNFPGATYYSAYESGFSGFWAHRELVSQGVNNIVVHAADVPTTQKERAFKNDKRDCRKIAHSLCKGELEALHVPSIKTQEDRSLVRLRLTFRKDLTREKVRVKSMLNFYGKKIPEQFLSSSHWSKAFIEWLKGVKFETGSAEQALKLLIGQVEQMRSGLLDVTRKIRKLATSEDYAANMELMLKLPGVGFVTAIAFLTQLETIDRFLNTDSLAGYIGLVPNCHSSGEKENTGEMTYRGNKWLRELLIEAAWSAARSDPALHLAYLNLCKRMKSNNAIIRIARKLLNRMYYVLKYKREYQKGIVQ

SEQ ID NO: 231704 - protein, 344 aa, unidentified
MVTTIGIDPHKATHTAVAIDETETVLGELTVPADRDQTKTLLDWAQNLDGDGRVWAVEAAGGLGYLLSQQLIADGEQVVDVPPVLASRVRLLGSGRSEKNDPNDARSVAIAALRQPRLAVVRPEDHTQVLRMLAKRHLELTALRTQAVCRLHAVLAQLRPGGMGRRLSAKQASRMLQGMRNLDVIGEQRRMMARTHLADIRRYDREIKTNKVLISKAVVASRTTLTDVYGVGPVVAALLIGYTNNIGRFATADHYAAYNGTAPVEYSSGGKTKHRLSMRGNRVLNHAIHMAAVTQISHDTPGRIYYDKKQAEGKTRKEALRALKRRISDVVYRKLLADQRTKTR

SEQ ID NO: 231705 - protein, 392 aa, unidentified
MTEPYLIKWLSKYPKDGGWMYAACKANLKKEMKNMNHLGIDVGKRKCSRAALKDDKGMMLDEFFFGNDMSGIHNMLSRIQSHGKGATIRAVLESTGNMWIRIHDTLEENGIDTKLANPYKTRIIAEAKIKSDKLDARILSDLLRTDLIYESYVPNSEDRDKRSLVRHRITLSRTKTKLANKVHSILDKYDYQTDLTDIFSKSGIEWLKSLSSIVTPVDRIILNTSIESIEAINQQVDTVSKEISKHARDNKDVKILLSITGIDIFSAMLISAEIVDVRRFSTPWKLVSYASLAPSIRESSGKIKTGKITKQGSSPCLRWILVQCALTAIRFDAHLRIFYDRIRNKRGHATAIVATTAKELLVIIWYMLTRNELYRYMNKQRYEQKLHKLEHR

SEQ ID NO: 231706 - protein, 351 aa, unidentified
MITVGVDAHKRMHVAVGVDEAGREIGRWEGRNSSSGWRELSSWAQSIGDDRQFGIEGAWGYGRGLAQLLVGTGEVVYEVSARWTASQRRSARRPGKTDNLDALAVAQLVRQEAPRLPRVSAEDETALLDLLTSERQAVLAESIRLRNQIHALLVQLDPDYKTSMVNLKSEAALAVLERYVAPDSNPMQQERAAVVRRLAERLRLALRQLHEVAGRMRELAVPFTALTRLCGINLLTAGMLAGILGPGRRFATDAQLAAYAGVAPLEASSAGVVRHRLNRGGNRRLNAILYRIALTQARHSAEARTYIARRMTEGRSRREAMRALKRYVVRAIWKLWHECWPAVDVSVATAA

SEQ ID NO: 231707 - protein, 340 aa, unidentified
MGEYIGLDVSLKETAVSIRREGKRVWRGKCASDPQLLAALIRKHAPEVVRVVFETGPLSVWFFHALSAEGLPAICIDARHAKAALDMAANKTDANDADGLAHLAEVGFYKEVRVKSFDSMLARTLVAARTRLVRIGTELSNQIRGLMKTFGLVVPPASGSKFERQVEALLAGNADLGRIIRPLLEAWHAVRLRAAELGRKLLADARRSDACQLLMSIHGVGVVTATSFITAIENPTNFKRSRSVGAWVGLTTRRYQSGEIDYDGHISRRGDSHLRGLLYEAATVLLVRSRSECDLRKWGLQLRERLGFKRAAVAVARKLAVIMHAMLVTGEPFQETRTSA

SEQ ID NO: 231708 - protein, 362 aa, unidentified
MGQVSTIGVDIAKSVFQIHGVDADGTVVIRRRVGRARVLEFFADLPPCRVGMEACATAHQWARELEKLGHDTRLMPPTYVKAYVKRGKNDAADAAAICEAVTRPSMRFVPIKNVEQQSVLMLHRTRDLLIRQRTQLINALRAHLAELGLVAAKGREGLHQLVTVVTECGDERLLSNARFACQAIVTQLHAVQIEISGLDKRITQIHRTNADSKRLDTIPGFGVILSTAVVATMTDPKVFRTGRDFAAWIGLVPRQNSTGGKERLGSISKQGDRYLRRLLVVGATSVINCARARPYKYPWVIELLGRRPTKVVAVALANKMARIAWAVLAKGSPIGRQHAQATPSSQRRPEPLAFDCKVTSRT

SEQ ID NO: 231709 - protein, 402 aa, unidentified
MVNVGVDLHKTQFTVCVRTPAGERFGKYPTTDYGYELFLNEIAVWQKKGKAVRVGVESTGNTRYFKNKMEDAGIEVTVINTLKFKVVNSSVKKTDKYDAATIAEFLEKDMLPEACLCSRESEQMRRLLKVRTTLVRSQVVIKNQIHALLTAEGLEGVKGSLQSKKGRKQVLATLNQCKNGLVAQPLFEMIDRLDENVNVIEKQLKTLAAGDRMVELLMTIPGCGEVSSWTIRAYTDDIKRFSNFKKYAAYAGLAPLVQNSNETTRHGKITKRGPEQLRTAFVQVVMGLRRMKKKTLSWRLMQRYEQMKVKKSSGKAIIATARKMATIIWHMLNEDSCFNLGLMTDRKLNEKSESMSRLTKLETGETFIVREIFEIKPEKQVLKKTKKTEKKLALPDKKKKVG

SEQ ID NO: 231710 - protein, 312 aa, unidentified
MADILCGVDISSDTLDARIGRTGPWRQFPNSTDGIADLAAFCREHGVTLAVMEASGGYERLPFAGLWAARIPVALVDPRAVRRFAQAMGRLEKTDRIDSAMIVWYGEAKHLHPTPLASATQQHLTALVVRLRQLTDLRTQQTNQRRLIADPTVLATFSAVLTTVATQIRTLEHQIVGLIAADPLWTALDAACREIKGVADRTVARLLAALPEIGTLNAKAASKLTGLAPLAHDSGKRHGKRGVRGGRESVRTVLYVVARLVCRYDSEFAAFRDRLKAAGKPAKVIRVALAHKLLVRLNAKARDARKVLAPAV

SEQ ID NO: 231711 - protein, 498 aa, unidentified
MRLWRTTWHENEVQKQYRWAGQPVIQATLDGDCLEVGTYSVTTQIPRRRLTRAGKGITFCRTRKREGRIAVSVTNLRRSNRLHYGGVMQTLVERGCGLDVHQATVVACLLIVLQNGKVQKQIRTFGTTTRELLSLREWLLSEGCTHVAMESTGVYWKPIYAILEGAFQIVVANAQHVKKVPGRKTDVKDAEWIADLLCHGLLRSSFVPPKPIRELRDLTRYRRKLVESQTAERNRLLKLLETANIKLASVATDIFGVSGRLMLEALVEGKATPQEMAELAKGRLRQKIDELGPALEGKLEEHHRFLLRLQLQRLEAAEKDLAVLEQRIQEKLKPYEAQLTLLDEIPGVDWTLAAVIIAEMGVDMSVFGSVSQAASWAGVCPGNNESAGKRKSSRIPKGNVYLKTALVEAASAAAKAKGTYLRDKFYRLKARRGYKRAAVAVAHKILVAIYHMLSHQVCYDELGDLYLDKLNKHHLTRNLVHRLERLGYNVTLEEKKAA

SEQ ID NO: 231712 - protein, 355 aa, unidentified
MNEAKYIGMDVHTATISAAVRDSSGNLVMEATLETKSETILEFVHGLRGSLRVSFEEGTFASWLHDLLKPHVTEVLVCDPRKNALLRVGNKNDREDARKLSELLFLNKLHPVYHGETGIRTLKELARSYLTLTRDLTRMMNRLKAIYRGWGIACGGQQVYAPRYRAEWLAKITEAGVRRRAEIYYQQFDVLVALRQGVRRELLAESRKHPARRLLRQIPSIGPIRAALLIALMQTPHRFRTKRQLWAYCGLALRTYDSGEYRFVGGQLKRSKKAVTIRGLNKNHNHDLKNIFKGAATRAAATAGPLQNFYEARIANGMKAPMARLTLARKIAAITLLVWKKGVRFDAEQLKQQAA

SEQ ID NO: 231713 - protein, 376 aa, unidentified
MKRHGEAFVGIDAAKARNAVAIAEGGRDGEVRYLGEFDNTPDGVSKLIRKLADRYEVLHVCYEAGPTGYGLYRQVLGLGHACTVVAPSLIPRRPGERVKTNRRDAQSLARLLRAGELTAVWVPDETHEAVRDLVRTRAMAVEDYRRKRQHVTSFLLRHGRMYAGKTSWKGRHLRWLDGQNFAHPAQRLAFQEMLNAVRATVERIDRLEAALIEIVPSWTMAPVVSAFQAMRGVQFVTAATMVAEAGDLRRFDHPRQLMAFLGLVPSERSTGETRRQGGITKTGNASARKALVEAAWTYRHSAGVGRDHQQRQANLPQQVRDIAWKAQTRLCARYRRLTAKGKRNTVVVTAIAREIAAFLWAIARQVDPIPSPAANG

SEQ ID NO: 231714 - protein, 409 aa, unidentified
MVVHAAPVTRSTVVVAIDVGKNEFAVSVTDAARGKLLKPRLGCPMTGTSVRGLVDTIQRLLPADADVKVGIEAAGHYHRPLLAAGSWPAGWELLELNPGHVTEQRRVLGKRTIKTDTVDLEAMTELLLAGRGLPVRDRNTVLAELTAWSAHRTGRIQIRTATKNQLLGQLDRSFPGVTRALPDVLGTKVGRLLAAEFADPARLAALGSSRFIRFGATRGLQIRRAIADRLVAAAKDALPMPDGAVARAVLAADLTLLADLDAQIDAATAELVRLVPLSPFRTLLTVRGWGAVRAGNYGGALGDPARFTSSRQVYRAAGLNPIQYESAGKRRDSVISREGSVELRRALIDLGLGLWLNDPAASRHAAALRGRGKKGLVVACAMAHRANRIAFALVRDQADYDSARWMRED

SEQ ID NO: 231715 - protein, 378 aa, unidentified
MLSENIIHIAIELSVSSWLVAVRLPGTEKSRLHRITGGDTTALLALIAELRARASAKLGQAVEVACCFEAGRDGFWLHRLLTAQGIAAYVLEPTSILVNRRARRAKTDRLDAEGMLRVLAAWLAGDGQICSMLRVPTPEDEDAKRPHREREHLVQTKLRLENRIKALLFTQGIRSRPSLRSWERDMAELRTGDGRALPPLLRSELDRLRRQLVLILELIRELEAEQAAAIEAAADDAMVQKIVGLQRIRGIGPNIAAVLVREVLYRSFANRRQLASYVGITPMPHQSGGMDRTRNISRAGNPRARTTLIQLAWLWLRYQPGSPLALWFRERVGALQGRTRRIAIVGMARKLLIALWRYVETGVIPDSVEITTPEAATA

SEQ ID NO: 231716 - protein, 317 aa, unidentified
METGQVVVGIDVSKRRLDIAVRPGGACWTTETDQTSLRTLAQRLVKLAPERIVLEATGKYERPLVAVLAAAALPVVVINPRQAREFGRASGRLAKTDRIDAGVLAHFAEAMRPELRPIPDAAAQALDELVARRQQLVGMIVAEENRLDTSSPATARRIQTHVRWLQRELRVVEDALDEAIRTSPVWHARDRLLQTVPGIGPTTARVLIARLSELGTLNGKKVAALVGAAPLNRDSGVMRGKRRIWGGRAAVRQALYMAVLSAARFNPVIRAFYQRLRAAGKPHKVAAVACVRKLLVILNAMLRDQRAWSPREVPMAA

SEQ ID NO: 231717 - protein, 374 aa, unidentified
MSKVRFLGLDVHADTIAAAVAEPNGEVRQLGIIPNRLESIRKLVNKLQPVGSLRACYEAGPTGYVLYWQLTALGVKCEVIAPSLVPTKAGDRVKTDRRDAVKLARSHRSGDLTAVWVPDAEHEALRDLVRAREDAKQDQLRARQRLGKFLLRHGKRPESTMKVWTGKYMEWLKSKVHFEIAALEATFLDYVHEVTHQAERIEDLEKAIDAAIAAAPAQIRAVIEALQALRGVAKITAVTIVAEVGSFSRFENPRSLMGYSGMVSSEFTTGNQVRRGKITKTGNAHLRRVVGEAAWAYQRRPWVGGFLRKRQQGLDQEVKDIAGKAQTRLHSRYTKLTGRGKNKNQTVVAVGRELLGFIWAIATRTEAKFQKQAA

SEQ ID NO: 231718 - protein, 352 aa, unidentified
MARLAGDADVIIGVDTHLDCHTAAACSTTGRQLALVQIPATPAGYAQVLAWARAAAGGGRVAWAMEGTRSYGAGLARYLAAGGEQVTEIDGSRHLGKRRAGKSDAIDAVRAARELLARPHPAQMRADGDREALRLLLIGRDHAVQAAKAARTALASILVTAPAPLREQLRRLPAKRRPAACAAWQCPPGTDRVTATTCQVLASLGQRVTALTAEAAHAEAQIAAIAGGMTPGLVAAEHGAGALTAARILLSWSHPGRIRSEAAFAMLSGSAPVPVSSGRTSRHRLNRLGDRQLNCALHTIVLTRMRSHPATLAYAARRHADGKTDREIRRCLKRYLARHLYRELNRRARPAT

SEQ ID NO: 231719 - protein, 371 aa, unidentified
MQHTRFIGLDVHKERISVAVAESGRSGTVEYLGEIANEPSAISKLCDRLGRPGKRLSFCYEAGPCGYGVHRQLAGLGHRCEVVAPSLIPKKPGDRVKTNRRDASMLARLHRAGELTAIWVPDADHEAMRDLVRLRSVVRYVVTRARQHLQGFLLRHGRKHGRGRAWGLSYRRWLSSLTFEHAAQQIAFQDYVDAVTDAERRLKHAEEQIFSLVSEWNLRPVVDALQAMRGIALINAVVLVAEVGDFTRFANPRQLMAYFGLIPGERSTGETVRRGGITKTGNSHARRALVEGAWAYRMKPRVGRHKVDRIEALPKAVRDIAWKAQVRLCTRYRRLRARGKTANVVNVAIAREMVGFIWSIACTIQSAPKAA

SEQ ID NO: 231720 - protein, 316 aa, unidentified
MTQVYCGVDVSGAALDARIGPSGPELRVARTPEGVAELAAFYRAHGATLVVMEATGGYERAPYVQLWAHGVACALANANAVRQFARAMGFLEKTDRIDAGVIAGFAAARAIGPGPAPDEDQSRLRALVTRLRQLVELKVDQANQRRLVDQPAVLDGIDELTALVRRQIRALEADIAAALDADPLWRRLDHAFRSIKGVAGRTVARLLAELPEIGALGGKAVAKLAGLAPLADDSGRRGGRRHIRGGRGHVRSILFVVAEIVRRHDPDFAAFHRKLKDAGKRPKVVRVALARKLLVRLNAKARDVRAEFAAHTLLAA

SEQ ID NO: 231721 - protein, 423 aa, unidentified
MAFMKDCCCGVDVHKSFIVAVIAKLKGKDVIFTGYKRFSTFKKGLLEFKEWLGMHDCYEICMESTGKYYIPVYRTVADETFHVDVVHPKYVKAPRGKKNDKKDAKRIADMYMRDHIAEYSIIPTAEILAIRDVARYRRKTVYAITAEKNRMSNCLTVSGIKLDEVLSDLYGKTGQALIGETIQRGSCDFNPEPFIDKRVKATPEEFREALDGDITPATLIKMKMIQERMGFLCNQKTELELSMTSLSKDFSRQLEILDSAPGVDSISAISIISEIGSDMKVFGSVKKCLSWVGVVPQNDESAGKKKTTRIAKGNSWLKPVLVQCANAAIKDKKHPEIREKYLAIKKRRGHGKAIIAIAKRLMTAIYFMLLRDQMYAPRLGKDTAPKRGKISLEKLIEHYQSQGYTIISKGLNVPALCDDNVAI

SEQ ID NO: 231722 - protein, 312 aa, unidentified
MTDITIGADISKEHIDLHSLPDGQTLRATNDGKGFAAILQWIGAKSVERIVYEPTGPYHKAFERFMAANGLALSKVNPRLARRFAEATGRLAKTDKIDAGLLARYGALLQPRILEANTQLLNDLKELHVARLALAKDRTAAKNRGKNLSNPLLKKQNADRLRQIERQITAVDDAIMALIGKDASLKARLDILVSIPGVSEITAFTLLIEMPELGELDEKAAAALSGLAPMCRQSGRWTGRASIAGGRAIVRQALYMPALVASRFNPDLKAKYDVLTKAGKPPKVAITAIMRKLIMLANALLRNNRKWTPKPA

SEQ ID NO: 231723 - protein, 474 aa, unidentified
MARTRSRPASPPVPGDAGAEVTDEPVQVISRAAAIDVAKGSGMVCLRLPHESRAGRRTQKVWEVTATFASVVALMDHLVCQGVERLVLESTSDYWRIWYYLAEAAGLEVWLVNARDVKHLPGRSKSDRLDCVWLCKLNEWGMLRRSFVPPEPVRDLRALTRLRANLTHDRVRHQNRIEKILEDALLKVSSVISDLMGGSGRRFLQALADGERSPAALAALGDYRLHASKAELQEALTGRFRDIHGFEISMLLKLIDDLSAKITELDERIEAQLENVPGLGGVCTSCGQPGPDGPCTGCGEPVLGVIARLDEITGIGRGAAQVIVAELGTDMTQFPTPGHAASWAKLTPRAIQSGATSKAGRTGKGDPYLRGATGVAVMTAARTGTFLGARYRRHARRRGKQKAIVAGSRTIIEIAWRVIADPGFRYIELGPDYHDQLDPGRKTRDKIRQLEKLNPGMTVTLTPRPERGEQSPAA

SEQ ID NO: 231724 - protein, 416 aa, unidentified
MTFKIVYPVCCGIDVHKSFVVACIAATNEKGLTTYKRRRFSTFTGDLRLLSEWLAQNNCKDVCLESTGKYWHPVFNVLEQTCNVILAHPKYVRAIRGKKTDIKDAKWIADLFKHGLVVPSFIPPFKIRQLRDLMRYRVKLTSFRTGEKNRAQNCLTVSNIKLDDVFSDVFGKSATAITEQLLLNPNGNFDVSQFVDRRCKASLEKVQDAVDGFICHEQIEKLKIIRSHLANLEECRTGLESVILSLSKPFQPQIELVLTVPGIQLFSAIAIISEIGVDMSVFASAKHLASWTGLVPQNNDSAGKKKTTRISKAGSYLKPLLVQCALTVCKSDKHPEIKNRYLALKKRRGHKKAIIAICRMLLTAIYAILKKSEPYNPNLYRKEISVPANRALTMEQVVAFAKRRGYVIIDPDGVVA

SEQ ID NO: 231725 - protein, 356 aa, unidentified
MVSSRGRTAGKQGKEAAMVLYGGMDLHGDNVFCTIMDQAYRPVFEERLPNELPVILEALAPYRERLKGVAVESTYNWYWLVDGLQANQYPARLANPARMQENIGLKSANDKTDARFLAKQMAMGVLPEGYIYPKEERPVRDLLRRRMRLVHMRTGEWLNLEGQVARHSGRDLGLTALRGLEAGELSQLLGGDPLVLEAAQINYRLIAFLDREIRQIEKAVEGRVKLTDGYERLLDVPGIGRILAMTIRLETGSIARFPGPGNYASYCRAVKTEHTSNDRKKGEGNGKSGNRYLAWAYVEAANFSIRYSPELRAWYQRKAARTKRVIALKALANKLAKACYFILRDGVAFDVKKLVG

SEQ ID NO: 231726 - protein, 483 aa, unidentified
MKAKQQEKDKKAICRPTQNNWHEMNRKQRREMTRKIQSEDLSLEVVHPDAAGIDIGNESHYVAVPPTRDSQPVRRFGCTTAKLKEMAVWLKQCAIRTIALQSTGVYWIAVYDILEEAGFEVYLVNARETKNLPGRKSDVQESQWLMKLHTYGLLRNSFRPSQEIRTMRTYWRQRNDLVRSAGRHIQRMQKALTQMNIQLANVLSDVSGMTGQAIVKAILAGERDPYQLAALRNWRVKASEEEIARSLEGNWQEDLLFVLQQEQDGYEFCQRQMAECDQRLQQYLQQQKDRSHGASLPEEKRKERLRKKKKGNAPQFDLRAELFRVTGTDLTQIDGIDVTTTMTILSEAGWDMSKWKTEHHFVSWLRLCPDNRISGDKIIGKGRLPTNNRVTNALRMAASTLRLSNTYLGAQFRRLRTKLGAPVAIKAMAAKLARLVYRMLRYGMTFIDRGAEFYDAQHRKLQINYLKRKAANFGFQIIEVPAA

SEQ ID NO: 231727 - protein, 348 aa, unidentified
MRFYTQQHQFYCGIDLHARTMYLCILNQDGEILVHRNMPAGPEPFLKAVAPYREDLVVCVECIFTWYWLADLCAREGIPFVLGHALYMKAIHGGKAKNDKIDSQKIAVLLRGGMLPQAYVYPAAMRATRDLLRRRMHLMRKRAELLAHVQNTNSQYNLPGIGKNIAYKANRDGIAERFPDPAVQKSIEVDLALIGHYDHLLNDVELSIVHTAKQHDPQTLSRLQSVPGIGKILSLVLLYEIHTIDRFPRVQDFVSYCRLVKCAKESAGKRYGTSGAKIGNAYLKWAFSEAAVLFLRTNSAGQKYLARLEKKHGQGKALTVLAQKLARAVYYMLRRKTAFDMSMFLQSS

SEQ ID NO: 231728 - protein, 383 aa, unidentified
MKSVCGLDVHKDSVYLCILSEFGELIEKVFGVLTYELEEMRDLMLHHHVVEVSMESTSVYWIPIWRVLSPHFKLNLANPYFIKQLPGRKSDVKDAQWIAECTMKELIRGSFVPPEIIQQLRQYDRRIFDLNEEIVRKLSKLDAVLQRCNIRLSNYVSNVDSKSYKAVVRAISQGITDPEELVKLIHGRIIKHHGMDVITASLKGVVSLAEIDMISQLRDELDMAEAHKEKCQARMLEICEREFPEELKRLQTIPGIKERAATSLIAEIGTDMNKFETANHLASWSGLKPRNDESNKKIKSRSITHGNVYLRKTIIECAWAASRTKDCFFSRFSYHQTQVRKKNKMKVLVAVARKMLVAVWHVLHDNTNYIDFTTDRKTSRTKG

SEQ ID NO: 231729 - protein, 405 aa, unidentified
MGQVFVGLDWGEDHHDVFVEDGTGKRLSGGRLSDGVEGVARFHELVGGHVEDPAQVVVATETDRGLFIGTLIAAGYTVLAVNPLSVSRYRERHSTSGAKSDPGDAKVLADLARTDAHNHRRVAGDSELAEAVKVLARAHQSMIWSRQRQTNQLRSTLREFYPAALEAFDELAGRDALAVLAIAPTPTLGRGLSRSKIAAALRRGGRQRRIEERAAEIQTALRSEQLDAPALVADAMGATVASLVTVIAVMQTQISQLEAELAHRFDQHPDAKIIRSLPGLGMTLGARVLAEFGDDPNRYADAKSRKNYSGMSPITRASGKHHVVLARYARNRRLADACYQWAFAALTASPGARHFYDQRRAGGDTHHRALRALGNRLVGILHGCLRHGTPYDEHTAWAHRLATAA

SEQ ID NO: 231730 - protein, 372 aa, unidentified
MRIVGLDVSRSVAEIAYLEDGTLHAGGRTGLRRDELERFAAKLRATDHVVLEATGNTTAIVNVLRAHVARVAIANPLQVRLIAEARVKTDKIDAAVLAQLYASGFLPEVWMPDERTLALRWQIARRSQLVRQRTRLKNEIHAVLIAHLIERCPATDLFGKKGRAWLGVQPLPLDERLGVEQRPRELGRLGDDLCEVEQALAQATIDDARLRVMLTITGVNTTVAIGLLSAIGDIARFPNPEKLVSYFGLNPSVYQSGPAPARHGHITKRGRSYARAMLVEAAWGATQAPGPLRAFFLRVRDRRGQQIAAVATARKLAVIVWYVLTRGEPFAWDRPALTAHKLRALELQAGMPAQHGSRKGSAAAYSLKSVRQ

SEQ ID NO: 231731 - protein, 360 aa, unidentified
MDKYIGFDIDSKKTVACIVQEGQKDRFTTLKTDIKHMKMFLKQQQKPGVKLHLTFEIGGEAGYRYDELADFVDDITVSNPTKMTWIYRTSKKNDRIDARKQAVLLSIGEVPKVHIPTREVRQWRVTIQHRRKILTKICQVKNRIRALLKANGLVKPVQSGSWWKLANRVWMRSFVTEQQINSKELWRMSLADMLDELDLLESQLKRVTDYLDCYLEKKAGGQLLMSIPGVGPRTAEAVLAYTDDIKRFSRGKQYCAYFGLTPRLDESGLTKRLGHISKQGPSIVRWLIVESAWRVIKKSPSLRAFYDRVMNGQKSRKKIAAVAVARKLLSIMRAMQLTGELFNEQLVCRECGFDNVKKTA

SEQ ID NO: 231732 - protein, 438 aa, unidentified
MKVLHEHVAGIDVHKDMIKVAIRSPGEKPWTRKTEVLEFRTFYGVLQEMARELRRRGVTHVAMEASGVYTEPVYHALCEQDFTEVIVVNPAHVKALRGHKTDARDCARIAELLECGLLHGSFIPSAEQKEVRDLTRYRMKTVQARTSEIQRLHKALESAGIKLGSVLSDITGVSGRLMIDALIDGERRAQVMADLAKGTLRQAGKQADLSMALAARFTDHHAMLCRLHRDQIKLADHAIAGLDAQIADRAGRWPRELGLLDSVPGFGDVVSAAWLAEIGPAPHRWFPSHGKLASWVTLCPGNNISARKRKHGRTGDAGTYIKPVLVQAAWAAIRVRGRLQARYRRLVRRFGGDKNPGAKKKAIIAIAHTLLKIAYQVLKTGQPYTDLGADFYTRRQSPEQQQAYLARRLQKLHPGCTVTITISPPPGSPPPSAPTEAA

SEQ ID NO: 231733 - protein, 388 aa, unidentified
MTQVDDLSRSLIAFEQNSTMVVVLEMSQSSWLAAGVVPGIERRPLKKLDPDPTALLRLVEGWRDHAMKSGRMITRIVLAFEAGRDGFWLARWLRARSIEPFVIHSTSVAVSREHRRAKTDRLDTEMLIRVFLGWLRGEPRHCKMVAIPTLEEEDARRPSRERESLIGERTRIINRMKAALIRLGIRGFKPELLKAPQRLEAQYTAEGVPIPPNMLDELRRDMARLAWVREQINAIEQARLERLEQAPSTGPHAMVRMLASIIGVGVETADMLVQEILSRNLRDRRAVARYAGLTGSPDESGVKRREKGLAKAGNARVRRGLIQLAWRFLRFQKESALGQWYRARTEGAAGKRKTTMIVALARKLLIALWRMVTTGEIPAGVALRTAAA

SEQ ID NO: 231734 - protein, 383 aa, unidentified
MQKNSTVSVSGSPVFVGLDVHKAFIQVAVHDPCVREVSEWREAHTDAGVCRLVKVLQREFAGRPVQICYEAGPTGYELSRHLNAENGMICSVIAPSLIPRKPGERVKTDRRDARKLAELLGAGLLTEVHEPSPEDEARREVSRARGAAQDDVKRAKQRLGKFLLRQSRRYPGKSPWTQKHLAWLEQQRFDLKHLQTTFDALLRALTQCLDRVRELEDALEEAAQDEAVVTQVGLLKCFKGVRTITAMGVITELYDFERFESPRALMAFLGMTPSEYSTGGRAKRGGITKAGNSRLRKLLVEAAWNYTRSNKTGVKLRKRREAQPGWAVDHAEKAQKRLNSRYWTLVAKGKHPNKAVMAIARELAGFIWVVLAEYNARHQEAHA

SEQ ID NO: 231735 - protein, 328 aa, unidentified
MSKERLCVGVDVGKDEVVVAVVGRKAVAFGTRPADLKRLMKWVKAPAESRGIHIGMEATGVYSSKIALALCAYPGVTVSVINPAQIKAYGRAVLRRTKTDRVDAQLICDFVRSQTPAAWTAPSAMQQELAALVTHTDAIRHEMQKWANRRHAHQHMTHLPAVIATSTAELVATLTQELATIEAAITRLCQSDATLADDMTIAVSIPGIGQRSAAQLLAYGGRALTQRTRRQLDAHAGLAPAERQSGTSVRGKSHIAKAGNARLRRALYMPTLVAVRYNPILKRHYDRHLERGKPKKVALTACMRKLLNILRAMLIARKPFDPAHQPLT

SEQ ID NO: 231736 - protein, 365 aa, unidentified
MKKVSTVAVKQSRNISEQQLTIGFDLGDRSSWYCVLDEAGSVLLEQRVSTTPKAMKEVFGAMPRCRIALETGMHSPWVSRLLAELGHEVIVAHARNVRLIGESRKKDDRLDAQTLARLARIDPQLLCPVKHRSAKAQADLTVIRARAGLVRARTALVNTARGLAKSYGERLRGCNVRNMNPEKAEGLSPELQRALEPLLAGIESLSERIGECNERIEKLAQESYPQVARLKQVKGVGTLIALTYLLTLEDAQRFRKSRDVGCYLGLQPGRRNSGQSEPQMHISKEGDPYLRTLLVQGAHHILGPFGVDSDLRRWGLKLAERGGRNGKKRAVIATARKLAVLLHRLWVSGEAYEPLRNQKAMPAAA

SEQ ID NO: 231737 - protein, 270 aa, unidentified
MPLWIGIDVAKDTLAVHVLPLDQLLSFPNTAQGHQRLCDHLAGHCVGNALLEATGGYERAVMTALATAGIPVTRINPRRARAFATALGTTAKTDPLDAALLARMAQLVQAPAPVPDPLREQLRMLVQRREQLVQQRDDERRRLHQATLAMVRACLIEQIGDLRRRIQRMNQAIKQVRCQLDDALAHALGTVPGIGEVTTASLMAYLPELGTLDRRQIAALVGLAPYNVDSGQHCGKRRIRGGRATIRRVLYMACWSVVRTQASFKERYQQ

SEQ ID NO: 231738 - protein, 315 aa, unidentified
MQTPLDIGADVSKDYVIVACAKQSLPTCKLANKRSALLAWLKGLPVASRIGMEATGTYHELLAILALRLGLVVYVLNAKDVHHYAKATGQRGKTDRVDTALIARYVAKEHSHLHPWHPASPAQRQLQRLVRRRAKLTSARATLRSSLQTLPSLRSELRALLKHFDVLLTKLDAQARKLIDICQERAQHFRRLNTIPSVGNTVGIGLLAALERWPLPRADAFVAFVGLDPRPDDSGRKTGRRRLSKRGDPELRRLLYVAAMSASRTRAWKPLYQRALARGLSRVEALVTLARHIARTAWSIYTHKSNFDPVRLHSH

SEQ ID NO: 231739 - protein, 307 aa, unidentified
MDVASDHLDVAVHGQPTVRRFANTIQGIAQLLRMVPPSSVLGLESTGRYHTQLAMAAHAAGLCVHVLNPLDARRYAQSVGQRGKTDRMDALVLARYICHEHAHLQQWQPPTACQAALRELLADRATLVRQRSALAQAGCHNKALARLDEPVLAAMQQAIAQIDEQLASTVQADPASQEAFEYITSVPGLGLVCGSLLVMLFGRMQTRSADAVIAFTGLNPRPNDSGKKTGQRRLSKRGWPEIRRLMYTAAMSAARTKTWNSFYRAQRDKGMSTTAALVVLARKLLRVAFSLFKKRVKFDATLVAASA

SEQ ID NO: 231740 - protein, 424 aa, unidentified
MKNTQNEKILQIKNDTLVVGVDIAKRFHFARAFDYRGIELGKLLRFENSAQGFEAFDAWLEKIKQENSMTEAIVGFEPTGHYWFNLGDHLITYGHKLAIVNPFHVKCARELDDNSPSKSDRKDPKTIAMLVKDGRYRDVYIPEGFYQELRELVCERERLQSQLSSLKNQIVRWLDIYFPEFTTVFKDWSKQASWLALRHFSTPQRVVDAGAQEILQTWREEMKRPSLKRAEKLYQVAKDSVGRKEGTMAATSSLQFMLTQYELITMRLEQLRGEMEACLHQIPNASHLLEIKGMGVVAAAIIVSEIGDISRFTDPRQLIKYAGLNLRENSSGMHKGKTTISKRGRKRLRHGLFQAMIPILATNLEFRALHKRNITRLENPLSKMESLTALCGKLLRVTFALLTKDLPYDPKKLAINKSHLAQAA

SEQ ID NO: 231741 - protein, 371 aa, unidentified
MKKFSMFVGLDIHKTSIEIALAEAGRDGEVRSYGGIDGTLDALDKVVRKLVSKGFNLHFVYEAGPCGYEVYRHLTAQGFDCVVVAPSKIPRQSGNRIKNDRRDAQMLARLHRAGELTAVYVPCVEDEAMRDLTRSREDAKAMERKAKQRILAFLLRHGHCYSGKSPWSRAHFRWISILKMPHPAQQIVLQESLDTLAECTRRVDRLTEQIQTLSPQWRLFPVTQALQAMRGVSLIVATTTIAEIGDLTRFKKPTELMSYLGLVPSEHSSGRTTRRGSITKTGNGHVRRVLVEAAWAYRLPARVSRKLLIRQEGVSQEVCAISWKAQLRLCARYKRFTTKGKSHQLVVTAIARELCAFMWAIANEVQGSAKV

SEQ ID NO: 231742 - protein, 413 aa, unidentified
MKPTKKKLYVGIDIHSREHKAAIVPVGLFQQTSTVWGSIRPIVVKNEYNSFKNLDDSIRSQVCDTSEVTIAVDHTGGHYSEPIVYYLLTAGYDVYYLESKAVKSARERLLDEENKSDIIDSIGTAYLLYLRDTHSLSFRISLIQYELGSRAAVLNSLILQRLQFVKLLNQMTNRLHQLLIATFPEGEARYFNKLLRIIPHYPTPRDIVDSRGLENVRGLSKNDREDIMQFAVNSIGVPSNEYKWLIKELGILRLDLVKKRETITLMLRKQLAEHPYTEILYSFPFLGEIAAATIIATVKNIDNWSNKKKFKKALGIYSRSTRSGNRSYSRRGKEGSKHGRRVLFQVCRNCIKRNAPDNDFKDYYSRQVNQGKVRIKALVSTMGKLAEIIYHCLRNRELYKYQGKYRKKFTKDT

SEQ ID NO: 231743 - protein, 407 aa, unidentified
MTDSGKRYLGLDVHKHYLIAFGVDKDLNVVLSARRVELSRIEAWMKKTLTKQDEIVLEMTTNTWQLFDELVEYAGSVMVVHPPHVALITRSQVMNDKIAASILARLLAKGLLVGIWIPPQEIRELRGLVAQRRKMTTLATQAKNRLHAVIQRHHLVPPAGNPFGASNKEWWRVLPLGKLEKLNLQSDLDTLQFAEKQVKRMTEMMEGMAAEQEPIGRLLHLAGFGVVTAVTVWAAIGDIRRFAEPRYLVGYAGLGTRVHDSGMMMRSGKITKAGRRDLRTVLIEAANVAANSHPHWKAELARLEPRLGRNKAVVAIARKLLIAVWYVLQGKTDKYAEPEAIAQKMLKFAYQVGKANRPKQQTAAQFARLRLDALGLGQELTSIPWGSKKPIPLPPSTNKVSDVPNTE

SEQ ID NO: 231744 - protein, 474 aa, unidentified
MKANPRKAASGAAIKPSPKLPVIHPHAAGIDVGSVEHYVCVPVDAVAEGESAIRSFGAFTGELDKLVEWLRSCGVRTVAMESTGVYWIPLAQKLEAAGIEVVLANARHLRQVPGRKTDVKDCQWLQQLHSYGLIQGSFRPTQDICRVRSLMRHRQNLSQHCGQEVQHMQKALQQMNVHLHHVVSDLNGQTGLRMIDAILAGERDPQKLLELRDQHCCKSTPEEMAAALKGDWKSEHLFVLQQALQTYRHLLKQMGECEQEVEKALAEVVIPGDRADAAPAPPNPPASAKPRKKKVFHHVKAGTGLQRDLSQELERLCGVDLTQITGLNVLGILIILSEIGLDMNRWRDAKAFSSWLGLCPGNKISGGKVLSSRTPHVANRVAIFLRMVGPVVGRTDTALGCFHRRMRARLGPAGANTATARKLACMIYHLLKYKEEFIDIDALLYQEKLRKRRVAALSRQAEKLGFELIKRTAA

SEQ ID NO: 231745 - protein, 342 aa, unidentified
MYYIGLDVHKKTISYCVKDASGQIYRDGKISATRQELDIWIKTLPQPWTVAMEATIFTGWIYDHLLPYAKQIKVAHPLMLRAIAAAKKKNDQIDAGKIADCLRCDFLPECHMASTAIRDRRRTLRYRQLLMRQMVQMKNRISGLLMETGVSYNKQRLHKVKYFHELLTTNQDIDESIRPLLKLSRETIVRLQKTEYALVSSLQRDPLLSERIQCLRTVPGVGPITALTWALEMGDISRFRSIRHAISYCGLCGDEKSSADKVMRTPLSKQRNKHIQRVLVEAAKLAPKEDHDLALVYEKERQKGNANRATLAVARKMVAYLLAVDRGQREFLPFKNSQSAVA

SEQ ID NO: 231746 - protein, 334 aa, unidentified
MRYCGMDVSDRSSRICIIDEAGEVLHEGLVMNDTDGLRQFFERAEPMVVGIEACGTSAWLAEEISRYGHVVKVLHPQSIEALVKGRKTDRNDARMLAQVLRGGWYREVHQKSRDSRWLRSLIQARSKLVMTESSISVQIQGLMKHWGLAVGSSRAADFMGRIEGRLMQEPKLEAIIRPLMDALTGIQEQLKRLTKVLKEASRGNDDAAILMTHPGVGPVTAMAFIGTIDDPGRFKKSRPVGAYLGLTARVNQSGELDRRGRITKNGDAVLRSYLLTAAHALLREETRFCKLKAWGLRLAKKKGYSKAKVAVARKIAVHLHRMLIDRKPFDYALA

SEQ ID NO: 231747 - protein, 516 aa, unidentified
MYFLYTTSCGLTVGFIIMSLSGARRRHILGVIPSPGTSLRGGASGLADNRYGMPFPGQARGFIWLPGGYFNLGRRIEAPEPESVVAKSQPEIRAPDFNLEYSMKAQPESRTIHRYVALDLHKEYVMTGAMNAAQEWVLRPRKVEMMRFREWAAANLRQGDAVILETTGNVWDIYDIVAPLVTRTVVAHAGAVRQIAEARVKTDSEDIKRLLRLLIADIVPEVWVPPAHVRELRSLISYRNRLVKTATMIRNRLQSLLHRHNLKLGENGLTDAEWWESQPLSALEKLQVRQELALLSRVEQSKAELETELAKMSMSAKWGKSAVRLLQLPGLGLITAMTVLAAIGDIRRFASPKQLVGYAGLGAGIHHSGKERQEKGITKSGRKELRWALVEAAWRAVRSSEVWKQRFDQLAKRRGEHKAITAIARKLLVTIWYVLTREETDRHASEEDLAYKMLVLSWELNEEARLGLTYKQYAKYALMKLGIETDITRFVRKNVPRRVAPREEVLARMKELGLSL

SEQ ID NO: 231748 - protein, 422 aa, unidentified
MLEETQDTEELIGRVAALDIGKAELVCCVRVPSAQGSGKRLQEVRTYPTMTRSLLVLADRLGALGVTRVVMEATSDYWRSPFYLLEAHGFECWLVNARDVKHLPGRPKTDKLDAVWLCKVAERQMLRPSFVPPPAIRMLRDLTRYRADLVAVRTAEKNRVEKLLEDAQIKLSVVASDIFGVSGRAMMAALIAGERDPKVLAQLARRRLRAKLSLLEEAFYGRFSDHHGFLLERMLGRIDQASADIAALEAHIDQEIAPFQAAVDQLDEITGVGRTAAQVVIAEIGVEMGRFPTAGHLVSWARFAPGVKESAGKKKGKATTGHGNPYLARVLGEAAVAAGKTDTFLGERYRRIARRRGAKKAIVAVGRSILIIIWHLLSDPDARFHDLGPGFYDTRIDADRRKRNHVRQLEALGYKVTLQPAA

SEQ ID NO: 231749 - protein, 389 aa, unidentified
MPIDADRAETPAAIQTHFAAIFISLELSRSVWLITSLTPGGGEKMSKHSVRAGDVAALLARFSELKQRALARTGKSFPIVTIQEAGLDGFWLHRLLEREGIESHVVDPASIATSRRRRRAKTDRIDGEALLRALLAHKRGEPRVCAMVKAPTPEEEDRRRLCRERKVLIAERVEHVNRIKGLLFAQGISAYEPLRRDRRQRLEELTTGDGRPLPAHLKTQISRELDRLELLLNQIKLTEAERDEVLAAQQTAAPAPAGRMLLDFKGIGPEFAAVLWLEGLFRHFDNRRQIASYAGLAPTPWQSGSIDREQGVSKAGNARLRTTLIQLAWLWLRHQPQSALSRWFHERVKRDGGRMKKTTIVALARKLLVALWKYVATGVVVEGAVMKAS

SEQ ID NO: 231750 - protein, 331 aa, unidentified
MTTHFVGIDISAASLQVAIDSKGKLWEGVFKNNAAGHKALLKRLTKKGRRARVVMEATAFYGLDLALALDNAVGVEVMVANPRTLAAFAKATAQRGKSDPLDARTLREFAQRMPFLPWQAPTTHALELRQVMRRLHQLVHDRTQEKNRLHAAQSSEALPAVVVEDLQAHIAQLDARIERLEAAGLSVARADVELCEKLGLLESIPGIGTRSGLHILGELCLLPSDMTVRQWVAHAGLDPSPRQSGTSLKKSSRISKSGNRYLRHALYMPALVSLRHNAHVKGFYEKLLSRGKAPKQAVVAIMRKLLHAIWGMFKSKQPFDASRFYKMPETA

SEQ ID NO: 231751 - protein, 315 aa, unidentified
MSDAQPNVGVDVSQATLDVAVHPTGEQWQATNDDAGVRQLVERLSSLGPERIVLEATAGYELLLLAALANAHLPVVAVNPRQVRDFARSIGRLAKTDALDAQVLAHFAAAVRPQLRPLPDAATRELSAVLARRRQLIEMRTAEANRLATALERVRPDIREHMRWLDKRIKELDRELHDRLRASSVWRENDDLLRSIPGIGPVCSTTLLADVPEAGKVADKQLSALVGIAPLNRDSGRWRGKRSIWGGRATVRAVLYMATLSAIRLNPIIKQLYQRLIQAGKPRKVAITACMHKLLRICNAILRHRTPWRYQPLDS

SEQ ID NO: 231752 - protein, 396 aa, unidentified
MKQQKKSSDITIGLDLGDRRHRFCVLDKSGGLLEEGSVRNERVFLAQLSERYPGALAVVEAGCHSPWISRYLQEQGCRVLIANPRKLRAIYQHERKSDRRDAQMLARIGRLDPALLYPVRHGTAEAQQDLLRIKLRDSLVRARVAVINSVRFTLKSLGYSVRNPSSERFHKVAMEGLPAALCQMIAPSVAALEELTARIKALEAEINSLARSKYPQAMQLQQIPGVGPITALYFVLKIEDPTRFQNVRDVGAYAGLCPKRDQSGQSDPQLRISKCGDAYLRRLLVSAAQYILGPFGPRSARLWLDAGGGWNSAGKEAGSRGGGAKTRRPAAESLETPASLSTFPARGKPLELAANKRGPTIRNDCGASLGSAIIDFDNQMATFHLFAVSLDLNMDR

SEQ ID NO: 231753 - protein, 431 aa, unidentified
MSERKSLEIRVSVDVGSRSHQVAIGLSSGEVLEEFEIAHRVEGFEDLFSRIERHRKGNSYRVAVAMEGFNGWARPLDSMVRGRGYRLYNINNLKLARFKEIFPGAAKSDRIDARKGLELFQLRDHLPLAKEVLQEVVGTPHENEVLKRLSRRRRRLVDERVRVVNNLQADLQAVCPGLLEITKEAGNQWFLNFLISADTLPQLARLRRTTLLKIPSVGVKYARLIQDWQERAHFSEEVEWVSAMIQEDARRILELDETIKALEVKTAEVAETSTIAKLLRSIPGYGAICTSELAGEIGTIERFNKEGSLALYLGMATLDNSSGKYQGTKRPKHINTRAKAAMMTALDRHRKYVPQSQKYYEKKRAQGKSHNQAIRALGRHLCRIIYKMLKEKREYEVRPLKRDTQAKVTSRSSRIGQIRKKKSRRKDKITI

SEQ ID NO: 231754 - protein, 555 aa, unidentified
MPDTSLLLYHVLRAFVKHFSAFSLFLFLNSGKKLHSAAVAGGTNRNENEVRHSIVLWYNKLEGEDKLQSTVGGVADCLLGSSQHKKQCKNRRQAQISGTYSPYANHCFSLLLNVWRFSQCLSLTKIIPGGIILNIVYPICCGVDVHKRFFVATLITTKGIEAKYEKRRFSTFNNEILKFKAWLLENNCRNVCMESTGKYWVPVSNLLEDSINVTIANPKWVKTVKGNKDDTKDSKWIGDLFRIGLVPGSFIPSKDIRILREYTRYRFKLVSCKASEKNRYQNVFTVCNVALDAVVSDMFGKSASSITDYIINSDTFDPEHCVSLLKKSLKSKADEVVESIEGFQMTDSQKKRAKMVKEHHDYLLEHIQRLDALVDALVKPFESTITLLCTNPGIKRNSAITIISEIGTDMSQFGSSKRLCRWAGLTPGNNESAGKKKSVAITRAGVYLKPVLVEVAHAAVKDTKNPYYRIKYERIAKRRGKKRAIIAIARMILTAIYNMLTTGEIWNPVDLKQIDMPPELREKEIQKSLRRAAKLLVSHGIIAPDVIQFPETVSG

SEQ ID NO: 231755 - protein, 340 aa, unidentified
MDIEILGIDLAKCVFQLHGADRHGRTVYGAKVMRAAFVVVRELGPRIVAMEACSSAHHGARCFRAMGIEVRLISPQYVKPFVKTNKNDRNDAQAIVEAASRPTMNFVTVKSIEQQDIQAVHRVRELLVQQRTALINQARGLPAERGVSIAQMREAFKRAVPQIVGSCEGEVTSVCQAMLLEVSQQIHVLEERIKHVETWLRSFMKRSTLCRKIAAVDGVGTVTATAMVASVGEAKEFKNGRHLSAWLGLVPRHHSSGGKSQLRGISKRGDKYLRTLLIHGARSVLRYAVGKTDPQSRWLQDLIARRGYNRAAVALANKNARVIQALLSSDPPYRPSAAAR

SEQ ID NO: 231756 - protein, 320 aa, unidentified
MPEIIIGVDVSKDFLDTAVANADRPAARFANTPEGIAKLVAWAQELAPHRIIFESTGHYHKQAVTSLQLASLNAVVVNPRQVRDFAKAIGKLAKTDAIDAMVLAKFGEVFETTVRPLSSKEMVAFQQMVDRRDQLVKMRAMEKNHLHAAQALRVKKSIEKHVNHLTKQIKELEQEMDKFIEETETFRAKDEILKTLCGVASQVSRTMLAFLPELGKGSRQGITGLVGFAAYNNDSGQGRGTRRISGGRSKVRKALYQAAVVAVQWSPSMKEFYARLLARGKAKKVALVAVARKLLVLAHAMIRDMKPYEERTNPLCPKKA

SEQ ID NO: 231757 - protein, 391 aa, unidentified
MIYVGIDVAKDKHDCFITNSDGEVLFQVFTIQNNRDGFDDLFAKIHSISTDVSNIKVGLEATGHYSYNLLGYLINKGLPTFVINPLHTNLYRKSLSLRKTKTDKVDARTIAMMLMSDVNLKSYSDTSYHNEELKSLTRYRFDKVQERAQLKQSVSRLVTILFPELEKLVPTLHIASVYALLSELPSAGKIASCHLTHLTKLLENASKGRYSREKAVEIREAARVSIGSNMPAKSMELRHTLKLIGELDSEISEIESEIKRIMDQISSPILTIPGISYRMGAMILAEIGDFSRFDSPDKILAYAGVSPSTYQSGQLESSYSHMEKRGSRYLRFALINAAKYVCHWDEAFGAYLQKKISEGKHYNVAITHATKKLVRLIYTMEKSGMPYRKAA

SEQ ID NO: 231758 - protein, 327 aa, unidentified
MQVYKVTSDGVVSNKAVKRADFLNEFRNIPPALIGMEACGGSQHWARELQSLGHTVRLMPPKLVKPYVTGLKNDKNDARGIYTALVMGMREVPVKSAAIQDLALLQTMRTKRQREKVAKINHIRGILTEYGLITGKSVNAFLAKAGSLIVELKERADVSPFMVSELNALFPKVKEAMAKIKELETNIESIAKTLKHYDLFQSAPGVGPITAATMLVLHCNPEVFKNGREFAAYIGLAPKSSGSGGKNFVTHIPKKYECNNEVRTLLVQCAHAICRSKHKSDWVSSILARKPKKVVIIAVANKLARQLWIMAKKGEKFERRFILAAAQ

SEQ ID NO: 231759 - protein, 345 aa, unidentified
MERYIGGDVHRASVTFEVLKESGKRDRRDVIETNGRALVDYIQQIPGNRHLCIEEGEWSQWIYELLSSRVAEMVVYRREWTPGSKNDAIDAHDLAEKLRTGRVTTRVYKDAKRFKELRAAARTYTMLTRDVVRVKNRIKSIYRSRGVPCSGEVAYKPKARQELAKHLPVPLQRCVGLLGAELDSLIELKAQAETAMENASHRYRISRILETAPGLGSIRVAQMMPIVITPHRFRTKRQFWSYCGFGIVTRSTSDWIRENGRWVRGRTIHTRGLSFSHNRMLKEIFKGAATTVVSLSEPNPLREAYDRLLENGTRPNLAKLTIARKIAAIVLAMWKKEEPYDPGKV

SEQ ID NO: 231760 - protein, 356 aa, unidentified
MTNAILMDVIIGVDTHKDVHAAAAISGAGVHLATTTIPASSKGYGALEAWAKSMGAIQAFGIEGTGSYGAGLSRFLRERGHTVVEVNRPNRQLRYQQGKSDAVDAESAARAVLSGQAVGQPKSGTGTVEMIRHLKIARDTAVKARTQAMQTLKAIIVCSPDALREQLDQVSGKMTLLRRLAALRPGPLTSTLASAKTSLRAIARRWLLLDAEIKQHDAHLETLTAARAPELLEAHGMASGTAAEMLLLVGDNPERIHSEAAFAKLCGACPIPASSGKTIRHRLNRGGNRQANAALYRVVIIRMRGHQPTLDYVRRRTAEGKSKSEIIRCLKRYVAREIFGYLCTKPALADAAATSS

SEQ ID NO: 231761 - protein, 418 aa, unidentified
MSADENTRGSRRHIALDIHKKYSVIGGVDREGRVVLHAVRVEHADLEGWLKKNLRATDHVVFESTTNAWHVYDLLVPLVERVVVANPARVKQIAQARVKTDVRDTFILARLLAANLVPDVWVPPAHVREMRQLLSQRRQLVETHTQIVNRMHSVAHRHHLQHERGKRFNEKTTAWQKDKRLSRVEQFQLELEMENRAYIEKQIQRIGREVTKMCHQKPWAQSMTYIMQLPGFGVITGMTVLAAIGEIQRFGSAKHLASYSGLTGGLDQSGTHLVQKGITKEGRKELRWALVEVAQRAVKSDPHWKRKFQEMEKRMHRNQVIVAVARQLLELVWYVLTRRQPYRHFSQERIAYKYLTWAWQMDEQARDGLTRQQFARYYLMRLGIGHDLTRIALDPKHPRRISSEAELLALRPELNHLE

SEQ ID NO: 231762 - protein, 309 aa, unidentified
MGIDVSKETLDVAVRPSGERWRTTNDERGIRELVSRLRPMGAMLVVMEATGGYETALALSLVEAKIAMRIVNPRQVRDFAKGKGLLAKTDSLDAAILAEYGEIYRPEARVLLDEQAREMADLLSRRRQLIEMKTAENNRLEHARGQVHKEILAHLSWLSRRIKKIDEDLDKRIRNSPLYLDKRERLKSVPGVGNQTALSLILNLPELGTLNRKQIAALAGVAPFNKDSGRRRGKRSIWGGRAQVRAVLYMAAVVASRHNDVFRDFYAKLCAAGKPKKLALTACMRKLLTVLNAMAKNQTSWTPSLATAR

SEQ ID NO: 231763 - protein, 356 aa, unidentified
MERYIGMDVHAASCTLAVISETGRRLKDFPVETNGQALVEAVRMIPGRKHLVFEEGLQSAWLYETLSPHVDETVVAGITESRGSKSDNRDAYGLAEKLRVGTLDKQVFKAPHEFTRLRELSRIHMTLVGDVVRAQSRIKSLYRSRGVMVSGLDVYSVRRRDDWQAKLCASARIRASRLYDHLDFLLDQKKQAESDLLRESRKHRIVQIVETAPGFGPIRAARLVPIVVTPHRFRTKRQFWSYCGLGIVTRSSSDWVQTADGAWIRARVPQTRGLSRQHNRVLKSIFKGAATTVITQRNKDPIHARYARLLDEGTKPTLAKLSLARMIAATVLRMWKNEEAYDPGRAGLSVETKRDG

SEQ ID NO: 231764 - protein, 370 aa, unidentified
MLDTTTFIGLDVHARSIKAVSLDVMTGEVRAATFGYDAGAVAEWVRSVDPRARCVYESGVTGFDLQKRLSGLGVDCVVGAVSKMIKPSADRRRKNDRNDAEFLARMLSVGNVVEVWVPDDECEAARDLTRALEDARDDLSRSKQRLSKFLLRHGLAFDERTPTGRRKGNWTRAHWSWIESIRFGEGADNDVLAYYVDAVRRAAEEKARLEGLVEAEARKPRWRRRVDSLRCLKGVDTATAADLVFEAGEFSRFGNARSFAAWVGLTPSEHSSGESDRRGAITKAGNKHLRKALVEAAWHYLTCSGRPKDLAKGQAPDRVARRHAAKGVRRLVERREALLARGVHGNKANVATARELACWVWAVGLMAEEA

SEQ ID NO: 231765 - protein, 412 aa, unidentified
MKGMIAGIDVHKRVLMAVIGAASEDGKPGRFERRRFGSTSLEISNLSGWLVECGVQEVVMESTAQYWKPVWLALEGRFGLHLAQAWSNRAPRGKKTDFKDAERLVRRYCAEELTLSFVPDAEQRQIRTLTRRRTQLTRDRIRIQNQVESLLEETRIKLSSVVSDLFGASGLRILEALAGGETDAARLAALADARLQCPAQQLTEALTGAVGAVHRLLLGQHLNHLQLIDRQIEELSQQTAVLLQTSSQAIARLVNIPGIGAVAAQQIVAEAGPQASTFASAAQFSSWIGVSPGKDESAEQNSSSRCAKGNHYLRVILCQAAQAAVRAKQSVFEQKFRRLLPRLGYTKAVWAIAHHLAVVIWKVLHQGVEYVEYGMTLAPEAIKRRLQRIKKQLRELGYSDELRIIQTLRRAI

SEQ ID NO: 231766 - protein, 337 aa, unidentified
MNYCGIDLHSNNCVVIVSDENDRIVYQKRLPNELARIAAALEPYQHELAGVVVESTYNWYWLVDGLMDTGYRVHLAHPAAIRKYDGLKHSGDFADAAYLAKLLRLGLLPEGYVYPREERGARDLARKRMQLVRYRTAQILSIEGILMRQTGSRINGEAVKRLTAGQIDEFAFAPDVALAVEANRAVSQALGQQIEALEKRLRERVSLRAEYHLLRTVPGIGDTLATTIMLETGSISRFAQVGNFSSYCRCVDSLRESNGRKKGEGNTRNGNKYLAWAFVEAANFAMRYCPQARSFYDRKKSRTNRVLAIKALAHKLARACYHMLRDQKPFDVHLCFG

SEQ ID NO: 231767 - protein, 379 aa, unidentified
MLNKSSIRTIGVDVHKESYSLCTYCPESDSFVGEITMTSSSKMVANYVKRLEKDMEPNVSIIIGYEAGPTGFGLQRDLLKAGIDCKIMAPTTIYEKKGGNRVKTDRGDARKLAKALNWGAFKEVIPLSPEDEAIRDYIRMRDDRQNALKKAKQQLKSFLLRKDKHYPEKGKRWTLKYRGWLNSLEFELSADQLTFNEYYVEVCRLEEMVERFDQQIEEYSQDDRYRENVSNLRSFGGIDTHIAMATVCEVGDFSRFPTAKDFSSYMGLCPGQQSSGGKTQMTGITKAGNSNLRRLFMESANSMARTTIFNKSKRLKARQSGNSAAVIAYADQGTARIRYKYNKMVREGKNANLAKAACAREIACFVWGMMTGNINGEVA

SEQ ID NO: 231768 - protein, 440 aa, unidentified
MNEEDHTRLEKFRQFRKQIRKSAEYLIVGIDVAKDRHHAFFGTATGKTLFKRLVFENDLEGFRKLLVQAEAMKVQEGLKKVVFGLEPTGNYHKPLGEHLIRCGREVVLVSGVAAHENRKTLDGRWDSNDTRDAANVADLISQGKCLFYEFPVGGLQDLRNLLSLKRRLKRQEHGYRVRIRNHLVAKYFPELDRYFEQSEKMSLAVVRWCLDPSVIAGLEYPKFVEMVSSGQRRLSQENRLQAIWKMAVDSVGCEVGPAVAFEVQVMVEGLKQIRERIRDIEEKIYEICSQFPEYEFLLSIPGFGPDVSAKVLGAVGDPFRFQSGKQVLKMAGLDLSAERSGKTSPSAIPVISKKGKADLRYALYQAAFIASAKNQDFIVYYTHKLRGREREPGIKTKMRVKLSAKLLIIAWTLMKKKEPFNPSYLRVEFQPFSAGAGRES

SEQ ID NO: 231769 - protein, 381 aa, unidentified
MRKPTRFLGLDVHAETIAVAIAEDGRDGEVRSVGIVPNHPEAVRKLIKKLGGPAGLRACYEAGPTGYALYWHLSSLGVDCEVVAPTLVPMKAGDRVKTDRRDAVKLARSYRAGELTAVWVPDAQHEALRDLVRAREAAKKDQLRARHRLAKFLLRQGRRPPKGKSAWGVVHMQWLRAQRFDHPAQQAAMVDYLAEVDHAANRIARLEAAIDDAIDDAPAQTQALVEGLQALRGVAKLTAVTIAVEVGRVSRFAKPNQLMAYTGLVPSEHSSGASRRQGGITKTGNAHLRRVLVEAAWSSRHRPAIGPALRARQKHTTSEVKEIAWKAQHRLHRRYVKLAAKDKPKQKVVTAVARELLGFVWAIGMQVEAEEATRNHAKAAA

SEQ ID NO: 231770 - protein, 490 aa, unidentified
MAKGGLGSMQSKTAKQAERPKRLTRRRRKELARRIWSDRPGLDVVHRDAAGIDIGSREHYVAVGPDRDAEAVRVFGCFTTDLRRMAEWLQRCGIKSVVLQSTGVYWIPVYDVLEQYGLEVWLVNAQDTKNLPGRKSDVQESQWLLKLHTYGLLRRSFRPAPEIRGLRTCWRERGEYVQQAGSCIQRMQKALTEMNIQLATVLSDLSGETGMSIVRSIVAGERDGKRLAEFRDPRVKASKQTIAKSLEGTWLPEQLAVLQRQLGDWDHIQRQIAACDVDLQAMLQQIPAAKVQQQQSLAPAAAPAGKRKRKKNGKSSKNEPKFNLAAELQRVTGVDLSRIDGIKAMTIMTVISEAGLDMSKWATEDHFVSWIGLSPRNDVSGGKVLKRKTRKVKSRLATALRTSATTLRQSDSYLGAQFRRLRSRLGPPKAITAMAARQARLVYRMLKYGQEYVDKGAVIYEQKYREQQIRFLEKRAAQNGFALVPLHQNA

SEQ ID NO: 231771 - protein, 394 aa, unidentified
MPQLWAGIDAGKSHHHCVAIDGDGNKLLSRRFANREPEIRTLLGDVASLPGGVEVAWATDLNHGGTGLLRAVFTEHRQPLHYISGRAIHHAAHTYRGEAKTDAKDAVIIADQARIRRDLNLMRPVDDLTAELRLLSARREDLVHDRTRTVNRLRAILLHYFPTLEAAFNYATSKGPLILLTKYQTPGAIRRVGHRRITTWLKGKHCRKATDVATIALQAAAEQHATVAGEAAAARLVGTIARDLLRLREQILEVEAEITAVLPANPLAASLMSIPGFGPRLAADFLAATGTDLSYFETPDRLASFAGLAPVPRDSGKISGNHYRPRRYDRRLLNACFQSAFIAARNCPTSRAFYERKRSEGKSHKQALIALARRRINVIWAVLRDGTVFAAPAT

SEQ ID NO: 231772 - protein, 406 aa, unidentified
MANIFALDVSMGKSYCVWYRGKHCLKEFSLVHTKAGVNALRDMIKKAQKPIIYFEATGIYSRVIEHFCETNGLRFCRLNPLELHLKSESLRRVKTDQKDAHRIALTVQENTFRLTVPWKKDYLQLHELSRFYNQLNADWNYRLNHLHTALEQVFPELKQLFVNRTSKLALNIVEFFPHPALVRPYSRVKLKNILMASTDKRISKMKAYKYADRLIDLAQKSYPAVSGDAIQVDEVRYYARQLIALTRKKEEVIKRMESIAQRLPEYILYCSFPGIGKQTAAQLMGELGDISRFDNANQLNAFVGIDIRRYQSGTYLGQDHINKRGNPIARKLLYFTVGNMIRQQHANSNHIVDYYYRLKEKRPHPKLNKVAMVACMNKTLKCLLSMIKHHEKYHYRYTDSMVPVKA

SEQ ID NO: 231773 - protein, 347 aa, unidentified
MSIVGGLDLHRQQITFDYLDTDTGQVSVGQIPAADRRQLRAWLARRFADRQDRDQIEFSVEGCTGWRYVAEELAAAGMVVHLAEPAETANLRGRKKRAKTDRADARHQRDLLVQGRLPECWIPPAQVLEARALLGCYHDLRRDHTAWVQRIHAVLFHQGATACTDLGTSAGRARLAKVAVEQLSPAGRTQVAAAVLMLDATEAQMEILHRQLLSTARHMLGPKVLVERLYGVGPITGLALTCWLGGAGRFSSARKAVRFAGLDITVYSSAGKRSPGRLSRQGPPVLRWCLYEAGKTHARPSAPDYAYYAAVKKKIDGKRAALSEARKLIRQAVHILAELGDDAFAYV

SEQ ID NO: 231774 - protein, 388 aa, unidentified
MQTVADRPEAPTAIRTDLGAIFVSLELSRSTWLITSLSPGGGEKMSKQVVRGGDVAGLLERFARLREKARARTGKVFPFVVIQEAGLDGFWIDRALQNEGIESHVVDPASIATSRRRRRAKTDGIDGEALVRALLAYKRGEPRVCAMVKAPTPEEEDRRRLCRERKVLIGERVRHVNRVKGLLFSQGISGYEPLRRDRRRRLDTLQTGDGRLLPVHLKAQVCRELDRLELLLEQIKAVEAERDVLLAAQQVAAPAPAAMLLDIKGIGPEFAAILWSEGLFRHFDNRRQVASYAGLAPTPWQSGSVDREQGVSKAGNPRLRTTLIQLAWLWLRHQPQSALTLWFEERVRRNGGRLKKTTIVALARKLLVALWKYVTAGVVIEGAVMKRT

SEQ ID NO: 231775 - protein, 341 aa, unidentified
MNHYVGIDVSLEASSVCVVDSNGKIIREGKVASEPGALIAWLRNLKLELTRIGLEAGPLSQWLYAAMRQAGLAVELLETRHVHNALETMPVKTDRNDARGIAQLMRLGWFRPVHCKSIAAQETRALLTARKLVQVKLHDIELSLRGILRGFGLKVGPTTPARFEGRIRELVAGHPSLEAIAESLLAVRVTLRREFERFEKQLRAMARCDTRARLLTSVPGVGAIVSLTFTAAIDDPARFKSSKQVGAYFGLTPTKYQSGETDIDGRISRIGDAWVRAALYESANIILTKPLKGCTALKSWAMKLARRSGMKKAKVALARKLAVIMHRMLADGASFRHVAAV

SEQ ID NO: 231776 - protein, 444 aa, unidentified
MAITPDNINKLRRIAMKKNNLRIIYRRKIISSKSLILGIDIGSSFHSVVFQNKEGYILDKIEKVFNSRKGFDFLDSMIEYLLKKHELTEVHIGFEPTGIYWKNIIYHLHNKGHQVHFIKTTAIKSQRELDESSPSKNDIRDANLLATLVREGKYIDSKLQFDVFKNLRDIGKMRAKVMVMKTSMICRLRMLIQLYFPELLELFWAIDSVGFWRLLKRVQFPSDLKEINDDELKDILRVRGLRKNRLEKMIESLKRASINSIGLQSNDFDRFNILSCIESLELFHKQLKDIKTKMEKLLNQTEYWYLLKSIKGVGIVTGATLLGELGDPANFKDAASIIKFSGLDPKERSSGKYKGKVKISKKGRYLMRTIIYFISMRLIYRDEGFKAYYKYKINTRSISGKYLEKREALMAVGIKFIRVIFAMFRDKVEYRGIKIKDMYLKEAA

SEQ ID NO: 231777 - protein, 344 aa, unidentified
MTIVEDPCVITGGVDTHADTHVAAALDSLGGLLGVREFPATAAGYADLLGWLGGFGTVALVGVEGTGSYGAGLARHLAAAGIRVVEVDRADRQDRHRQGKSDPLDAVSAARAALSGRAAGVPKGRDGAVEAIRALMVAKRSARAERTQAINQARALILTGPDELRARFAGKRAAALAEAVAALRPRPGDAADYSLRVALRELGRRVEFLDAQIGRLDDLIIPLVTARAPGLLSLYGVGPDTAALLLIAAGDRPERLRSEAAWAHMCAVAPIPASSGKTRRHRLNRGGNREANHALWRIVITRMNAHPATRAYLERRSKEGLTKKEIIRCLKRYVAREVYPYLRG

SEQ ID NO: 231778 - protein, 341 aa, unidentified
MERLYYIGLDIHKKTISYCVKKVDGTMVQQGKLAADRKTLLKWMEGLPGPWLGAMEATLFTGWVYDFLKLYAVDLKVAHPAMLKAITAAKKKNDRADAEKIADLLRVNLLPECYMLSEELRELRRILRYRNMIVRTAVKMKNKMSGLLMEVGATYSKEKLHRRKYFNNLLERVEDVPESVKSMLKLSRSSLEMFEAVQKKLVYTLREDKLIRERVQRLMSIRGIGEVMALTWVLEIGDSSRFHGARKAISYCGLCSAQRESAGKEQRGPISKKRNKHLQSMLIEAAKLAPRWNPQLAAIHEKELSRGNRNRATLAVARKLVEYMLAVERQQKDFVPSEMAA

SEQ ID NO: 231779 - protein, 423 aa, unidentified
MKVVYPICCGVDVHKSFFVATIITSDGLTPHYQKRRFSIFNNQILAFKAWLLENNCRDVCMESTGKYWIPVFNLLEDAINVTIANPKWVRAVKGCKDDAKDSKWIGDLFRLGLVPGSFIPCKDIRILREFTRYRFKLVSNKSGEKNRYQNVFTVCNIALDSVVSDMFGVSATSITDYIVNSDIFDTEHCVSLLKGKLKCKSEEVAQSIDGFQMTDSQKVRARMVKEHYDFLLNQIEKIDAAIDELAAPFESAIDLLCTNPGYDRQSAITILSEIGTDMSQFGSSKRLCCWGGLTPGNNESAGKKKSVKITRAGVYLKPMLVQVAHAAIKSKESPYYRIKYEQISKRRGKKRAIIAIARMILTATFHMLSSGEVWNPVDLQQIDMPPEMRERELQKTLRKAAKLLVAHGVVDPKDFHMPETVPA

SEQ ID NO: 231780 - protein, 343 aa, unidentified
MYFIGLDVHKKTISYCVKDAAGRVHQEGKIGSTRRELDGWIRTMPQPRTIAMEATIFTGWIYDYLLPHAERLKVAHPLMLRAIAASKKKNDRIDAGKIADCVRCDFLPECHMASTEIRDRRRTLRYRNLVIKQMVQMKNRVSGLLMETGVSYNKQRLHKVGYFAELMTTNKEVHESIRPLLKLSRDMISRSQKLDYALVSSLQRDPVLKERLRRLRTVPGVGPITALTWALEIGDYTRFPSIKQAISYCGLCGEEKSSAEKVMRMPISKQRNKHIQRVLIEAAKLAPSESPELALTHARELEKGNRNRATLAVARKMVCYMLAVERRQQDFVPAEEFSRTIAV

SEQ ID NO: 231781 - protein, 412 aa, unidentified
MKGCVVMNQNTCITIDVSQNKSHIQGFIGPNKPLSKARTMRNTKQGFQFILILKNLIESKTNETPLIVFEFTGIYHKPLEKFLISQNLKYHIVAPLKAAKARNSEIREQKTDARDCLSLSKLFYSNNLGIFYSENETYSNLRKLNRYYDTCMKHLIKIKVNFRETLAVVYPNYKKLFSSIYSDDSLTFLKEFPHPSLYTSKLEDRIIEILKNKWDHLESWTSSKVKILTPLINEVVSGCNVTEPDIIMLLSYISQIEYYLNQIEITVSQMNELAKKVPLYNLVHSLPGIQDILTCKFIAEVGDISRFSNYKQIVAYAGIDPMIRQSGDKDGLHLKMSKKGNKRLRTILHLMVSSLIKANREPNAIKDKYQKKTHQLNPLKPKVASMACANQLVRIIFYMHKTSSTYTYHECK

SEQ ID NO: 231782 - protein, 342 aa, unidentified
MSEDQVWVGLDLGSTVTHVCVVDDEGMTIHEQQSETRADALTAALSKFPIDRIGLVAVEAGCDSHVVRGLRAAGIPATIFDARKASKFLALRRNKSDSSDARGLADLARLGRNTISQVHLKSAECEQIRGMLAMRNRLVMIRVAAENALRGRLTLRGLRFKSATRPGDTEDQVERLIAELDGRRDLDLRREVEPLVELCEFLRAHIDKVTLDLQKRAKSHEICRLLMEVPGVGPICALSYYSAIEDPSRFEHPSDVAAYLGLIPRRYQSGETSRTRGITKTGCKLTRRYLVTSAMVFGRIGPEGELKQWFVALRDRAGWKRARTAFRRGCSTSPQAKPRPKK

SEQ ID NO: 231783 - protein, 417 aa, unidentified
MEVIVERPAALDVHKAQVTACVRVPGQDGVRVEQVQEFKTTVAGLLVLADWLKSHRVTQVTMEATGVYWKPVWHVLEDDFELLLVNARHVKQVPGRKTDVQDAQWLCRLAEAGLLRSSFVPPKPIRELRQLTRYRKTQIAERQREANRLHKALEDTGIKLDCVATDILGVSGRAMLDALCEGTTDPEILAELARGRLRAKLPELKEALEGRFEPLHGLLIGSILAHLDFLDAQILALSEAIEALLGPLAPGAVMLLCTIPGIGERTAQNVIAEIGLDMSVFPTAQHLASWAGQCPGNDQSAGKRRSGRTRKGSKWLNLALQEAAVAATRSNDSYLQALYRRKKAQGGHNKAIGAVKHSIICAIWHMLSTGELYRDLGPDHFAQRNPERQTRRLVDQLQRLGHTVTLQPTSTTAAVAA

SEQ ID NO: 231784 - protein, 341 aa, unidentified
MERTVIAVDIAKKVFQLHWVEMDTGCIERLQLKRARMLEWFANRTAVLVVMEACGGAHDWGRALIGLGHDVRLISPRKVRPFVQRNKTDAADAQAIWTACQQPGMRFVPVKTEAQQIVLSLHRLRAQLMKTRIMQTNELRGLLYEFGIVLPEGHAALLKALPDAMCDAKTRLPAMLMDSLDEQLRRVQRLQADIGLIERRLSQQMRELPACKAVAEIPGIGLLTATAVVASMGTPTAFKDSREFAAWIGLIPRQTGTGGRVRQLGISKRGDAYLRTLLMHGARAVVIRSKDGPTWPWLTALLQRRPYSVAVAAVANKLARTIWAVLARGQAWRPEAWQTAH

SEQ ID NO: 231785 - protein, 358 aa, unidentified
MNRNTGMNAGQIIGTMNGLQVIGLDIAKQIFQLHTVDMGTGEIFNVQIKRAKVLEYFANRKSCLIAIEACGGAHHWARELTALGHSVHLLHAKIVRPFVSGNKTDATDARAIWLAVQQPGVKFVGIKTAAQQATLTLHRQRELLMKMRTMQTNALRGLLYEFGATFAKGRKALFKDVERELEGLAGQLPQMVSDSLREQIARIKAMGEDIQAIEKRLSLQLKADSHMQRIAQIPGVGLLSATAAIATMGQASAFKSGREFCAWLGLVPKQTGSGGKVRLGSISKRGDTYLRTLLIHGARSVLTHAKDPGPWLEQIKARRPANVVIVAQAAKMARAIWAVTAKEQDYQQGFKSVRPIAA

SEQ ID NO: 231786 - protein, 322 aa, unidentified
MTDFVLGVDIAKRKFDAALLANGKLKHKVFTNNQEGFSELITWLKKYDVDHAHVCMEASSTYGEELAAYLHEVGHTVSIVNPARIKGFAQSELLRIKNDKVDAGVIARFCDKMRPDPWTPLPSEVRKLQALVRRVDALLSMRTQELNRIGTTHETVLSSVKGHISFLDEEITALKKEISDLIKKDPNLKTKADLLRSIPGIGEATIAAILSELSLFEKCDRVRKVVAFIGLAPREFTSGSSIKGRPRLSKTGSARMRKALYMPSLVSMQCNPVIISFCKRLTKKAKNGKVIVCAVMRKLVHIIFGVLKSGRPFDPNFGLKMA

SEQ ID NO: 231787 - protein, 321 aa, unidentified
MTYVGIDVSKATFVVAYSSAKSSETKTFKNTTKGIREFIRTISPKENHCVLEATGNYSMLLVYLLSKAGVTVSMENPLKIKNFARVMLSVVKTDVIDARLIALYGERMQPAPFKLRSDSILLLKQKRTVLRQLKKQLTANRNLECSLKVLPFIDSKCKKVLEKTIKFLEKQIEEMEEELTSLAEIEYKKQMDLLTSIKGIGATLAAALIIATGGFTYFDNAKQLTRYLGLSPTYQQSGTSVNVKGHINRNGDAYLRSQLYIGAMASLRCNTECKACFDRLRSNGKPGKVAIVAVANKLIRQAFAVVTYEKKYIDGYKSVKP

SEQ ID NO: 231788 - protein, 353 aa, unidentified
MTSTKYIGMDVHKESISIAVRNDAGKIVMECVIETKANIILDFIHGLRGELQVTFEEGTWATWLYDLLKPHVTKLVVCDPRKNARQGNKNDQIDARELSDRLYMNKLSSVYHGGAGVRTLKELARSYLTISKDLARVMSRVKAIYRSWGIPCAGKQVYAPRHRAEWLAKITEVGVLRRAEFYYQQLDALRSLRHEARRDLLAESKKHKAAKLLCQIPSIGPIRAALLIALIQTPHRFRTKRPLWKYSGFAIETHSSADYRSVKGQLQKAKKQVSVRGLNRDCNHDLKNLFKSAATIASVKPGPFQEFYAALVAKGMRPEMARLTLARKIATIVLIVWKKGVSFDAQYLKPQTA

SEQ ID NO: 231789 - protein, 393 aa, unidentified
MITIGIDPHKGSHTATAVDASEAVVGELRVTADRRQRARLLEWAARFEPRRWAIEGATGMGALLAQQLVGAGEHVVDVPPKLSARVRLMGNGRIDKTDPNDARSAAIVAVRNATLNTVGADSEHRVVLRLLADRYHQLTAQRTRSVCRLHALLCLLIEGGTGRSLSTARAVKLLAGVAIGDPIIAERVATCRQYVTELEALDQALVDIRARTVTAVDASKTTVIDVYGVGPIGAAIILGHSGDIRRFPTAGHYARHNGTAPIEASSGPKARHRLNPRGDRQINHAIHTAALTQIAHDHPGRVYYARKLAEGKTKKEAMRALKRRISDVIYRQLLADTRDRGGQPHPPNPSPTVGGHRGPGRTTRGRLVNPARPASHPTTADSSDKSLPDPTRP

SEQ ID NO: 231790 - protein, 345 aa, unidentified
MNKLSVVGLDLAKNVFQVHGIDADGEVIVRKQLRRSEMHKYFARLEPCLIGMEACGGAHFWSRELTRLGHTVRMMAPAFVKPYLKSNKNDRNDAEAICEAVQRPSMRFVQPKMPEQQTVLHLHHSRQLLVRQRVALSNHMRGILSEYGIVVPQGGKAISQRLPELLEDADNDLPMLARHLLAELKAEHDQLIERTDRIEKQLKAWHANNAVSQRLASIPGIGVLTATALAACVGEGQDFRNGRQLAAYVGLVPRQSSSGGKDRLLGISKRGDGYLRSLLIHGARAVIHHIRRRLKAGRPGGNPWVEQLLQRCHVNEAAVALANKMARTAWVLLARKVTYCPAHSA

SEQ ID NO: 231791 - protein, 324 aa, unidentified
MAKRITVCAGIDTGKRKLDVAIDGSSERLQVENTAEGHKTLLEWLRRHKVKRIGIEASGGYELPVVIELRRKRFVVVVFQPAQVRAYAKFHSQLAKNDKMDATLIAACAAAVKKIHDAPDPRLQPFAERLTLIDQIGEDIQLYKNRLETCRDPRIQKLWNEEISRLEKRERAELKSLVAAIRQHRDLARRLDLIYSVSGAGMPTAVAILVRLPEIGKLSREQVAALAGLAPYDDDSGERSGARHIDGGRKRLRRALYTAALPASFRWNPHLIALYKRLRAAGKVHKSALIACARKLLIFINTVVARGTPWEEEPPVRATNPAAA

SEQ ID NO: 231792 - protein, 340 aa, unidentified
MSATRFVYCEQTIKNSFQLHGVDHAGRTVLRKKLSRSRFLAFFADLPACTIGMEACGGAHHWARELTKLGHTVRLMPPQYVKPYVKRNKHDAADAEACCEAVQRPSMRFIPIKSPEQQCLLMLHRIRDRLLAERTASINAIRGHLAEFGIVAAQGARGLGELRVVIGDVDDHRLPARARALLAEEVEHLRELEAHLERLDRELLAQARTDEACQRLTEVPGIGPVIATALVAAVGDAKLFRNGRSLAAWLGLTPKQHSSGGKELLLGISRRGDGYLRRQLMHGARSLVRVAQGREGKLWAWINGLLARRPFNTTVAAVANKLARIVHAVLSRGEAYRAPA

SEQ ID NO: 231793 - protein, 411 aa, unidentified
MRDRQNYVFIGADVHKEQHTVVIINCWSEVLGDFTFESKISEYPKVIEKINEVIPDGLVPIWGLEDVCGNGRSLAVFLKENGYTVKEVNPSFSSSERKNHATTKKNDYWDAKCIADVLIRKLNELPEATPNDLYWTLKQFVYRRDSLVKSATTAKIQLHEQLVKNYTSYKKFFSNIDGNTALEFWERYPSPTTLKGVTVIELRNFLRKASKNSCSTKKATTILELIEGDGDTFREYQNSRDELVKSYVRSLKYYQEEIKKLNKEIKGIISNLDYKLETLTGVGTVTAAQLISEIGDINRFKSAEKLAQYAGVAPVRFSSAGKGKDKKSKQGNRNLNGVLYFLAMQQIQISKQSKIPRNEILYEYYQRKLTEGKTKVQALICIMRRLVNIIFGMMKNKTEYVKEYRHNRIVS

SEQ ID NO: 231794 - protein, 411 aa, unidentified
METIVERPAALDVHKAQVTACVRAPGPDGERVQEIAEFQTTVRGLLGLRDWLAERRVTQVAMEATGVFWKPVWYVLEDEFECLLVNARHVKQVPGRKTDVSDAEWLCRLLEAGLLAASFVPPKPIRQLRNLTRYRKTQIAERQREVNRLHKALEDAGIKLDCVASDILGKSGRDMLDALVAGTTDPVALADLARRQMRRKIPRLQEALRGHVDAHHRLWIGSILRHIDFLDEQIEQLSTAIEQQIRPFWPAVELIRTITGFQQRGAECVLAEIGIDMHVFASHRHLASWAAQCPGNDESAGKRRSGKTRNGSKWLDYALEEAALAAIRVKDSYLAAQYRRLKPRRGHKKALGAVKHTMICAIWHMLSTGETYRDLGADYYTRRDPERQTKRLIAQLERLGHHVTLQEAAAA

SEQ ID NO: 231795 - protein, 419 aa, unidentified
MFKIFRKNCCGLDVHKTWIYACVGITDANGRTEYKQARFSSFSKGLRELADWLAQYGCKDVCMESSGKYWVPVFNILEKTCWVTLAHPKYTKPQKGNKTDRKDAKWICDLFMCNMIKPSFIPPPDIRHLRDLMRYRFKLTNILTGEKNRAQNCLTVSNLKLDDVFSDVFGKSASSITKYILEHPGEQFDVASFVDKRCNHPIEEIQAAVDGSISPEQAAKLREVLKHIEEIEGHKIRIEAEIMRLAEPYTELLKLIRTVPGFSANPITAIAVLSEIGADMSVFPTAKHLSSWTGCCPRNDQSGGKRKSTRISRAGVYIKPLLVQVSNAIVKSDKYPECKERYRRIKARRGHKKAIIAVCRMLLTAIWNILSRLEPYSDKGYLVDCEPDQTKELTTTQALKLLKSRGYVIKDDLSEPSTA

SEQ ID NO: 231796 - protein, 350 aa, unidentified
MLIIGCDFHSRFQQIAMLDPTTGEVINRRLEHENGEAQKFYATLPSPARVGMEATCDAQWFERTLREHNHELWIGDAAEIRAAMVRKQKTDPRDALHILDLLLTNRFPRIWVPSPAERDLRQMLRHRQKLVRFRTSVMNQLHALAMGQGLCRKKKLWAKAGRKELEGLVLDPWASLRRKELLQLLDQLDPWIANLDEAVIQAAESRPPAVCLLQQAGVGPVTALAFVLTIGPVSRFANSKKVVSYLGLNPSEESSGGRQRLGAISKQGNPMMRYLLVEAAQTASRLDPELRRDYQRLKFRRGSAVAKVAIARKLAVRLYWKLREAAQPVPSARMQGSPASPVVGENLSPY

SEQ ID NO: 231797 - protein, 435 aa, unidentified
MEEVEDEPLFCDRVAGIDIGKATVMVTIRVPSEARAKGRQQETREFGTTRRELLALADWLRCWQVERAGMEATSDYWKPVLFTLEQEGFDCLLYQASQVKALPGRPKTDKLDSVWLARITEQGSLAGSFVPPEEIRRLRTHTRYRRKLVQMRTAQKERCEKLLEDAHLKLSSVISDIHGVSGRDMLRAIAAGERNPKVLAQMARGVMRSKIARLEQALDCSFFTGEHAFILTMMLDSIDSLTAQAGVLDARIADMCQPYQRQLEQLDEIPGFGITTAQDLIAEIGTDMNVFPTAGHLASYARQAPRVKESAGKRKGKNATGRGNPYIGGALGEASISAGRTQTFLGEKYRRLTRRMPKRKAQVAIMRSQLVIAHALLSDPDARYQDLGPDYYERKADIRRRARNHARALERLGYKVTLEAIDPGTGELHLVATAG

SEQ ID NO: 231798 - protein, 412 aa, unidentified
MRRVIGMDIHRTFAEVVIWEEGRLRHHGRIDMTRTALEGFGETLRPTDEVVIEATGNCMAVSRVLSPFVAQVIIANPLQVKAIAHAHVKTDKIDAGVLASLQAAGFLPSIWTPPPEVERRRRLVARRDQVVRHRTRIKNEVHAILHAHLIPLCPHADLFSRVGRAWLQRQPLPSDEVLAIERHVRELDRLGEDLEVLDREIAQDALGDPAVKRLMTITGVNLTVAVGLIAAIGDIRRFSSPQKLVSYVGLNPRVRQSGLGLAQHGRISKVGRSHARAMLVEAAWAAAKSPGPLHAFFVRIRAKRGHQIAAVAVARKLVILCWHLLTKEVDYLWSRPALVATKVRAMELQAGQPARKGNKRGPAYSYNVKELRDREMKAAEQAERAYERFVAHWQPRPPKGKARERLNPTRLE

SEQ ID NO: 231799 - protein, 453 aa, unidentified
MARKAEKERTKDGLKLKIVNPNAAGIDIAYGEMQVCVPEDRDGENNRCFGSFTCDYEGIASWLKACGITTVAMESTGSYWVGLYFFLEEKGFDVLLANAKDIKNVSGKKTDEADAEWIMLMHSYGLLKPSFHPDAAARNIRELARHRDNMLRSAGKEVQHMQKSLVLMNIKVDTVISDILGKSGKAIIEAILEGNHDPKSLAQLADRRCKASRETIEKSLEGTWDAVHLFELKQSYDLYKYIHTQIADYEAEMDRMLSDYTDGCGTDMTGYKATEKRVAKKNAISFDAEKHAFSMWGVNIMEMPGMSLGGLSVLMGELGSGFVEKFPSAKSFCRWCNLVPNNKISGGKLLSSKVPKQKNRVGQVFRLCANSVKGVKTGLGVYFRRQKSKGGHLQAIVATANKMARIFYTMVASKKPFDETKVGLDEKTLLQRKISIAQRSLEKLNLRLSVAQG

SEQ ID NO: 231800 - protein, 343 aa, unidentified
MDQYIGLDVSLKETAISIRQDGKRIWRGKCASDPKLVAEMIRKHAPHARRVVFETGPLSTWFYHELTKEGLPAICIEARHAQKVLNETLNKTDANDADGLAHLAEAGFYKAVRVKAFDSMLTRTLVAARTQLLSISTQLSNQIRGVMKTFGLIVAQGKGRVFDNNVRQLLDGNDGLAKIILPLLEGWRDIRMRAADLGRQLVAAARESQATKRLMTIPGIGAVTAVSYVAAIEGPDNFKTSRSVGAWLGLTTRRYQSGEVDYDGHISRRGDPHLRGLLYEAATVILTRTSARNESRLKSWGLKLRERLGFKRAAVAVARKLAVIMHSMLKTGDVFNRLAGATA

SEQ ID NO: 231801 - protein, 422 aa, unidentified
MSYCPVAGIDVSKRFSDMCILSPDNKIFAQEKIYHDETSINRANALLQKAERLFFSKPVIVMESTSHYHLILFQFFSEHGYDVIVVNPLQSNSMKDFSIRKRKTDRVDAFKLAMMYRTKTLRPSQIPQTATRALRQLCRHRAELLNDVSSYKNRLTALLDQTFPGYDKVFSDVGGVTSCAVLVRFPTPTILLVEEESELVEVIAAASKSGYSFAKKKAGLLISAAQKAQTLGIHSCADETLIVCTIQMLRTLSESVLQIETAIDNLLAQIKEMRNNVSLLQSIPGIGSHSAALLLGEIGDISLFKKPKQLAAYFGLDPTERQSGSFRGTKNKLSKRGSSYARATLHMGVVNSICKRGKDSAANPVLLSYYEKKCKNKPAKVAQAASMHKLVFIVFAVLRDQKPFELKTPEQHAVEQGFVKAA

SEQ ID NO: 231802 - protein, 353 aa, unidentified
MNVTHYIGFDVHKKSISFCSKTADGAIVEEGTLLAQRSALRQWAMTQQQPWQGAMEATLFSGWIYDTLKPYGLQLDMAHPAMMKAITAGKKKNDQLDARKIADMVRCNLLPVCYVASPEIRELRRLLRYRSLVMRESVRMQNRIAGLLMETGTPFNKEKLHGKKYFTHLLENLEEVPESVQDLLRLSRGAMEMFAATQKRLVRQLLAHPELRQRVERLASIPGVGPITALTWALEIADPERFSSSAKVMSYCGLTAALQSSAGKQQRGPISKQRNSWLQTALIEAAKLAPRWNPQLAAVHARELERGHRNRATLAVARKLAAYLLAVDKSGQLFQLRTLPPAGETTIALEKAG

SEQ ID NO: 231803 - protein, 349 aa, unidentified
MNNSIVTLSTTKNKRPAQYDHYIAVDWSQKNMAIARSSPKSKHVRTLDVPSELRDLKDYLSNLKGSKILTIEECPAAQWLYVELLDYVDKILICDPYRNRLLSDGAKNDVLDAEKLCLLLRNGLLKEVYHTHNSLFELRKYVSAYLDIIQTGVRMKNQRSSIFRSEGKNFRKESVELDANSFIVGIIDRNIETYEQDKAEYKTLFNKIKRKNTILKNLCNVPGIEIISAVKILANVIDAHRFPKKGNYLAYCGLVKHKRVSGQKTYGLRKPRYNRVLKSVYKSAAWTSIIATSNPMKDYYEYLLEKGVEVHNARNALARHIAIITYGMLKSGEKYQPYKREKETKPILN

SEQ ID NO: 231804 - protein, 366 aa, unidentified
MEQMYYIGLDVHKKKISYCVKDVSGRIHAEGAIPATRTDLDLWMKTLPQPRTAAMEATIFTGWIYDYLLPHAAALKVAHPLMLRAIAAAKKKNDRIDASKIADCLRCDFLPECYMASTEIRERRRTLRYRNLLVRQSVQLKNKIAVLLMEAGVSYNKQKLHKVGYFRDLLKTNPDINESLRSLLQLCRETLVRLQKIESALIRSLERDRLLAERVDRLMTIPAVGPITALTWALEVGEVKRFSSIKKAISYCGLCSAEKSSADVIKRGPLSKQRNKHLQCMLIEAAKLAPRNSSGLAMIYDRERQKGNANRATLAVARKLVAYLVAVDRSRAGFPFDREPKPHCRVRRPCRNQEGSFSAQPARSRR

SEQ ID NO: 231805 - protein, 471 aa, unidentified
MAAVMIGVDPHKASHTAVAISAAEEPLGELRVRACVAQAERLLAWAQAWPQRTWAVEGAGGTGHLLAQQLLSAGERVLDVQPKLGARVRLLAAGDVNKNDPNDARSVAVAALRSPGIREVQPDDHAAVLKIWSKRYRDLGRTRTQVVCRLHAVLGELIPGGVPKVITTARAGRVLKAIRAEGAVEQARCELAAAFLDDLRRIDARLRETKKQLAAVVAATGTSLTGLFGVGPVIAAAVIGDVRDVSRFPDRDHFAAYNGTAPIEVSSGPRKVYRLSRRGNRRLNHAIHMAAITQIRQRHSEGRAYYEKKLAEGKTGKEALRSLKRRVSNAIFACLQADARRAAARAKGPGGQQGNDSVASAAGSHPRHRLFGQATPGPGHHPTTAAASPSPGPARAPGRAGHSPVAATLPPATPQVQVERPQRSEDERPGGAARRLPYSAARKAPESRTAGRTTAPEGHLIGPLSTTDGTS

SEQ ID NO: 231806 - protein, 455 aa, unidentified
MARKRKKDSQGKQAVLPVMRADAAGIDIGATEIFVAVPPDRATENVRSFPTFTQDLYALAEWLKQCGVKTAAMESTGVYWIPLFQILEERGFEVYLVNARHVKNVPGRRTDVSDCQWLQFLHSVGLLRASYRPEQEVCAVRSLLRHRESLVQMAATHVNHMQKALDQMNLQLHHVISDITGQTGLAIVDAILDGERNPQVLAKLRNGRIQASEEVIAKSLVGDYRPEHLFTLQQSLTAYRSYQKLIADCEREIHRALEQFHPPDPPQASATDIAPASPPTKTRSSDGVLRTELKRAFGVDLTQIPGIRTGIAQTLFGEIGPDFTKFRSASAFASWMGLCPDNEISGGKVLWAGTRKVNCRAATALRMAAQSLHHSKSVLGDFYRRMRAKLGAPKAIPAAAHKLARMIFHLVTTRQEFDASHFAADQLRFQKRQEAKFRAKARALGFQLIPLDQTA

SEQ ID NO: 231807 - protein, 375 aa, unidentified
MTSTTSTAPRCHVALELSQAKWLVGVLLPGRAKVALYIVRGGDAEGLAALLNKVAARASAEARQAVSISVCFEIGYDGFWLARFLLARGIDTHVLDASSFLVSRRGRRAKTDRIDVEAMAFTLKAYLAGDRSVCRTVEVPTPEAEDAKRLSRERTQLTRERTRHVNRIRGLLTLHGIRAVKGLFGGAWREALDALVIGDGHALGPFLRAELAREFERLHLVLDHVRQLDAERRAATAAATAFRDAPKVERLVTLAGIGEIGATVLVAEVFHRSFQNRKHLASYLGLTPSPYTSVRAAASRASARPATRRRVPCSSNSPGAGCATSRAAGWPIGTAAPMGLKVRGCARLASSRWLASWRSRSGGLWSRASCRPGPC

SEQ ID NO: 231808 - protein, 333 aa, unidentified
MVEGTEGSHHKEGSTKMNHYSAVCAGIDTGKHKLDVAIDGSDERLQVDNSPEGGRLLLAWLQKRGVERVGIEASGGYEQAAVSTLRADGFVVVVFQPAQVRSYAGFVLQHAKNDKIDAALIARCTAAATDIREPPDARLAPLAQHLTMIEQLTEDVAQIKTRREASRDQRIHDFWTDEISRLKRLIKQELQLLVAAIRTHRDLSDRLDLIASVDGVGLRTAVAILVRMPEIGRVSREKAAAIAGLAPYDDDSGLRRGERHIKGGRQRLRKSLYAAALPAVFYWNPRLKAFYRRLIEGRKPHKLALVACARKLLIFVNTVVARGAPWASVKATN

SEQ ID NO: 231809 - protein, 527 aa, unidentified
MINDIAKKHSAKSQNFHITSSIGNSSVDKAVHMSIVDGCGELVLDKFIAIPSQILETLQALKENQDPNSKRKSNKGSLRHKNKLGYIDPTVSGIDIGDKVIHVAIPNGKGGAFVEEYETTTPALHKIAQRLKEYGVITAVMEATGVYWIPLYDILESLGFKPVLVDAKTVKNVPGRKSDVVDAQWIQTLYSNGLLRAAFRPPRDRLKLRAFVRHRMTLVKNKQYALNRIEKGLQLMNVKLSTAVSEIGGVSGMDIIRAIVKGERDPVKLAALRNRGCKKPEQLFIDALSGNFQEENVFTVSQSLAQFDFANDQLKECDEKIKAELETYPTVAKTPIPKRDKDKNKTRKFSNKRKPNRNDISFDVKTMLWEKSGRDFTALGGVEANTALLIFAELGGADVSSWGSAKEFSSWLKLCPGNNISAGKRRKSKKQPSANYISQALRMSSMSAKKSHTALGAHIRKITGRTDKPKGIKAGAHKLAHLLYYMCKDGWSYYEKGEDAYEKAYADRCLKNLQKKAKEFGYKLVLA

SEQ ID NO: 231810 - protein, 444 aa, unidentified
MNEQMPPIAVAAAAAPDVDDPARAFGQLTHYGGFDWAKAEHHALVVDRQGHIVLSLRFANDADGWAHFRRKVAAFPGLGIAIETNCGPAVERLLDMGLTLYPLNPKAAERYRDRKAPAGAKDDALDAWSIADGLRTDGHGWRPLRPQDPLTTELRLLCRDEVALIEQRTALVNQLKAALHEYYPAALDAFDDWTGEGPWRFVITFPSPDVLVKAGRRKQERFLHANKLYRPQTAEQRLSAFAAAKAFANPNAAVTRAKMLLAVTLAKQLCSLESQLREYRARIIELFDDHPDHDCFGSLPGAGAKIAPRLLSELGANRAVFATAEALQGYAGTSPVTKQSGRSRFVIVRRACNKTLRATVHLWADLSRKSCVWAEAYYQKKKADGMGHAAALRCLGQRWVKILWTMWRNHAVYDEATHTRNQVRHGSWVVGLPPTNPAPTTAGR

SEQ ID NO: 231811 - protein, 367 aa, unidentified
MQNTIVHREGAASLEAARTKVKLSRAIIKIGLDVHARLYVAVAQYDQLLPKAARRLAPPEFLPWVEQLLRAGHTVHVVYEACGFGFNLYRELKAAGAHCYVIAPRKLDEQGTRVKTDPRDATTLCQRLSRYLGGNTRELAVIRVPSEAEEQARHVTRRREQLVHQRQKLEAQGRSLLINHALPAPAHWWKEQTWTRLGKYLPVWITTRLEVARPALLSLQGQIESLTSQLEAAAPPNIPSGLGKLTTVMLTREICDWHRFNNRRAISSYTGLCPGERSSGTKRVPGSVTKRGNPRVRAALVECAWRMVRFQPQYPPVKKRLAVLAKGVKATGAQRKKAIVAVARHLAVDLWRLHTGRCTAQQLGFTI

SEQ ID NO: 231812 - protein, 810 aa, unidentified
MSENYAVYVGLDVGKSAHHACALAEDGSCLYDKPLVQDEAALKDVFVGLQQYGPVLMIVDQPNTIGALPIAVARDCGCQVAYLPGLAMRKAADLYPGRAKTDARDAFIFADTARTMPHTLRAVDRDSEVLSAFKMLAGFDDDIARDCTRAKNRLRSVLTQIHPALERVFVGEILARAIVLDLFIHYGGPTKLAAAGRARVLKWARNRSRKDPVELIDRIFTALAEQTVTVPGTDAAELVIPQPAANIKALQEQRETIAGQVEGMLDEFPLAEVLISMPGIGIKTASNILLAVGDCSDFASASHLAAYAGIAPVTRRSGTSIKGEFPARSGNKRLKNAMFRSAWIASNCHGPSRANYQRKRAEGKKHNAAVMCLARRRSNVIYAMLTNREFYREPTSPPQMSAAAWASETAARALTILIGTPPVYTRPMTAALGKRFDARSTAVLVSTSGAFVLPIFAFGSPGFIRSGATPALFAVWIYTTFSFAFTLCVGRLSDRQFTVIGFGGMVGVAISAFVVTDPAAAPAIVALLSAIPAIAAMASTRRVTLLFVLVAIVLAVSHSLYWSTSTAARMVAAGASILTVSVPVFMVAVLRSSLESAVEKVTSLGETDPLTGVLNRRGLIKRHSQVFDHCRRSGSAIGFLFIDIDHFKTVNDNRGHAAGDRVLVKSADTIAASAPPSSLVGRFGGEEFVVLCGVDSIADLSAAAARIRAAVAEQGQVTVSVGAVLARVEMTYEGLPNVSEIIDELAHHADRCVYWAKDHGRDRVVLRTAPVVRWCPGLPRESLPVTPDLSDPTGFLAFVSRRACRASTVQ

SEQ ID NO: 231813 - protein, 352 aa, unidentified
MKKLTKQSVGMDCAKDELAVAFKTIDSDYESKTVASKTFRNDKSGYQALLNWSKKLREQKLKVSFVIEATGVYHESVALFLYEHKEEISVILPNKIKHFAGTEKIKTVNDKVSAQTIAQFGLEKKLDLWEPPHEVYNYLRQLSRERDQLNQELTQVKNQLHAEQAGAWPNKGSVTRMKQRLKLIDKQKEDIEEEIKQLVKDTKWLKEKIDHVCTIKGVGLITAVTVIAETNGFHLIKNKKQLVSYAGLDVQCKDSGTSVHHKPRISRKGNKYLRKSVYFPALSAIRSEDKMKNMFVRLVSKHGIKMKAAVAVQRKLLELIYTLWKKNEDFDPDYTANKKVRAATGAALNEMA

SEQ ID NO: 231814 - protein, 370 aa, unidentified
MKRIRFVGLDVHGATIAAAVAEPDGEVRFLGTIPNTAEAVRKLVKRLGSVKELRVCYEAGPCGYVLYWQLVGLGVKCEVVAPTLIPVKAGDRVKTDRRDAEKLARSYRSGDLTAVWVPDAAHEALRDLVRAREAAKKDQLRARHRLSKFLLRRGLRAPAKMAAWSGRYMKWVKELRFEHAAQEATHLDYLGEVEHAAQRIARLERSIDEAVEQAPAPMRAVISGLQAMRGIAKISAVTVASEIGSFSRFVTPRPLMGYSGIVSREDSSGERTRRGAITKAGNAHLRRVAVEAAWSYRHRPSVGETLRRRQKDLPPEVIEIAWKAQHRLHNRYRRLAARGKESPKVVTALARELLGFLWHIGVTIERSQAA

SEQ ID NO: 231815 - protein, 360 aa, unidentified
MATYYIGADVHNNSTKLAIGNGKKIVATYSVPTTIPAISNVLDSLHGRKHLTFEEGPMAGWLYRNLNSKVDELVVCDPRRNKLICSDGDSDDKIDAAKLALLLRGGYLREVYQTDSDQRAELKHWVSLYHDRVHDAVRQINKIRARCRMFGQTIPGSALRAPEHRLKWLSKINHPVLAKQLKRLWIGYDATAKQARIAKRQLTVLGREHNIIKYWEHLPGIGPIRATTLFACLDTPWRFKRKNRLWKYCGVGLERSASGTDKTGRPKPARLRLPWAANGMLKNAVLGAAISAINQGDNVFKDDYERMVQNGMITSNARHAVARKMLTVMWGMWKTSSQFDEKSLCLPSDRNRPTASISSR

SEQ ID NO: 231816 - protein, 338 aa, unidentified
MKAYAGIDLHSSNNYIGIMDQDHKRLFSRRLPNSLDKILMVLEPFKSDLKGVIVESTYNWYWLVDGLQEHGYRVHLANPSAIKQYEGIKHTDDKWDSFWLAHMKHLNILPEGYIYPKEQRPVRDLLRRRLLFVRHRTANILSLQSTITRNLGIKMSSNEIKKLDMDDACDLFDSSNLVFMAQNNISTIKHLRKIIMGIEKEVKSQVKFRKEFVMLTTIPGIGLILGLTIMLEVGDIGRFFKVGNYSSYCRCVGSKRLSNGKKKGENNKKNGNKYLAWAYVEAAHFAKRYIPKAQRFYQQKMAKANGAVATKALANKLARASYFIMRDQVPFDEDMLFR

SEQ ID NO: 231817 - protein, 303 aa, unidentified
MSSEWLEARVGRDGRTGRFANDPAGIEALAGWCRQAGVGLVAMEATGGYEKRPFALLWGRGIPSAIANPRAVRRFAEGMGLFEKTDRIDAGVIAWYAEVKRLKPCEPASEAQAHLAALVTRLRQLTELRTAQMNQRRLVTDPTVGRGFEEMLGLIARQIGSIETEVAERIAGDPVWRKLDEAFRTIKGVADRTVARLMAELPEIGTLSGKAVAKLVGLAPIANDSGKRTGNRPVRGGRTTVRAVLFVVAEIVRRYVPDFAAFHQRLRDAGKPPKVVRIALAHKLLLRLNAKARDARHQLTAIA

SEQ ID NO: 231818 - protein, 350 aa, unidentified
MIIIGCDYHPGFQQIAYVNTDTGDLSEERLGHKEQAEQFYRGLRTRGLTVRVGMEASGHARWFERLLNELQIELWIGDAAAVRTKRVRKQKTDRQDAQLLLRLLVENRFPRIWMPEAENRDLRQLLWHRHRLVQMRTRVMNQLPVVALNEGLRRKKALWRPAGRAQLESLALAPWASRRRQDLLDLLDQFTPKILELTRRLEEVVEKRPVARRLQTHPGVGPLTALAFELVIGTPERFQCAKQIASYVGLVPSEESSGDRRRLGHISKQGNALLRFLLVEAAQVTVRSDPQWRSQFFHLAMRRGRKIAKVAMARKLAVELYWMWRRGWDDNEMQQFGSHAGEPGNRHGVH

SEQ ID NO: 231819 - protein, 369 aa, unidentified
MQNDITVFVGLDVHKDAVAIAVAEEGRAEPRFVGSCGPELRELLKVLAHLGDRSHTLIAYEAGPSGFALARQLAADGWRCQVIAVSKTPRKPGERIKTDRRDALALARYLRSGDLTPVVIPDARDEAIRDLSRARQDAVRARLKVRQQLKAMLLRHGKRFPGKTSWGAAHERYLARIGFDHPAQQIAFAEYRAAVMETHERVERLTAALREQLEHWRYGPVVKALMCFKGIDFVAAATLVSELGDMHRFEHPKQLMAYLGLVPSEFSSGTARAQGSITKTGNTHVRRILVESAWCYRYSARLSRPVAERQLEQPKAVRDIAWRAQLRLCSRYRRLCGRGMHSNKICVAVARELAGFLWEAARHVQARVH

SEQ ID NO: 231820 - protein, 393 aa, unidentified
MQPGPLPDWKAPHLEPERLHVVECLPSDHLSRYRTELVLLGIAYRVPRNDKAKLHRLEAGDGAGLLAFIAGLRHRLDPPDDASMRVVSCFEAGRDGFWLHRLLTAHGVINHVVEPTSILVARGARRAKTDRLDAVGLLRVLAAKFAGDPGACRTVVVPSVEEEDAKRPHREREFLVQERVRIENRIAALLATQGVRERPSLRSWDADMRALRTGDGRPLPTHLVAELNRLRRRLSLTLEMIRELDAVREQALEAQHDSASRTVKALCTIRGIGVNFASVLTREVFYRTFDNRRQIASYLGLAPTPFQSGGMDRDRRINRAGNSRARKTLVQLAWLWLRYQPESSHAAWFRDRVGSLQGRIRRITIVALARKLLIAIWRFVTLGLAPEGAIIAA

SEQ ID NO: 231821 - protein, 340 aa, unidentified
MNVRTLGIDLAKNVFRVHGVDENGKILVARQLRRRQLLPFIAQLKPCLVGMEACGGAHYFAREIAKHGHEVRLMSPRFVRPYVKSNKNDARDAEAICEAVTRPSMRFVVVKSQTQQDVLALHRVRALLIRERTALMNQMRGLLAESGIVIAQGSATLRRTVAELQDNSETGPTPILRGILVEMSERLRLFEERLKGYDSRITGLARDDQQVARLMAVEGVGPITATALVATVGDARQFRTGRELSAWLGLTPRQHSSGERTVLLGISKRGDRYLRTLLIHGARSALYYAARRHTRRSEWLEGVRKRRGNNIAAVALANKNARILWALLRRGEDYHARLAA

SEQ ID NO: 231822 - protein, 448 aa, unidentified
MEVLHPHCAGLDIHKDTVVACVRHMVDGAVKREVRTFKTTTKDLMALSEWLSAEGCTDVAMEATGIYWKPVWHILADGDFKLMLANAAHVKNVPGRKTDVNDATWLADLMAHGLIRGSFVPDEPTQEMRNFLRTRKQFVRERTSHVQRIQKTLEDANIKLDSVITDIMGLSGRRMIEALIAGETDPFALAALAHRRIKASQAELEAALRGRVSDHHRFMLRLLLQHIDAIDAAIGQIDQEVDAHVEPFRTAIQILSSIPGISDLSAEVIVSEIGIDMNRFPTEGHLISWAGLCPRNDESAGKRRSTRMRKGAPWLKTTLIQCAWAAARTKGSYLQAQFQRVRSRRGAKKAIGAVAASVLTAAYHMLKNGTLYEDLGSDHFDRRAKGKQILRLVSRIQNLGFAVQITRSGRQHDVGTTSPDVRAGPAAGFHMPPGRRQDRGQSPSIVSF

SEQ ID NO: 231823 - protein, 344 aa, unidentified
MYHFAGLDVSVKETSICIVDDAGKIVREVKVASEPEALLAVLKNLAYHFKRIGLEAGPLSQWLFSALAEAGLPVICVETRHMQAVLKAQINKTDRNDARGIAQMMRAGLYRPVHVKTIRSQKLRMLLTHRKLLQSKAIAIENDLRGTLRNFGLKVGVVGKVKFEARIRELVENLPDLAVLVEPMLIVRRTLREQVGILHRRLLAIVRDDEVCRRLMTTPGVGPVVALTYRATVDVPARFRKSKAVGAVFGLTCAKYQSGEVDRNGRISRCGDEMMRVMLYEAAQSMLRSKKWSWLKAWAMQIARRRGMKKAIVALARRLAVIMHRIWVDGTEFRWTREQATAAA

SEQ ID NO: 231824 - protein, 387 aa, unidentified
MMDFHGIDLIKPFKINNTMDGIKMLEEKIKSVKEENKLNKVVLGMEPSGHYWKVLAWQMKISKEIDYLVGVNPYHVKKSKEFDDNSPGKSDRKDAGVIARLIRDGRYFDIYLPEDIYGELRVITTTREQLVNKRKNAKNMVISVMDEYFPEYEKIYKNIFSEGSIKLLKTHPFPKEIIEVGIEEIEKVLKKSTNGKDWKSRAQKIYESAKKSIGVREGQKSAKIKLRMLLEEIEFLTSQIEELEKEMEELVEETEEGEYIKSVPGIGPIMTAVILGEIGDINRFKSWKEIRKLAGLNLYEISSGEHKGKTRITKRGRPLLRKIIYLMAQTTLKHNHEIRKKYEQLRRREKNPLKVVQALIAIGLKMIRIVFKLAKSKIKYEPEKVYV

SEQ ID NO: 231825 - protein, 319 aa, unidentified
MSKISQDQIVGIDVSRDWLDIYCLPDGAKLRFPNNHDGHTRVAALAEERHALVCFEATGGQEWRLWSNLDTAGIETRQLPPAQIKAFAASRGTRAKTDRIDAELIARFMAFRPDAGRSLPHEKLRFLRALTSKRGQLIETRKRLLMQIKAQAKLGVENQFADMDSNLKGLLDRQITEIEAQIEQTITSDDEMLQTAEILRSVPGIGPVTTAMLIAEMPELGQITGEQAAALTGLAPIAHDSGSLRGKRTIAGGRRSIRHVMFQAALVASHHNPILKTFAKRLRTAGKPHKVIVTAVARKLVTIANALCKSRQKWASQAD

SEQ ID NO: 231826 - protein, 343 aa, unidentified
MEHYIGLDVSLKQTSICVVNQAGAVLREGVVDSDPDAIGAFVRSNAPGVVRVGLETGPTATWLWTELKRRGLPVICIDARHAKAVLKMRINKSDRNDAAGIARIMQTGWFKEVRVKDIDSHSVRALLASRALLVKIKRDLENQIRGLLKNLGLVIGRAKFNVFAVRAKELIEDRPELMAAVRPLLEARKAIEQQVGDLDRKVLKLARHDVQVRRFMTAPGVGPITALCFKATIDDPTRFKRSRSVGAYVGLTTRRHASGETEWTGRISKCGDAMLRSYLFEAAGVLLTRVPKWSALKAWGMRLAKRNGLRKATVAVARKLAVIMHRMWIDRKEFNWSKKEVAA

SEQ ID NO: 231827 - protein, 342 aa, unidentified
MSVVGGIDIHRAQLTFDYVDLDSGEVFRGRVAPADRMQLRRWLQRFAERPGVAFAVEGCTGWRYVVEELQRAGVHAHVAEPAETAARRGPKRRAKTDRSDARLLRDLLLEDRIPESWIPPQPVLEARALVRLYKDLLEERTGWLQRVHATLFHMGAPDLGAKIMSAAGREQLQGAELSPATRTAIEVGMRQVDRLTEDMTRAREEIEWISRRQPACRALRAAHYGVGPLTSVAIWAEMGDTRRFRSSDDAVRHAGLDVTVHSSNGRRSAGHLARQGPVVLRWALYEAAVYSGRPTSPDYPYFRQVKARLDGQLALLSVARKLARRCHHTLRNLDDQVLAPAA

SEQ ID NO: 231828 - protein, 428 aa, unidentified
MSKLFISVGIDVGADFSYMSIALPNQTLIGKPFKIDHENMHSLEKAVLAIKEAEELHSMKARVVMESTGSYHYPLFCYLCDKGLCVAVINPIISKNSTNMNIRKVHNDRFDSKKLALIGLKPDLKISVIPSEAVLDLRNLVREYYSLMDARVAYVIKLIGILKIAFPLYAGIFSKVTAMTSLALLDAFQSPADFLAATESAIVEIIRKTARFGEAYAKAKYLAIVEAAEKAATFGRYLPSNGVQIRTYVSFIRKYDEEIAGILLRMRELVERHSGEEFVRQIRLLESIPGVGFLTAATVIAEIGDFSAFKSPKQLFAYFGLDPAVKQSGKFVGKDVKMSKRGSAIARRAIFAIALVSIGVKKNGAANNQVLRDCYLSKCKSKPKMVALGVVMHKICNIIFAILRDGKEFCMVTPDEHAENYRNRKAAA

SEQ ID NO: 231829 - protein, 430 aa, unidentified
MKFNTQNTKIEAITETTLVLGIDVGSETHFARAFDYRGIEYSKKPFKFSNTEAGFVTLKAWILDIKEMHGKDKVVPGMEPTGHYWFNLGKFLQDNEMKPVLVNPHHVKKSKELDDNHPTKNDRKDPKVIAGLVREGRYMIPYLPDGVYADLRTASNMRFQLQGELTRIQNRISRWFNIYFPEYKTVYGKPDAKSGMLILKRAPLPKDILTLGVDGVNRIWRDAKIRAVGKARAKTLVEAAEHSVGNKEGEVSARMEIRMLLEDYESRNTRLQEVMALIEELVKQIPMAEKLLEIKGVGIRTVSGFLAEVGDISRFDTPKELQKLAGLALVENSSGKHKGETTISRRGRKRLRYLLFEVAMSLVAKNAEFRELHHYYTTRKQNPLKKMQSLMAVASKLLRVFFAMLTKGVDYDPEKMLSDIKRPAVYLQAA

SEQ ID NO: 231830 - protein, 404 aa, unidentified
MLFVGVDWAEDHHDVCVMGEDGMVLAKRRVPDSMAGIGDLHGLVAEHADDDEAVVVGIEIDRGLVVWSLLAADYEVYAVNPLASARYRDRHGTSGAKSDSGDAKVLADLVRTDRHNHRPIAGDSDLAEGIKLLARAHQSAIWGRQRQLNALRSSLREYYLGALQAFGTDLASADALAVLEIAPTPELGRRLSRSKIASALRKGGRQRNVERRTEEIQEALRAENLEAPDLIANAHGLVTHSALALIVTFNAQIAELETALSEHFEQHPDAKVVLSLPGLGTVLGARVLGEFGDDRTRFSGPKSRKNYAGTSPVTKASGHSKVVLARFARNRRLGDACDQWAFCALTHSPGARGYYDELRARGKSHRQALRQLANRLVGILHTCVERDVPYDEMIAWPKDRALAA

SEQ ID NO: 231831 - protein, 417 aa, unidentified
MKIVYPVCCGIDVHKSFLVATIVSVTDLRTLKHKKERFSIFNKDLKRLKHWLIENNCYDVCMESTGKYWVPVLNMLEPELRVVIVNPKWVKAIKGNKDDVKDSKWIGELFCFGLVRSSFVPEKPIRILREFTRYRYKLVHMRSSEKNRFQNGFTVCNIALDSVVSDMFGKSASLITDYLLTNENPDAKHCTTFLQRSLKKKAVAVVESIEGFQLTEEQKFRMLQVRQHMGYLDSAIEAVDRKLEEMTSSYAAAIQLLCTIPGMKRDSAVTVISEIGTNMSQFGSSKRLCSWAGLTPGNNQSAGKKKSVKITRAGVYIKPMLVEVAHAAVKCISQPYYKTKYESIMRRRGKKRAIIAIARMILTAIYHMFCTGEVFNPTDLRQIDMPEELKKKNVFNAIRLLKQQGVLPKNFTHASYA

SEQ ID NO: 231832 - protein, 336 aa, unidentified
MNEIIRIGLDTSKQVFQLHGVDAQEKTVLRRQLRRAQVEPFFAALAPTTIGLEACGASHHWARRLRALGHEVRLLPPQYVKPYVKRGKSDSLDAEAICEAMSRPSMSFVPIKTEEQQAGAMLLTVRDGLLKQRTMLINSIRGHAAEFGVTRAKGARQVKELLARAEPHMPAQAFQLLSLLGELLAALEDRLKRLDAELRVWHGRNALSRRLAGIPGIGPVTAMALVLRVPDPTAFASARGFAAWAGLTPRLSGTAGRMRPGKISKQGDEMLRRLLVVGATAVIRRAKDGKGAAWLLGLLARKPSKLAAVALANKTARIAFAMMISGQPYRGSAPAA

SEQ ID NO: 231833 - protein, 323 aa, unidentified
MQGKVSFEEDAMPVVYAGVDVSKEWLDIHLHPLGESRRFSNDKTGIRQLKRLLARHRPKSIVMEATGKFHRPAHRSLWLDGFAGAVIDPLRARMFARACGYLAKTDRLDARFLALLAESLRPPADTPPSPHIEALQELVNARSAAKCDITALQNRSKTATTALLRGELNRLVRRLEQHVERLDKEIERRVGEDPQLYRKAEILTSIPGIGRVTALALMAGMDELGSCSGKQAAMLAGLAPIANDSGARTGRRSIRAGRPAPRRALYMAALSACRYNPALARFADTLKAAGKPAKVILVAVMRKLLVLANCLLSHDRLWTPNPP

SEQ ID NO: 231834 - protein, 425 aa, unidentified
MTTHADTTSAATWVAIDIAKHHHAVLIETPDGKHQRFRMASTLQDHQRLVDLLRTLPAPTRVAMEPTGDYHRTLAYRLLREGFDVCLVSSVAGARYREAMFNSWDKNDPKDAGVILALLKQGITQRYVDPLQAGHHGLQELSKTHYQISLARTRLQHSLLTHYLPLYFPEVERFFSSSRADWFARFLLLFPTAASIRVRSFDDFQRAAWDAVGRKVNKRAWLRELYDRAQTSIGLPILDDSIEIETFRLQLSRYQMLIEQRDALSERAHVLLEGRADYEALRSLPGVGPILALTILAEGGDLHRFAHHRQFLKYCGLDLATAQSGQFKGHERLSKRGNARLRFAFWFAASIAVRMRENSFREKYARYIQSDPLNADRKRKAMTAVAAKMARVAYALVKHQTLYRCYAEDALPRGSIPLSRAVGTT

SEQ ID NO: 231835 - protein, 392 aa, unidentified
MRVLYERCAAIDVGNAVVAVAVRLPGDGPDGRVTHKRVFKTFYGVLREAAQWLTSLGVTHVAMEATGIYSMPVYHALLEHGQFEQVLVCNAGHVKNVPGRKTDLADADWLAHLLECGLLRGSFMPPADIKAVRDVLRYRVKVVQARTSEIQRLGGVLQDAGIKLGNVASSIASKSGRTMIEALTGGERRPDALADLAIGRMRSKISDLAMALEGRFSSHHALMCRLHLDHIAHLEQMIARLDAQIETMMQPYRTEQDLLATIPGIGQLAAAAIISEIGADVRAYFPSAAHLASWAGICPGNHESAGKQRSGKRRHGNQNLQPVLAEAAWSAARHQGYLQSLYHRHVMKSGGYRSTSAKNKAIITVAHAILVIVSLDYLAVSDLTVTPGYAGS

SEQ ID NO: 231836 - protein, 416 aa, unidentified
MDDIQWFAGVDWASEKHKVCLLNASGEVVGQRDVDHSGAGLSELCDWLLAKTDATPGQIAVAIETPHGPVVEALLERGFAVYAINPKQLDRFRDRFTMAGAKDDSRDAHVLGDALRTDRRALRRLAVQDPLLIELREWSRMNEELQQERTRLANRVRDQLWRYYPQALEITDDLAADWFLDVWQQVPTPAKAARISEKTIARILKTRRIRCIDAAEVLRILCKTPLVVAPGTAAAASAHIDTVAARIRLLNQQIKQAHRKLDELCAQLETPSENAPGQVCEQRDVTILRSSPGIGRIVLATLLAEASEPLQRRDYHALRTLSGQAPVTRRSGKQCVVIRRRACNKRLENALYHWARVAMQHDPVSRCRYAELRRRGHSHGRALRGVGDRLLYVLCKLLERQVLYDPDHPRPQMAAA

SEQ ID NO: 231837 - protein, 341 aa, unidentified
MWSRGGDGACLLDLLSRSRAKAEQRYGVQVKTIVIQEAGLDGFWIHRLLLAKGIESHVVDAASIAVARRHRRAKTDAIDGETLLRTLMAWARGERRVCSMVRAPSPEDEDRRRLTRERGTLLKERIQHTNRVRGLLSGQGVRDYNPLRRDRFERLEALRTGDGRELPPMLKAEIRRELDRIALATTQLAAVERARDALIRTDAEERNTPAALLLELKGIGPEFASLLWLESLFRSFGNRRQVAAYGGLAPSPWQSGGVERDQGISKSGNRRLRKTMIELAWFWLRHQPDSALSRWFQARVGAAKGRIRRIAIVALARKLLVALWRYVTQGVVPEGAVFKAA

SEQ ID NO: 231838 - protein, 340 aa, unidentified
MDCIGLDLHKRDSQLCVLTEAGEVIERRVRTDPARFAAVLGGRPAARILLEASTESEWAARCLEELGHEVVVADPSYAPVYATHARNVKADRRDARALAEACRVGAYRPAHRLSEARRHVRAELMGHEALVRTRTRYAILIRTLTRRDGLRLPSGSAEHLAARAAALAMPDALRAELVPLVALLAPLQAEIDAAGRRLAALVAAGPVMRRLTSVPGVGPVTAAAFVAALDDVGRFGRAHEVEAYLGLVPRERSSGERQRRGAITKAGNPRVRWLLTEAAWNVLRSRRPEAEPLRAWARRIAARRGAGVAVVALARRLAGILFAMWRDGSAFGQRRRRAAA

SEQ ID NO: 231839 - protein, 342 aa, unidentified
MFYAALDVSLRSVAVCIIDDDGKVRLERSVPSDVPDLVRCLNEFGEPIHQVGLEAGTLTQHLTYGLREAGFDVVCMEARQVAAALSAMRNKTDKHDARGIAQILRSGWYSRVHVKSVESHHLRALLTSRKVMQRKCIDLENEIRGLLKVFGVKLPMRLSRGAFDVAVRDTIESDPALSRALLPMLHARQMLFETFMELDRRVRKAAHEDEVCTRFMGIPGVGEITALSFKAAVDDPARFKSSRTVGAHFGLTPRRFQSGEKDNPGRISHAGDSDVRATLYAAANAMLMRSIAWSSLKAWGMRLMKTKGRRRAIVAVARKLAVVLHRMWADGSEFRHGSEAAA

SEQ ID NO: 231840 - protein, 339 aa, unidentified
MKNNEKTIYKHYIAIDWSIEDVYIARMLAQGEKIETKRFDSDVKQIKKYLMSIKGKKILTIEETTSSHWLYVELLDSVDKILICDPYRNSLLSEGAKNDKIDAQKLCLLLRSGLLKEVYHSLNEDYKIRKLVSAYEDLVKAGVRVKNQKSALYRAEGLRYKKDTINKQDKLIGLIEEQQNASIKLYVEEKKKYEAKFEEIKKGNATIKLLCGVPGIGTILSMRIYSKVIDANRFENKYKFWGMCGLVNHQRESGGRNYGKKKPRYSRTLKSVFKTAAIAAIGGNNDVREYYDHLLKVGYAISEARNQIARYIAKVCYAIMKNKIAYRAYQWRELKKTAA

SEQ ID NO: 231841 - protein, 369 aa, unidentified
MRDHIRYVGLDVHKDAIVVAIAEDGIRDAVREYGRVANTATALDRLIRKLADGGARLRFCYEAGPCGYGIQRHVSKRGHECVVVAPSLIPRRAGDRVKTDRRDAASLARLHRAGELTAVWVPDTAHEAIRDLVRARLDAVHALRRARQQLSGFLLRQGCHYGRPAWTKLHRRWLSNLKFEQAVHHLVLEDYIQAVETAEARRDRLTAQIEAMLPEWTLAPVVAALQTLRGMALVNAATLIAELGDLSRFTDPRQLMAYLGLVPSEHSSGASVKRGSITKAGNSAARRLLIEAAWCYRFPARVSRELLLRQENQPKLIRDIAWKGQVRLCARYRRLARTGKPANVVTAAIARELTGFIWAIARRVPVTAG

SEQ ID NO: 231842 - protein, 420 aa, unidentified
MLKIVHHVCCGMDVHKKFVIAAIAFTDFKNVTTYKKKRFATFNSDLKSLEKWLLDNNCTEVCMESTGKYWIPIFNVLEKSCHVVVANPKYVRAIKGQKTDTKDATWIADLYKFGVVPSSYIPCPEIRMLRELFRYRQKLIGHRSSEKNRLQNSLTVSNIALASVVSDTFGKSSSALIEYILTCDTFNPEHAKTLLHRKLKDKAEEVIASIIGYELRDDQSVKMKVCRKHFDYINECISILDEKLSDLSKPYHEFIEFASTIPGVTDKSAAYIIAEIGTDMTIFKSSKHLCSWAGLTPQNNESAGKKKSVCVSRAGVYLKPLLVQCANAAIKDKKNPYFKFKYDRIKKRRGHKRAIIAIARMILTCIYHMFLKKEAFNPTETDYSDIPEDLYKRHREQYIKNAIKLLEKEGCTIIPPAMPA

SEQ ID NO: 231843 - protein, 410 aa, unidentified
MDVIVERPAALDVHKAQVTACVRVPGEGGVRVPHLAEFQTTVRGLLALRDWLVAQRVSQVVMEATGVYWKPVWHILEDDFELMLVNARHVKQVPGRKTDLSDAAWLCQLAEAGLLKANFVPPKPIRELRQLTRYRKTQIAERQREANRLHKALQDTNIKLDCVASDILGKSGRAMLDALVSGTTDPEILAELAKGRLRQKLPQLREALEGRFNELHALLIGAILAHLDFLDEQIDRLSDAIEERLRPFERAVELLCTIPGVGTRVAQNIIAEIGPDMSVFPTARHLASWSGQCPGNDRSAGKQRSGRTRKGSKWLNDALKDAAMAATRANNTYLQALYHRQRSRIGHAKAIGAVKHSIISACRYLLSTGELYREAGGNYFAQRDPQRATRRLVAQLQRLGHTVTLGEAAA

SEQ ID NO: 231844 - protein, 361 aa, unidentified
MFRQRTFVGLDVHARSVVGHALDEHTGEVWQQRLPADPPGIWGWLESLPQPVKVTYEAGPTGYGLARFLRGRGVVCLVAAPSRLVRPAGNRVKTDFKDAEHLCRLLRLDEIVEVRLPDTDQEAARDLVRAREDVRGDLMRARHRASKLLLRQGIVYPGRKTWTVTHQRWLQQQRFDAPPRQLAFEDAVEAVLLTTDRRDRLDAAIEVMAADSSYTPLVRRLCCLRGISTLTGFGLAVEIGDWHRFSGSSIGAFLGLVPTEDSSGESRSQGSITKAGNGHARRLLVEAAWHHRKSYRSPSRDLRNRWQLAPSPARVRGHEGNRRLHSRWQTFQARHKRDTIAAVAIARELAGWAWSLAVMDD

SEQ ID NO: 231845 - protein, 454 aa, unidentified
MGQKRHKRRTLEGFPEINPHAAGIDVGNAQHYVAVPPGLDPEPVRTFSCFTADLHALADWLHRCKIKTVAMESTGVYWVALHEILESRGFEVCLVNARQAKNLPGRKTDVKDCQWLQQLHAYGLLTRSFRPQSEIITLRRYLRHRETLVQEAGTCIQRMQKALTEMNVQLANVISDISGMTGLRILHAIVDGERDPRRLAKLRDRRIKASEEEVASGLYGNWRDELIFILEEDLALYGVYQDKIRRCDERIEQHLKTMSAKVDVTAAPVPAARKGKRPHGNAPAFDLRSELYRVTGTDLTQIDGIDVTTAQTVLAETGPDMTAWRTEKHFVSWLGLCPDHRISGGKVLKRGTRKVVSRAATAFRMAASTLRRSQSALGAKYRRLQSRLGPAKAITAMAHHLARLFYRMIKYGSHYVDLGMASYEERFREQQLKWLARKAAELQLYLSPVPLSQT

SEQ ID NO: 231846 - protein, 446 aa, unidentified
MSTPSLPVLDPTAAAIDVGSEQLHVSIAGGPPKVFGTTTGQLYELRDWLLAHGVKSVAMEATGIYWLCPYEVLEKGGLEVVMVNGKYVKNLPGRKSDMKDCQWQATLHAHGLLKPGFVPPEHIRRLQDYLRLRTDHITMAGSHEQHMQKALERMNLKIHDVISDLTGVSGLKMIEAMLGGERNPVALLALCDAQIQKNKAGALRQALEGTWKDEHLFALRQAYELWQFYQKKIAECDQAIGTVLQELAGPEDPKNPAPPATKRGGVNGPHIAGLHVLLWRLCGGKDPTTLPGVADYVLLQLLSEVGTDLRKPWPTEKHFTGWLGLAPGSRQSGKRRGSQKRGRNRAGRLFCVIARSVGRSVDKALGGFYRRLKGRRGGLIANLALARKLAELFWRLMVHGIAYVEQGLKKYEQKVAQTEQRLLQKLASKYNLVLQPKAPGPSTLPT

SEQ ID NO: 231847 - protein, 345 aa, unidentified
MQSMYYIGLDVHKKSISYRMKDASDQIYAEGAIPATRFDLDRWMKTLPQPWTAAMEATLFTGWIYDHLLPHAAALKVAHPLMLRAIAAAKKKNDRIDANKIADGLRCDFLPECYMASTEIRERRRTLRYRNLLVRQAVQLKNKISGLLMEAGVSYNKQKLHKVGYFRELLATNQEIGEGLRPLLRICRETLVRLQKTESALVRSLEHDPLLAERVARLMTIPAVGPITALTWVLEIGDVKRFSSIKKAISYCGLCGAENSSANMIKRTPLSKQRNKHLQSVLIEAAKLAPRRSSGLALVYDREKQKGNANRATLAVARKLVAYLVAVDRRQKEFLTVEKEKRTAA

SEQ ID NO: 231848 - protein, 407 aa, unidentified
MKTSYFLGIDAAKHKIRAALSDKENRLLWQSDLVVSASALRQLLAKIKTYVPHPEQLLILIEATGMLHLNWSAALTRAGYAVAVINPLIARRLYRVENSIRDNKTDAIDARGLCTIGALHGEKLLALYRFCLKPEQFALQRLQGVRKALRSSLTNLKKTYQTLLELSFPELGHLLELDGVGIRALLSQAPTAAAITRMRRSSLKKNWMLRPKAKALQLLAADSIADPQLAAASAPALQLLLQSLASLEAQLHKLDQQIQSASLNLDQKSKALIESLPGIGPINAAKLLAWLPTQILHSGNNRKVAARLQAFMGNDPRLRQSGQWKGHTKMSKRGVEMLRTALFQCAFSAAQSDPQLRAYYHRKRNQGKTHNVAISHLMRILTRRLVAVLRSGKPYSSHYNLTLQSVL

SEQ ID NO: 231849 - protein, 393 aa, unidentified
MKNCNSETLLKATTLTKIIANSLNKPIFAGLDIAPSICQLAIQDIEDPTKIINFQIKPDALENYLRNMAKDGQKVTVAMESCACSNKWHNVIEGMGHEAIILSAKEIKNTASPYSNKTDYKDAEKILRALCLHKTTNIVTQVHGRSDENMIEIFLFNLREFVIKTIEKLNKLINSFLREITARGHSKSKPKDIIEDLITTLNDIEGSKSVNNYNETIIKIATNYFTTLESCVAQIDDTITEEVKENKALQIIKSIPGVNNVIAFGLLAHLGDVTRFSSLKKVSSYLGVAPKVVGSGGKNAELDTRYKGIKKLKRVLFQGGMSKNRIKQSLCSGKIRKEAQKYANKIVRIAVTLLRKGEFFDKNYKDKRFINKHKYKAQGLVEIAKENSIEIAL

SEQ ID NO: 231850 - protein, 339 aa, unidentified
MSSLVFAGIDVSQARLDVAVNDGQKWSLPHDESAMTTLVEQLATLHPTLVVLEATGGLEIPLTSALAAAGLPVVVVNPRQVRDFARAKGLLAKTDALDAQVLAQFAERIRPQPRPLPDTEARALAALLTRRRQLVEMLSAEKNRLLSASSSIRKSLRAHITWLERELQRTDTELTATIQQSPVWREKDELLRSVPGVGPVLTSTLLANLPELGTLTNKQIAALVGVAPLNRDSGTLRGRRTVWGGRAQVRAVLYMSAIVAARFNPVIRAFYRRLCAVGKAKKVALTACMRKLLVILNAMLTSNTVASDRGASSVILKTVADTFLPPHVAGVPERTKRLA

SEQ ID NO: 231851 - protein, 321 aa, unidentified
MTYIGIDVSKDSFVAAYPAKSGYTTKSFQNTASGVHKFISSLPNECHCVMEATGNYSMLLLYLLQEKGIPASMENPQKIKHFARAMLNTTKTDEIDAKLIALYGEKMNPASYKIPSESVLLLKQKRTVLRQLKKQLTMMTNMQHSFAALPKQDPASKVALEQTIKFLRKQISKLEEEITNISNKEFRRQMALLTSIKGIGDEIASALIIATGGFTYFSSAKQISRFLGLCPTYQQSGTSVNVKGHINRNGDTYLRSQLYIAAVSSIRFNTACREIFERLKANGKSGKVAIIAVANKLIRQAFAVVTNNRPYEDGYVSSLAK

SEQ ID NO: 231852 - protein, 309 aa, unidentified
MSQEKYIGMDVHQATISVAVMDGGGKLIMECLLETKAATIVEFIRGLQGTLSLTFEEGTSAAWLHDLLKPHVSRLVVCDPRKAALLKDGNKSDRIDARKLAEMLRTNQLKPVYHGEHGLRTLKELGRSYLTITQDVTRCMNRIKALYRSWAIPCSGSTVYAPRHRAEWLAKIAEPGVRIRAERLYQQLDSLQPLRLQARGELLRESHKHSVVQLLRQIPSIGPIRSALLVALLQTPHRFRTKRQLWAYSGFAVETHDSGEYRSVRGKLQRNRERITVRGLNDNHNKDLKNLFKSAAISASTRPGPLQDF

SEQ ID NO: 231853 - protein, 364 aa, unidentified
MNINNEPIDQNSAVYIGIDVHRYQHTAVAANRFEEAMGELTFPNTPGGIKEFLHWTDVLADNSRTRIIGIEGANGNGKLLRNAVTPVFPAVYEINPIYTKQRRDHGTRGDKSDPVDARLMIEVLTRKLDELPRVTSQDTSDSMQALSELVAFHDDLTRSQTRLKNQLHRLFYDIDATSETSRSRTFSNKQLKYWLTKTAKTDLSINCTMQRFIIRNKIHQLLDLKKTRDIADDQITQLVAQFNGNLLSLPGAGIITTAKIISAVKGIGRFGNIRQFVKYAGIAPVEHQSGKTRKHKQAKGGNRQLNTAIYTIALTQLRCNPKAKEYFEKKIAEGKTKKHALRCLMKRVACIVYGMMKGGEVYRG

SEQ ID NO: 231854 - protein, 317 aa, unidentified
MNAQNNQNEINVGVDTGKTQLDIYIRPLDIYFVVSNDELGIKEAIKTIKKYKVTRIVIEATGRLEQPFIMACAKANLPFVIANPVRIKKFAGAINQQAKTDKLDAQLIAYYAEVIKPELSQLKPEDIRLMSDLLSRRRQLMEMQTMEKNRLQIMPKEITSSIKPVLTVMKNQLDKIDNKLQKLINSRDEYKIKNDIIQSVPGVGKVVAFNLISEMPELGYINNKEASSLVGVAPFNRESGSYKGNRMIRGGRSQIRTAMYMAMMSAIQCNRTFKEYYQRLVAVGKPKKVAIIACIRKLVITLNSMVRDGVYWDPKMS

SEQ ID NO: 231855 - protein, 377 aa, unidentified
MDKMTHRDESMGATPVLYMAMELSATKWHLVFGIGVATPMRHRTIAAGAVDSLREEMRKARARFELSTEVPVRSCYEAGRDGFWVHRLLNQEGVENLVVDSSSIEVNRRHRRAKTDRLDGVALCRKLVQYWSGDHHTWKVVHVPSEALEDSRQADRGIVTLTTERTAWRNRIHALLMLVGVRTTITADFGDRLDRVRTWAGEPLPPGLLSRVRQAWRMLTNVESELRAARQAQRDEVAAAATAPAQIAAQLRRLHAIGDGTAALLAKELFSRDLRNRREVGALTGLVGVPYNSGDTSREQGISRAGLARVRGIAVELAWLWRRYQPQSALTRWFEARFGAGGKRVRKIGIVALARRLMVALWRYTQTGIVPAGATVR

SEQ ID NO: 231856 - protein, 359 aa, unidentified
MPEIFVGIDVSKESLDIAILPDEQRFVVANDEEGLAILISRLVSMNPTLAVIESSGRYQVRAVSVLVEAGVPVAVVNPRQVRDYAKAKSILAKTDALDARVLALFAEAIRPEVRPLPDAESRRLADLMSRRRQLVEMMTAERNRLGIATPAVRPSIEAHLSWLKREIKELDEDLDDFIHKSPLWREKDNLLRSVPGIGPVVSRTLLAELPELGTLNRKKIAALVGVAPFNRDSGKWKGKRCVWGGRSKVRSALYMAALVATRHNPVLRAFYQRLLAVGKAKKVALTACMRKLLTILNAMVRQRTLFSFNNLERCEPRKAAAVKGGEAVREADQAAGRVREAEAQTLDGRRLSGSLALSC

SEQ ID NO: 231857 - protein, 341 aa, unidentified
METTRHIGIDLHRNKFTCCVRLDHGRNCLSEWKLENLPVFVKKLRPTDAVAVEVTGNTRLFYDAVAPHVARVVAVDPNQFRVISHSVKKTDPNDARNLALYLSKGLLPEVRMKEKTQAQIASLTQTRDTLVKLRTALKNKVNNILSAHGINLDKEALSSEKKLTEVLAMQFDPMIRIELKVIVEQIRSLNQSIAELEKTITEEGQKLKGHKNLTSIKGIGPLTGSILLSVIGDIHDFADEGKLAAYFGIVPRVNNSNETERSGRITKRGSKLGRTALVQCALIAQRYSPYLKKFYEKTKARRGTGKAIIALARKLLGIVYRTLKNNWVFQDFPNFVLAEES

SEQ ID NO: 231858 - protein, 438 aa, unidentified
MNSQSLEVKRYFVNGKTIIGIDPAKRKHQVVIIDPIGVPIGSTFKFSNNFYGFHTELFDNLNARITGFSSKNVVFAIEASINLWQKLCYFLNNKGYSVLTVSPLFTHHERPKINNNFSRTDPKDALAIANCARQGYFNFYQDYPSNVNAMHNLSITYYKLIKHIAQVKQRIGSMIDLIFPEFKDALDHDTDTARYLLSKYLSASDFRAMNLFLEAPVIMKLSGRQHGEDTLKRIKQAAKQTIGIKLNDEEIITARITLNCWLGQYGFLKEQIGSVLEQLITLAEKTPYFNIISSLKGISDITAARFIAELRDISYFNHHKKIEAISGMNLKLSQSGQYTGYRRITHLGNHRLRAIIYKMAEETKNHVPEVRIRYLKRQMKQPRYRKNVIASSSNLLKLIFSLVKENRKYEYREEKLTELKQLEKQYTEFKKKKYKKSA

SEQ ID NO: 231859 - protein, 352 aa, unidentified
MTTIAEPTRGVILGVDTHEEIHVGVVIDDLGRVQDTLSIPSTAAGNRQLVRWARRHGPVLAAGVEGTGSYGAELARFLTAEGLTVVEVNRQNRQHRRRHGKSDPTDAEAAARAVLSREATATPKTRSGIVESIRVLRIARSSALKARTQAANQIRDLVITAAEPLRGELRGLSTTKRVQRCARFRPTQNADPLEVTRRALKHLARRWLALSSEIRELDTELETLTRQAAPRLLAHFGVGTDVAGKLLVAAGDNPQRIARESAFAALCGVSPVAASSGKTQRHRLNRGGDRQANNALWTVAFVRLRNDPTTRAYADRRTKQGLSRREIIRCLKRYIARQLYPDLIADLTHALT

SEQ ID NO: 231860 - protein, 360 aa, unidentified
MRIIGCDLHSRQQTLAMLDTTTGEIEKTTLKHEENVVREFYSNLPRPACVGIEATGSMQWFLSLMEELGVECLVGHPAEIRAAEPRKQKHDRRDADLLLSLLVEERFPTIWLPTKELLDIRALLRHRHQWVGLRVKIQNALQAIALANGLRRGPSLWTQAGQQAIAALPLSPHAAYRRNELQTMYVKFEEEIEKLNQRVEQQARERCGARLLMTHPGVGPMNRSSRNRRNSDPARFADSKTLASYVGLIPGEYSSGKRQRLGGLTKQGNPLLRFLWGEAAIHAVRRDPELKRFYNRKLIQKGLGKARAAVARKLGIRMWIMLRDRIEYHEFCRRGQMQQTSGDACAGMPGRVMVRKSPAD

SEQ ID NO: 231861 - protein, 354 aa, unidentified
MPARSMAQSVIVGVDTHKDAHVAIAKDEMGRHLGELVIPASPSGYRELLCWAKGYGEVASFGVEGTGSYGAGLSRHLASVGQRVIEVNRPNRQTRRRNGKSDPADAEAAARAVLSGEAATRPKAADDVVEMIRVLRIARRTAIKARTQAINAMQAILITYPEDLRQSLKGLSATRLVRTCARFRVSEASDPLGATRMALRFLARRHEALEAECSSLQAELERLTTRAAAELKELYGVGTDTAGALLVAAGDNPERLRSEAAFSALCGVSPMEASSGKTMRHRLNRGGNREANQALWRIVMVRISRKHQPTMDYVARRMAEGKTKREIIRCLKRYVAREVYAVLVAGKSDASAVA

SEQ ID NO: 231862 - protein, 504 aa, unidentified
MDWFGFGWRASEVGHRGKRRLAPVDKSAPEVIPDAEHELVIERVAAVDVAKAAGKVCVRLPAKTGRRFSRVWDVPARTGAITELGQQLVELGVEKITVESTSDYWRIWYYLLEAAGLSVQLVNARDVKNVPGRPKTDKLDAVWLAKLTEKGLLRPSFVPPAEIRRLRDYTRLREDLTHERTRYWQRLEKLLEDALIKVSVVASRLDTMSTRDMIEALIAGERDPRRLAELARGRMKAKRSELITALDGRFDDHHAELARMLLAQIDALSAQINTLTGRIEDLIAELSEAAAVDHGGGDDTDTAAPDAGDGPDAGPPPARGAAGLTGGTPRRVDPAIEAECARLSAIERLDEITGVGEHNAQVIIAETGLDMTRFPTPAHLVAWAKLCPRTIQSGPVTRSGRAGKGNPYLKGALGQAAAAAAKTDTFLGQRYRRIVKRRGKLKALVAVARSILVIVWHLLADPLARFHDLGPDYHARRIDIERRMRNHIAQLTALGYRVTVEPAA

SEQ ID NO: 231863 - protein, 389 aa, unidentified
MAARTVNNLPPAGAHDDAVRCVLAIELSKKSWIVAVNTPLSNKISRHTLTPCDGKGLLDLCERIRTRVAGETKKRVEIVSCYEAGYDGFWLHRLLEAHGIRNYVIDPTSLQVDRRARRAKTDRVDVERLLRSLLAYLRGEPKVWSVVRVPSVAEEDDRRLHRERGRLINERIQHVNRIKGLLAIHGVYDYQPLRRDRTQQLERLRTTNGQTLPPRLKAEILRELQRLELVVGMIKTIEAERDAIASAKVETEHRSAKRIQDLVRIKSIGPEFATTLAGEVFYRSFDNRKQLASYVGLSPAHFQSGSTSRDQGISKSGNAKARTVMVELAWLWLRHQPASPLSVWFHERVGKLKGRIRRITVVAVARRLLIALWRYLETGLVPEGATLKV

SEQ ID NO: 231864 - protein, 350 aa, unidentified
MLIGVDYHPSFQTIAFFVQETGECGEQELNHSDGKAERFYRDLKEREICVRVGMEATGYARWFERLLAELGFELWIGDPAEIKAKRVRKPKTDKEDARLLLKLMLEDRFPKIWVPSLENRDLRQLLWHRHRLVQMRTRIMNQLQALAMNEGRRWKKKLWSEQGRAELEKLGLAPWASRRRKELLELLDRLNPSIEELTAAAEREARKRPDVLRLMTHPGVGALTALAYVLMLGTPERFHRGKQIGTYVGMVPSEDSSARKQRLGHITKEGNCLLRFLLVEAAQAAVRTNPHWRRRYIHLAMRRHKSIAKVAMGRRMATRLYWMWRNRCDYSPSFEFGSYAGQPETSHGVK

SEQ ID NO: 231865 - protein, 427 aa, unidentified
MNYTQNQKISQITPSTLIVGIDVAKEKHVARFQDDRGLEFGKRLIFENCIHGFQTLLDCVKRHQNDNHKDHVIFGMEPTGHYWLNLAYFLKAKGYDVVLVNPMHVKKSKELDDNSPTKNDTKDARVIAQLMKDGRYSVPNLLEGVYAELREGVKLRDQLIKQLMIIEGRIENVIQRFFPEFFDVFGDWKGKAAFYTLRMFPFPSHIQKLSPEEVLQKWKPYVQRGVGLKRATRLVEVAKKSVGIETGIQFAKRELDCLLDQYELYKKQLAQLDEELEGVVESIPGAKQMTNIPGLSYTTIALFFAEVGDLTKYNHPQQLVNLAGLSLREHSSGKYKGQTRITKRGRRRLRKALYLAIRPLVAHNPVFKALHHYYTNRPDRPLKKQQSLIALCCKLLRVLFAIGKKQCEFDGLKLLKGLPQIKALQAA

SEQ ID NO: 231866 - protein, 432 aa, unidentified
MIPAILERCAGIDVGKSEVAVCLMTGPAAAEPRVEYRDFKTFTADLERMKEWLVGAGCTHVLMESTGSYWKPIFNVLEDRLKVCVANAEDVKGRKGHKTDRQDSWWLAHLFRHGMVRTSFIPPRAIRDLRDLTRRRRKLLGMATSEKNRVAKVLEDANVKLGSVLSNLFGVSGQLMLEALLEGRATAEQIAQFAQRRAREKIPQIAASLERHRMSEHHRLLIRMSLEVLRCLEAQVIALDEEILRRIARHGYVRQLELIESVPGIQRDTAVVILAETGGDMRVFPTAQQLSSWAGVCPGNKRSAGKDFRGHTTRGNRWLRSTLTQCAWAVAHSKGGPLRERFWKLAVGGTKKAVMATAHAQLRLVYQVLSTGQPYSPGPSAPCDPARRLRMIRHHVRCLGRLGLSTGPMLAQIRHAYCTKTRLEAPVHSGEE

SEQ ID NO: 231867 - protein, 459 aa, unidentified
MQDNIETQENRRRQLEGLPVIRRGVAGIDLGSEHHWVCAPTEDGAGREITDFGSTTSELVRMAKWLKDRKVESIAMESTGVYWIAPHEVLEAAGLEILLVDTRQLAQVPGRDKKTDPTDCEWIQRLHSCGLLRGSFRPPEQVCMLRTLIRDKGNLVAESGDWLRRMQKSLDQMNVRVHRAVSDIDGVTGLAILRAIVNGERDARQLAKLRDKRCRKTEEEIAEQLNGHWRQDHLFSLKQALKMYDDIQQRIGDYEQEIIRQLGAMQRTEFREQAAPKPQNPQKAKTMKQRGQEPIREALYRMSGVDLTSIDAIGVETVEVVLSEYGPDLSRFPTEKHFVSHVKLAPYTPRSGGKKLKKKRRNTASTRVAAALRMAAVSLRNSATALGAYYRKVARGIAGDVAVFATARKLAVLIYRLLRWGQPYVDEGEEAFEKRYAERRITVLKSKARELGFALVQKP

SEQ ID NO: 231868 - protein, 341 aa, unidentified
MKYTPVGVDIAKHVIQVHFINEHTGEVVNKQIRRQDFLTFFSNREPCLIGMEACGGSQHWARELTKLGHKVRLLQARFVKAFVMGNKNDVMDARAIWMAVQQPGKEIAVKTEEQQSVLVLHRTRMQLVKFRTAQINALHGTLLEFGETIHKGRVAMERELPEALERMKERLPQYLMTVLENQYNRLNELDSLIEDIEKQLTSVAKQNETCKRLLDIPGVGPLIATAAMATMGEASAFKSGREFAAYVGLVPKQTVSGGKIRLLGISKRGDTYLRTLFIHGARAAALLTKEPGPWITELKCHERCNSDPHPSGTGMNVRLRRSFFSPAFSVYGLSENTSPSL

SEQ ID NO: 231869 - protein, 412 aa, unidentified
MKDLLEISCGLDIHKEKIVACILTGPLGKPTHSEIREFTTLIPDMLALRDWIISENCHHIAMESTGIYWIPIYEILEDAFSGDITLLVVNARHMKNVPGKKTDMRDSEWISTLLRAGLLNASFIPEKRIREFRDLNRYRKSIIRDITSQKNRVEKFLQSSGFRLSSFISDIFGASGRNIILHLMEHGQIDKMSLDSYLKTKTRKRIDEILMSVNGTLSEHQKSFLKILMCHYDSMKEHLIEIETHLQEDMLPFALQIEQLNTIYGISTTASCAIIAEIGTDMKPFKTAEHICSWAGLCPGNNESAGKRKSTSITKGNPYIKSMLCEIAWVIAGKRNTYLSAWYWRIKQKKGARKAIVALARKLLVIIYTMLKQGTNFDENCFEVRRKNCEQKQLSRYIRELEEHGYTVEAQV

SEQ ID NO: 231870 - protein, 344 aa, unidentified
MYVGLDVHKDFCQAAFLDNEGKFVKEGRFENTASGLLELAQATAGEEVVMESSSSSMHVYDSLVETCKVKVAHPSKVKAIASARIKTDKIDARILAQLLRADMIPESFVPPKAYRQARLLVRYRASLVSARTRIKNQIRSLLTKEGIKNPFKANAAFGKKGLLFLRNVELEEMQRISMDSLLLLLESFDKQIANFDKRIRDMASQDNYAKLLVTMKGVGCLTALAVASEICDISRFSSYKKLCSYLGLVPSVYQSSTTERRGHITKQGNALLRSMLIQDARVAVRYSKYFKHKYEKLLAKGVKEKKAIVAIARRMVVIMYIMLVRNETYVEERKGEKPVGLLGQ

SEQ ID NO: 231871 - protein, 338 aa, unidentified
MSYYVGIDLHSDNNFIGIIDMKDCRILSKKIPNDLGMVLDTLKPFKRKIKGVVVESTYNWYWLVDGLMEKKYKVHLANPSQMQQYSGMKYTDDKWDSFWLAHMLRLGILPEGYIYPKDIRPIRDLLRKRMKLVQQKTAHVLSLQSMINRNTGRKTGVNEIKKLHENELKKIFPDKHLVMSAQSDNEVIEFLNVRAGAIENTAVKEVKLRYPFGRLLTVPGIGNILGITIMLESGDMNRFQSVSNYSSYCRCVSPKRVSNGKKKGENNKKNGNKYLAWAYVEAANFMRRYCPQARSWHQRKVSKTNQIVATKALSNKIARACYFIIKDQKDFDPEMLFK

SEQ ID NO: 231872 - protein, 373 aa, unidentified
MNNTTVYVGMDVHKNSFSLCCYTVRDDACSHYVKIDPDYRLVLEYIESMRGIYGDDSKFICGYEAGCLGYTLYHQLNDHGVECIILAPSTMAESPVQKKKKTDKRDSEMIARCLAHHSYHKVHVPTSEEEQIKEFIRMRDDHKLALKKIKQQILAFCLRHGFIYNAGASYWTAAHLSWLRSLEPEGLYKEILSEYLLTYDKLTDTLERLDRRIEELADQDAYRESVRKLCCFLGIKTQTALAVIVEVGDFKRFQKAQQFASYIGLVPGEDSSGDGINRLPITKAGNTHVRRLLVEAAQSYGRGSIGFKSKALKARQEGNSPEVIAYADKANERLRRRYYRMTLKCGKKVNVVKTSIARELACFLWGMMTGETA

SEQ ID NO: 231873 - protein, 385 aa, unidentified
MTIQIQVPGFIPRDYDVFAGLDVDKKGMAVTFADHAGSQRAVRMAHQVTPLLNYVRKHFAGQRVAFAYEAGPTGFGLHDELVRRAYTCVVVAPSKVPRAPGERVKTNRLDSRKLAESLRGGQLHSIHVPSAVYRNLRHLVQMRDTHVRQLTASKLRIKSLLLFEGIAFPEEHEKWTARAMRELQTLPCSEPVRFKLDDLLDTLHFHFQAAARATKQIRQYCLQEPELQQSIEVLLSLPGIGWIVASHLVARLGNPQEIKNGRQIAGFLGIVSSEHSTGDKENRGEITRSGDSRLRNKLIQSAWTAIKRDPELRAFYRRIYQRHPKKVAARKAIVAVARKLTNRIYVVPKEQRPYVIRPDSSIAPLTTEETVGPRERLDAAQNDQS

SEQ ID NO: 231874 - protein, 463 aa, unidentified
MEVINSRCGGLDVHKETVVGCVRLALDGKVTREVRTFETTTSGLLLLLAWLTEMGCTHVAMEATGVYWKPVWNILSDGDFELVLANATHIKNVPGRKTDVSDAAWIADLLAHGLIRSSFIPDQEIQELRELLRTRKQLGRQQARHIQRLQKTLEGANIKLDSVITDIVGKSGRAMIRALIAGETDPVKLAALADGRIKASQQELRGALRGRVRDHHRFLLHLHLQHIEFADAAIHDIDQNVAALIIRMDQEVEAGRAFQGLILLLITIPGIDVLAARIILSEIGPDMSRFPTAGHLLSWAGLCPRNDESAGKRRSTRLRKGDRWLKTLLIQCAWAAKRKKGSYFNANSTVSLLDVDQRRQPARSLPRSSRRSTTCSRTAHNSRISVPITSIAARRKSRPNASSTSSQSLASMPSSRPSPKLLEIDAANVATKRIPEDQAGSPPEPSSWRDREFAARSVPSVSS

SEQ ID NO: 231875 - protein, 314 aa, unidentified
MRNCIGIDVAKQSFDLHCLKTGQDQRMDNSTDGFRQCVAFCNETRPELIAMEATGGYELALAGTLQAEGFAVAVVNPRRIRDFARAAGQIAKTDKLDARIIAQFAATLEPMPTEQINENTQKLKALVARRNQLVGLHTAESNRLEHADVRDIRRSIAAVLKVIETQLETIDRQIEEHIQNTPQLQQRSETIDSAPGIGPTTAHMLVTELPELGRLNRRQIAALVGVAPFNRDSGTFRGKRMTGGGRKDIRSRLFMPTLVAVRHNPVLKAYYTRLVGQGKCKMVALVATMRKLICILNTMIKNNQKWNPNLIKIA

SEQ ID NO: 231876 - protein, 328 aa, unidentified
MCTLGIDVSKNKIDLCLLTAGPGGKKKHKVLTNEPAVARKVVDWLNAQRCVPESVTVVLEATGIYHENLAYGLHEAGVSVCMANPCRVREFAHGMDILNKNDAVDAFVLACYGELKSPAVWVPPSPEVRKLRALLRQRDALREDVQRTVNRLEKANSTSTPQEVIRSLERTKSWLNEELARIEKLITDHTDNDPGLKADLDLLKSIKGVKDQVGREMLALLKDGTFKSASQVAAYLGLTPVEKTSGSSVRGRPHMSKTGPSGVRAKLYVAALTASRWNKQAKAIYERLVAKGKAKKAALGAVMRKLVHLCFGVLKTRLPWDENYVATA

SEQ ID NO: 231877 - protein, 423 aa, unidentified
MEVMHERCAGLDVHKAMIVACVRIMAGGKVGRECRTFETTTAGLLALLAWLRESGCRHVAMEATGVYWKPVWNILSDGAFELMVANAAHIKNVPGRKTDVNDAMWIADLVACGLIKASFVPEEPIQELRSLLRARKQLTREQTSHIQRIQKTLEEANIKLDSVISDILGLSGRRMIEAMIAGVRNPFKLAELADRRIKASPKALYDALHGRLTDHHRFLLRLYLGQYDTLDAAIVALDQQVDASVTRMDKEAKAGQATFRSLIILLCTIPGIGALAATTILAEIGRDMSRFPTAGHLVAWAGLCPGQNESAGKRKASRLRKGAPWLKTMLVQCAWAASRKKDSYYKAQFNRLRSKRGPKKAICAAAASLLTAIYHMLKDGTEHHDLGADHFDHRSTAVKANRLVAQLVKLGFQVELHPLAEAA

SEQ ID NO: 231878 - protein, 420 aa, unidentified
MKPLSDDEFTAFIGIDWADRKHDICLQGAHGERREFARIEHKVDAIDQWAISMRQRFGGPIAVALELTKGPLVYALQKYDFFVLFPINPATLAKYREAFKPSRAKDDPTDAEHALELLMHHRERLTALNPQSVPMRTLLHLVEQRRRVVDDKTRFTNRLGYALKQYFPQALDWFEHTDTIVFCDFLTRWPTLLQVKRARATSVKAFFKSHNVRYVNVIDERIQAIKSARALTQDVAVITAYRLQALVLVDQLRVTLQAIDRFDAQIAETAPTLPDYALFKSLPGAGTHLTPRLLVAFGEQRERFASAAEIQKYSGVAPVTERSGNKCWIHWRWQCPTFLRQTFVEWSAQTINKSFWAGAFYRQQRDKGSSHQAAVRALAFKWLRILYRCWQTRTPYDESNYLNALKKRGSPLLNQLGTQT

SEQ ID NO: 231879 - protein, 340 aa, unidentified
MEARMIGLDLAKNVFQAHGADAAGAVVFRKRLRRCKVLAFFASQPACQVAMEACAGAHYWGRAIGKLGHTVRLIPPAYVKPFLKRQKNDAADAEAICEAAQRPTMRFVAVKSEEQQASVVVFRARDLLVQQRTQTINALRGHLAEYGLVVSKGPSHIAKLIAQVEDPQSSLPQAARLALSVLVETLRSLEHSIKRLDVEIARRAREDGTARRLATIPGIGPITATALVALSPAAASFKRGRDFAAWLGLTPLQRSTGGKQKLGAISKMGERTLRRLLIIGASAVTRQARRRGAPQGSWLARMFARKPPMLVIVALANKMARIVWALLAKGGVYQAPAAVA

SEQ ID NO: 231880 - protein, 313 aa, unidentified
MKALQSNVFIGVDVSKERLDVAVGSSGETISFANSEDGIALLSDFIKPQAPALVLFEATGGWEMNAVHHLAAQRLPLVVLNPRQVRDFAKATGQLAKTDAIDARVLARFGQAVRPEVRPLKPEELRKLDALITRRRQIVEMITAEQNRRGSAPEWIRPDIEELIAILKKRLAAINRELNKLIRKSPLWREKDRILQSFPGVGPVTASTMIAALPELGSLNRRQIAALVGVAPLNCDSGTHKGKRKIWGGRADIRSVLYMCAVTAARCNPVIREIYQRLLRAGKPNKVVRTACMRKVLVILNAMMRSKTCWQPT

SEQ ID NO: 231881 - protein, 350 aa, unidentified
MVVVGADVHKRTHTFVAVDEVGRKLGEKVVAATRLGHGQAVMWARERFGTDVVWAIEDCRHLSARLERDLLTAGQQVVRVPPKLMAQVRASARTRGKSDPIDALAVARAFLREPDLPIASHDEISRELKLLVDRREVLVAQRTATINRLLWRVHELDPERAPKPRSLDLAKHRRLLADWLNNEAGLVAELARDELADVTRLTEAIDALGKRIGDRVRQIAPTLLSMPGCGELTAAKLIGESAAVTRFKSEAAFARHAGVAPIPVWSGNTAGRVRMTRSGNRQLNAALHRIAVTQIRLDGLGQTYYRKRLHAGASRSEALRSLKRRLARVVYGHLHTDHQNRQNTCQQAAA

SEQ ID NO: 231882 - protein, 310 aa, unidentified
MERIYVGVDVSKDRLDVHVRPAGEAFAVARNGEGLEELNRRLGGLGVSLVAVEATGGFETVVSASLLGAKLPVVVVNPAQVRSYAQALGKRAKSDPIDAEVIARFAEATKPEIRVLPDEQTQALADLVARRRQIVQMIAAERQREKRTRLRRVLRSIKNVIAALEKALNDVDQQIDDSIRSSPAWREKENLLASVPGIGPVTARTLLAEMPELGRLDRREVASLAGLAPWTRQSGKWKGKSFIGGGRHEIRTALFMAALTAARHNPVLKVFHQRLIAAGKPKMVALIAVARKLITILNAILRDKRPWQIA

SEQ ID NO: 231883 - protein, 315 aa, unidentified
MTQTSMTTAGIDTSKAKLDIAVHGRTERWRVANALPGWRALAANLTKADVTRVGIEATGGYERGVVEYLRAAGLTVLVLQPLQVKAFGRVHLRRAKNDALDAELIAACTAAIDQLRMVPDTRLTELAGYLTFLEQTEEDIARFKTRLEHIDEPGLRRIVNSDITRLKARKAAQIRDIAKRLRAHDDLAGRLDLVLSIPGIGERTALALLIRMPELGQVSREEAAALAGLAPFDDDSGQHRGQRRIAGGRGRLRRSLFAAALPAAYRWNKALIALYARLKARGKAHNSALVACARKLLIYANTVVQRGTPWTEKAA

SEQ ID NO: 231884 - protein, 369 aa, unidentified
MAQPIMVACDLHDKSMLLKIAQGSDKPVKRSVLNTRTARTQLIADLQAMSQAKDGAPIVFAYEASGLGFGLYDELTEAGIQCFVLAPTRIVRSPQQARQKTDEKDADQILELLRGHLLAGNRLPTVWIPDPQTRDDREIVRARLDAVDKASSLKTQIKCLLKRTHVPRPEGLGQGWTRLFYAWLRGICSDPARGIGLRSALESLLRQLEFMETEIERLDGAIALLAESARYAPVVAEVAKLPGVGLLTAMVFLTEMGDLRRFDNRRQLAAFIGLAPCAFESGNSHDRKGHITRQGPSRVRRVLCQAVWPRLRYDGPEKEAYERIVTKNPKKKKIAVVAGMRRLAVRMWHKGKAAQEELKRTAAPPGPAE

SEQ ID NO: 231885 - protein, 356 aa, unidentified
MPTMPDHAGEVILGIDTHEREHVAALVDELGRLLATRSFPATTRGFKLLLAWTHEHGHVCRAGVEGTGSFGTGLARFLAGEGVRVVEVTRPNRRGRRHLGKSDTVDAEAAARMVLSGEATATPKRRDGIVESIRVLQIARRSAIKARTQAGQQVRSLIVTAPPELNGALAGLSVKRQVERCARLRPAARSSASASTQRALRSLARRWQQLDTEVRELERELHSLIRTAAPSLLAEPGVGPDTAGKLLVIASDNVDRLRSDAAFAALCGVSPIEASSGKTRRHRLNKGGDRQGNNALWTIANNRLIHHPETRVYAARRTGEGLSRREILRCLKRHLARRLYRLLVADLTAAAALDLT

SEQ ID NO: 231886 - protein, 418 aa, unidentified
MNEEGNTRGTRRYVALDIHKHYCVVAGVDREGRVVLQPVRVEHADLEVWLKKKLHFTDHVVIESTTNAWHVYDLLVPLVERVVVANPIQVKQIAKARVKTDVRDTFILARLLAANLVPEVWVPPLHVRQLRQLLSQRRQLVETHTQIVNRMHSVAHRHHLKHARGKRFNEKTTAWQKDKRLSKLEQFQLELEMENRAYIEKQISRIGKEVAKMSHQKPWAESMTYLMQLPGFGVITGMTVLAAIGEIQRFESARHLASYSGLTPGLEQSGTKYREKAITKEGRKELRWALVEVAQRAVKSDPRWTRKFQELEKRMHRNQAMVAIARQLLELVWYVLTRRQPYRHFSQERIAYKYLTWAWQMDEAARDGLTRQQFARYYLMRLGIGHDLIRIALNPKYPRKLASEAELLVLRPELQHLE

SEQ ID NO: 231887 - protein, 370 aa, unidentified
MAPASTLFVGLDVHKETIAVAYVGEEREAEVVSLGTIGTRQKDIDALVRKLQGKGKRLHFVYEAGPCGYWLYRYLTKKNLKCWVVAPSQIPKKAGDRVKTDRRDAVQLARLLRSGDLSPVYIPSVEDEAIRDVVRAREDVLKDLKAAKVRLKAFLLRQDIRYEGRANWTAAHLRWLANVVCPTPAQQIVFQEYVRAVSEQTERLQRLEAELLPLVQTWRWAPVVAALQALRGVQFLAAVTLIAELGDLTRFETPRQLMSYLGLVPSEHSSGERRRQGSITKTGNSHARRVLVEGAWAYRYPAKVSRHLQLRLAKVPKAIQDISWKAQVRLCKRYRRLVARGKNVNQVVVAIAREMAAFVWAIAREVQVAH

SEQ ID NO: 231888 - protein, 372 aa, unidentified
MKKSSSSRENPKCAMKAKRAKQSVTIGMDLGDKASRYCLLSDEGEILREGEVATTKAGMTGTFGRMGRARIAIEVGTHSPWVSRLLRSFGHELVVANPRQVKLITESSRKDDRLDAQTLARLARIDPQLLRPIQHRSEKAQMALMVIRVRAALIAVRTSLVNTARGLAKALGERLPKCDADQMGVLQAESLPPQLRQVLEPLLKEVESITEKIKDSDREIEQIARKDYPETALLQQVGGVGPLIALTFILTVDDKGRFQKSRDIGCYVGLRPRRSDSGQSQPQLRISKEGDPYLRTMLVQGAHYIISRRGPDTDLKRWGLHLAEHGGKRGKKKAVVAVARKLGILLHRLWVTGEVYEPLRNQNLRMGRKKAA

SEQ ID NO: 231889 - protein, 406 aa, unidentified
MNAVGIDVSKGKSTVSILRPGGEVIASPFEVSHNPRELNELVTLIKSLDGDSKILMEYTGNYYLPVALFLQKSGLFVSVVNPILVKDYNNKSLSVRKGKTDKKDSLKLAAFALDRWNELPLFSAQSDTRTLLKAFNRQYNQYNKLKVMLKNNLISILDQTFPGANTLFSTPARKADGHEKWIDFVLKFPHCECVSKKSFSAFSKGYLSWCRKFGYLFSEAKAKEIYAFACNCTPSLADSEATHTLVSAAILQLNTLNETIASLQKEMDLLAASLPEYDTVLSLYGVGSVLGSQLIAEIGDVSRFSNKKALVGFAGIDAPPFQSGNFNPQSRNISKRGSAALRKTLFQVMSVILQKAPANDPVFLFMDKKRSEGKHFYVYMMAGANKFLRIYYARVMEHLNSLQEAA

SEQ ID NO: 231890 - protein, 483 aa, unidentified
MNKTPEEKTKSEDKAVVKEESNENALNEKETKEKDLEDIETYLKEHPEMVVTAKDSIKHMRCGSVDVHKKILVAAICITDPTTLAACYIVQRFSTKNANIETMAEWFQKYEVKDVIMESTGKYWIPVYNILEGKGLSPILTHPKYVKQVRGKKTDIRDAIHMANLLRMGHYVASFIPPSDIRDVRELCRYRLKLTYVRTGEKNRYQNCMTVSQVRLDTVLKDPFGKTAQAIMKYLLSVDPDKASDEEIAKLINPRVKATTEEILDSIHGYCFPQVQRDKLQVISDHLNWLDKEIGILDTSLQEKGKSYAKQIRHLKSHPGIDDKSAIFIIGEIGVDMSVWSDVNALCSWAGVTPANNESANKKKSTRISDGGHYLKPLLVQCALAAIKNDYFRAKYENIRRRRGHKKAIIAIAHKMLIDIYHMLKNDEDYKPKDLETVTKKIESQRNTTESQLTAALEILKQQGISSELLNSINNQLRQKGSK

SEQ ID NO: 231891 - protein, 361 aa, unidentified
MTESSDYESVQVFIGVDVGKDTHHAVAINRSGKRLFDKALPNDENKLRSLISDLKQHGQILLVVDQPATIGALPVAVARSEGVLVGYLPGLAMRRIADLHAGEAKTDARDAAIIAEAARTLPHALRTLKLADEQIAELSMLCGFDDDLAAQTTQASNRIRGLLTQIHPALERVLGPRLEHPAVLDLLQRYPSPEKLASLGEKKLAAQLCKLAPRLGKRLAADIAQALAEQTVVVPGTNAAAVVLPRLALQLITLRKQRDEVALEVEQRVLAHPLYPVLTSMPGVGVRTAARLLTEVACRAFASAAHLAAYAGLAPVTRRSGSSIRGEHPSRRVIKLSNGRCSCRPSPRSGIRSPGLTTPAK

SEQ ID NO: 231892 - protein, 441 aa, unidentified
MAMRRRDEELVFPNAAGIDVGASSHWVAVPKHLADDPVREFGVMTGDLDSLADWLLGCGVDTVALESTGVYWIPIYEVLEQRGLKVWLVDARQMKYVPGRKSDVQDCQWLQRLMSLGLLRAAWRPANEVCVVRAIVRQREVLLVEQASWVQRMQKALVQMNIQLTEVMSDVMGMTGQAIIRDIIAGVRDPVLLARHHSRRIKASKDDVIKALTGNWREEHLFVLKQSLQVFDDLAQRVQECDAKIEALLAPLQRHEVKLGKATKAKGKNSPAFNVRQALANWAGVDLTRIDGLGVSIVMKLLAEIGPDLSRFANVKHFCSWLSLCPGTKISGGKVLSSGTKRSANRARQALKMAAMSLSRSNSALGAFYRRLCTRMDTPRANTAVAHKLARMVYFMLTRGEEYVDKGREHYEEQQRQRSVAALKRRAAAMGFKVTPMGAPA

SEQ ID NO: 231893 - protein, 341 aa, unidentified
MNATTYGMDIAKNVFQLHWVEPTSGEICRRKLSRSKVLEFFAKRLPARVVIEACGGAHHWARELSALGHQVELLPAHQVRKFVSGNKDDAADARAIWLAAQHPDIRRVPLKSIQQQAELSVHRVRSHWMQVRTATINCLRGLLYEFGVVLPKGRRAALRLLAEQRAQVEQQLPGAMLQLLDSQLLALGALDAQIASLEAQIEVVQRSNEVARRLRQVPGIGLLGATALAATLGDGSAWRSAREFACALGLTPRHTGTGGKVRMGGISKRGDAYIRTLLIHGARNLVRCAQPAPWIAQLLERRPFNVVATAVAHKLARAAWAMVAQGTAWQANHKTGVTAHA

SEQ ID NO: 231894 - protein, 311 aa, unidentified
MDAHYIGIDVSKDRLDVHAHPSGEAFAVARNGEGLAQLVVRLQAIAPALIAVEATGGFETVVAASLASAALPVVVVNPAQVRHYAQALGKRAKTDPIDAAVIARFVEATQPEVRVLPDEATQLLADLVARRRQIVEMMAAEGQRERRAAKRLQKSIARLRKALEKELAELDAEIDDQVRGSPVWAEKEDLLASVPGVGSIIARTLIAEMPELGTLDRRQIAALAGLAPWTRQSGQWKGKSFIGGGRKTVRSLLFVGAMVAARHNPALKRFRDKLVAAGKSKRLALVAVARKLLTILNAILRDRKPWRAEIA

SEQ ID NO: 231895 - protein, 355 aa, unidentified
MNSSKYIAMDVHKDSISIAVRNATGKIVMESLIETKASMILQFIDGLRGDLHVTFEEGTSAAWLYDLLKPHVTRVVVCDPRKNKSMREGNQSDKIDARRLAELLRLNHLTPVYHGEHGLRTLKELVRTYLTVTKDLARVMTRLKAIYRSWAIPCSGKQVYARCHRAEWLGKITEPGVRRRAEFYYLQLDALRVLRQDARRELLAESKKHKAWKRLCEIPAIGPIRAAVLLGILQTPHRFRNKRTLWNYGGLAIEMHSSADYRSVDGELQRSRKNVLVRGLNRNCNHDLKNLFKGAAAVASSKPGPFEEFYAALVAKGMKPEMARLTLARKIATIVLIVWKKGVCFDAQYLKPQTA

SEQ ID NO: 231896 - protein, 373 aa, unidentified
MSAKRILAKEIDANLDYEVIGLDLAKQNVSFVGITSDGEVIRIDRVDYSILLEKAAEMAPTTFGMEPCTEMNWLCNELKRYGHICKVFSGQAVQAQIQAFFFGQKNDLNDAEAIAYLARDSRLPTIRAKTIDEMTLQSICVARELHLKHARAVLVSLKGQAQAWGLKIAKALSSEAKLLEIIDQATYAPQEIRDLLAEQVKAYMLTKRKVNQLTKRIEEKIKTNTTCQRILKIPGCGPLIAANVAVTIGDVERFDGPKKLAAYYGLVPRNLTTGHVEKMGRITKRGDKRTRSLLVQGANVLLMLESKDKLPKCQLQKWIAKKRRELGYSKLVIALAAKLLRILWACLKYGKDFDIRRAGIARCNLPIEMRTGI

SEQ ID NO: 231897 - protein, 400 aa, unidentified
MNAVGIDVSKGKSTVAVIQPFGVVIAEPFDVFHTDSSLKELVRFIKSLSGETKVVMEYTGTYYEPVANALHNAGIFVSVVNPLLIDDYDTNRVRKVKTDKLDALKIASYALDKWIKLRKYEPAETVRKTLQIMNRQCIKLNKILVMQKNSFIALLDCCFPNANTLFTSPHRVSDGHEKWVDFVMKFPHVDSVAKLPLSVFRTKYQSWCKKEHYNYSESKAEQIHAYARTIVSTLPMTDAVRKMVSEAAKLLNSTLEALGTLHSEMDALASQLPEYETVMNLYGVGKVFCSQLIAEIGDVTRLKSNKSLTALAGIDPPPNQSGKDDPKSRRISKRGSPALRRTLFLIMTIYLQHQPADEPVYQFLDKKQAEGKPYKVYMIAAAHKFLRIYYARVKEVMPKE

SEQ ID NO: 231898 - protein, 349 aa, unidentified
MLADIVDAVIGVDTHRDVHHAEIAYPTGAVIATCSVSNSSAGYAQLLSWAGEHAPGPRLAACIEGTRSYGAGLTRAAAAAGLVVIECEQPTRKTRRGKGKSDPIDAHLAVLTALQLDAGKLPTPRADGDREALRILLCARQEMTVTATAQTNRLRALLRDGQDTDRDLACTHLSDAVLAQLARRRPPRDAGRDLAVRQGEIRRLALALRAASRALKANRAELDAIVGELAPGLTSRRGIGPVSAAQAIVSFSHPGRCRNEAAFAKLAGTSPIEASSGLVTRHRLNRAGDRALNRAIHVIAGTRMRCDPATIAYVTRRRAQGKTDREIRRCIKRYIARQLYRALNAALTA

SEQ ID NO: 231899 - protein, 246 aa, unidentified
MQIYGIDLAMEKFDVSFLDSKGNEKHLIVNNKLGAIARFLKRIPAGSLLCAEHTGVYGNLLVFLCNHLEIPISLTSGYSIKHSLGLLKGKSDKLDAKRIREYGERFRDKLELAEYESETLQELNELSVLRSQLVKERRMLETQQQSKKHNPYNSISAHKQAEKVIAVFNKSISEIEEEILKIIESDHSLKRTFELSTSVKGIGPITTCELIIKTGNFKRIDTARKAASYAGVCPFPDSTGKMVKKR

SEQ ID NO: 231900 - protein, 392 aa, unidentified
MRFVGIDIAAEKHVVAIVSEAGEVLTKPTAIAEDAGGYEKLFALLGEPEGTLIAMEATGHYWKNVFAALAGRGFQIALLNPVRTHRFAGEDLERTKTDAIDALGIARFAAQKRPVVTRLPDAVTEELRELVRHRDRLVQDFGDRTRQLHRLVDLGFPELTRFIHSLDSQLATAVLHEYPTAQAFVGLPWKKLAKYRYDGVHIVGDDLAKSIIEAAKVSVGRHHGLAYRIQVQHACEDMDLLRRRIKQLDGDIETKLGEHEVGSLLTTIDGVGTQTAAKLVAELGDPAQFHGPEALAAYVGVIPALRHSGKRSPMRAGLTPIGNARLRAALWMPTLTAVRRNPWLKAHYERLRARGKHPKVALVACMRKLLHAVYSVAKHRRPFVPELAGGTA

SEQ ID NO: 231901 - protein, 367 aa, unidentified
MFHRQSDSATTFVGLDVHKNSITSAVLAPGAEAAVIDRFFPDEPSIRRFVGQLGDPRALAVCYEAGPTGYALARLLDRMGVDCEVIAPSLIPMMAGARVKTDRRDARRLAELHRVGQLTPVRIPTEAEEAIRDLCRTRSDLVTDRTRARHRLIKFLLRHNVVFREGSHWTMRHEAWLAKVAFDDEALSRTYARYRSVLSGLDAELAAVEADLRCYFEEGPYAECVARLAAYRGVTELGALALGAEVGDWSRFPRASSFMGFCGLTPAEYSSGDRTKRGRITKTGNIHLRTALVESAWAYQHHPAAGAEIKKRQARASDETVARAWKAQIHLTSKFRRLSATKSSRNIVVTAVARELAGFLWAEMTAA

SEQ ID NO: 231902 - protein, 392 aa, unidentified
MIYIGIDVAKDKHDCFITNSDGEILFNPFTISNNREGFETLFQRIKSVAEDFSKIKVGLEATGHYSYNLLGFLLDKGLPTYVINPLHTNLYRKSLSLRKTKTDKVDSRTIATMMMSDVNLKSYSDTSYHNEELKSLTRYRFDKVKERAKLKSSVSRLVCILFPELERLVPTLHMASVYALLCGFPSADAVANAHLTRLSNLLSESSKGRYGKDTAVMFRDVARSSIGSHMPTKSLELKHTIKLIQELTVEIDEIESAIKRIMDEQIQSPILTIPGISYRMGAMIIAEIGDFSRFDSADKILAYVGMSPSTYQSGQLDNCYSHMEKRGSRYLRYALYNATKYVCHWDESFGAYLEKKRSEGKHYNVALSHATKKLVRLIFAMEKSGKAYLPTA

SEQ ID NO: 231903 - protein, 372 aa, unidentified
MNQHKAFVGLDVHREKIAVAIAVGRQAPQFQGVILNRAEAVRTWIGRLRAQYPQLEVAYEAGACGFVLQRQLTQLGVSCQVVAPSLVPVPAGRRVKTDRRDALLLARLLRSGDLTSVWVPDAEHEALRDLVRAREAAVADRLRANNRLRKLLLRQGVQPPPRVKPHTRAYQRWLAGVQLAYPTQQVVLEEYRAALAECQARIDRLEAVLRRAMATSRYAPTMAAFQCLRGVGPLTAVTLVAELGDLRRFKKARALMSYTGLVPSEYSSGDGHHRGPLTKAGNAHVRRVLVEAAWHARHVPRLGLGLKRRQADQPPVIRAMSWKAQQRLHARYEALVHRTHNPPKSVAAVARELIGFVWAIAQQVPQPTSAVA

SEQ ID NO: 231904 - protein, 373 aa, unidentified
MPRYSTAFGMDVHLRSTTVCALDAETGEAVARRFRGNPWGEVAEWMSGFPGPSLAAYESGYLGFAPQRELSALGVDCVVAAVSKVPRSAADLSSKNDRNDAARMAKAILSHDVTPVWVPSPEIEGLRDLAAAHDAATARLAAAKQRLLAFLARRGYVYGGTTPAGNPRKYWTYGFLRWLDKVRPADDGGIRALAALRNEVEAANEAREALLAEYRAAVAAGPLSAEVEALQSIKGCGFVLAAAFASEVGDFSRFRSGRQVTAYFGLAPKQRSSADSVRLGGISGAGDALVRRLAVEGSWRYAQAGHQPKLMPKGSGVPLEIRMHGRKGSERLLRRREEMLERGMPQAKANAATAAELVRWLWALGMMCREAGE

SEQ ID NO: 231905 - protein, 297 aa, unidentified
MKIASIGIDIGKTTFHLVALDEHGSIVIRRKFSRKALLVYTAKLASSLMGMEACGGAHCLARLLRDQGHQVRLIPGQFVKRYREANKNDYLDAEAIAEAVTRKKLRFVPIKTEDQLDVQGLHRVRERLVYNRTEVINQIRGFLLERGVTFNRGPLSLRKEMPDLLEDAEQNLTPQLRSLLAHLWQEWQSLNSQIERIGAAIEEVAESDAACQRLRKIPGVGPLVSTATVAAIGNGAAFKRGRDFAAWLGLVPKQHSTGGKAKLLGITKRGNRYLRKLFVHGARAVLLRVKYDTGGFG

SEQ ID NO: 231906 - protein, 341 aa, unidentified
MAFVPAFVGLDYHSETIRVCVMTQDADVLVNRNVRNCPAAVIDLVRSQNVFVQGVAIEACCGAADFAARLAEATEWDVRMAHPAYVQKLKQGRDKTDCGDAALLADLLRVNYLPEVWLADETTRQLRRLVRYRQGLVEERKAVKLRLRSLLREERVECETSRAWTKAWFAWLDTIRLGEQSRWVLDQDRRRLARLDEAIAEVDVRMETATADDPVVQKLRQQAGVGLVTALVLRAAVGRFDRFRNGKQLAKYCGLTPCNASSGKRQADAGLIDEGNPELRAVLIQLAKRLPRHVDRWRELHVRLRRTKPANVASAAIANRWVRQLHHLMVERRDPSDSQAA

SEQ ID NO: 231907 - protein, 432 aa, unidentified
MKFNQLNKQNQRISRISETTLVIGTDIAKHNHVARAFNYRGIELGKRCLFQNDESGLLNLLAWVESIKQEHGLTDVLLGVEPTGHYWFPLFHFLKQRGIEVVLVNPHHVKKSKELDDNSPTKNDIKDAKVVAKLVIDGRYTQPQLPEGVYADLRVLMNQRDRLCGDLNRVKGRIHNWLDRFFPEYRQVFKDWEGKASLITLQHFPLPQDVVAAGETTVVAIWKKNDVKRAVGSKRAELLYRKALKSIGLTEGAAAARHELAMYLEQYAMLCRQIEQLMELVAGLVEQIPGAAHMMSIPCIGLVTVAGFLAEVGDLSGYDHSQQIVRHAGLSLRENSSGLHKGETTISKRGRCRLRALLFRAALTMVARNPEFRALHMYFTTRRDNPLKKKQSMIAICNKLIRVMFELGRKQKNYDAGKVLGPHREAQLQAAA

SEQ ID NO: 231908 - protein, 322 aa, unidentified
MTRIICGVDIASSSLAARIGQDGAPASFPNNPEGIAALAAFCQQHQVELVAMEATGGYEQQAFAQLCEQGLAVAIVNPRAVRQFAHSMGALEKTDAIDAGMIAWYAETRNSQPLCLAPQTQLELRARVLRLRQLTDLRTTQLNQQRLVINRAVQATFRKMLRFLASQIEELQQAIAGLIQADPLWRQLDQAFRSIKGVADRTVARIMADLPEIGTLSNKTISKLAGLAPLANDSGKHKGKRAVRGGRASVREILYVVASVVGRYEPDFITFQQRLRTAGKPPKVVRIAVAHKLLIRLNAKAREVRQRMAPVLDHSRLAPVTT

SEQ ID NO: 231909 - protein, 347 aa, unidentified
MTLVADGLVVGVDTHKDVHVAVVLDRLGRRLAVRDFPATDAGNAELVRWLAGLGPVTDAGVEGTGSYGYRLARLLAEVGLQVWEINCPDRSRRRRKGKSDPVDAENAARTVLAGEATAVPKDRRGLVGELRLLVATRRSAVKARTQASNQIKAFLIDADDQLRARLHGLRKRRFGRACAALEPDDGLRRALAALGRRWLALDTEARDLEAQIAALLTAHAPQLLARHGVGAVTAAQLLITAGANPERLRGDAALAALCGASPVEASSGKTSRHRLNRGGDRAANNALWVIAHVRTISDPRTRAFVAKRTATGNSRKEIMRMLQRYVARELYPLIIDALSTAAVAGLT

SEQ ID NO: 231910 - protein, 357 aa, unidentified
MEYGAIDLHKKESQIRIVTESGEIIDQRIVTTRDRLTIVFWGRPRMRILIEASTESEWVAQHLEELGHEVVIADPNYSAMYGHRSRRIKTDRRDVAALTEACHQGTYRLTHRRSARQHEVQCRLNVRKEITQARTRAISVARAITRSAGLRIPSGKAETFATRLFGLELSPAMKATLSPLRNIIDVCDDELAAADEKFEAMVAGDPMVKRLTTLPGIGPITATAFVAALDTVSRFERVGQVTSYLGLVPHEYSSGEKQRRGRIVRSAHPHLQSLLVQAAWRLSRSKDPRTESFRTWAQAVARRRGKKVAMVALARRLARTLFAMWRDEADYQPRRIGTRSAQPVADATAKTGAGAPM

SEQ ID NO: 231911 - protein, 350 aa, unidentified
MIIIGVDYHPGFQQIAFVDTDTGEFEERRLEHREEAEKFYRDLGAQGVSVRVGMEASGHARWFERLLSELQFELWIGDAAEIRTKRVRKQKTDRQDAQLILRLMLEDRFPQIWVPNWENRDLRQLLWHRHRMVQARTRIMNQLQAVALNEGLRSKKRLWRDAGREQLESFPLAPWASRRRCDLLELLDRLNPTIAELSQAIEQEVEKYPEARRLMTHPGVGSLTALAFVLIIGRADRFQCGKQIASYLGLVPLEESSGQRRRLGHITKQGNSLLRFLLVEAAQVTVRSDQEWRSRYFHLAMRRGRKIAKVAMARRLAVRLYWMWRKGWDYERLTKFGSHAGQPGYRDGVR

SEQ ID NO: 231912 - protein, 350 aa, unidentified
MIIIGVDFHPEFQQIASVDTDTGEFQEKRLTHREEAEKFYRALAGAGQKVRVGMEASGHARWFERLLADLQFELWIGDAAEICTKRVRKQKTDRQDAQLILRLLLEDRFPKIWVPSCENRDLRHLLWHRHRMVQARTRIMNQLQAVALNEGLRCKKRLWRESGREQLESFRLAPWASRRRQDLLELLDRLNPMITELTQAIEQEVEKCPEAQRLRTHPGVGVLTALAFVLIIGRAERFQCGKQIASYLGLVPLEDSSGKRRRLGHITKQGSSMLRFLLVEAAQVTARSIPEWRSRYFHLMMRRGRKIAKVAMARRLAIRLYWMWRKGWNYEQVVKFGSHAGQLGTGDGVQ

SEQ ID NO: 231913 - protein, 411 aa, unidentified
MAAGQVWAGVDVGKEHHWVCVVDDSGKVVLSRRLVNDEQPIRELVAEIDELAERVLWAVDLTTVYAALLLTVLADAGKTVRYLAGRAVWQASATYRGGEAKTDAKDARVIADQSRMRGQDLPVLHPNDDLISELRMLTGHRADLVADRTRTINRLRQQLVAVCPALERAAQLSQDRGWVVLLARYQRPKAIRQSGVSRLTKVLTDAGVRNAASIAGAAVAAVKTQTVRLPGEEVAAGLVADLAREVIALDDRIKTTDADIEGRFRRHPLAEVITSMPGMGFRLGAELLAAVGDPALIGSADQLAAWAGLAPVSRDSRKRTGRLHTPKRYSRRLRRAMYMSALTAIRCDPDSKAYYQRKRDEGKRPIPATICLARRRTNVLYALIRDNRTWQPESPPNRAQSVKFVLLGPDP

SEQ ID NO: 231914 - protein, 348 aa, unidentified
MVYFVGLDVSVKETSVCVVDDAGKVILAQKVPTEPADIIAVLASLGASFGRIGIEAGPLSQWLVNALAAAELPVICVETRHMKALLKAQQINKTDRNDARGIAQMMRVGLFKPVHVKTLVAQEQRMLLTSRKLLQRKLLDLELDLRGTLRNFGLKVGVVGRSRYEVRIRELVESFPVLAAIAEPLLAVRRVMRQQLAVLHKMLLDTVRSDPVCRLLMTAPGVGAVVALTYRATVDQPQRFVHSRAVGAHVGLTPKRYQSGETDYDGRVSKCGDALLRTMLYEAAQVLLTHGSKWSWLKAWGVRVAQRRGMRRAIVAVARRLAVVLHRMWVDGSEFRWRKESAAVPSVA

SEQ ID NO: 231915 - protein, 318 aa, unidentified
MSPAAAVFVGIDVAKAELVMAIRPSGERWTATNDEAGIQQLLTRLREDAPALVVLEATGGYERAAVAALATARLPLVVANPRQVRDFARATGQLAKTDQIDADTLALFAERVRPEPRALPDASAEALDALLTRRRQILGMVGAERNRLEHAVPAVRRGIVQHIRWLERQLRDVDDDLDRTIQVSPVWRAKENLLRSVPGVGPVVSRTLIGDLPELGTMPRKQIAALVGVAPLARDSGTLRGKRLVWGGRAPVRAALYMAALVATRRNPVIREFYQRLLAAGKPKKVALTACMRKLLTILNAMLRANTVWRHTAHAPIA

SEQ ID NO: 231916 - protein, 344 aa, unidentified
MNIATIGIDLAKNVFQLHGVDGRGKVVLRRQIHRGQMRGLFVNLPPCLIGMEACASAHFWARTLESYGHTVRLIAPHFVKPYLKTHKTDATDAEAICEAVSRPNMRFVPVKSIEQQSALSLHRVRQGFVRARTAQACQIRSLLAEFGLVMPRGISNIKQVPKLLQVAGKELPAPFCRLIERLLAHLKELDRQARELEEQIVDWHQRSEPSRRLAKIPGIGPITASALVASISDVRSFKSGRELAAWLGMVPRQHSSGGKPTLLGISKRGDRYLRTLLVHGARSVIVQVLKRDDDKGSWLKRLLERRHVNVATVALAHKTVRTVWAMLAHDREYCPNYKSLPVAA

SEQ ID NO: 231917 - protein, 470 aa, unidentified
MKKNIKTQNSRKARNGLTHRNKLGYIDPTIAGIDIGANLIHVAIPNTKGSADVYEFGTTTPELHDIAQELTKAGVTTGVMEATGVYWIPLYEILEDLGFTPVLVDAKAVKNVPGRKSDVQDAQWIQTLYSNGLLRAAFRPPRDRLALRAFMRQRLSTIKTRQRALLHMEKALQLMNIKLSGALSDIGGISGMDIIRAIVRGERDPVKLATLRNKGCKKPKEAFIAALTGNFQKEHIFSLKQALDLYGYTGKQLDECDQLIKEELEILPTITNQELPKREKDRKANGKYKKAQKPRKNAFSFNVRELLWMKSGIDATCLDGIEESSALLLFTELGGTDVSSWDRDKEFASWLKLCPGNNISGGRRRKSKRQPCANYMSQCFRMAALSAKKSDSALGAKIRCISGRTDKPKGIKAGAHQIARSYYNMCKYGWKYHRGGAADYEKAYNERRLKSLKRSARSLGYELTPQKKVA

SEQ ID NO: 231918 - protein, 327 aa, unidentified
MTVFIGIDVSKKKLDAAWLRDPATGKIKTKVMLNTPDGHNALMTWLSRQTGQPLSACHIIMEATGIYHEALAYTLHDAGAGVSVVNPAQVRAFGKGLGVRGKTDAKDCVVLARYGATQRPAFWQPEPVAVRALKARIARLEALDDDIQREANRREKSEITGNAEILASIDTVLAALRAERERLARDIDDHIDGHPELKQDRDLLESIPGVGPKVSVRLMATLRSRLFDSARQAAAFVGLVPVPHESGSSVRGRPRLSKAGPPALRRRLYMAAVVSLRYNPDIAAQYQRLTACGQPKMSALGAAMRKLVHIAFGVLKHQQPYQPQIAR

SEQ ID NO: 231919 - protein, 356 aa, unidentified
MNKVTANFENQIVHVGLDVHKRGWNAAIFLGGFYVRNLHQPPSPEALHHFLVTHYPGARYQCAYESGKFGFWIHRHFSQLGIHCLVVNPADIPSSHKDEVYKTDSRDARGIGQALSSGLLKSIFVPDPHQEADRQLVRQRKKLWSDLVRCKNRIKAFLDYLGIDVPPRFDNSNWSLNFLVWLHQLEFEHASNRVTLNYMLDELELLRKQMLSICNTIRKLMRSKKYNKLYYLLRTVPGIGPLTAASLITEIGDINRFTDFYHLNSFIGFLPMEHSSGEKEIRTRITVRKHRQLRSDLVECAWTAKRSDPALALYYSEQLKKGKNGKAAIVKVARKLVARIRYVWRTQQPYQCAVVK

SEQ ID NO: 231920 - protein, 422 aa, unidentified
MLHDSEDTEEIIERVAALDIGKAELVACIRVPSPDSPGRRAQEITTYSTMTRSLLGLADRLRELDVTRVVMEATSDYWKPVFYILEAQGLDPWLVNARDVKHLPGRPKTDKLDAVWLAKVAERQMLRPSFVPPAQIRLLRDLTRYRVDLVATRTAEKQRVEKLLEDAQIKLSVVASDIFGVSGREMMAALIGGQRDPKALAQLARSRMRAKIPLLEEAFVGHFTDHHAFLLRTMLARIDQASADIAAVETRIEELITPFAGAVEQLDEITGVGVTAAHVMIAEIGIDMTRFATTAHLCSWARFAPGVKESAGKKKGRGTTGHGNPYLARVLGEAAVAAGKTDTFLGERYRRIARRRGKKKAIVAVGRSILVIVWHLLSDPEARYHDLGPDFYDNRIGPERQRRNHVRQLEALGYRVTLEPAA

SEQ ID NO: 231921 - protein, 407 aa, unidentified
MRLFVGDDWAQDHHDVELMDAAGKVLARGRLPEGVAGMARLHELIGLQLGEDAEDAEVVIGIETDRGPWVAALVAAGYTVYAVNPLQASRYRERHGVSGAKSDRGDAHMLADMVRTDSHQLRVVAGDSPDAGAVKVVARTHKTLIWERTRQVQRLRYQLREYFPAAVEAFADLDAPDALELLGKAPDPARAARLTRAQVSAALKRARRRDIPAKATAILAALRSAQLGQPPAVTAAYAVTVRSLIAVITVLNEQVKTLQGQVEADFGRHPDAEIYLSQPGLGSVLGARVLGEFGDDPHRYASGKARKNYAATSPITRASGKKKVVAARFIRNQRLTDALMAQAFTALSTSPGARALYDAERARGTEHNPALRKVANRLVGILHGCLKTRTLYNEATAWPHNENRLAA

SEQ ID NO: 231922 - protein, 370 aa, unidentified
MRIIGCDLHARQQTLATLDTITGEVVNLTLMHEGEKVREFYSQLPRPVLVGIEATGSMHWFLDLMEELGIECRVGHPAQIRAAEPRKQKHDRRDAELILKLLAENRFPAIWLPSKELLDLRALLFHRHQWVRMRTRIQNALQAIALANGLRRGSSLWNHDGQAKIAFLPLTPHTAYRRNALQTMYKTMESEIENLTKQVTEQAGNRPGARRLMTHPGVGPVTALATEVFLGDPQRFADSKALASYVGIIPREYSSGAHQRLGGVTKQGSPLLRFLWGEAGAHAARRDPELKRFYCRKLVQKGLGKARVAVARKLGIRLWIMLRDEIDYQEFCRRGQMQQKTVRPVVGMPETGNGAKSHRQSDEATHLPES

SEQ ID NO: 231923 - protein, 400 aa, unidentified
MLSIGIDVSKGKSTVCGMKPGGEIVYTPFEIQHTREGMSELVSLLRGSGEEVRAVLESTGSYHCPVVAALLENGIFVSVINSLRMKRFCSQSIRKVKTDRIDAMQIALYGLAYWQELQPTKLPEDTYRELQLLARQYYQMTSMLIKAKVDFNALCDQVLPGMQELMNDHAGRHKLSDFVLRYHHTTHILEMGETRFRKDYCKWAEKKGYRNCERMAVLIFATAQNGIPVLPNAPSTQIVITEAIRVLHTVEASRDAILTQMQALAKTLLEYSLVREMPCIGDTLAPRLIAEIGDVRRFHSKRALIAYAGIDAPPYQSGKFCANNRHISKRGNRYLRKTGYEVMQSYVMHKPANDPIFTFIEKKRGEGKSGKLAMVAGLNKFLRVYYGKVTELYRSLPTIE

SEQ ID NO: 231924 - protein, 315 aa, unidentified
MSAGVFVGIDVSKAHLDIAVRPHGEPWRERRDERGIAALTARLRALQPELVVLEATGGLEIELVASLLAAEVPTCVVNPRNVRQFAQAGGHLAKTDRLDAAVLAHFAEAMKPTPRPLPDAQTRALEALLTRRRQLVEMVTAEKNRLAAAYENVRPSLQTHLDWLQHDLAQLDNTLHDEIRRSPAWREKDDLLQSVPGVGSVTAYTLIAALPELGQLTHKQISALVGVAPLNQDSGQQRGPRVIWGGRAEVRATLYMAALCGTRYNPVIKAFYQRLLAAGKRKKVALTACMHKLLIILNALLRSGQPWRNMATEPG

SEQ ID NO: 231925 - protein, 342 aa, unidentified
MDHFAGLDVSVKETSVCIVDETGKIVREVKVASEPEALLSVLKNPAYRFKRIGLEAGPLSQWLLSALAEAELPVVCVETRHMQAVLKAQINKTDRNDARGIAQMMRVGLYRPVHVKTLRSQKLRMLLTHRKLLQSKAIAIENDLRGTLRNFGLKVGIVGTAKFEARIKELIENLPDLAVLIEPLLVVRRALREQFVILHRRLLALVRDDEVCWRLMTTPGVGPVVALTYRATVDVPARFRKSKAVGAVFGLTCSKYQSGEIERSGRISRCGDEMMRVMLYEAAQSMLRSKKWSWLKAWAMQIARRRGMKKAIVALARRLAVILHRIWVDGTKFRWTRETAVA

SEQ ID NO: 231926 - protein, 345 aa, unidentified
MPIVGGLDIHRKQLTFDYLETVTGEVRRGQIAPADRVHLRGWLARFAGRDDVAFAVEGCTGWRYVAEELAAAGIAAHVGEPADTAAARGRKRHAKTDKTDSRHLRTLLAEGRLPECWVPPAQILECRALLETYHDLRAEHTAWVQRIHAVFFHQGAPALGEGALRTGQGLAALREAAAAHLSPGGQLQVATALDMLAAIEARMEVLRTQLRDAARHLTGAKVLAARLYGVGPVTSLALTCWLAGEGRFSSSRKAVRFTGLDITVWSSDRKGPPGRLSRQGPPVLRWAVYEAGKTHARASAPDHAYYATVKDRKNSKRAALSEARKIVRQACHILTELGDDALTAA

SEQ ID NO: 231927 - protein, 418 aa, unidentified
MAMKIVRFNCCGMDVHKDLVVATIGITDRQSNITEYFQQSFSTLNSDLYRLKDWLNSYHCCDVCMESTGKYWIPIFNILEGEINVHLTHPKYVKAIKGKKTDKKDSKWICDLFKHDLIKFSFIPPKEIRELREIARYRYKLVCMRSSERNRYQNCMTVSNIGLASVVSDPFGKTASNIMKEVMKPNVIDDDKILKLIHKNCKNKDKILDSLHGYHIESDQRFKMEKSLNHMEYLDQLINSCEAELVKRAYPLRESFQHITQIKGISSLSAILIISEIGIDMSQFESDKQLVSWAGLSPANNESAGKKKSVRISKAGQYLKPLLVQCALSTIKDKTSYFGRKYSNIKKRRGHKKAIIAIARMMLVSIYHMILTGEVFQPTDYESFMNPRSDTKQSLTVEEALNFLKQSGIDISSIQINL

SEQ ID NO: 231928 - protein, 343 aa, unidentified
MKLHVIGIDLGKTVFHLVGLDSTGRAVIRKRCSRRQLLAFTANLEVQLIGMEACSGAHFLGRALRGQGHEVRLMPAQYVKPYVQSNKSDYLDAEAIAEAVQRPRMRFVSIKTEEQLDLQALHRVRERWVMRRTAVVNQIRSLLLERGLTLPKGRGHLDEQLPRILEDAELNLSGSFRVLLAQLQLELKQLAARIEEMDRVIQKMAKENEACQRLTEIPGVGPVTATALISAVGNGSTFQKGRNLAAWMGIVPGEYSTGGKQKLLGISKRGNKYLRRLFVQGARSVLQQRHKQAPGLSSWLAQLLGRTHQNVVVVALANKLVRMAWAVLCKNQRYRTPVLAVSV

SEQ ID NO: 231929 - protein, 359 aa, unidentified
MDGSPQPPGALEPVKKQGAPSTGSTWNPNSRLGRKPSPHSQGRVMEQSPSSPSFVGIDVSKDRLDVHVRPSGQTFAVARDAKGLEQVTNELRGLTPALIVLEATGGFEITVAAALAGASLPLAVVNPRQIRDFARATGRLAKTDALDAQIIALFAERIRPEPRPIADADSQALAELIARRRQVVEMIGMETNRSRQARNPRVQRTIKATLKILEAQLAELDREINDTVRGSPIWRAADDLLTSVPGVGDVTSRTLIADLPELGQLDRRRIAALVGVAPVNRDSGQMRGRRTIAGGRTDVRSALYMATLSATRWNPIISQHYKSLVERGRPKKVALVACMRRLLGILNAILRTKTPWQIA

SEQ ID NO: 231930 - protein, 358 aa, unidentified
MQRNKISFKGQKIFIGIDVHKKNWDVAIAPEVGNVKRHTQKASAKELFDFLKKHYSDGDYLAVYESGFSGFSTYYALKDVGIECKVIHAADVPTTQYEEVMKTDGVDSVKLVRSLKAGLLKGIYIREKENIDDRSVVRIRKTIQKQLSGYKARVKHMLHCNGVSFPERFEKPGSHWSKAFLKWLKEDVTLLSSTRNSLDLLIRQVETIRLTLLEATKMMRSLSQTERYKHKCDLLMTVPGIGFIVSMCILTEIYDVKRFHNEKEFAAYLGLIPTSHSSGDKVVHGEMTFRGNKQLGPMIIETAWISICKDAGLGSLYLRYKERMKPQEAIVRIARKLSNIIFAVLKNETQYVSYNMCK

SEQ ID NO: 231931 - protein, 343 aa, unidentified
MEQYVGLDVSVKETHYCVVDGTGAVVARGREATHPELLAGALRVHAPAARVVVLETGGQSSWLQAALEGLGLPAAIVDARRARLALSCRLNKTDANDAEGLAELARMGWYRRVMAKRRETRLSRALLLARQQLVRQRRDLENQVRALLRGFGLAVGMVSKARFEERVWRLIDREPALEDAVGPLLQVRRSLCLQIRQIEQRIGAAVKQSAVCRRLMTVPGVGPMTALAFTTAIDDPARFARSASVGAYLGLTPRRHQSGNVDWSGRISKHGDALARHMLYEAANSLLCRTRAWSAPKAWAARLTRRVGAKKARVALARKLAVILHRIWCDGTEFRWRGKEQAA

SEQ ID NO: 231932 - protein, 426 aa, unidentified
MASPMEDVTMMDAILPCVAGFDVHSKTVAVCLRRVDDHGKVFKEIRTFGTMTRDLLTLSDWLTAEGATHVAMESTGVFWKPIYNILEDQFEILLVNARHIKNVPGRKTDVKDCEWIAQLLQCGLLRGSFIPPKPQRELRDLTRMRTQLTNEMASVANRIHKVLEDTNVKLGLVATDVLGASGRKMLLALIEGETDTVKMADMACGRLREKIPLLQQALQGKVTEHHKFLLKALMDHLTYLESQIDRFSQRIEEASRPFEKAITALIPIPGYERRSAENVIAEIGPDMTQFRTDAHLCSWAKICPGNNESAGKRKSGTTGKANRWLRSTLVQVAWAASHKKNSYFQAQYRRLAGRRGKKRAIVAVAHSILTDTYYILKLGTSYKDLGADHFDRLQRDRIRRYHVRRLGDLGYKVSIVDERGQENKAA

SEQ ID NO: 231933 - protein, 388 aa, unidentified
MIRVDDLSRSLIAFEQISTLVIVVELSQSSWLAAGVVPGIERRPLKKLDPDPTALLHVVEGWRDRATKAGRAITRTVLAFESGRDGFWLARWLRVRGVETFVMHSTSVAVSREPRRAKTDRLDTEMLIRVFLGWLRGEPRHCKMVAIPTLEEEDARRPSREREILVGERTRIINRMKAALVRLGIRGFKPGLLTAPQKLDALRTPEETPIPPNMLDEMRRDMARLAWVREQINAIEQARLERLERAPATGRHAMVRMLARVIGVGVETADMLVQEVLSRNLRDRRAVARYAGLTGSPDESGSKRREQGLSKAGNARVRRGLIQLAWRFLRFQKDSALAQWYRGRTEDAAGKRKRTMIVALARKLLVALWRLVTIGEIPVGVALRTAVA

SEQ ID NO: 231934 - protein, 389 aa, unidentified
MDEAGKVLVKRRLPEGAAGMTQLHALIGRFLPEDADDAEVVIGIETDRGPWVTALVAAGYVVFPVNPLQASRYRERHGVSGAKSDGGDAHMLADMVRTDSHQLRPAAGDSPEGQGIKVVARAHKTMIWDRTRATQRLRSQLREYFPAALAAFEDLDAPDVLELLGKAPDPDRARRLTRAQVAAALKRARRRDIAGKTDAILAALRGEHLGQPAALTAAYAATARSLIAVITTLNAQVKILEDQVRDHFGRHPDAEIYLSQPGIGAILGARVLGEFGDDPCRYVSAKARKNYGGTSPITRASGKKKVVAARFIHNDRLIDALMSWAFASLNASPGARAFYDEQRAKGLDHNDALRRLANRLVGILHGCLKTRTPYDEATAWSHRESSLAA

SEQ ID NO: 231935 - protein, 365 aa, unidentified
MIGNEEYRNESSGTVAEVVLGVDTHLDVHLAVVLDHLGRRLGTFSVPTTKNGYESLLARAESFGPVRCAGVEETSSYGAGLARHLRAMAIPVMEVERPKRRHLRRKGKSDPIDAEAAARAVLAGEAAGVAKSGDGRVEMIRTLRSARHSAVKARSQAANQLQGFVVTAPEELRHRLRELTTKKLVTVAARMRPGKDLDDVEAATKFALRSVARRYEALSREIAELDVQLDRLVAEAAPELISLPAIGTDHAATLLLTVGDNPERLGSEASFASLCGVSPVEASSGKVVRHRLNRGGNRDANRALHLICVVRMRIDERTRRYVARRTAEGKSRREIMRCLKRYIAREVYRVLVSATSPTQIGVSTT

SEQ ID NO: 231936 - protein, 339 aa, unidentified
MSRFIGVDLHKNMFVVSFYEEQSGKHKLWKYRLTEIGSFKRRLKKTDILGVESTGNTRYFVDQIRDCVEQVRVINPSQFKVISHSVKKTDDNDAKVIAEFLSKDMVPEVRMKDAKTAQVSSLANTRDKLVKLRTALKNKIHNILSAHGIILKKEVLASKKALKEILDQPVNSVALVELKVIVEQIESLNEGISKLDKELEEQGKKLDGHENITSIKGIGDKSGSILLSVIGDIDDFENEKKLAAYFGIVPRVSNSNEKEHQGRITKRGSKLGRTTLVQCTLVAIRYSPYLNGFYQRIKARKGSGKAIIATAKKLLGIIYLTLKNKWVFEDFPNFVLKAG

SEQ ID NO: 231937 - protein, 337 aa, unidentified
MSVYVGIDVHRKRSQVAVVTGDGTVELNKNVVNGSEPMLRLIGNLPPGTPVAFEAAFGWGWLAALLEDYGFEPHLVHPLRCKAIASARLKNDKVDAATLAQLLRADLLPEAWIAPPAVRQLRALLRHRAGLVRLGTQQRNRIHAVVADFGFDRSGSYLSGPGRGWLAGLDLPPVSREVVADCLAVIDGLAPVIDRIDGELRQHAKADPRVKTLTTLPGVGQFTALVMLAEIGDISRFGSARKLASWAGLTPTVRGSDLTVRHGHISKQGSAWLRWVLNQAAQTARRSPDFAATYSAIAGRRGKKIATIAISRKLLTRAWHLLADMQATSTNEPPQRP

SEQ ID NO: 231938 - protein, 343 aa, unidentified
MEASMYGIDIAKSVFQVHGANASGRMVVQKRLKRGQVVDFFRALPRSIVAMEACGSAHHWGRELTKLGHEVRLIPPAYVKPYVARNKTDARDAAAICEAGSRPHMRRVPVKTIEAQADRALQRTHDLLVRQRTAAANALRGHLGEMGIVAPAGLSGLRRLIEAIETQDEAIPARLLVPLQALARQHRTLEEEVDALKAVIVARVREEADMKRLARIPMIGPMTAHAMVAAVGDGRQFNSARDFAAWLGLTPKQASSGERLASGKISKQGDEPLRRLFVLGAANALRRPDRASPWMKRLLARRPPKVAMIAQAAKTARIAWAVLVSNEEYRTNIAPAASVPPRA

SEQ ID NO: 231939 - protein, 340 aa, unidentified
MKKTVIVGIDFSKRTMDVSYFIMGSMQDYWYKQFANTEQGCQEMISWIKQSHALASEWLICGEYTGIYSMTAAMVFNDNDLDLWLENPNQIKLSSGISREKNDKVDSYQIALYAARFIDRVKLYKPQSKVLLQIRELVRFKDRLTKVKTQLSVAASELKHVRKDWQETEYICESSKVLINQINAQIADTEKQMMHLLQTDPELKQMYQLINSVVGVGMQTAIYLLIHTWGFKAFENPRQLACYCGIVPFAKRSGTSLRGKPHVSHMANKKLKTLLHMCALNAVKYDPYLKLYYQRKIEEGKHKMNVLNNVRNKLLQRICAVITSGQEYDKNYYMLNLAAA

SEQ ID NO: 231940 - protein, 397 aa, unidentified
MIAVGIDISKAKSTVAVIDSDGTVLASPFTMAHTQPEMEAFVTYLKGLGEPTTILMEYTGHYHYPVLKKLQDEGFPVCIVNPYQMKKYGDVEIHKAKTDKKDALRIAAYALEKSYKLVPYSSMEQKYEDLKFLSRQYSQRITYVTKLKVQLIALLDQTMPGITRILPLNSRNPEKCALLLFIKRFKSFDEIQRIGKARFLASYDVLAKKASERSASSKGLSIYELAVDSITTRGEDPYIWLSQNQCVDLLSATQNAADEIISQMRNIAETIPEYKVLRAMRGVGDRLGPIILAEIGDIRRFHSGKALNSYAGNDAPPYQSGQFESRNRHISKRGSSALRKACYEVMQALKLTKPQDDPVYLFMLKKEQEGKPFNVAKMAGVNKFLRIYYARAMELYK

SEQ ID NO: 231941 - protein, 343 aa, unidentified
MAQQTIIGIDLAKHVFQVCMVTPQGTIKTNTTVARGKLLALIARQPPALIFMEACGGAHDWARRFCALGHEVRLLAPQYVTPFRRGQKNDPNDALALTEAGQRPNIPTVPMKTIEQQDLQALHRVRERLVKHRTAVVNQVRGLLLEYGIVIPQGIARLRKRLPRVLEEADNGLSFLMRDLLQSLQSELSALDMRITDVTGQLTRLSHELEACQRLQAMEGIGPLSATALVAALGNGHDFQTGRQVAAWLGLVPRQHSSGGTTRLGGITKGGNSYVRRLLIHGARSVISHVRDKPDAKSAWMRQLVTRIGVNKACVAVANKMARVAWALLHTGESYRTSEVLAA

SEQ ID NO: 231942 - protein, 444 aa, unidentified
MRTSKARTGLRARLACHRRWSVYGNVCRHTPKVGEAMGRAAEVVAPSSSIRIDGGCPVAQVNDLSRSLTAFDLISTLVVVVEMSKASWLVSGAVPGVERQPLKKLEPDATALLRLIERWRNEALRAGRPISRIALAYEAGRDGFWLARWLIARGIEAHVIHSASVAVSRERKRAKTDRLDAAMLMRVFLGWLRGERGHCGMVAIPTMEEEDARRPSRERESLINERSRITNRMKSALARLGVRGFKPHLRKAPERLAGLRTAEGTGLPANIIEEFRRDMARLALVREQINSIEKTRAERLKRAPDTGPHAMVRLLARVIGIGIETADMLVREILSRKLRDRRAVARYAGLTGSPDESGLKRREKGLPKAGNARVRRGLIQLAWRFLTFQKDSALARWYRARTEGPSGARKTTMIVALARKLLIALWRLVTTGEVPDGVELRPAG

SEQ ID NO: 231943 - protein, 400 aa, unidentified
MLSIGIDVSKGKSTVCGMKPGGEIVYTPFEIQHTREGMSELVSLLHNSGEEVRAVLESTGSYHCPVVAALLENGIFVSVVNSLRMKRFCSQSIRKVKTDRIDAMQIALYGLAYWQELQPTKLPEDTYRELQLLARQYYQMTSMLIKAKVDFNALCDQVLPGMQELMSDHAGRHKLSDFVLRYRHTTHILEMGETRFRKDYCKWAEKKGYRNCERMAALIFATAQNGIPVLPNAPSTQIVITEAIRVLHTVEASRDAILTQMQALAKTLPEYSLVREMPCIGDTLAPRLIAEIGDVRRFHSKRALIAYAGIDAPPYQSGKFCANNRHISKRGNRYLRKTGYEVMQSYVMHKPANDPIFTFIEKKRGEGKSGKLAMVAGLNKFLRVYYGKVTELYRSLPAIE

SEQ ID NO: 231944 - protein, 362 aa, unidentified
MRIIGCDLHTRQQTVAMLDTTTGAVERQTLRHDGSNTREFYSALPRPVLVGIEATGSMHWFLNLMEELGIECQVGHPGKIRAAEPRKQKHDRRDAELILTLLVENRFPSIWLPSKELLDLRALLLHRHQWVRMRTRIQNALQAIALANGLRRGPSLWSQTGQDMIASLPLAPHTAHRRSELQAMYGKFQAEVEKLNQRVEEQACKRPGARLLMTHPGVGPITALATDVFLGDPTRFADGKALASYVGIIPREYSSGGRQRLGGLSKQGNPLLRFLWGEAAAHAVRRDPELQRFYRRKLLQKGVGKARVAVARKLGIRLWIMLRDEIDYKEFCRRGQMQQRSGDACAGMPEARNGADSHRPID

SEQ ID NO: 231945 - protein, 369 aa, unidentified
MEKDTTYVALDDSKRKIVVGILRSGDTQPELREIANDPRQIRRLFERLKREGPVAACYEAGVSGYDLHRQLIALGVAGAVIAPALTPRRPGQRIKTDRRDAAKLVRLFRAGELTAIHVLDESEEAVRDLVRCRDDIRRDVLRWRHRVLKLLARHGRACLTGKNWSRAHWQWIREQRFDLPPLQRAFEATLFALEQALARQAELDKGLEVVAATAPYREPVGWLRCFRGIDTLSAIILLAEVVDFQRFRRPRELMAYLGLVPSEYSSGESQRRGALTKAGNSHARRILVEAAWHYRHRPTIGRALASRTHGQPDEVVAQAWRAQQRLHRRYRHLVGHGKRTPVAVAAVARELVGFIWAAMTRHESRRAAA

SEQ ID NO: 231946 - protein, 325 aa, unidentified
MQTERKCYMGIDVSKLWFDLSLMIVTNNQKQAMIMHRFNNTTEGMALMGKWLKTHQVPMNEDSLLVIENTGVYHRLIWAYCSVNSLPIHIGNAARIKWSLGITRGKSDVTDSQRLCSYCYKHSEELKATPVLDPVFIKLKDLTTARSRLLTQMNATSSYLKELKLSNSKEVQKLMEQAHKAALEGLRKSIAQIQEQILAVIKETKGIKDNYDLLLSVPGIGHVTAVYILCCTSNFAGKISGKQLASYAGVVPFGSSSGTSIKGRNKVHKMANKDLKKLLHMGAVSAIKNYPELKDYYERKKMEGKHSMCILNAVRNKIENSINNS

SEQ ID NO: 231947 - protein, 385 aa, unidentified
MQANTTKSPAAIRVDLAAIFVSLELSRSKWLVTSLSPGGGERMSRHLVSGGDIPGLLDHFAELQRKAEVRTGQSFRIISIQEAGLDGFWIHRVLEREGIESYVVDPASIATSRRRRRAKTDRIDGEALVRALLAYNRGEPRVCAMLRVPTPEEEDRRRLVRERKALTNERIRHVNRIKGLLFSQGVSGYEPLKGDRRKCLDALITGDGRPLPPALMAQISRELDRIELLIQQIKDVEEARDALLVAADEPTPALLLSLKGIGPEFAAVLWSEGLSRKFDNRRQVAAYAGLVPTPWQSGQINCEQGVSKSGNPRLRSTLVQVAWLWVRHQPNSALSQWFRARVIQNGGRYKKTAIIALARKLFVALWKYVNAGVVIEGALLTKPSA

SEQ ID NO: 231948 - protein, 356 aa, unidentified
MDLHRKILINQSVANNPEAVFRVVTPFGNNISAALEASTGAADFAEKLITNYQWHVELAHAGYVARMKQTPDKSDWTDAKLLADLTHAGYIPRVWLAPQYIRELRDLVRHRHGLVQQRTQVKLRLRAALRQHRIVCPYSPWTIKGKKWLLDKDNISSETLFYLVQDHYDTIEYLDKKIAAVTERMQLAVDDDPVVKQLLRQTGVGVITAITLRALVGHFDRFRTGKQLAHFCAVCPRNDSSAGKTTTGGLIKAGDNVLRQVLIEAAHRLIRYDVHWKAMADRLRANGKKACVIVAAVANRWIRKLFRSMCEPTTTGEADVRFLRHGQKSLSVESSSDVRPFTEQTPEAGFLDSVIP

SEQ ID NO: 231949 - protein, 411 aa, unidentified
MLEPEIRCVVGIDVAKRGHVVCALDVPGGTVRQKALKIDATAAGYAGLRAALARWGEPSQVLVGVEATGSLWEPLYDAVTRAGYRAVVLNPRQTAAWAAGLGPERRSRGAAKTDGLDAQTLARGLLAGYARASVLPSETLQARRELTRARRDLVQSQTAARQRLQDELVVVFPELPGHTPDRCDLATPAVLHLLCAYGSAQALAAAPSGDVAALLAQHSGGRWGDAQAQALQTLASGSAASTRAVAARAVVVRTFARHLLDLQARIADLQEAIAAVLREDDDGQRLRRVPGIGPIHAATIRAELGDGSRFAGVDQVVAYAGLEPRVRQSGAFVGQHKVSKRGPGALRHALYLATVVAGRHRPAWRTRSQRLLDRGRAKKEALTMLSRALLKVRSHLLRTGATYDPARLAHV

SEQ ID NO: 231950 - protein, 432 aa, unidentified
MRRSETALKGEVYMSYCPVAGIDVSKRFSDMCILSPDNKIFAQEKIYHDETSINRANALLQKAERLFFRKPVIVMESTSHYHLILFQFFSEHGYDVIVVNPLQSNSMKDFSIRKRKTDRVDAFKLAMMYRTKTLRPSQIPQTATRALRQLCRHRAELLNDVSSYKNRLTALLDQTFPGYDKVFSDVGGVTSCAVLVRFPTPTILLMEEESELVEVIAAASKSGYSFAKKKAGLLISAAQKAQTLGIHSCADETLIVCTIQMLRTLSESVLQIEAAIDNLLAQIKEIRNNVSLLQSIPGIGSHSAALLLGEIGDISLFKKPKQLAAYFGLDPTERQSGSFRGTKNKLSKRGSPYARAALHMGVVNSICKRGKDSAANPVLLSYYEKKCKNKPAKVAQAASMHKLVFIIFAVLRDRKPFELKMPEQHCNTRRYL

SEQ ID NO: 231951 - protein, 457 aa, unidentified
MKAIRMDLKTKEHGNYNLLRLISVGYKNILTGGVITMHTKNYNRQVEKRQRIGNATLVIGMDIGCEFNAMCVMNKEGTVLGRYPKIYNSWKGFDYFHTVIESIKKKYGFNDVLIGMEPTGNYWRKIAFFAIDKGYEVRFIRTTALKHQRELDESSSSKNDMRDAYTIANIVREGKYIDTVIEDGIFRQLRTLAHTRERIQRSNAGSKHALKGVLEDYFPELKNIFWSMKAKGLWALLERCPFPEDVLNITPDILTDIIAKSTRRKMKAREKALKIYEAAQQSVGLKHIGQADRHRVATYLSEIRHSEEQLNEIEVKIKGLLEKIPFAGYILSIPGIGVLTCGVFLGELGNPDNFKDPKQIIKYAGYDPQEHDSGQRTGRKIISKKGRWLLRKYLYFMAIRAVHRSPFFKEYYENKQKTMKKKEALCAVVIKLIKVIFALLRDKRMFTEKQSRLAQAA

SEQ ID NO: 231952 - protein, 391 aa, unidentified
MIFVGIDVAKDKHDCFILNSEGTVLADVFTIANNRIGFETLLSRIQSCSQGESKIKVGLEATGHYSYNLLGFLLDSGLATYVINPLHTNLYRKSLSLRRTKTDRIDARTIAMMLMSDVDLKSYSDTAYHNEELKSLTRYRFDKVKERAKLKSSVARLVNILFPELEKLVSSLHIAVVYALLSNYPGASYIANANTEELAETLCTASKGRYTKSKTAEIQVAAGVSIGSKMPAKSMELKHTIALIRELDKEISEVESAIDKITSQMDSPIFTIPGIGRHMGAMILAEVGDFSNFASADKLLAYAGLSPSTYQSGQLQNCYAHMEKRGSRYLRYALFNAAKYVCLWCPTFSAYLEKKRSEGKHYNVAISHATKKLVRLIFAMQRSGKAFLADY

SEQ ID NO: 231953 - protein, 422 aa, unidentified
MRSVALDVHLDFCEVAIVEDGELRSAGRIETKPCQIELFASSLGPDDRVALEVTGNAWEIARLIEPHVAQVLVVSPSDTGIRQARAKTDRLDARTLARLLAAGSLDGVWMPDRWTWVMRRRLSRRGQLVRARSRSKNQIHAVLMRQLVGRPPVSDLFGVGGREWLKGLELAEEERETVDAHIRQIEFLEKELAEVERLIAGAALESAEIKRLMGVPGVNVIVAASFLAAIGDISRFESPRKLVGYLGLDPLVRQSGVGPATHGHISKQGSVRARHALVEACWTTVRQPGPLHAFYERIRARRGHSVAIVAAARKLASLFWCLLTREEDYAYQQPSLTKKKLRRLEITAGAERYTPKAAGIWSANDAVRKAERELARQAEVAYARTVRDWHATQVEKVGASVTPGRASKKPLKGEAARQTTSP

SEQ ID NO: 231954 - protein, 333 aa, unidentified
MYAAIDIHKHAFQVAVLDPESGELVEERFAADRESLARWAEQWRGRVEAVAIEATTGWRWVWRELVERGFEVRLAEPVQTRALLGRRRSAKTDRLDARWLARLLAKEMLPQSWIPPEQIQQLRDRTRLRKALAEDRRRWGQRLHAYLLHEGWPCSRSNLLRPPGLRWAAALQLSEHARLQVDSLLAVMAALEAQLETVDAELRRFARNDQRCQALQSIYGIGPILACHLLAEIGEARRFRRAEQITRLAGLDPVVEESGESRRRGHLAKAGSRHLRWALVEAAVHAHRPTAPDLELYRATRARRDPSVARLTVARKIGKRAFHVLRELELASA

SEQ ID NO: 231955 - protein, 360 aa, unidentified
MDVSKDRPRTTAGLDLGDRYSYLCLIDSQSGDVIEEGRLRTSPEAFGRRFASERPMHIAIEAGTHSPWVSRLLEECGHEVLVANARKLRLIYANKRKTDEVDAENLARLARLDPKLLYPLRHRGEDSQAHMAILRSRQALVGCRTHLVNHVRGAVKSFGGRLPKCPARSFHNRAPEYIPEALRPALGPVLETICSLTELIRDYDRKLETLSKERYPETELLRQVEGVGPLTALSFVLTLEDPYRFERSRSVGAYLGLVPARDQSGGKDPQKRISKEGDEMLRRLLVGSAHYILGPFGSDSDLRRHGEKIASPRGGKNAKKRAAVAVARKLSVLLHHLWVTGEVYDPLHNTHRRQEREEAA

SEQ ID NO: 231956 - protein, 279 aa, unidentified
MNNIILGIDISKATFDVALLFDGKVKTKKFGNSAKGFAELKQWLASKSIFTANVCIEATGGYEISLAKYLYNKGFKVSVVNPARIKGFATSRLSRVKTDKADSELIAYFCEAMKPDPWQPIPRHIKKLQQWIRRLDSLIANKTQESNRIKGAIPELVSHIQRHIDFLDSEIKETQKLIASHIEQHKNLKDKNQLLNSIPGIGDKTIAVVLAFLNPEEFDSAKQIVAFVGLNPKPKQSGTSVRGIGRISKTGDSDLRKAFYMPAVVSVKCNPIIKDFINI

SEQ ID NO: 231957 - protein, 417 aa, unidentified
MEAAMEATAVPCRVLAGIDVHKKMLAVVVRRDQNGETSYQKRAFGTTRSEIEHLTAWLQHNFVTEVVMESTAQYWRPVWYGMEAHFTLHLSHPLQTRAPRGRKRDFRDAQRLADRLSAGDLEESFIPGAEQRAWRWLARTRVDLQRKITRVRNQVEGVLEEGGIKLAAVVTDLFGISGWCMLERMAAGETDTEALVELAQGKLLKKKAQLREALKGSLPSHCRLLLRQHMEQVTLLRRQVVELTAELGRALKQHAGIVERLCKLPGVDHCAAQALPAEIGPRAAAFATPEQFASWIGVCPGSQESAGVSYSTRSAKGNRYLRRVLCQIAWAAVHSKGTFFKQLFNRLKPKIEAKGAVWAVAHRIAKVIWLMLAHEVDYIEKGPAPPNQRTLMRKLRRLARDFALLGIDINKAALASV

SEQ ID NO: 231958 - protein, 348 aa, unidentified
MALTIVETRAITGGVDTHADVHVAAALDPIGGLLGVREFPATAAGYGRLLSWLGGFGTVCLVGIEGTGSYGAGLARHITTAGVRVVEVDRSDRQDRRRQGKSDSLDAVSAARAAQSGRARGASRGRDGAVEAIRALMVAKRSAAGERTQTINQARALVLTGPDDLRARFTGHTAAALVAGLASLRPRPGSTVGYATRIALRELGRRAEFLDGQLERLDELIAPLVAARAPGLLALYGIGPHTAALLLIAAGDHPERLRSEAAWAHLCGAAPIPASSGKTVRRRLNPGGDRQANHALWRIVFTRLGSDPATRAYAERRTAEGKSKKEIIRCLKRYVAREVYPHLRTTVG

SEQ ID NO: 231959 - protein, 330 aa, unidentified
MYLGIDTHSRYSQVAVVDDDGNLQDEIRLPNDRLDEIAEQYTGGEAAIEASGHYRPVYEMLDEHLDVTLVNPSKNRLIAEATVKTDRIDAKRLAHMLRADMLAESYVPSDEIRTLRDLVRTRKSLVEERTAEKNRVRAVLKRTNNAYDSELFGPTGREFLAELSMSEADRTIVEAHLSVIDEYDEQIERLETKIEEKVFESPAAQRLLSIPGVGQSTAALIVAEVGEIDRFDRHEELVSYAGLDPQVHQSGDKEVHGSISKEGSGALRWALVQCSHVSVRHDDYLGNFYTRLKRRKNKQIAIVATARKLLVSIFYMLKRKEPYNPPEVSA

SEQ ID NO: 231960 - protein, 433 aa, unidentified
MGLIVPTTIPPEREDQPLPYEWFVGIDWGSQQHQVCVLDRARRRVGARAVDHDGASLAQLAAWLWTVSVGQPQRVSVAIEVPRGAIVEGLLERGFHVFALNPQQLDRFRDRHSVAGAKDDRRDAFVLADSVRTDRPSFRRLQLDAPHLLLLRELSRVEETLLEEFRRSANRLREQLHRLYPQMLQLCSAADEPWLWDLITLAPTPAHAMLLSEEQVQRVLKAQHIRRLKATEVLACLQAPALPVAPGTPEAAQAHCGFLLPCLRVLAEQLQACSQQVSTLLRTMADEPGEGESPSDVAIVQSLPGVGRKITAWLFAEAAQPLAERDYQVLRTHGGVAPVTKQSGKRRQVVMRHGCNPRLRHALYHMARVAMQRDAHFSSVYAALRAKGQRHGQALRNIGDRLLRILMAMLRHRTCYDASRIRCEPVAQMGQKM

SEQ ID NO: 231961 - protein, 345 aa, unidentified
MNATTVAVDLAKSVFELAVADEHWKVVERARLTRGQFGRWLHNQSVRLVVMEACATAHHWARMLAARGIEVRLLPASYVRAYVKRNKTDAADALALLEAARASDITPVAVKSVEQQALQALHRLRSGWMTTRTRRINALRGFCREFGMEVSVGAAKGLAQIARLLADEHSAIPVMLRTPMRLALEEIRLLEARIDALEHELAAMAKQSEACQALASIPGIGLLTSTAMVAAVGDPRSFRSARHYASFFGLTPREHSSGEHRYLGRISKRGNRYVRTLLTHGARSVLRAATLARRTGRQVDRLRTWALEIQGRTNHNKATCALANKLARIAWAVWVKHERYQPASN

SEQ ID NO: 231962 - protein, 428 aa, unidentified
MNPPNTNLTLSSDAVACVGLDWGDKAHAWALSDLASGRRETGTFQHSAENLHAWLDKLALRFGGRPVVLAIEGTRGAIFPALLDRPWLQVYAVHPTTSSRYRNAFTPSGAKDDIPDAEVLLELVERHRDKLAQLSLTDADTRRLAWLCEARRDLVDRRTQLVNQFIACLKSFYPQAFELVGDDLASPMALDFLDRWPDLLELKRARPATLRRFYYTHNVRRPETVQARIELVAGARALTTDEVVVEIGVRKLRVLIEQLRVAQRHIAEYDKTIAEAFKAHPDSLIFREVPGAGPVLAPRLLAAFGADRSCYPDPESLQKYSGLAPVREKSGGALWTHWRWNAPRFVRQSFVEWAGQSVLHCAWAQAYYQQMKAKEKGHWAILRALAFKWVRVLWVCWQKRVPYDDARYVQGLQRRKSPLASALAASPL

SEQ ID NO: 231963 - protein, 360 aa, unidentified
MKQDNTKERSWKAGGVTIGMDVGDRSSRYCVLDAAGEMVEEGEVASTRKAMKQRFGQAGRCRIALEVGTHSPWLSRWLERLGHEVIVANARQVKLISASSRKDDRLDARTLAQLARVDPRLLRPIRHRSERAQGHLTVIRVRAALVDARTSLVNAARGLVKAQGERLPSCDTDQMGVERMAKLPAGLRAVLEPLLAEVESLTEKIKACDAKIEQIARTEYPETALLEQVSGVGTLIALTFVLTVEDQKRFRKSRDVGCYVGLRPRRSESGKRQPQLGISKEGDLYLRKLLVQGAHCILSHRGPDSDLRRWGLRLAERGGKNAKKRALVAVARKLAVLLHRLWASGEVYEPLRNSQLARAA

SEQ ID NO: 231964 - protein, 342 aa, unidentified
MKLYGAIDLHSTNSVLVLIDEQDRVVYQKRLPNDLGLIVMELSTYRAEIEGIVVESTYNWYWLVDGLMEQGYQVHLANPAAIQQYEGLKYTDDHSDARWLAHLLRLGLVREGYIYPRADRPVRDLLRKRSQLVRQRTTNLLSIQNLLTRNTGRSLGANRVKQLDVQQIDELLPDGDLALAVKANLLVMNSATEQIEVLERTILKRVKLRPQFKYLKSVSGIGEILALTIMLETGDIKRFPTVGNYASYCRCVSSRKISNDKKKGKGNTKNGNKYLAWAYVEAAHFAVRHCAKIRSYEQKKKAKSKAIIAIKAVAHKLCRACYYIMRDRVAFDVSKAFGPKKV

SEQ ID NO: 231965 - protein, 448 aa, unidentified
MSTKKSSKGKRMKLPKHLQHINLYAAGIDVGSRSHFVAVPEGSSEPPVREFESFTDDLHRMAEWLIACGVTTVVMESTGIYWIPVFEILESKGLDVKLVNARHVKNVPGRKSDVLDCQWLQRLHTYGLLEGAFRPTEQVCALRAYVRQRMNLVRYASSHIQHMQKAMAQMNLQLVNVVSDITGTTGMRIIKAILDGERNPLVLARMRDHRCKNNEETIARSLHGNFRPEHLFSLKQAVDLYIFYQGQIAECDREILSQLATFDAVSFSDNGPPTTLEDALQRMSGVDLTRIDGIDTNSVLKIIAEIGVDMSRWKSAKHFVSWLGLCPGTKVSGGKVLSGKSKQVANRAAAALRMAAFTLFNSKSALGAYLRRQRSRLGAPKAITATAHKLARLVYSMLKHGTAYVDAGQEYYEERYRSRVVQNLKRKAQKLGFELVEIAGLQQKIATT

SEQ ID NO: 231966 - protein, 370 aa, unidentified
MKSIIYVGMDVHKASFTISCFSVTTQETFATVKISPDAKAIKKYLDGVSLSRSEECEFVCGYEAGCLGYTLYHQLTAMNIRCVIMAPTTILRNSKRIKTDRIDAENLARCLAYGGYKSVYIPTAQDEAVRDYLRMRDDHKLMLKKIKQQINAFCLKHNKIYPGNKSKWTQAHVKWLNALEFDGYLQDAFNEYMITYRELTDKVERLESQIEQLAELEEYRDKVKKLICIKGIKTHTALSLIVETGDFSRFQSAERYASYIGLVPGEHSSSEDQNRLGITKAGNRHMRMLLIEAAQCYSRGVPAKKSKDLKSRQKGASPEVIAYADKASIRLRRKYIRMELVNKKKANVAKTAVARELACFIWGMMTDNIA

SEQ ID NO: 231967 - protein, 381 aa, unidentified
MTTPATCQVPESTTAGTLFVAFELSEKTWKLGFTTGHGQKPRERTVPARQQERVLDEIAHAKRRLGLPNTAPVVSCYEAGREGFWLHRCLQGHGITNHVVDSSAIEVNRRRRRAKSDGLDVRKLLSMLMRYHHGERHVWQVVKVPSIEAEDHRHLHRDLETLKQERARTTTRIQGLLSSQGLRVPSLTKLPEQLDALRLWDGSPIPQGLRRRVLRVYAHHTFLSEQIAAVEAERRAQLQAATDARIDQVRQLMQLKGIGINGAWLLVMEFFGWRAFKNRREVGGLAGFTPTPYQSGESAREQGITKSGNRHVRWMTTELAWSWLRFQPDSALSVWFRERFGHGGKRVRRIGIIAVARKLLIALWRFLETGALPEGAALKVG

SEQ ID NO: 231968 - protein, 479 aa, unidentified
MPTTRLSGLNRKQRRELARRLQAADPGLAVMHPHAAGIDVGNSTHYVAVRPDRDPDPVRRFACFTADLHQLADWLVQCGVTTVALQSTGVYWIPLYEILDSRGLEVYLVNARHTKNLPGRKSDVQESQWLLKLHTYGLLRNSFHPSAEIRVVRTYWRQRGDHVRAVSTCIQRMQKVLTQMNIQLANVISDLSGWTGQRIVRAILAGERDPETLAGLSHPGIHATQAEIAKSLEGTWQPDLLFVLKQEVDLYDTYQQRIAECDQALERHLHTFADNTPDLRADAEPAPTPPPTATRASRPKRSRKAGSHAPQFDLGRELHRISGVDLTRIDGIDVTVAQTVISEVGLDMSRWETEHHFASWLGLCPDNRITGGKVLRRGTRHVINRAATALRIAATTLLRSQSYLGAQFRRFRGKLGAPKAITAMAHKLARLVYRMLRWGHEYVDKGLQYYEERHRQQQVHLLRKRAARLGLQIVEPLGA

SEQ ID NO: 231969 - protein, 347 aa, unidentified
MLHAGLDLSRRKVDVCLLSDDGRHLDQLAVAPDVDSLRTLARRIEEVHREQVYAVVESMTGARLVHDTLEQEGWSVEIADAQKVKGLAPLACKTDKIDSMVLAVLSHRDLVPAIWLPDPRVRDQRELARFRMHLVHHKSALKNRVHSTLINFGRPCPVTDLFGAEGRRLLARLDVPEPWRSNVCASLELIDHLERQIDQINRRLRAGHADHAYVPLLMSVPGIRWVLAFTIAAEIGEIERFSSPEKLTGYTGLCPRVDQSGERDRRGPLTKHGPSYLRWALLEATMHALRHPAYSERYQRTKKRLGKQRGAKVAQVDIARRLAHAIWHMLTRNEPFAPRGAAFRLAA

SEQ ID NO: 231970 - protein, 323 aa, unidentified
MEIEQWVGIDVCKRWLDVHLRPQGKSFRVENSERGMAVLLTHLVAPDLVGRVILESTGGYERQAAIFLSQLAYPVVVINARQGRNFAKAANQLAKTDAVDAANLAWFGEAMKPPIRGFASQVQAELQDLVTRRRQLVDMLTAEQNRLSGLRGKAQGDVEAHLEWLRERIKQLDEQIEMQISQCQIWKAKQAQLQSVPGVGKVVAATFLALLPELGQLSSQKIGTLVGVAPLNRDSGQMQGKRTIFGGRSAVRQMLYMATLVAVRHNPVIRAFHEQLLKRGKPTKVALVACMHKLLTILNAMVKQGTDWQPKIKPPSEPQPQPA

SEQ ID NO: 231971 - protein, 339 aa, unidentified
MKHYSGLDVSLKETFISIIDEKGKIVKEGVVASESSAIAEFLLGQNKKYESIGIESGQLSISMCKELRNLGLPVTCVDARHMAAALSARINKNDKNDARGIAQMMRVGLFKEVLVKSDEACQVKIILGSRRQLIRCREQIAGTIRGLLKIYGIKVNQRLSSANFALKVQEMVNNLDEISQTSIESLVHSLEIIEESIRKLDKMLSEQSKKDEDCKLLTTVPGVGIIVAMTYKAAIDDLHRFETSYTVGAYMGLSPRQYASGEIDRHGSISKMGPVDCRNMLYEAAQVLLVKCKRTFKLRSWGLKLKKKKGMKKAIVAVARKLAVIMHKMLIDRKEFCYQ

SEQ ID NO: 231972 - protein, 298 aa, unidentified
MSETIGTAIAVVGIDIGKNSFHAVGLNDRGAIVLRQKWSRSQIGTRLANLRPCLIGMEACVGAHHLSRKLKALGHDARLMPAKYVRPYSKGQKNDFRDAEAIAEAVQRPTMKFVATKTIDQLDLQALHRVRERLVSQRTGIANQIRAFLLERGIAVRQGLRFLRAELPRILAAPSDVVSPRMIRLIEDLAGDWHRLDARINGLSDEIEGIARRDINCERLMSVPGIGPIISSAMVAAIGNGEAFAKGRDFAAWLGLVPRQISTGDRTILGKISKRGNRYLRVLFVQAAWVVLVQPKSW

SEQ ID NO: 231973 - protein, 410 aa, unidentified
MEVIHQHCAGLDVHKKTVVACVRLASEGKVVTEVKTFATTTQGLLTLSDWLSQNRCTHIAMEATGVYWKPVWHVLSDGEVELVLANAAHVKNVPGRKTDVSDAAWLAELLAHGLIRASFVPDGQTQELRALLRTRKQLVRERTRHAQRIHKTLEDANIKLDAELSDVLGKSGRAMLNALVAGETDPVRLAALAYPNVKSSQAQLREALRGRVTSHHRFLLQLHLGQIDSLDAAIGTIDREVEDSLAPFRAAVDLVRTIPGVSTLGAEVIVSEIGIDMSRFPTVGHLLSWAGLCPRNDESAGKRRSSRLRKGAQWLKTTLVQCSWAAKNKKGSYLQAQFLRLKSRRGPQKAICAVAASILTAVYHMLKDGTEYQDLGPDHFNRRSKITQTQRLVRRLEHMGYAVDIKPIAA

SEQ ID NO: 231974 - protein, 467 aa, unidentified
MSKGSGMTRGDRRRNARRERLRELLPRDGAVIGIDLAEDKQALAVADHDGRVLARKTVKVKAFRLGAALDWAVAQARVKGFERVAVACEPTGPRWLQVQRLCGERGLPLVCIQPLVSHIAREQQDYTPHKTDESDCVLIGRLAAELHCYIPEELDETWAQLRHLGRRRAQLITAGTASVQRIRDFLSVAWPVVTEACVHPFDSMTWLAAMGVVTSRCGGDPGRLAALGAEEFTALVRAAVAGWGGQRPAAVICRRVFAALSDTEGVVASCRRGLLRRTADELGDLARTRAQLRAVEADMVVVLGELGLSRLGEVPGLTAVGAAAILAEAGDPRRYDSSSSLVKHAGMSPAGNASGAFEGQAHISRRGRPGLRLAVWRAVWPLLRHNPVLAAKYAALTGAAAAAGAGPQQGRAAQAAARARRAKARVACAASLLRWIYSMTVHGTSWDAVIAAGGAGQHAPRRPAQAA

SEQ ID NO: 231975 - protein, 341 aa, unidentified
MKKFIRIGVDLAKNYFQVHALVSEVGPAVTRKLRRSKMYEFFSRIEPCLIGMEACGSAHYWARELKAMGHEVLLMPPAYTKPYVKRGKNDAVDADACCEAMSRPGMRFVPIKSAEQQATLMLHKTRELLVKQRTMSVNALRGHLSEFGIVAAKGIGRVDELLELAASDTTLPAVARAAVKMLSQTLEGLDKAIDDLVDEITSAHAQNEMSRLLYKVPGIGKLIASVIVASVPDPSVFKSGRDFAAWLGLTPRQNSSGGKQTLGAVTKQGNRYIRKLLVLGATSLLNAVGKRKGALRDWIVGLLAKKPARLVTVALANKLARILWATMKTGECFRTEMFAKA

SEQ ID NO: 231976 - protein, 425 aa, unidentified
MNYKQNEKINQVKESTLVVGIDIGSTTHYARAFDWRGIELGKVFPFSNSREGFENFKGWMQRLQDKYKKSDVIVGIEPTGHYWFDLGAYLEDEGILLVMVNPYAVKQTKELDDNSQSKNDRKDPKVIAKLVTEGRYCAPYTPDGVYADLRIMVANRKRLIRELTQIKNRFARWFAIYFPEYKEVFGDYEAQSSMMLLKKACTPEAIVELGAKKINQIWRDAKLRAVGMKRATTLCETAKRSIGLKKGSSAAEYEMKLLLADYEYKKAQLDSIMEEIESLCKKIPESEQMLAIKGIGIITIAGFLAEVGDVRRFESPRQIQKLAGLSLRENSSGKHKGQTTISKRGRSKLRAVLFNAAIPLIAKNPEFRSLHEYYTTRANNPLKTKQSVIAISCKLIRVFYAILANGVTYDPEKMISDIHRPPQAA

SEQ ID NO: 231977 - protein, 466 aa, unidentified
MAGRGRGQGGTGQRQRRGLERINANAAGIDVGCNEHYVAVPPGRDAEERDVRSFRSFTCDLEQLSEWLRLCGVTTVAMESTGVYWIPLYDLLESKGFEVLLVDPRGLKRAPGRKSDVLDCQWLQELHTFGLLAGAFRPKEQTAALRAYARQRAMLIAYASDHIQHMQKALTQMNVKLRSVITDITGVTGQAIIRAILDGERDPRALASLRHEACHNDEATIADALEGTWREEHLFSLRQAFELYQTYQEKIAACDAAIEAHMGRMDDRSGGTTLKPPRRGKRRKNQPHFDLRGHLYRIAGVDLTRIEGLDALTVLKVISEVGTEMTPWPTRKHFTSWLGVRPGSTITGGKKLSSRTKPSANRAAEALRVAAQSLHQSRSWLGAFLRRKAAQKDMPTAITATARKLAELIYTLLKRGTEYVTRTQDQYEMMHRQRMLAGMARSARRFGYVLVPKDAVLLTPEPAPAQ

SEQ ID NO: 231978 - protein, 348 aa, unidentified
MNSLHYIGFDVHKKAISFCVKTAAGEIVEEGSVLAQREVLRQWASVRPQPWRGAMEATLFSAWIYDTLKPYGEQLEMAHPARMKAISAGKKKSDTIDARTIADLVRCNLLPACYVAPPRIRELRRLLRYRSLVVSEAVRMKNKMAGLLMETGALYVKEKLHRKKYFASLLEELEEVPESVIDLLRLSRGALEMFENTQKRLVRELLADPELAQRVERLMTIPAVGEITALTWALEVGDPQRFPSCSDAMSYCGLTAALKSSAGKQQRGPISKQRNHWLQTTLIEAAKLAPRWNPQLAALHARELERGHRNRATLAVARKLVAYLLAVDKSRQPFQLRVPLEEPTQKAA

SEQ ID NO: 231979 - protein, 406 aa, unidentified
MVFVGIDWSEQQHEVELQAGSGKVLKRLRVSADIAGLSRLQEAITDAAEEPSQVVIGIESNHGLLVNALVASGYRVYPINPLTSARAREGEAPSRSKSDPGDAHVLANLVRTKRQDLRPLAGDSEQAQALQVRARSHLRAIRVQQRLRSQLRSALAKFFVGALPLLGDESEDLRDALAVLSLAVSPEQGRGLSQNKIRSSLARHGRQRNLEVKAAEIQAQLRAPQLELNAPKVVSAYADEVSHLVRSLLLARSEVAQLEAQLAADFREHPDAEILLSQPGLGLVLSARVLGESGDDPTRYVNAKARKNYAGNAPVTKRSGKWKMVSRRLARNRLLADASFLWANSALSASPGARRYYDQLRARGKTHNQASRALANRLVGILHGCLRRRCLYDEAVAWIQPLKEAA

SEQ ID NO: 231980 - protein, 407 aa, unidentified
MDVVHPKCAGLDVHQQTVVACARVGSGKAVTHAVRTFGTTTPELLALSDWLATHGCTHVAMESTGVYWKPVWLVLDGHFELVLANAMHIRNIPGRKSDVNDATWIADLLAHGLIRSSFVPPEPIQELRDLTRTRKQLVREIAQHTLRIQKTLETANIKLTAVLADITGVSGRAILQALVAGERDPERLATLANERVKASRADLVAALHGRVTGHHRFMLHLHLTQIAALEAAVREVEARLGDALAPFRAALDRLITMPGVSETVARVIVAEIGFNMTRFPTAGHLVSWAGLCPRLHESAGKRLSNRTRSSNPWLKTTLVQAAWAATRKKDGYFRAQFLRLKSRRGPKKAIIAVTASMLTAAYHMLKHGVDYRDLGADHFDRRDKAKLAKRLIARLQDLGITVEVRAA

SEQ ID NO: 231981 - protein, 343 aa, unidentified
MQTITTIGLDIAKSVFQVHGVDADGDVVIRRQLKRRYVLAFFQKLPPCLVGIDACASAHYWSRELQALGHTVRLMPPAYVKPYVKRQKNDAADAEAICEAVTRPNMRFVATKTPEQQSCLTLHRTRHLFIRQQTAVINSIRAYLAEFGIVAPVGRNGVEQLLEVVADANDTRLPEIARTCVAALGTQLLGLKAQILAFDRRILAWHRSNETSKRLDEIPGVGPALATALVASVADPKAFRSGRDFSAWIGLVPRQNSSGGKEKLGSISKQGDRYLRSLFMAGALAVIRYAKIHGTKHRPWLTALLARRPTKVAAIALANKMARMAWAMMTRGERYKEPVAVAA

SEQ ID NO: 231982 - protein, 408 aa, unidentified
MNTLYVGIDVSSKSNVVYLMLPNGDKHSNFSVANSHEGSTQLVKRILSALTSHSLDTVLIGLEATSVYGDNLVYFLREDASLAPFHRKIHVLNPKQVKKFHDAYNDLPKNDYVDSFVIADCLRFGRINKEVYMGDYRYKALQNLTRARFFAVQNLVKEKQRFMNVLFKKYSTMTQEKVFSDTFSTTALAVYDEFDSAEALANMDLHELTDFIIEKGKNRFPDPDAVAKAIQKAARSSYRLPKTVNDSVNQVLSISITSMKALESQIKEFDKAIKAQMELLPNVLISIPGIGPVYSAGIMAEIGDINRFNSQAALAKYAGLAWKQHQSGGFESEVTRLIPSGNRFLKYYLCEAAFSLVRCDKEYSDFYHLKYKEVNRCQHKRALALTARKFVRLVFRLLKDNRLYCPAK

SEQ ID NO: 231983 - protein, 427 aa, unidentified
MDIVHPRVAGIDVHKKILWVAVRLPGGPAPGERTVTVRRFKTFWRQLRQMAAWLAELGVSDAAMKSTGVYWWPVCHALVQAGIEACVCNAAHMRNVPGRKTGLKDCQWIAELREHGLLRPSFIPDAQVATLRQRTRYRKKLIEQRTSEGQRLAKVLEDAGIKIDSVASDMLGKSGRAMIEALIAGERNPERLAGLALGVLRRKTDQLQMACDGRFTDSHAQMCRLHLDAYDHLTVQIAGLDTLVATAAAPFAALIARLVTIPGVGQRTAEVIIAETGGDMARFATAARLAAWAGLVPGDNESAGKRKKAPARKGSPHLRVAMVEAARATWRTATRPGARFRRLARRFGKGHEKKAAVAVARTLLCITWAVIRYDGDYIDAGADYYDRRDARNREHLIGRHHQALARLGVQVTLSDPVTPAPPPGQAA

SEQ ID NO: 231984 - protein, 424 aa, unidentified
MKVTFQTCCGVDVHKSFLVATIIKTTGGIEPSYQKRRFSTFNNSILEFKKWLLENECLYVCMESTGKYWIPVFNLLEDEINVTIANPKWVKAVKGNKDDTKDSKWIGDLFRLGLVKCSYIPCKEVHILRKYTRYRYKLVSCRSSEKNRYQNALTVCNVALDSVVSDIFGKSSTSIIDYLLEQSGTSINHEEIASKFLRSLKSKEYAVIESVEGYQMTDAPKYRMRLVRAHMDYITAEINDVDKMIENMISSNPDFENAVQFLCTIPGVKRDSAITIISEIGTDMTQFSSPKRLCCWAGLTPGSNESAGKKKSVRITRAGVYLKPALVQCAHAAVKSDKSPYYKKKYESIVKRRGKKRAIIAIAIRILTAIYQMLSTGEQWNPSGLYKIDMPVALVEKQKAKVIKQAKKLLQREKLLPSDEPLAS

SEQ ID NO: 231985 - protein, 344 aa, unidentified
MENKLEQLLERPSRPFPGAGPAWPARILQAGVIYHVKEQIVYLGVDVAKAYLDAAIGKEKRRLPNEATGHRELIKWIKQMEGPVRVICEPSGGYERRFIQALIGGQIRVSLVQANRVRQFARAAGILAKTDTIDARVLCAFGEAMRPQTLTASKLEQELLRELESQRRHLSRLLVMEQNRGARLSDSLVRSLNRALIKQIQKQIERIDLLIKEHIEHSQELSAKAHKLTAISGVGARTAALLLAQMPELGQLNRREVAALVGVAPFNRDSGKSRGKRTIYGGRRYVRHGLYMAALVAARHNPILRTFYRRLRAAGKPAKLALTATMRKLLIVLNSALKTNPITT

SEQ ID NO: 231986 - protein, 341 aa, unidentified
MDIDILGIDLAKRVFQLHGADRGGSAKYGAKVMRAELLATVRKLAPRIVAMEACSSAHYWGRRFKELGIEVRLISPQYVSPFVKTNKNDANDAAAIVEAASRPTMRFVPVKSVEQQDMRAVHRVRELLVHQRTAMINQVRGLLGERGVIIAQTPAAFKRAVPVALAQCEGDMTSTFQAILIELLEQMRVLEERIARTNQWIAAFMKHSVLCQKIQAIDGVGPITATAMVAAVGDAKEFKNGRHLSAWLGLVPRQYSSGGKSRLQGISKRGDTYLRTLLIHGARVVLRYAIGKADARSRWLQDLIARRGYNRAAVALANKNARVIQVLLSHPDSYRLSDRPV

SEQ ID NO: 231987 - protein, 358 aa, unidentified
MTTIAQPEIPCRVIGGVDTHKDQHVAAALDQIGRLLGIAEFPATTTGYEQLHAWLAGHGEISAVGIEGCGSWGAGLARYLATVGVVVVEVNRPNRQTRRRRGKSDSLDAEAAARAVLNGDAKATPKSGDGPVEALRQLRVARSGAVKARTAAANQLHSLLDTAPDQLRAQVAKLIFKERVALAERFRPGAGSDLDSSTRRALRSVARRWRFLQDEAKELRAEARKIIDAIAPELVARNGVGYETAGQLLVTAGDNPERLLSERSFAALCASTPVQASTGRTNRHRLNRGGDRQANSALWTIVLVRMGTDPRTKAYVERRTADGLSKREIMRCLKRYVARELYPLIRAITAVQQLESAA

SEQ ID NO: 231988 - protein, 343 aa, unidentified
MQSISTIGLDIAKSVFQVHGVDAAGQVVIRRRLRRRHVLAFFRKLPPCLVGIEACASSHHWSRELQALGHTVRLMPPAYVKPYVKRQKNDTTDAEAICEAVTRPNMRFVPTKTVEQQSCLMLHRARHLFIRQQTAVINSIRAYLAEFGIVAPVGRRGVEQLLEVVADTADRRLPEAARACLAALGSQLRALKVQILEFDRRIIAWHRSSATSKRLDAIPGVGPALATALVASVADANAFRSGRDFSAWVGLVPKQNSSGGKDKLGSISKQGDRYLRSLFTAGALAVIRYAKIHGTGHRPWLTALLARRPTKVAAIALANKLARMAWAMMARSERYKEPAALTA

SEQ ID NO: 231989 - protein, 350 aa, unidentified
MVTLGGDSHKQTHTLVAVDDNGRQLAQKTSPATKTGHLEVLQWARRWPERRWALEDCRHVSRRFEADLLVAGEVVVRVPSKLTGGARKVARTSGKSDPIDALAVARAALREPDLPVAKLEGPGRDVRLLLDHRDDLVGERTRIQNRLRWHLHELEPEAAIPARMLSRYHSLAEIEQRLGRHRGIVAEIALELVVRVRDLTRRINELEADIEHRVGGLAPTLMNLTGCGALCAAKVVGEAAGVSRFRSRAAFAMNNGTAPVQASSGNQKRHRLNRGGNRQLNVAMHRIAITQLSRPGPAKDYVAKRLAAGNTKTEAIRALKRRISDEVYRRLLQDERASLTNHVTSSVAAA

SEQ ID NO: 231990 - protein, 348 aa, unidentified
MNAPHYIGFDVHKKTISFCVKTASGEIVEEGSVPAQRRVLRQWASARPQPWQGALEATLFSGWIYDTLKPYGERLEMAHPAKMKAISAAKKKSDTIDARTIADLVRCNLLPACYVAAPRIRELRRLLRYRSLVVSEAVRMKNKMAGLLMETGALYVKEKLHRKKYFANLLEELEEVPESVIDLLRLSRGALEMFESTQKRLVRELLADPELAQRVERLMSIPAVGEITALTWALEVGDPQRFRSGSDAMSYCGLTAALQSSAGKQQRGPISKQRNRWLQTTLIEAAKLAPRWNPQLAALHARELERGHRNRATLAVARKLVAYLLAVDKSRQPFQVRESSQDLAQKTG

SEQ ID NO: 231991 - protein, 315 aa, unidentified
MAMSAAESRSVMGVDVAKDELVIYDQERDQLITIPNNKTAIKQWLKALAGAVSIAIEATNIYHVMFADLAYEAGCSVYLVDGYALSHYRKGVNVRAKTDAIDARLLARYLRNEGGNLHPWVPPQPFYRKLLSLFRRRAALVQARTSLTLSWANEPLLKAAFKSQLASMQRLEALVEKMIKELLEKAGLMAQVKRCMKVEGIGFLTAARLVTSYQRGQFSGGDAFIAFLGMDLRVAQSGQKKGLSKLTKRGDPEARRLLHNAAMSARRTTAWKDYYETQRARGFSSIQVLVMLARKLARVVFALLQNGSEYQTKAA

SEQ ID NO: 231992 - protein, 410 aa, unidentified
MVKENFIYVGIDLHKETHTAVMIDCYNQKLGEITFPNRPADFPKLVTKVKKCNTDGKEVVYGLENAYGYGRALAVWLIDKGYLVKDVNTAISHRQAKHRGAMYRKSDSDDAKAIALATLNMLDKLPDACPNDAYWSLGQLVHRRDNIMKQRTRLVNQLHEQLCIAYPSYKQFFNDISRPTALYFWEHYPSRKYLKGKSVEDLRAELVPVSHNKCSTKTCEKILDAVASDKVKNNAYQDARDMVTLSIVSDLQHYDSQLTEVDKMLEQMYKMLGCTLTTIPGVNVITAVKILAEIGDIKRFSNANKLAQFAGIAPLHLSSSGKGKDVATKQGNRRLQATIYFLAIQMVQISSKGTPRNPVVRAYYEKRKAEGKTSQQALICISRRLISVIYGMLKNGTEYRMPVVENAGEK

SEQ ID NO: 231993 - protein, 317 aa, unidentified
MAQNGTIVGIDVAKGKIDAAIRFGAEASFANSAEGRSELLAWLQEHGVCKAVMEASGGYEKGWARLLRGAGVEVVIADPKRVRHFAKSAGQLAKNDPIDARMIAWFGEVFGHASGQPHDEERQELDQIVTARLGIARLKEQIDNWGEHEQPKAVQKAHRALLKVVASQLAKLETIIAAKIGKTERFAQRAEIIQSVPGLAGTAAAGIIAFLPELGLVDRQAAAALLGVAPFDADSGQRRGERHIQAGRHKLRKLLFMPILSAATQHNPVLKACYQRLIARGKKAKVALIACMRKLIGILNTMLARGEKWDSAKHAIA

SEQ ID NO: 231994 - protein, 343 aa, unidentified
MNEVITIGLDLAKNVFQVHGVGDGGAVMISKRLRRRQVIPFFKKLPSCLIGVEACATSHHWARELGALGHEVRIMPANYVKPYVKRNKNDAADAEAICEAVTRPTMRFVAVKTKEQQSLMMLHRTRSLLVRQRTMLVNAIRAHLAEFGVVAPVGLRGMKALLAVIADAKDQRLPPLGRTCLDSLAASLMNLEQEIAFAERHIHAWHRSNEASRHLESIPGIGPIIATALVASVSDPSIFKSGRELAAWIGLVPKQNSTGGKERMGRISKQGDKYLRWLLVAGAMSVIRHGRKTNFKNNPWLADLVYRKPAKVAAVALANKNARTAWALLANGEIYRQPAAAKA

SEQ ID NO: 231995 - protein, 399 aa, unidentified
MNRNRTVAGLDIHKDSVYLCIMGHDGTIIFEKTYGVLTPDLRQMCQDMVEHGVTEAAMESTAVYWVPVWNELCGSMELKLVNPYFIKQLPGRKSDIKDAQWIAECLLKNLIKGSFVPGPVVQDMRKLNRRIMDLNEDLTYNTNKLDAALQRCGFRLSNYVSRIKGKSYQSVLSCIIDGERDPGKLIAKVHGRTINKHGRQTIMAAVTGCFSDTDIIIFRQTKAVIDLIEAQMAECQKELTALCGKHFPQQYRRLQTIPGVKERAATAIIAETGVDMKMFVTAASLVGWCGLKPRNDVSNGRYKSRKVTHGNRYLREILIEIAWVASRTRNCFFSKFSYVQTTVKKKSRMKIQVAIARKILVAIWHMLSKEQDFIDIYLKRLEQQRLLEEQLKSLESKMA

SEQ ID NO: 231996 - protein, 343 aa, unidentified
MGVFAALDVSQEETAICVVGQDGVLVAETKVPTCPDAITGWLAERASGLERVGMETGPLAVWLWNALTERQVPIICIDARHANGVLKMMPNKTDRHDARGLAQIVRTGWFKAAQIKSHDAYVNRAMLTAREALVGMRVRLENEIRGLLKTFGIMFGKRVGGFKRRAEEIIRDELTVVPDLVPIFEALMQARRDILARIAALDSRIRAVARRHATVRLLMTAPGVGPITAMAVVAAFDDASRFRRSSSAGAYLGLTPRRYESGEISRNGRVSKRGDAFTRKCLFEVANAIFCRNLGGPRLRDWAKAIAERTGPRKAKVALARKLAVTLHAMWRTNTPFREAAVA

SEQ ID NO: 231997 - protein, 409 aa, unidentified
MEVIHPRCCGIDIHKESVVACLRLQEGRRVKTEVRRFGTTTAELLRLHEWLSHAACTHVAMESTSVYWKPVFNLLEGSFEVVLANAYHIKAVPGRKTDVKDCEWIANLLAHGLIRASFIPPPPIRDLRDLTRHRKSLVRDRVKATNRVHKLLETANIKLANVVADVLGVSGRAMLDALVAGETDPEPLAKLAKGSLTPKVKPLAEALRGRFTSHHAFLLGQMLTQLDQLAALIARCDVRILEVSKRFEPEIQRLQTIVGVGRRSAEVLVSEIGVDMSRFSSAGHLASWARICPGSYESAGKRRSAGTGTGNNWLKTTLLESAWAAAHSRKSYLGAQFRRISKRRGPKRAGIAVAHSILVIAYHMLRNGVDFNDLGADYFDRMNSAKLKRYHLRRLAELGCDVSALAVSA

SEQ ID NO: 231998 - protein, 361 aa, unidentified
MDPAPITLETTMNYYAGIDVSLGSSSLCVVDASGTIFREAKAASEPAGLISWFLGLGVSLERIGLEAGPLSQWLYAALREAGLAVELLETRHVRAAFVTMPVKNDRNDARGIAQLMRLGWFRPVHCKSLAAQEVRATLTSRKLLQKKLHDVEMHLRGILRNFGLKVGRTTQKGFAGRIRELVTGHATLEGLAAALLSVHEVLVREFAGLEKQVRGMARADKLVRRFMTAPGVGPIVGLTYAAAIDDPLRFSSSKKVGPHFGLTPTKYQSGETEYDGRISKAGDASVRTALYEAAHIILTHPVKGSVLKSWAMRLARRAGMKKAKVALGRKLAVILHRMWVDGTDFDFARGAASVASDKKAA

SEQ ID NO: 231999 - protein, 401 aa, unidentified
MKRLSGGIDVGSESHHIIILDEEDNFLYNQKVAHKLNEFTENIKQFKKIEKKEGGKISFALEGKNGYSAPFDRILLNQGFTLYNVDNLKLKRFREAFAGEWRDDERDSLMLSKMLKLKDYINSERERVFIKIEKPSLVTESLKLLSRHQQTLIDEKVRLVNRLGKKLLEVCPQILELGKLKNKKIIAILAKYPDFSKYKRITLKSLLKIKGIGKIQAPFLLKRLNNIEYMSGLTDIYKIIISSYAKRIMQLQREIKDIDKSLDEIGGKNKEVNHLKTIPGVATKLASRFIGEIGDINRFPSEKQLAVYCGIACVDNNSGKITKARVVYKANKICKQTLITMAGCSIRFSFQCKDYYLKKRTEGKSHNHTLRCLARQLIKVIYRMLTEDREYIVRKELKKVA

SEQ ID NO: 232000 - protein, 411 aa, unidentified
MRLFVGDDWAEDHHDVELMNEQGRVLARKRLPEGVAGMARLHELTGEQLGEDADDAEVIIGTETDRGPWVAALVAAGYTVYGVNPLQASRYRERHGVSGAKSDAGDSHMLADMVRTDSHQLRAVAGDSPGAGAVKVVARTHKTLIWERTRQVQRLRHQLREYFPAALAAFEDLDAPDVLELLARAPDPARAAKLTRAQISAALKRARRRDIPGKATVIMAALRGAQLGQPPAITAAYAAAVRSLIAVITTLNEQVKILQGQVGEHFGQHPDAEIYLSQPGPGPVVGARVLGEFGDDPHRYASGKARKNYAGTSPITRASGKKKVVMARFIRNDRLIDALMAQALSALGSSPGARAFYDAQRAVGVEHNAALRKLANRLVGILHGCLKTRTLYDESTAWPHREKNPQSDIAA

SEQ ID NO: 232001 - protein, 386 aa, unidentified
MRRAKKRGPGPSSVLVTPDHAANVVGIDPHKQTLTATVVDPRGGIVASEHFKVSGGGHRALEAWARQFGQIARWGVENAAGWGRHTAIFLAGCGYDVRDVCANRTPRHDRARQRGKSDTLDSERIARETLAHPLLPKAFKRAGQDQGPDELHQLLALWHNRRRSILTGRQHLVNEAEHLLCELPLELREQLPASKAVRPRLAALQRRNRRRRYDPPTRLRLQLLDGYHAQITALDREEKQVVAALEALVRQSGSTLGELCGLSTRSVAELLVETGDVRRFTEGGFRRFNATAPLPASTAEGPGEPVRHRYNPGGNRRINAVLHRMAVTQLRREPRAQAIYANARASGHTKKEARRVVKRHLSDVVYRRMIRDLAAASHPAQPLAAA

SEQ ID NO: 232002 - protein, 342 aa, unidentified
MYYIGLDVHKKTISYCLKDASGQVHRKGTIGATRNELDWWMKTLPQPWTVALEATIFTGWIYDHLLPHAAQVKVAHPVMLRAIALAKKKNDRIDAGKIADCLRCDFLPECHMASTEIRDRRRSLRYRHLLVRQMVQMKNRISGLLLETGVSHNKKRLHKVGYFRELISKNEEIPESIRPLLRLSRETIVRCQKTEYALVSSLERDPLLAERLQRLRTVPGVGPITALTWALEIGDVARFRSIKQAISYCGLCGDEKSSADKSMRTPLSKKRNKHIQSVLIEAAKLAPRQSPELALIHEREKQKGNANRATLAVARKMVAYLLAVDRRQRDFVPAESHSTAAA

SEQ ID NO: 232003 - protein, 401 aa, unidentified
MVFCGWDWGATQHGVCVIDDAGQVLWRDLVPHRQASLTAVFDRLAGLADPGQLPVAIERGEGLLVGMIADAGHPVLVADPAGFKAARPRWGPTPTKSDLADAFMLADYARTDGHRLRRYEPVAPATREISVLARARTGLVAARTAASNQLWALLSEYWPGAAGLFAKLTSKIALAFLTDYPTPQSAARLGEQRMTQFCRRHHYNGQRSPAELTARLRSAPTPAEAVSPVALEAAVHALVAQIRVLNTEIATVEDQTARTLQTHPKTALLSALPRTDTVSLAQLIGEVGPILDRCATVEQAAALCGVVPVTRASGKVHTVGFRYACHKPARVALTGFADNSRHASPWAAQRYQQARDRGARHPHAVRIVARTWLRVLWVCWHTNTAYDPEAHHAQRRARAGT

SEQ ID NO: 232004 - protein, 330 aa, unidentified
MKNFQVIGVDVSKSTLDVYLHTAKTHFQVDNSNQGMVELLGRALSSLKCKPADLMICFENTGKYSKLLSVMLDSQNIKFLMLSALEIKKSLGLTRGKNDKIDAMRIANYAIEKREKLKPTILPGVNVDRIKALLSLREKLVRHRTAYKNGLSDLKDCYVEGENALIVEVQLNLIGELDKQIQKVEDEIRMIIHSDDSLEVNYNLAKSVIGVGPILAAYLIAFTNNFINFDNPRSFACFAGIAPFSESSGKQKGNARVHPYANKQLKSLLNMGAMSAIRIPGELKNYYLSREKAGKNNMSTMNIIRNKIVFRVFAVIKRKVPYINHSKFAA

SEQ ID NO: 232005 - protein, 425 aa, unidentified
MSDTGIRLAAMIGIDWADQHHDVSLQATGSNQVEAFRIRHTPADLTQWVGELRKRFPDGYVGIAVETSRGPLVHGLLEHDFIRLYPVNPRSLQRFRETFTPSGAKDDRPDADLLRELLVKHRDRLRPWEPDDEETRALGRLVQMRRGTVDQRTELIQQLGAALKEYFPLALTLAGADLSTEMATDFLLKWPTLSALQRARPKTVRQFYYDHSCRRREVVDRRLDQIRSAVPLTTDPAILETSTLLVQALARQLKALALSIAQFDQEIARRFAAHPDAYLFESLPGSGDVLAPRLLTQFGSDRDRFEGAADVQKISGIAPVTERTGKQKKGWVHRRWSAPTFSLQSFHEFARSSIQQSAWARAYYTQQRERGNDYHTAVRALAFKWIRIIYRCWKDRTPYDEDRYVRSLIQRGSPLAARLGHTTAA

SEQ ID NO: 232006 - protein, 354 aa, unidentified
MLYLGCDVHKNYTTMSFITEDGKVADTSSFYNDIEELKNLLKKFPKEEFSAVLEAGLNWGVIYDMLDSLPEVKNVSLAHPPKVKAIASAKIKTDKIDSKILGQLLRTDLIPEVCIPCKETRILKDIVRSRAFIVKIKTMIKNRIHDILRKSHINPPEVKDIFGKYGRMWLEDIELTDKRADKLLRYHLKLKDTFEEMEIELKKWINKEMKTNEDLKLVKTIPGIREVFGPIIVLEIDDINRFPDPAHLHSYSGLVPSTHVSGNTSYHGRLIKGNRWLRWAFIEGAHTSVRVSPYFREYYGRIKRKAGSQAASVASGRKLATIVYKVLKEKRPYIENKIGRLPSVKSSWGNPSSC

SEQ ID NO: 232007 - protein, 436 aa, unidentified
MRGCRCSMIMGFTKPIEHFNLQRKKVITMNTLYVGIDVSSKSNVIYLMLPNGDKHSNFSVANSHEGSTQLVKRILSALTSHSLDTVIIGLEATSVYGDNLVYFLREDATLAPFNRKIHVLNPKQVKKFHDAYNDLPKNDYVVSFVIADCLRFGRINKEVYMGDYRYKALQNLTRARFFAVQNLVKEKQRFMNVLFKKYSMMTQEKVFSDTFSTTALAVYDEFESAEALANMDLHELTDFIIEKGKNRFPDPDAVAKAIQKAARSSYRLPKTVNDSVNQVLSISITSMKALESQIKEFDKAIKAQMELLPNVLISIPGIGPVYSAGIMAEIGDINRFNSQAALAKYAGLAWKQHQSGGFESEVTRLIPSGNRFLKYYLCEAAFSLVRCDKEYSDFYHLKYKEVNRYQHKRALALTARKFVRLVFRLLKDNRLYCPAK

SEQ ID NO: 232008 - protein, 422 aa, unidentified
MLGVGIDFAEEFHLVAFGRPGEGVIEIRRVEHTPEDLRALFDKIGELEADPREVRVVLETRHGMLVEALLDAGYVVVPVNPDLVARRRGPAKKKDDAEDARIACLIALDRFERLRPLIPHGEVAGELRAIARDDERAARDERRLLNRLRADLIATFPAALQIAGGDLGAPTFLRLLENWPTAETLEAVSRGDLVAFARSNRHGWPERFADKVAAALAAESFVARPHLVRAKAATIRLEASQLLLLGAQRRSWERQMGELLLGGPRTGRDRSVKEPDLGKAFPGGEIYLSFPGLGDRLAARVAAEIGDHIEQFDTPSSLQSYAGKAPVTRRSGKSELVVSCRLACNRYLRDAVQQWAFCSLSRSGWAREFYDMKRARGQSHHAALRALGNRWLEVLWHCVTKGVKYEEEIHVANRKRALGRAA

SEQ ID NO: 232009 - protein, 323 aa, unidentified
MTKHITICAGIDTGKSKLDVAVEGSREQLQVENTSEGHAVLLAWLRRHRVKRVGIEASGGYEQPVVAELRRKRFVVVVFQPAQVRAYAKFHLQRAKNDKIDAALIAACTAAVRKIHPAPDPRLQPFAEQLTMIDQIGEDIARLKNRIESCRNTQIKGLWEEDLARLAKREKVELKALIASIRKHPDLAKRLDLINSIDGIGLPTAVAILVRMPEIGQITREQAAALAGLAPYDDDSGEQVGTRHIEGGRQRLRHALYAAALAASFRWNKQLMTLYRRLIAAGKEHKRALVACARKMLVFANTIVARGTPWQDRPPENATLTAS

SEQ ID NO: 232010 - protein, 420 aa, unidentified
MTPLSNQQFTAYVGIDWADTKHDICLQAAGDIRREFDCIPHQVARIDEWAKSLQRRFGGPIAVALELAKGPIVAALQKYDFFTLFPINPSTLAKYREAFKPSRAKDDPTDAELALDLLLRHPERFAPLRPQSVAMRSLLRLVAQRRELVGDKTRLTNRLCDTLKQYYPQALDWFGQRDTVLFCDFLTRWPTLLAVRRARRTTLEAFFHAHNGRRANLIEARLESIRAATPLTEDPGIVAPCRLHVLALVEQLRTVLTAINGFDREIAMVAGTLPDYALFQGLPGAGPQLAPRLLAAFGEQRERFHGADELQKYSGIAPVTERSGKKSWVHWRWQCPKFLRQTFVEWAAQTINKSFWAGAYYRQQRAKGSSHQAAVRALAFKWIRILYRCWQTRTPYDETIYLNALRKRGSPLLRNLGLAG

SEQ ID NO: 232011 - protein, 433 aa, unidentified
MTIDSAAVRATKGKSMKPWIEITHYAGFDWARDHHDVVIVDRQGQIVADFRIEHSLAGWQQFRDQVKHYPALALAIETNQGAAVDQLLLLDCAIYPVNPLSAKSYRERKAPSGHKTDRLDAWSLAEALRLDGQQWKALQPLDPLTQQLQMLCRDEIGLIEQRTALINQLQQALVEYYPAALQAFEDWTQPFCWDFVLQFPTPEKLAAAGRRRWEKFLHTQKLWRPETASKRMEIFQNARQFCGSAAVTSAKSLLALSLAKLLNALQLQLDQYRQQIETLFKQHPDHDLFGSLPGAAQTLAPRLLGEIGGNPQRFEDTEALQCVAGTAPVSFQSGQIHRVHVRYQCNKVLRHTVHLWSQCSLRVCPWAEVYYRQKRAEGKSHACALRCLGQRLLKILWRMIQTRQPYDADLHARNQKQHGSWVLTLMKAAPEAS

SEQ ID NO: 232012 - protein, 356 aa, unidentified
MQTKITKNSGFSNQNFYIGLDVHKKSWYVTILTDGLELKTFAHPPSAQQLAEFLNNNYPNGNYFSAYEAGFCGFAAHRQLVKLGIKNIVVNPADIPRMDKELAYQTDKSDSRSLARELRNRQLRGIYIFNPSDEEFRALFRYRIAIAKDIRRTCNRIKGFLFYRSIQLPVRFDNPNWSNSFLDWLENLQLEYVPARFVLCQMVANFRQLHLKKLEVEMQLRTGAKQKDVQLYKVLQSVPGIGPITAVALMSEIGDIGRFKHFKQFASYVGLVPRISQSGEKAHTGKMTYRSNNFLRPLLVESAWQSIRSDPAMLAYYKRACGKTISKKAIIKVARKLLSKIMFVMKQREPYQNNMK

SEQ ID NO: 232013 - protein, 325 aa, unidentified
MKSQHLIAGVDVSKDTLDIYFNDANGKEHYLRVRNDKKGHDLLIGKIGVQRTYLMESSGPYYLRLAFAIKKLNGDVRIENPISVKRFIQMHLERNKSDQKDARWLYVYAKQRETNEWRLPPKEQLYSMQVMGSIDLYSRQLVMVTNQLHSLEQVPVQMKEVRVSLEKMKQKLQVELRKLELQLHHLLQAWQGEQVKNITSIPGLGKRAVALLIVYTDGFKKMSNHRQLIALAGLAPREHTSGTSVRGKKGICKMGNGHLRNVLYMCSLSAIKHNHACKELYDRLKAKGKQSKVALIAVCNKLLKQAFAIATKGTTYQAAYKSCLH

SEQ ID NO: 232014 - protein, 414 aa, unidentified
MYYVGIDVHQKSSSVEILDCNGKLFKRREVRGRWPVLIEELAKVPKPFAVCYEASCGYGYLHEQFSKLAQQVKVAHAGGLSWIYRSKRKHDRIDARKLAKLLFLDEVPSVHVPPKEVRLWRQAVEFRQKVLRSRVAAKNQARALLRERGIESPRNLFSGKGLAWLKDLKLEDLGDALRRDLIVEQIEESDEKIKRVVKHLDSLSNNHAGVALLRTIPGIGPRTAEALAAYVDDAKRFSNLRNVGAYFGLVPCQDSSADKNRLGHITRDGPPTMRKLLCEAAWTAVRESPTVRAYYERVMRQDPDRKKIAIVATAHYLVRVAVSMLKTGECWRESVKEDPGNVKEDSSPKPDRGGGETPSGPQGFSPPPVASPASDEATSPPPLSASPFSPQKGRRKRHRNKACREERGVKIHKE

SEQ ID NO: 232015 - protein, 349 aa, unidentified
MTDRHLSYIGRIVYVGVDVHKETSTVTCVCNKQIVKTATVQAEPAGLAASLLRWFPGATLYSAYEAGFSAFVLHRALTTAGITNIVVNPASVAVAANDKVKTDRRDAKKLAIDLADGRLRGIYVPTEEEELARLLPRTRAQIVEHRATIARQIKAKLHQFGLIAPSSRRMISNRYLREIAAWSLPPDLRVSLTLLAEQWRFATRQLIEIRRLLREQAAAQAELEKVYRSVPGIGAVVARTLATELGDMTRFANERALFSYTGLTPSEYSSGPSVRRGHMSRQGSGRVRHLLIETAWRALPRDKVLQEIFDRIAATRGKKRAIVAIARRLTGRIRACFRQGTTYAVGTYA

SEQ ID NO: 232016 - protein, 341 aa, unidentified
MKRDISVVGIDIAKRVFHLVGMDERGKIVMRKRCSRGEVLPLLANLGPTTIGMEACGGAHYWARCLREQGHEVKLMAPQFVKPYVKSNKNDMRDAEAIAEAVTRPSMRFVPVKDVAQQDIQALHRVRERLVTARTALVNEMRGLLAEYGIVLPQGLAKFRQALMSTLEAEHTKLTPLGQALFHKLFGELGKLDAELAYYQDKLEALAQAHPVCQRLLTIPGIGPLTATALIAAVGDAGVFKNGRQFAAWLGLVPKQYSTGGQTRLLGISKRGDSYIRKLLIHGARATLRWARTKADRRSQWIRGLLDRRGWNRTAVAVANKNARIVWALLSRGGIYEANAS

SEQ ID NO: 232017 - protein, 370 aa, unidentified
MKNGTTRYLGLDVHKATITVAIGEGSGQPALYGTIANDPGAVGKLVRHLGRAANLAAAYEAGPTGYPLHRQLTELGVNCIVVAPSLIPRRSGDRVKTDNRDAVTLARLLRSGDLTPVWVPGEEEEALRDLVRARFDAKADLLRAKHRLEKFLLRQGVQPPAGLKAWTVRHQAWLNDRHFPVPAAQVVFDDYRTTVRAAEDRVRRLEVELRRWAGTSRQVALIAALQALRGVGFLTAVTIAAETGDLRRFATARGLMSFTGLTSSEHSSGGSRHRGAITHTGNAYLRHVLVQAAHNARHAPHRGWPLKQRQAGLPLDLVELAWRAQIRLHHRYRHLLGRLGRPKAVTAVARELAGFVWAVGQRLAPEVPAA

SEQ ID NO: 232018 - protein, 327 aa, unidentified
MNQSRVDLPILGIDISKEKFDVALLRVGKYKHKKFSNNQEGFEQLGKWLAGHNLEQLHACMESTSVYGEALAEYLYGSGFRVSIVNPARIKGFGQSELIRSKTDKIDASLIARFCAAMKPGLWTPEPKEIRELRSLMRRVDALVEMRQRESNRLEVSDKVVKKDIEDHIEYLTNQIDSIKSQISQHIDNHPELRDKKKLLESIPGVGEATINLALAHFGDTEKFHNAKRLSSFLGIAPREYSSGNSVRGRRRMSKVGKTSLRKALFMPALVALRCNPIIIDMRRRLSEAGKPKMLIVGAAMRKMVHLIYGVLKSKMPFDPNYSLKHY

SEQ ID NO: 232019 - protein, 355 aa, unidentified
MKRAYFIGMDTHCQFCEIAAVNTRGDVVERDRCVTCIPALLEVIERVPRPRQLVIEEGPLAGWLWRHLHQAVDRMVVSEPRRNRLIALDGDKDDDLDAEKLAQLLRGGYVKAVHQVETLERALFKQQVSLYHHRVRQRVREGLRISSVFRQHGVMIREKAFAAAEDRPALQAQLPAAESFHEILPLLWSSYDAAVEHEELWRRRLVRLAKQEEEIQRFEALPGISWIRAATLYAYLDTPWRFRSKAALWKYLGIGLERKHSGNAPEYLGVPTRAHRLLKGTILGAACSAVASGNNPFAELYGRWIEHGLSSKLARRNAARALAATLWGLWKNGSAYRPEWVGVARVAGLATEVSR

SEQ ID NO: 232020 - protein, 401 aa, unidentified
MKEFNPERHRIETASALEVVTSAGHQEHHAAYVGLDVHKEAIAVAVAEPGRAEPVYRGEIANKPKSIEKLIGKLSAAYDGALLQFCYEAGPCGYVLCRQILACGHDCQVVAPSRIPRTPGEPIKTDRRDALKLARLLRAGDLTAVWVPDRDQEMMRDLSRARDDMKGQERKARQQLNAFVLRHGHHWPRGKSRWTPAHYNWLESLRFERPWQHVVLHEYIDAVKAASARVAQLNDHLMRALPEWSLAPVVDSLIALRGIDKLAATVLLAELGDISRFDSPRELMAFLGLVPSEHTSGARRRQGGITLTGNGHARRMLVESAWSYRFPARQTMHLKRKAVNASESAKKIAWKAQVRLCGRYRTLTRAGKNTKVVCVAIARELAGFIWDIVRQQMARPAPQAA

SEQ ID NO: 232021 - protein, 340 aa, unidentified
MTTTTVGIDLAKNVFAVHCIDQNGKAVLVKPKVSRAALSELIAGLPPCVIGMEACSGAHYWARLFRQYGHDVRLMAPKFVSPYRMAGKTGKNDAADAIAICEAVQRPHMRFVPVKDESQQAMQCLHRTRQGFIQERTATYNRLRGLISEFGVIAPQSTDALRHVVSDQKETLPVQVRLCIDDLLTHVTNIEEKIAEYDRVLSRVAKTDHRSQQLMELKGVGPTTASALVASIGNAHDFKNGRQLAAWLGLTPSQYSSGGKSKLGRITKAGDAYLRTLLVQGARSVMVGAENRTDPFSRWVCSLIGRRGYWRAVVAIAAKNARLCWASLHYGDDFRLYSTT

SEQ ID NO: 232022 - protein, 355 aa, unidentified
MSEQFVGIDWATRRARWHAVKPTGALIDEGWTPADEDGLAMLVGHLGPDVVACLEMMSGAAWVRDQLTAAGWTVQIADARKAKAVGSLAAKTDKLDARVLAELARRDLVPQVHVPTFADRELKERLGRRMHMVRLRTAAMNRAHGVLSQFGVTLAFKRLREPDREQLLIERGVPEVWRRSIAEAVAVVAMLDLRLIPLEQELRPLARADPRVQLLITIPGVGDLLGLTIASEIGEISRFPTARKLIGYSGLTPRVYQSGQKSRTGKLSKSGSTMLRWAAIEAAQQAWRPNNPWHQLYLDVKQRCGGKGNPAKAAVAGKVLIATWHVLALQQPFNPSRPRGADAPVPASSSCVLAD

SEQ ID NO: 232023 - protein, 526 aa, unidentified
MCAAVRRPRPGRRSRQRGHVGKPNGVFSPRVQKVGPQHFGVVSVDCAKDRSKWMLTDFYGHVVVPPTFVEHHRTAFDQAVAAVRSAVSRHGIKDLVVAVERTGRYHRPVQSAFAAAGFDTRVVHPSVSCYFREAGAYDTKTDDTDLEGIFRAAVNGFGLQEQPWDAVYGSLQLWSRQRRDLVDKTSQLRCQILEYLNEYLPGYQRCFDDVFISKVALLIACHYAAPQAIAAAGLSALVQLCRQAHVQVHNATLMRIMGWAQDAPAPEQSASFYQQWVCNLNEDRLTKEKQIAACEQQLVALLVQTPYVRLLALSGINVVLASELAGELGPMTYYATARVNTGRAGLYPRRYQSDQVDHASGTLARRGNRRLRYVLVMSADTLMRCNQYFGVLRAKWAHQGRDPRDIRVRVAGRYSRISFQMVTGKGGFRHPACQGPPAVLSKLIEFHNEHDIDPYTARTNLQRAAAQLPRAEQAREKKALHAQLDAARQSWGRGPKQLCSILPAVLEQLGGVPTNLIKSIASGETP

SEQ ID NO: 232024 - protein, 403 aa, unidentified
MSPPNTIPARFIGLDIHKHYFVAVGVNSQQEQIFGPQRIPMHALECWGQKHVNASDAIVLEMTTNTWEVYDQLIAKAHSVTVVHPPHVALVTHTRVKTDYKAARSLAQLHAAGLLESIWVPPKAVRDLRALIAYRAKMVRLATQAKNRLHSVLHRYAIALPEGPLFAKQQTSWWLSLPLSSLELVCIQTDLHTLAFAQEQIDLIEAELKSQAAQDERLVFLVHLPGFRWLTGMTVLAAIGKITRFPTAKNLVGYAGLGSSVHISGKTNHSGRITKQGRRDLRTAMVRVAHAAAKSHSHWRAELQRLEPRLGYQKAIVAIARKMLVVVWHVLTRRQADRYAHPQKVARKLLQHSYDLGKENRLLGQTAAAHVRDMLENLGIGQSLDHVIWGSNQKMVIPPACNA

SEQ ID NO: 232025 - protein, 342 aa, unidentified
MDHYAGIDVSLEQSSVCIVDGSGKIIREGKVVSDPEALTCWFGALGLSLARIGLEAGPLSQWLYPRMKQAGLAMELLETRHVRTALATMPVKSDRNDARGIAQLMRLGWFRPVHCKSIGAQETRAVLTARKLAQSKLLDVENSLRGILRGFGLKVGKTTNRSFADRIRDLVINHASLQAIATALLSVHAVLLRELKAFDKQVRSMARADAKAKLLMSTPAVGPIVALTYASAIDDPNRFKSSKRVGAHFGLTPKKYQSGDTDYTGRISKIGDATVRTALYAAAHIMLIKPIKGCSQLKSWAMRIARRSGMKKAKVALARKLAVILHRMLANGTPFNAAMATA

SEQ ID NO: 232026 - protein, 358 aa, unidentified
MVQRKELNFEGQNIYIGIDVHLKTWHVSILTESGCLKKHSQQSSAQALFEQFKKRYPNCNYLPAYEAGFSGFSTYYSLLDFGIECLPVHAADIPTGQYESVMKTDAIDSTKIARALKSGLLRGIYIPKKEVLDDRNVMRLRITLKRQLSGYKSRVKHLLYNNGVIYPECFQNSKSHWSKRYLKWVHEDVQLLSESRNSLDLLLRQVELFRKSLLEITRLVRTLSRNGRYGEAYENIVSIPGIGMITGMCLLTEIGDIHRFRNERQFASYLGLVPTSHSSGEKTSHGEMTFRGNKRLGPLLVESALVAIRQDRALAAAYGEYCKRMLPQEAIIRITRKLSNRILIILKSGKKYEHDRCY

SEQ ID NO: 232027 - protein, 316 aa, unidentified
MSKKPAPTIAIGIDVSKERCDVCFLDETENSNHQGCYSEDKYKALVKKIAKAKPRIVILEATGGYERLIAGLLVASSIPFRIVNPLRTRQFANSIGLLGKNDAIDARMLALYALRNKLDPVAVPNEKTMELRALLERRRQLLDLRTAEKNRVHRTDHKAAVKSVKKMLSILNDEIASIDSLLSEVVKDDDEFRHKEEILTSVTGVGGQTARSLLGSMPELGKINRGEAAALAGLAPFARDSGKQRGKRSIRGGRFHVRRSLYMAAISATKHNPRFRQMYQNLLAAGKAKKLALTACMRKLLLLLNALLKKNELFAQ

SEQ ID NO: 232028 - protein, 354 aa, unidentified
MNSVRYVGMDVHRDTISVAVLDEGGGWLMQSVVATRGDAILDFIQGVRGTLQVTFEEGTYSAWLYDVLVRRVAKLVVCNPRKNALMKSGSKSDAIDARKLAELLRAGMLSGVYHGETSAREVQQMARSYAQVTEDTTRVMARLKAVFRGQGVSCAGKKLYGKRHRDEYLAQLGGGLRRRAEHLYQELDALQPLRHEVRRELIVECRKHAAARWLQSIPFLGPIRAALLIGQVQTPHRFRSKRQFWSYCGLGLETRDSGQYRVVNGQVQRRRKPALIRGLNWNHNHAMKNLFKSAATAASARPGVWREFYLGLLAKGMRPEMARLTLARKIAAITLKIWKKGETFDAEHLKLRAA

SEQ ID NO: 232029 - protein, 389 aa, unidentified
MKIFVGIDIAKLNHFAAAISSDGEILIEPFKFTNDADGFQLLVSKLESFDKNSIIIGLESTAHYGDNLVRYLVAEFYQVCVLNPIKTCQMRKNNVRKTKTDKVDTFVIAKTLMMQDDLRFITFFDLDMMDLKALGRFRQKTIKQRTRLKIQLTTYVDQVFPEIQYFFKSGLHQHAVYALLKEAPSPKEIASMHMTHLANLLKVNSHGHFTKELAKELRVLAQKSVGANDSAISIQITQTIQQIELLDSQLEKIEAEMTDIMKFNDSVIMTIPGIGYINGGMILGEIGDIHRFSNPNKLLAFAGLDPFVYQSGNFQAKTTRMSKRGSRVLRYALVNAAWNVVRNNATFKAYYDAKRAEGRSHYNALGHCAGKLVRVIWKMLTDEVEFNLE

SEQ ID NO: 232030 - protein, 339 aa, unidentified
MDDLALIGLDTSKHVFTLHGVDAAGRAVLRRELRRGQLEGFFGKLAPVEVALETCGGSHHWGRRLMALGHRVRLIPAQYVKPFVKRGKNDRVDAAAIAEAAQRPDMARVAVKSAEQQAQAMLLRTRELLVKQHTQTVNALRGHAAEFGLVAAQGTGKVAGLLAAAADDPAVPAAAKALIALLGQQVTHLDEQVEALDRQVLACHKTNPLSQLLAGVPGIGPLTAVSLALTVEAGQFASGRHFAAWLGLTPKQNSTGGKTRLGKISKAGNERLRTLLVVGATAVIRHARPGSRLATPWLLSLLGRKPKKLAAVALANKMARIVWAMMTRGEAYRHQPVAA

SEQ ID NO: 232031 - protein, 309 aa, unidentified
MDIVVGIDVSKDRLDVAVAPSGLAFAVVNTQAGIDELVARLQSVKADVVALEATGGFETPAVAGLSSAGLSVIVVNAAQVRAYAHAIGRKAKTDPIDAALIAAFVMATRPTLRPLKDAETQALSALVARRRQIVQMIVAEENRARMALAKETHKSIRRLLSALRHELESLDADLDDHIRKSPLWRVRESLLTSVPGVGSATARTLMAEMPELGSLDRRQIASLAGLAPWTRQSGTWKGKSFTGGGRGKVRSALFMAALVASRHNPVLKAFRERLVAAGKPKIVAIVATMRKLLTILNAIIRDQKPWKSA

SEQ ID NO: 232032 - protein, 409 aa, unidentified
MKLFVGLDVSSFDIKVCFLNGEGDKLNSFTVANDLPGATQLRDEILKITQNQSVSALRIGLESTSVYSFHPSMFLHNDASIRALGGQVLVMNPKQIANFKKSYSDMDKTDEIDAFVIADYLRFGRLPMSVVKEEQYVALQQLTRARYQIVRQITQEKQRFLQYLSYKCNTFTEEVESSVFGKAMMDLFLENYSLEELAQMPLEDLADYLQSKGKNRFPDPKSVAKFIQKAVRSSYRLDKVVEDSIDTILGTSITLIRTFDKQIKELDKSIQRIMKGLPQTLQSIPGIGPVFTAGIIAEIGQIERFSDETKIAKYAGLYWRKHQSGRFTADDTSLSRNGNQYLRYYLVEAANSVRMQIPEYGEYYSKKYQEVPKHQHKRALVLTARKFVRLVDALLRKNQIYTPKRSVNI

SEQ ID NO: 232033 - protein, 351 aa, unidentified
MKQVTTVVGIDAHKKDLFVAMLVGTQATPVSWTVPNEPQAVRRLVRKLEREAPGQVRVFYEAGPCGYALQRQVTTPRVSCEVVAPALIPRKPGERVKTNRRDARKLAELGRAGLLTVVQPPTPEDEAVRDLARARDDAREDLQRCRHRLGKLLLRRGLHYGGRNWTRAHRAWIATLEWPHAAERAVVDDYLLAIDHTEARVVALDAQLSEIAQAEPYRAPVGWLRCFRGIDTLTAMLILAELHDVRRFASAPALMAYLGLVPGEDSSGEKHRRGRITRTGNALVRRLLVEVAWHYQHRPGIGVALARPRSGFRFHLTWCRFWIWIRTFQDVDLGPEGTAELIIGVSFCPKL

SEQ ID NO: 232034 - protein, 337 aa, unidentified
MEQEVVTVGLDLAKNVFQVHAIAADGAVLIRRKLRRSEVVRFFAELSPCLIGMEACASAHHWARELIAIGHEVRLMPPAYVKPYAKRGKTDAADAEAICEAVTRPTMRFVAVKSVEQQAVLMLHKSRDLLVRQRTMLINALRGHLAEYGIVTGLGAGGVAASLKALHEEQDQSPAHARSALHGIAAQLRALASEIDRLQAQILDWHRNDETSRRLATIPGIGPITASAIAAAVPDASLFRSGRQFAAWLGLTPRANSSGGKERLGGITKQGDGYLRRLLVVGATAVMRMTRKYPARQPWMAGLLERKPTKIATVALANKTARIAWAVMTRKEVYAAA

SEQ ID NO: 232035 - protein, 421 aa, unidentified
MNGKGNDYALLVGLDWADETHDLACLSEAGGKRSQLRIGSDPESIRQWMGEVGSRFPNGRVAVCVEQSRGAVAYALGAYAAVDLYPVNPVTLSNYRKAFKPSGTKDDPGDAALCLDLLVNHREALSRLEPDTELTRMLQLFCELRRKAVNRRAQVTNELISTLKQYYPQALTLIGDNRHSKMACALLMRWPRFESIAGADAQSVRKFYYVHHSRSERCIRKRLELIASGCPLTTDPAIVEPLMMHAKQLVSEIRALNKSVERYDDRIRKLFAAHPEAMLFRSFPGAGEQLAPRLLVAFGTNRERYGAADEIAAYAGVAPVIERSGKSEWVHWRWHCPKFMRQSFVEFAAKSVGQCEWAASHYHKQLQRGKEHNAAVRSLAFKWLRIIFRCWQQRKPYDEQRYLAALARHGSWIAGDLARPG

SEQ ID NO: 232036 - protein, 394 aa, unidentified
MSSSPAAVPATPAIRPIIYLGMDVHKESITIAVLPAAAKTPTRIEKLPNDLPKLRKWITRIARDGEIRSCYEASGAGYVLHRALAEWGFACDVIAPSLIPKRSGVQRKHDKRDAADLARLYRAGELVAVRIPSETDERVRDVVRCRETFQREILKSRHYILKFLARRGFVFREGTNWCTPHLRWLQHLTTDASPLAPDDRLVFREYHALLEYKLQRREELDRKIEQLALLPHLAPMVGRLQCFRGISVHSAMVLATEIVDWRRFEHPKQLACYLGLVSREDSSGDRQRLGSITKAGNSHCRHVLVQAAWSYRHRPQVSVDLKRRQEGQPPRVITHAWKAQQRLHQRFNHLTYRKLPQIAVVAVAREFVGFLWAVMQDVAQNVAQNVAQNGERVA

SEQ ID NO: 232037 - protein, 418 aa, unidentified
MEVVNARCAGIDVHKRMVMAHARLAEGPAPLRKVMEFGTFTQDLLAMRDWLHELGVTHIAMESTGVFWRPLYNVLEDEFEILVCNAHHIKNVPGRKTDVKDAQWIADLLAHGLLKPSFVPGPPQRALRDLTRARSQYVAQRARLSNQIQKLLEECNIKLSSVASDVLGVSGRAMLAALAAGQDDSKTLANYARRSLRKKLPQLGLALQGRMRSHQRTLLREHLNQVESLDRSIRALESAIDETLKQEPNSPFESAVAVIQTHPGIAETSARAIVSEIGADMARFGSAERLCAWSGMAPGNHQSAGKRLSGKTLKANRYLRSILVEVAQSAANQKGTYSSALYARLAARRGKKRALIAVGHSVLRSLYYMISNGQPYKELGANHFDELNRTRIVRRLTQRASSLGFELRPALATNGGST

SEQ ID NO: 232038 - protein, 466 aa, unidentified
MKHNRRRRPGKPRVSPSVLERINPNVAGIDCGSAEHFVAVPPDRDPNPVRSFPTFTSDLQRLADWLSTCRVTSVAMEATGVYWIPIYEILEARGFEVHLVNARHVKNVPGRKSDVSDCEWLRELHSVGLLRGSFRPTDAIVALRAYLRHRQTLIESAGAHIHRMQKALVQMNLQLPLVVSDITGVTGLRILRDIIAGRRDPSQLAEHRDHRCRASKAEMVAALTGNYRPEHVFVLQQNLELFDVCQTQLAACDSAIEAHVQTLTASMSAPATPLPPPRVTKKPRDNEPRFEIRTPLHQLTGGVDLTQIDGITSYTALKLLSEIGTDMGRWPSEKHFTSWLTLAPKNKISGGRFLSSRTQPSANRAAAILRMTVMSLGRTQTALGAFYRRLAARIGKPQAITATARKLAILIYRTLKGELVYRDPGADAYEAQQRTRVLRRLRQRAATLGFELVSRATGELLDGVVS

SEQ ID NO: 232039 - protein, 348 aa, unidentified
MDKIIRIGIDTSKSVFVLHGVNTAEQPVLCKKLRRRQMVDFLSKLAPTRIGLEACGAAHHWARDLAALGHEVVLLPPQYVKPYVQRGKNDAADASAICEAMSRPRMRFVPVKTAEQQAALMLMGMRDQLIARRTQLSNMIRGYAAEFGVTAAKGLDKIEPLLARIATDPTVPEFAKELFATLAEQYAELKPKLHRIEARLLAWHQHNELSRRLAEIPAIGPIGASLLVMKLPNPRTFRTGRDFAAWLGLTPKDHSTAGKQRRGVITRAGDETLRATLVVGATAVIQQVSKGRGKPSPWLTALLKRKPPKLAAVALANKTARIAWKLMVSGERYNRNHGAAASTARIAA

SEQ ID NO: 232040 - protein, 367 aa, unidentified
MLYLGIDQHKSQLTVNLRDEQGDVILKRQVSTRWEKVREFFADLADKARPEGGFFAILEVCGMNPWLLDMLEEYDCREIVVIQPTERSVQKTDRRDADKLCHLLWVHRRQFLEGKHPFGLRRVQPPTPQEADDRQITALRARLTKKRTAVLNGIHKILRKHNLEQECPTKVFQTQKVRRWLEEMNLPTIDRLEMDLLLLQWELLDEQLKVVELKIAERAAAEEQARLLETMPGIGHYSAVAIASRIGDIERFKRPDSLANYFGLTPGCRNSGEATQRLGSITKRGSRIVRHLLGQAVVKVLRFDGVMRAWFKRIKKRRGSKIARVAVMRRMTTIMWHMLKKKQKYRYELSLKKHQEFVEFEGVVEAA

SEQ ID NO: 232041 - protein, 409 aa, unidentified
MSQMLVGIDVSLRSHHVHFMDEAGKSLANFSVPNSVDGADTLISKLLEKTNKLKSQSLRIGMEATSNLGWHLAHYLKYQLIEPYPDAQIYVLNARKVARFKRGYDTLPKTDNIDAWVIADHLRFGRLPYEMKDVVQYDALQRLTRTRFHLMQTIGREKTYFLNQVFLKFSGLRQDNPFSTTFGTTSLAVIQELDPEQIAAMPIDELIDFIKEKGKNRFADPEEIALYLQKIARSSFRLHKTMADPVNISLAVTLSVIKHMEAEVKKLDKEIAKIMKSIPQTLTSVKGIGDVLAAGIIAEIGDIERFKNHNALAKYAGLSWNKYQSGEFEAEDTRRMMTGNKYLRYYLIQAADSIRKHDSEYKTFYQKKYDEVPKHKHKRALVLTARKLVRLVFTLLNTKQLYTPPERRG

SEQ ID NO: 232042 - protein, 341 aa, unidentified
MNELYAGMDLHSRNTYIGIMEKDSKKKVFEKRVPNHLSLILGLFEPFKDQLQGIVVESTYNWYWLVDGLMDAGYRCLHLANPSAIKQYEGLKYSDDRSDAFWLAHVLSLGILPEGYIYPKQDRPVRDLLRKRSFLVRHRTAHILSLQSMIERQTAQRMGSNKIKTLTSEDIKLIFDEEHLVLSARASSATIEFLTHHIKEIEKAVRARIKIRKPFEYLLTIPGIGDILTLTIMLEAGDINRFPRVGNFSSYARCVSSNRISNGKSKGKGNTKNGNRYLAWAYIEAAHFAKRFSPRIGRYFQKKAARTNEIVATKAISNKLARASYYIIRDQVPFKEEALFC

SEQ ID NO: 232043 - protein, 357 aa, unidentified
MLAEVIDAVVGVDTHRDTHHVEIALPTGTPIANCSISNDTTGYAHLLAWILDHAPGPRIAVSIEGTRSYGIGLARAASAAGLLVLECEQPHRKARRGKGKSDPIDAHLAVLTALRLHTNQLPIPRADGDREALRILLSARHDLTETSTAQINRLRALLRDGNDTDHQLARIALTDATLTGLARRRLPRDASREHAIRHAEVRRLALAIHDANRALKANRAQLQSIVDDLAPGLTDRPGIGPVTAAQAIVSFSHPGRCRNDAAFASLAGTCPIPASSGRTVRHRLNRGGDRALNRAIHTIATVRMRDCPATKAYIARRTAEGKTIREVKRCLKRYIARQLYRALTATMTPTTNAPTAA

SEQ ID NO: 232044 - protein, 350 aa, unidentified
MLIIGCDYHPGFQQIAYVDTETGELQERRLRHPEEAEKFYRDLWERKLRVRVGMEASGHARWFERLLAELSFELWIGDAAEIKAKRVRKQKTDRQDAQHILKLLLKDDFPKIWVPSWENRDLRQLLWHRHRMVQTRTRIMNQLQAVAINEGVRCKKRLWREAGRKQLESLPLAQWASRRRQDLLEVLDRINPTIAELTQAIEDEAEKCSEARRLMTHPGVGALTAVAFVLIIGEANRFGCGKQIASYLGLVPAEDSSGERRRLGHISKQGNSLLRFLLVEAAQATARSDCRWRNQFFHLAKRRGRKIAKVAMARRLAVRLYWMWRRGWNYEQLQSFGSHARQPGNPHGVQ

SEQ ID NO: 232045 - protein, 355 aa, unidentified
MQSNKISFKGQNIYVGIDVHLKTWHVTTLTESGYKYSFAQHSDAKELFDRLNKKFPEAHYKSAYEAGFCGFSIHYALTELGFENIVVHAADIPTTGKEKAMKTDAVDSEKIAWSLKRDELRGIYIKDKCFMDDTNLMRLRQRFIMDLSRQKNRTKHLLYTQGVTYPERFHNSKTHWSRNFMKWLREEVELLSEEKMALTLLCDQVENTRMAILTVTREIRRLSTTDKYRENFSLLTSVPGFGLITSMSMLTEFDNNPTRFPNERKFVAMLGLIPTCHNSGEKKVSGEKTNRGNKQLGPLIVEASWVAIYRDYQLGAYYSSCCQSMKPHKAIIKVARKLACRAYAVLKTKTSYVLS

SEQ ID NO: 232046 - protein, 376 aa, unidentified
MGTPSAQTLDDVGVREIFQKLEEVPLMTMVGGLDVHRAQITFDYVDDDGLVHWGQIRPATRKTLRGWLAEHCPDGDAEFALEGCTGWRYVSEELAGAGVGVHLGDPAEIAVLRGPKKRAKTDRADARLLRTLLLQGRFPESWIAPAHVLEIRTLGRLYCTLMDERRAWQQRIHAQLFHQGCPPVRALLSVTGRAALAGAELSAVGGQYVDTALGRIDELSTEIEPLRAQLVNFARHQTGCQALQRHYGIGWLCAAIIWAEIGDARRFSSSDQLVRFAGLDVTVYSSDGKRSPGHLSRQGSPELRWAAFEAAKCAARRGSPDYGYYRKLAAKRDGHNGKNPTLAVERKILRRCHHRLRELGDAAVALPVAEPQEVAA

SEQ ID NO: 232047 - protein, 575 aa, unidentified
MATLLDAPTREEASAQVIGVGIDTARYGHRVTFLRSDRQPAAPPLDVEESHAGYQRLRQALERLAREPRVKFHVRLDAAGQYAANLEQFLRGLPLPLEISVGQPARNAAYRRVHYPKRKSDDTDSRAVARFAVVEQPAATPATSAELLMLREVASQLDSQVKQTTRLVNQLHGLMARVFPELATLAPDLGAQWVLRLLEQYPTPERIARARQASLTAIPYLTDKKAAALQAAARQSVGSLRGPIAETLVRQAVGEIRLSQQIEKRLSELLLEAYDALPKGPHRLLTTIPGIGRGTAAVLVAKVVSIDRFATAEHLVSFFGTFPEENTSGYDRRGRPVPPRTMQMSRQGNDLVRRYLWMAAQSAIVHNPAVRPLYLRQRARGKRGDVALGHAMRKLLHLVFAIWKTARPFNPAHHPWESADGSKTAAGHRQEVILQGKVVTAATCKVEVSAAAVNPPTPATLAAPAAAATPSPLRPHVDYAFLRSQITLERVLEHLRLLEGLRGSRQRRGACPIHGSQNLRSRTFSVNLDRDVFQCFDGACGTAGNVLDFWAAFHRLPLYEAALHLAQTFGLRLNP

SEQ ID NO: 232048 - protein, 368 aa, unidentified
MKEVTTRYVGLDVHKATISIAVADDGVAPVLFGTIANEATAVHKAVSLLKSGGKLVAAYEAGPTGYGLHRQLTQLGVDCVVVAPALIPRRAGDRVKTDKRDAIALARLLRSGDLTPVWVPGQQDEALRDLVRSRFDAKDDLRRAMHRLAKFLLRQSIQAPPGIKPWSARHLQWLETLRLNHPTSQLVFEDYRVAVHAARERVRRLEADLERCAEQSPRLGTILALQVLRGVAFLSAVTIVAEVGDFRRFPNAPRFMSFTGLTVSEHSSGQSRRQGRITRAGNRYLRHILVQAAHNARFAPSLEGELKRRLKDVPADLVALSVTAQNRLHRRYRHLDRRIGRPKAVTAVGRELAGFVWAIGQRMEAIAA

SEQ ID NO: 232049 - protein, 344 aa, unidentified
MDISVLGIDLGKNVCSVVGLDASGAVVMRRRMRRETLIGLAERLPACIVGMEACCGSHHLGRVFASHGHDVRLMSPEYVRPYVKAQKNDDRDAEGIAEAATRPTMRFVELKSPDQLDMQTLHRSRDRLVGERTALINQLRAILLERGLVAPQGKWKLKQFLNVLMDEQGGASLSPRMILLVEDARAQWAELDRRIAAFDAEFVRWAKENEEAHRLTTIPGFGPIVASALVAAVGRAESFNHGRDLAAWLGLVPRQFTTGGKPKLLGISKRGNKYLRKQLIHGARAALPHIAERDTPLGRWAKELMRRAHLNVAVVALANKLARIAWAVLQRRKAFDANAVSVAA

SEQ ID NO: 232050 - protein, 403 aa, unidentified
MSRYAGVDWAKEEHRVCVLEDSGSRLSERSFAHDEQGIVSLSAALAKLGVERVAIERPDGLLVERLLEAGLAVLPVHPNQMKAARPRFRAAGGKSDGFDAFCLAELARTDHHRFRVLTPDSDETKALRAMSRAREDLVESRVALANRLRAELEAFWPGGAAVFAEVDSPIALAFLERYPAPADARGLGEKRLSGFLARNGYCGRKPTSELLGRLRKAPEGRAREAETEARRTVVLALVAALGPLVEQIKLLGSQIAHAVRSHPDGSVFLSLFVDPKATVTAARLLSEIGDRRERYPSAEALAADAGMCPVAVESGKRKAATFRRACDKRLRDAVATLADATRHRHPWARDVYRRARARGCDHPHALRILGRAWLRVIWRMWQDSVPYDPAKHGNLRRLNTARG

SEQ ID NO: 232051 - protein, 415 aa, unidentified
MMEQRNKVCGVDIHKRFLIATILSRDGTKIQKRYSTDIDDLFGFRDWVLENNCDCVAIESTGVYWYPVNAVLENKIELILANARQIKHTPGRKTDSIDSEWIAEVALNNLIYPSRIFPKEERDLRRLTRTRESLVKMRSQIKNQVHQGLESCSIKLSSVLSDNFGKSGRHILDGLIKGENIDRIIEEIPSKRVKNNEDKIRAAIRTGLDETQIFLIQSHLNTIDSLTKKLDEIDSEIKDKISGRKKDLQIAMSVPGIGFTAAATILAEIGNYRDFSTSDKLASWCGIVPNVYQSADKLITGSITKQGSKHIRWMLVQVAQAALKKRESRFRRFFLRIKARKGHNVAVVALARKILCILYHLLMNQEMYQEDGVTKSRQSKIDWSSARIDKMSLQSMIEIIAKAGYEVKKIKGQGG

SEQ ID NO: 232052 - protein, 459 aa, unidentified
MPSKAQTKTSVTPLAPVLNPHAAGIDVGATSIYVAVPADQHSEPVRCFGTFTQDLLALAYWLKECEIRTVAMEATGVYWIPLFQILEERGLEVCLVNARHAKNVPGRKSDVADCQWLQHLHAVGLLRGSFHPPQAVRAIRALLRHRDSLVKMAASHVQHMQKALTQMNLQLHHVISDITGQTGLAILDAVLAGERDPEVLAQLRHPGIKASQETIVRALQGDWRLEHLFTLRQALDAYRYYQHLLAECDAEMERQLGGFESQIAPDPAAEHPRKRTIRGNQPRFASLDLAAELHRILGVDLTRVPGVDTLTTYTLFTEVGSDLSPFPSGNHFASWLGLCPDNRVSGGKVLSVRTRKVKSRAARALRLAAYALSRSHSALGDYYRRMRTRLGAPKAITAAAHKLARIIYHLLTTGQEYDESVFAQNEERYRQRRSRWLEREAAALGYSLMPWQPVVQSVS

SEQ ID NO: 232053 - protein, 415 aa, unidentified
MEATVERCAGLDIHQASVVACVLVGPLGCKPRKEVRSFGTSTRELEALCAWLEGLGVTHVGMESTGVYWKPVHAVLEGGFELIVGNAHHIKAVPGRKTDVKDAEWLADLVRHGLIKPSFVPPPPIRERRDLVRLRRSLAEARSTERNRTLKLLETANIKLASVASEVFGVSGMAMLRALVEGEAAPAEMAELARGKLRSKRERLTHALEGRLTEHHRYVLAFHLRRLAAIEEDLRALDARIEAKAEPFQAQRRLLQQIPGVDALVAVTIIAEVGVDMSVFGNAKRLAAWAGMCPGNHQSAGKRRSGTTRRGNVHLKTALVTAAVCGSRRKGSYYKDKYHRLKARRGRLRAAVAIAHKILVAAYHMLAKGVPFRELGEAFLDQQARQRNVRHLLSRLTHLGYDVLLKPRAVEAASP

SEQ ID NO: 232054 - protein, 355 aa, unidentified
MAPLSNQQFTAYVGIDWADTKHDICLQAAGDIRREFDCIPHQVARIDEWAKSLQRRFGGPIAVALELAKGPIVAALQKYDFFTLFPINPSTLAKYREAFKPSRAKDDPTDAELALDLLLRHPERFAPLRPQSAAMRSLVSLVERRRDLVGDQNRLTNRLCDTLKQYYPQALEWFDDRGTVLFCDFLTRWPTFLAARRARSTTLEVFFHAHNCRHANLIEARLESIRAATPLTEDPGIVAPCRLYVLALVEQLRTVLTAIDRFDREIATVAGTLPDYTLFQGLPGAGPQLAPRLLAAFGEQRDRFHGTDELQKYSGIAPVTERSGKKSWVHWRWQCPKFLRQTFVEWAGQYASGCR

SEQ ID NO: 232055 - protein, 451 aa, unidentified
MARPKRSRPMRDISPTHPNAAAIDIGAKMHVAAVPPDRDADPVRTFGTFTGDLHRMADWFESCGVRTVAMESTGVYWIPAFEVLDQRGFEVVLVNARDAKHVPGRKTDVSDAQWLRQLHEYGLLRASFRPKGELATLRAYLRQRERLLDYAASHIQHMQKSLMQMNVQLHHIVSDITGATGMRIIRSIVAGERDPAALAAHRDRRCHASAEEISAALAGNWREEHIFALGQALDLYDLYQAKVAESDVRIEQVLARLRTASERPACRLPPARHRDNSANAPAFDARAILYSVLGVDLTQIHGLGPSLVLKLVGECGTDLSPWPDAKHFTSWLCLAPSNKISGGRVLSSRTRRSGSRAAALLRLAAVTVGRTQTALGAFYRRLSARIGKAKAVTATARKIAGLFYNAVRHGMVYADPGTSYYEQRYKARVLANLRRRATSLGFVLQEAPSSA

SEQ ID NO: 232056 - protein, 346 aa, unidentified
MHKASGRSWLVFFSELNIMFYIGIDVSKAKLDCSLLLEVERLKRKSKAVANSKSGVSDLLDWAAKHGALPAELHAVMEGTGVYHEQAALALCDAGVTVSIVNPAQARDFAKGLAVRTKTDGVDSLVLARYGALLKPAAWTPPSREARALQALLSRREAIAQDLRREQNRQEKADATDTPELIQQFLADSIAFLQKQLDKLQQDIDDHIDRHPDLKEDLALLTSIPAVGPQVGSNLLSVMHSHRFDSAEQLAAYLGLVPVERQSGTSVLGRARLSKAGPARVRGVLYMAAIVATRHNPHVKAVYARLLAKGKAKMSALGAAMRKLVHLCFGVLKTRTPYQADYAKPA

SEQ ID NO: 232057 - protein, 365 aa, unidentified
MNKYIWVGLDVHLDSITSAILDGDAQEPEVITLSGDLMRVRRLFRRLAKRGPVRACYEASGSGFVLQRVLSRDGFHCEVIAPSLIPRKPGDRRKTDRLDAVMLARLYRSGHLTPVHIPTEDQEALRRLLRLRYTYQVYSKATKLRIGGMLRNHGFVYREGKSYWTKTHRKWLTKLRLELEGPLQTALATELEHLEYIDTQRDALDAELERFAHAHPYRGKVEALCCLRGVKTLTALTLLCEVDDIRRFRSPRSLMAYFGLVPSERSSGDRERRGPITKAGNVHARRLLIEAAWNNHHRSGADLILKRRRQGQPPDVVAIAMKAQHRLYRKFWRLDERKHRHVAITAVARELTGFVWAILKAVPQN

SEQ ID NO: 232058 - protein, 412 aa, unidentified
MEVVQDRCAFLDVHRDTVMACARTPDPGGGRREEVIEFGTTTSQLLKLTEWLVERDIALVGMEATGIYWKPVHWVLEDEIDQVWVINARHMRNVPGRKTDVNDAIWGASLLEHGLVRPSFIPERPVREMRDLTRYRKSVIEERGRESQRLHKVLEDAGIKLASFTSKVLTKSGREMIEALIEGQHDPTVLAAMAKGRMRSKIPDLQDALAGRFNEHHGRLCRAMLDRIDHANQIIDELTEQIETLLDPHEAAVHLLCGIPGVSTRTAQVILAEIGTDMSRFPTSGHLASWAGMCPGNNESAGKHRTGRTRHGSKWLRIALVEAGQAAARSKDTYLSAHYHRIRGRRAPRKAAVAVGHSILVICWHLLSTGEVYTDLGGDYFDKRRNNASRQRKLVAQLEAMGLDVTITPTAA

SEQ ID NO: 232059 - protein, 414 aa, unidentified
MDVVHPRCAGVDVSKRDAKVCVRIAGTGRARAKSTVTTWGAVTNQVLALREHLIAEAVTLVVMEATSDYWKPFYYLLEDGPFEVMLVNARHVKNLPGRKTDVSDASWLAQLGAHGLVRGSFVPPEPVRQLRDLTRTRTAITRERAREIQRLEKLLEDAGIKLSSVASDITGVSGRAMLGALIAGERDPAQLAELAKRRLRSKIPELTEALTGRFGDHHAFLAQLHLDLIDQHTTAIDELTARIEVVIEPFRGARDLLVSIPGISTGVADVIVAETGADMARFPSAGHLASWAGTCPGSNESAGRIKSTKTRPGNPYLKGALGIAAMSAARSNGTYLSAKYRRIAARRGPMKAIVAVEHAMLIAIWNMLSTGAFYSDPGHDFYARLNPDKAKSRAIDQLRKMGYAVTLNPLAATG

SEQ ID NO: 232060 - protein, 465 aa, unidentified
MAKTQKSTSKSRSKRKNRAPLKPRDWTLGLQVVHPKAAGVDVGNAEHWVAVPPHMDRQPVRPFGCFTADLEAMADWLQQLGIETVAMQSTGVYWVPLRDILSARGIRVFLVNARDTKNLPGRKTDIQECQWLLKLHVYGLLRNSFRPKEEILRMRTYWRQRQQHTEDAARSIQHMQKALTQMNVQLANVISDISGATGQAIIGAILEGNRDARQLAKMRDPGVKASEEEIVKSLQGNWREELLFVLKQEWESYRGFQKKIEECDAELKKVYQSMESKADPQKLPPVPRGKRARGNVPKCFDLRSEMYRVTGVDLTGIDGINVLTAQTLLSEVGPDMEAFESEGHFVSFLNLSPRDKVSGGKVVGREKRKQANRAGRALQFASMSLERSNSYLGAQYRRFRGRLGAPKAQKAMGAKLACVTYRMLKFGKAYVDKGRHTYELKYRQQQVRMLQKKAAALGLQVVEAA

SEQ ID NO: 232061 - protein, 355 aa, unidentified
MGGCPTRPGSLKTVGELGTPPVVPSNPNSRLGRKMRSSIRQGRVAMDSIIVGIDVSKDRLDIAVRPSGEVFAIERNAAGLEGLVTRLREFSPHIVALEATGGFETIAAAALAAAGLPVVVVNPAQIRAFAQAIGQRAKSDPIDAGVIAHFAEATKPERRPLPDEATRLLADLVARRRQIIEMIGAERQREMRVTVPHLHKSIVRLLKALEKELTSVDTDIDDAVRGSPAWREKENLLASVPGVGPIIARTLIAELPELGRLGRKQIAALAGLAPFTRQSGQWRGRSFVAGGRTTVRTALFMGAMVAKQHNPVLKAFFDRLVAAGKPKKVAIIAVARKLLTILNAILRDHRPWQTA

SEQ ID NO: 232062 - protein, 338 aa, unidentified
MPMYCGIDLHSNNNFVAIQDGERRDIVCRRLRNNLETVLSFLEPYREELEAIAVESTFNWYWLVDGLMNAGYDVRLVNTTKASKYSDMKFTDDRHDARWIAHLLALGILPEGYIMPPDERGLRDLLRRRSFLVKKRTSLYLSIKTIFTRSTGNRVVIQDIQHWDSETVLGFFDDPHVAESIIVMLPVVRVITAQVKEIEKIVLTEGKIRDEFQLLLTVPGIGYILALTIMCETGDISRFAKVGNYGSYCRCVMSEHTSNSKRKGKGNRKNGNKYLSWAYSEVAHHATRYEPGAKRYFERKKLRCHQMVAARALANKMARACYYVLRDQVPFDPSRTFC

SEQ ID NO: 232063 - protein, 338 aa, unidentified
MKVYAGIDLHSSNNYVGIINDQDQRVYQKRLPNQVEHILEALEPFKESMEGVVVESTYNWYWLVDGLQAHGYKLHLANPSAIKQYEGLKHTDDKWDSFWLAHMLRLNILPEGYIYPKEERPVRDILRRRLLFVKHRTAHILSLQSMINRNRGTGMSVRAIKRLDEGDAEILFDQPHLVLAAKSNIAVIHFLKERIKTIEKAVKTHIKLRDEFKCLLTIPGIGDILALTIMLEVGDINRFPTVGDYSSYCRCVKSERLSNGKKKDENNRKNGNRYLSWAYVEAANFAIRFCPYSQAFYQRKMAKTNRIVAIKALSNKLARASYYIMRDQVPYDPEKLFR

SEQ ID NO: 232064 - protein, 344 aa, unidentified
MKQCNVKTKICVLGIDLAKQSFQLHGVDENEEPVLKKSLSRQKLMGFIANLSPCLIGLEACGGAHHWVRVFTKMGHTVRIMAPQFVKPYVKSNKNDAVDAEAICEAVARPTMRFVPAKSIEQQDLQSIHRIRSQSVAKRTAQVNQLRGLLMEYGIVLPKGISHVRKRIPDILEDAENSLTPLFRALLNDIYSEIIHSDKRIKILEDKLALLSKHNEDCQRLLTIPGIGSLTATALVSAIGDVSVFNSGRELAAWLGLVPRQHSTGGKPTLMGISKRGDPYLRMLLIHGGRAVVRVTNNYHDKRNKWIQELEQRRGKNITAVAVANKNARIAWALLSKQENYQAV

SEQ ID NO: 232065 - protein, 385 aa, unidentified
MPQQNDLSRSLVILEQDATLISVIEMGQSSWLVAGIVPGVERSPLKKLAADESALLKLLYRWREEAEHAGHRIKRIAVAFEVGRDGFWLARWLRARGIEAHVIHASSVAVSREHRRAKTDRLDTELLKRAFLGWLRGERDHCKMVAIPTIKDEDAKRPNRERESLVGEQSRIINRMKATLIRLGIRGFNPKLKKAGERLDSVRTPEGEPIPLNTLAELRRDMERRRLVNDQIRQIEDARLERLEQAPIDGPHAMVRLLARVIGVGIETADMLVQEALSRNMRDRRAVARYAGLTGSPDESGQKRREKGLARSGNARVRRGMIQLAWRFLMFQKDSALAQWFRARTRNARGTRKTMIVALARKLLIALWRLVREGVVPDGVVLRQV

SEQ ID NO: 232066 - protein, 337 aa, unidentified
MSKKSNEVLPVDYFLGCDVAKRKLDVALINKQGIVLWNDTIANEGTAIAEFWLTLTGALAGESVAGVVESTGTYHQAFAAMSYSLGVPCLVYNPLITKQGIKSSVRGKKTDKTDAIIIARMGLRGEGRLYSPEPYMATRHYARSCQKLSVLNSSFSQYKNHFTELLDGELTDDAKELLKGIQTAIKEARTQIYKDMAASAKGSLFTRLQTIPGVGPFVANSIIGEIQTMERFTNAHSLTAYAGLDPKIFKSGESLNRTGRLTKRGSAYLRRSAFIAANVAKRCDPKFKALYDKKRAEGKPYTVATCVVARKLLSVVRAVWLSGKDYDISQWTDENKT

SEQ ID NO: 232067 - protein, 408 aa, unidentified
MGRAAEVMAPSSSTRTDGGCPVAQVNDLSRSLTAFDPISTLVVVVEMSKASWLVSGVVPGIERQPLKKLEPDATALLRLIERWRNEAMRTGRPISRIALAYEAGRDGFWLARWLITRGIEAHVIHSASVAVSRERKRAKTDRLDAAMLMRVFLGWLRGERGHCGMVVIPTMEEEAARRPSRERESLVNERSRITNRMKSALARLGIRGFKPHLRKAPERLASLRTAEGTGLPANVIEEFRRDMARLALVREQISSIEKTRAERLERAPDRGPHAMVRLLARVIGIGIETADMLVREILSRKLRDRRAVARYAGLTGSPDESGLKRREKGLAKAGNARVRRGLIQLAWRFLMFQKDSALARWYRTRTEGPSGARKTTMIVALARKLLIALWRLVTTGEVPDGVELRPAA

SEQ ID NO: 232068 - protein, 341 aa, unidentified
MKRYFVGLDVSKDATAVCLRDDRGNILMSFKKPTDPDVLTRALGAEMEHIVCVVLETGRMANWLYGELSQRGLPMVCIDARQAHAVLSQMHNKTDENDAAMLSELARTGFYKKIEVKSRLAQERRALLRAREVATKMRMNAENTIRGLLASFGIRLPKHLKTYEQRVQKVLEGQAVLAGVIEPLLKLRTEALRQTAVLTKEMTRHSRDDEACRRLMTIPGVGAVSAVTFVATIDTPDRFKRSRSVGAYIGLTSRRYQSGDIDYGGRISKRGDRMLRTVLYEAANSLLCRVKSGPGQALKDWATALKKRTSHKKAVVALARKLAVIMHAIWKDGTEFEMKEA

SEQ ID NO: 232069 - protein, 375 aa, unidentified
MSKHSEAFVAFDSSKLRNAVAIADGGREGEVRFLGEIDSNMAAITQLVRKLEVNYERITFCYEAGPTGYELQRHIKALGHECLVVAPSLIPKKPGDRVKTNRRDAMSLVKLLRAGELTAVWVPDRRHEAMRDLTRARETAVIDLRAKRQQVSAFLLRQGRWYPAGKKTWTKVHMEWLAQQKFEQPERRMVFEEMIFAIRQAQERVARLEQAIRAAVPDWSLAKMVTAFMALRGIDLVSAADLLAELGDLSRFPTAPEVMGYVGMGCSESSTGDTIKRGPITKSGNRRARRTLVECAWSYQHPPRIGVAKQQKVAAAPPKVREIAWKAQSRLNRRYRALIKRGKRKNVAITAVARELAGFVWAVAREVASAERAAK

SEQ ID NO: 232070 - protein, 371 aa, unidentified
MKKKVQFIGLDVHKKSITVAIADEERDGEVRLYGTISNSKLALGKLVRKLQSSGCHLEFVYEAGPCGYEIYRYFKQHNLSCTVIAPSMTPKKSGDKVKTDKRDAITLARLHRAGELTAVYVPEAEDEAMRDLTRTREDMMKTRKKIKAQLGAFLLRQGHHYTGGQNWTKAHLRWLAEQRMEHPAQQIAFQEYVDTISELTRRIERIDEQTRLLLKDWKLKPVVEALQSLKGVSMVAAVSIVAELGDICRFDNPKQLMAFLGLTPSEYSSGETVKRGRITKSGNTHVRRMLVECSWAYRFQARVSKDLRKRQQDLDPSINDISWKAQIRLSQRYKKLIAKGKPVNKTLIAVARELVGFIWAITQQVAVLQTA

SEQ ID NO: 232071 - protein, 320 aa, unidentified
MLSFCGIDVSKDRLDVMVLPDEYSSSVPNDPAGWAILVEQLRGFSITAIGIEASGGYERGAVRSLQAAGMPVRQVNPFKLRQFAKASGVLAKNDPLDARMIASFVGIMPTRPAQRTTPAAEQLVEMLAVRRQLSAEKIAAENASRLLEDPMLQRLCRRRIARLAADIELLDKRLVEIVATDATLAHRYRLLTSMPGVGPVLACTLIALLPELGGMSRKQVAALVGVAPYAFESGTLKGRRCIWGGRANVRQVLYMAAMSASNWNPVLKLFHDRLKGAGKLPKVVIVAVMRKMITTLNAMVRDDIAWADRLSGRHSVTTAR

SEQ ID NO: 232072 - protein, 344 aa, unidentified
MKIVGCDFHPSFQQIAILDTVSGEIEERRLVHKDGAAEQFYGALEAPALIGMEAVGNSLWFEQLVTRLGHELWIGDAAQIRASYVRRQKTDRRDAGHILRLLVEKRFPRIWVPSEAERDRRQLLLHRHKLVQIRTRIKTELQHLAMNQGMQKKRRLWGVRGRADFKNLSLGGWTAQRREDLLSLLSLVQGQVDKLDEAVKEMAAGDAQAQLLMTQPGVGPVTSLAFVLTIGDVKRFKRSKQVASYLGLIPSEHSSGSKRRLGAISKQGNVFLRTLLVEAAQSACRYDEQFRREYGHRCHHKPTGVAKVAAARKLAVRLYWMLRTQTPYRPAVHNGGSPSHPVVG

SEQ ID NO: 232073 - protein, 366 aa, unidentified
MENDSIVWVGMDTDAKRNQVAVYRGWEMEPAAEWEAGMDGRGIRKLIDVLKRETGEVRCVYEAGPCGYPLARKLREAGIRCDVIAPSLTPRKPGDRVKTNRRDARNLARLYRAGELTVIGIPNESQEAVRDLTRAREDVREDLTRRQHRLSRFLQRHGHSYGDGDRWTLKHWAWIRKIAFEDANLQMVLEESIRAVEQSQEQLKTYGARVEEVARQPEYAKKVARYEVLRGIKTITAMTVLAEATDLRRYATAPQFMGSTGLVPSEHSTGEHERRGKITKTGNAHLRRVLVEAAWHYRHRSIAGRSVKKRRQGQPASVVMIAERADQRLCRKFHKLVDRYNKKPAIAAVAVARELAGFIWAIGQQE

SEQ ID NO: 232074 - protein, 351 aa, unidentified
MSQTPKTVGIDIGKNSFHVVGHDERGAIVLRQKWSRGQVEARFANMPPCLVGMEACVGAHHLSRKLNSLGHDARLMPAKYVRPYSKGQKNDFRDAEAIAEAVQRPTMKFVATKTADQLDLQALHRVRERLVSQRTGVINQIRSFLLERGIAVRQGLRFLRSELPRLLTTPPDVLSPRMVRIVEDLAGDWRRLDERVERLSDEIEAIARQDAGCERLMSVPGVGPIISSAMVAAIGAGDVFNKGRDFAAWLGLVPKQISTGDRTILGKISRRGNRYLRVLFVQAAWVVLIKPKSWERHGLKPWIEAAKKRLHHNVLAIALANKLARIAWSVLAHGRSFEAGSPKTLQGQAIM

SEQ ID NO: 232075 - protein, 382 aa, unidentified
MQTITLYLGLDVHKDSITIAIAEPGSKGEIRVFGTITNDIDRLDKALARIRKAHPGAILETAYEAGPCGFVIARRLKQLDVPCLVAAPSLIPKQPGSPFKTDKRDARAIARLLRAGELTAVYVPEATDEAIRDLCRARTDAVDDQRRCRHRLKAFLLRHGHRYQGKANWSQPHMRYLRELVLPHPAMKAILEEYLQGIDAAHNRVERIEASMLALLETWRLKPAVKALMAFRGFQLVAAMITVSELGDIHRFEHPRQLMTYLGLVPTEFSSGPRQRLGAISRCGNGHQRWLLTECAEHYAMPPKVSKELSRRQEGQPESVRALSWKAQNRLHLRFIKLLGRRLQRNKAKVAIARELCGFIWALLRTLDCYKQAPPSPQPATS

SEQ ID NO: 232076 - protein, 401 aa, unidentified
MIGIDPHKGSHTASAIDQAETALGELRVRSGADQLGRLLGWAARWPERIWAVEGASGLGYLLAQQLVAAGEQVADVQPKLAARVRLLATGATNKNDPNDARSVAIAALRSPAVRKVGAENHAAVMRVWARRHRDLGSARTQVACRLHAVLCALVPGGFAGEISAARAAGLLDELQPDGAVAAARCDLARQFAADLRRIDEQMRDTRKRLAAAVTASRTTTTQIFGVGPVVAAIVIGEAGHITRFASRDHFAACNGTAPVEVSSGPRKIYRLSRRGNRRINHAIHMAAVTQIRHRHTDGRAYFERKLAEGKTRKEALRSLKRRISDALFARLQADARQAAGTVSAGPGGQPGSDSVASAAGSHPKHRPPARSPDREDKITRDEKNRQDLLTTKRLPSALFMS

SEQ ID NO: 232077 - protein, 315 aa, unidentified
MKENGKEIFIGIDVSKSKLDAGVRPTWQKVTFPNNDEGISLMMGFIEPFSPTLVVLEATGGLEVPMVIVLAARGIPVVVVNPRQVRDFAKATGRLAKTDSIDADVIAWFAEAIKPEIRLLKDEDAQRLDALTTRRRQIVDMLTAEKNRLSSAPRWTRKDIQAHIEWLSKCLAKINKELGDFIKKNPIWREKDKILRSVPGVGPVLSVTLLAELPELGKLNRKEVASLVGVAPFNRDSGLFKGKRTIWGGRGKIRSVLYMSAIAATRFNPVIKRFYQRLIAAGKLRKVALTACMRKLLVILNTMLKNHSTWKELPI

SEQ ID NO: 232078 - protein, 321 aa, unidentified
MDKYNEIFGVDISKDVFDVINSKGDYDQFSNDLNGFKKFTKKLTKQTLVVMEATGYYHYCLAQYLYLQGYLVSVVNPLSVKRFIQMKLSKIKTDKSDAKAICEYGSFNEVPLYTAKDESQAECLQLIRLIDIYLKQSTALKNKLHGEKTLGIPSKVVYQSLNRSLKSVKKEIRLLEDRLTELVKDHQQKQLTLLKTIPGMGTKTAIMLIVMTDGFNKFENSKQLCSYAGITPTIRHSGSSVRGKSRISKMGNQKMRNLLFLCSFSACKYNKGCSDLYQRIVSKGKSKKLALIAVSNKLLKQAFAIAKSGLPYDDNFVSVLK

SEQ ID NO: 232079 - protein, 340 aa, unidentified
MKLYGAIDLHSTNNVTVVIDERDRVVYQHRLANDLALILKELSVYRSELEGIVVESTYNWYWLVDGLMEQGYKVHLANTAAIQQYEGLKYTDDHSDARWLAHILRLGVLPEGYIYPRADRPVRDLLRKRSQVVRQRTTNLLSIQNLMARNTGSSLSANQIKGLDVQQVDELLPNGDLALAVKANLSVMCSADEQTEILERTVTQRVKLRPQFSFLKTVPGIGQILALTIMLETGDIRRFSSVGNFASYCRCVGSQKISNGKKKGKGNTKNGNKYLAWAFVEAANFAIRFNAKIKSFYQRKKAKTQGVVAIKAVAHKLCRACYYIMRDHVAFDVTKAFGQK

SEQ ID NO: 232080 - protein, 400 aa, unidentified
MLSIGIDVSKGKSTVCGMKPGGEIVYTPFEVQHTREGMSELVSLLRGSGEEVRVVLESTGSYHCPVVAALLENGIFVSVVNSLRMKRFCSQSIRRVKTDQIDAMQIALYGLAYWQELQPTRLPENTYRELQLLARQYYQMTSLLIKAKVDFNALCDQVLPGMQELMSDHAGRHKLSDFVLRYHHTAHILKMGETRFRKDYCKWAEKKGYRNCERMAALIFATAQNGIPVLPNAPSTQIVITEAIRVLHTVEASRDAILTQMQALAKTLPEYSLVREMPCIGDTLAPRLIAEIGDVRRFHSKRALIAYAGIDAPPYQSGKFCANNRHISKRGNRYLRKTGYEVMQSYVMHKPANDPIFTFIEKKRSEGKSGKLAMVAGLNKFLRVYYGKVTELYRSLPAIE

SEQ ID NO: 232081 - protein, 315 aa, unidentified
MECYVGLDVSLKQTSICVVSRTGSVVREGVVDSDPAAIAAFVRSKAPGAIRVGLETGPTSTWLWTELKQLGLPVICIDARHAKAVLKMQINKSDRNDAAGIARIMQTGWFKEVRVKDIDSHSVRALLASRALNVFTMRAEELIADRLELIAVVGPLLKARQAIEQQTDDLDRKVLNLARHDAQVRRFMTAPGVGPITALCFKATIDNPARFKRSRSVGAYVGLTTRRHASGEVDWSGRISKCGDAMLRTYLFEAANVLLTRVPKWSALKAWGMRLAKRNGLRKAKVAVARKLAVILHRMWVDGTEFNWSTKKAAA

SEQ ID NO: 232082 - protein, 306 aa, unidentified
MKEIGFTQMVSVGCGIDVHQSQVTASVRKSDTEVETREFEAYTSSLTSLREWCKSEGVTHIAMESTGVYWKPVFNILEEDFEIILVNARHVKNVPGHKTDKKDSRWLSKLLLSGLLKGSFIPPRDIRELRDLVRYRKKVVGQIASEKNRIIKVLEDANIKLSSVLSDVDGAVGTKVVNDLINGETSVDKLAQYYHGKQKVSKAEFRKALEGHITPHHQLMLSIHKESIADKDVQLKRLDVAIDKATEAYQLEIELLDTIPGVGRDGAVSIISEIGVDMSRFPNETHLSSWAGMSPGNCETGGKKKT

SEQ ID NO: 232083 - protein, 477 aa, unidentified
MRKFADVMKSSATTFPRQKMNNVKTVSAGKNNYEKSLDMVNAHAAGLDLHKETIWGCVAGGADSDKSVQTFGTCTAELRRLVKWLQDSEVESVAMESTGVYWIPVYGILEEKGLKPVLVNAREIKAVKGRPKTDRIDCMWICRLHSYGLLRGSFVPPANVAALKNLCDCREKIISESSRSIQRMQKSLQRMNCRLDNAVSNIVGDSGIRIIEAILRGERDPVKLAELSDKRVEKEKSEIARDLDGNFQTELLLVLGEWYEHYRFYNKRLGTINEKIFALLEKFPKKADRKDLPPKPLNYREDKMTFSVPMRPLFFEIFGADLTQLAGVGPSVVLSFLATVGPDVSAWPTENHFVSWLGLAPNPQISADYRKKGKTKRVKNLLACDLKTAGMTVQRTDSFLGAFHRRLKIRVGPAKAKNAAARKIAIILYRLVKCGKQAIKFSSEQYEQLYKKRKLENLTRQAKHLGFNLVAAEMAKV

SEQ ID NO: 232084 - protein, 343 aa, unidentified
MGEVSTIGLDIAKSIFQIHGVDADGAVVIRKRISRAKLLEFFATLPACLVGIEACPTAHHWSRRLQALGHTVKLMPPSYVKAYLKRSKNDANDAAAICEAVTRPSMRFVATKSEQQQSGLMLHRSRQLLVCQRTMLSNAIRGHMAELGIISAKGRNGTAELLKIIADEHDDRIPAAARFSLDVLARQYAVVRAMIVALEKRIHAWHRSCEESRRLEEIPGVGPIVATALVAEVGDWKEFTSGRSLAAWIGLVPRQHSTGGKERLGRISKQGNRHLRWLLVAGAMAVIRYARQHGTKRPWLARLMDRRPIKVAAVALANKIARMAWAMMVRGERFKEPRLLPAA

SEQ ID NO: 232085 - protein, 315 aa, unidentified
MSDVPCFLGIDVAKAQLDIALRPSGERWAVPNDASGVATLVDRAQALHPTLIVLEATGGLERAVTSALATAGLPVVVVNPRQVRDFARATGQLAKTDALDARALAHFADVIRPTPRPLPDAQTQELRALLGRRQPLIGMRTAEQNRLAGTSERLTKDIAAHITWLNAGIATLDDDLETMLRASPLWREHDDLLQSAKGIGPVCARTLLLELPELGTLTRQQIAALVGVAPLNCDSGTLRGRRTIWGGRAHVRTVLYMGTLVATRYNPQIKAFYERLLAAGKVKKVALTACMHKLLTILNAMLKHRTPWQPQEVQN

SEQ ID NO: 232086 - protein, 321 aa, unidentified
MDHFAGLDVSVKETSVCIVDDTGRIVREVKVPSEPEALLQVLRNPAYHFKRIGLEAGPLSQWLFSALAEAGLPVICVETRHIRAVLKAHINKTDRNDARGIAQMMRAGLYRPVHVKTLRSQKLRILLTHRKLLQSKAIAIENDLRATLRNFGLKVGAVGTVKLEARIKELIENLADLAVLVEPLLIVRRVLREQIAILHRRLLAIVRDDDVCRRLMTTPGVGPVVALTYRATVDVPARFRNSKAVGAVFGLTPSKYQSGEIDRMGSISKCGDAMMRTVLFEAAQAMLTRTIKWSWLKAWAMKIARHRGLKKAIVALRVGWP

SEQ ID NO: 232087 - protein, 329 aa, unidentified
MSVHQQGRETIAASRPSAGIDVSKAHLDAAWAERFEHVSNDADGWDALVAKFQADRVDVVVLEATGGYEKAAACALQAAGFAMVVLNPRQGREFAKAMGQLEKTDRVDAYSLRDFAAVIARHPKRERYIRELPDAQRAHLAGLVMRRRQLLNMRNEESNRLHTSHRVALKSVQAILKAIDKQLGAVDDDIDHHMQQHFKDIRTWLESVKGVADVTSSTLVGLLGELGRLPRRSIAKLVGVAPLARDSGPRKGTRAIWGGRAEVRAVLYMATVSAITHNPVIRQFHQQLIAKGKPNKVAMVACMRKLLTILNAMARDHATWDDSKHVKPA

SEQ ID NO: 232088 - protein, 414 aa, unidentified
MDTMYERCCGLDIHKKTIEACFRSGKKKTHMSFGTTSAELRKLTMWLVENDCQSVAMESTGSYWKPIFNILELSGTDMKIIVVNARHMKNVPGRKTDVNDAEWIAELLQYGLLRPSFIPDREQRELRELSRYRKSLVGERAREINRLQKMLEGGNIKLTSVVSEVTGYSSRRLLDRLLRNDEPMTEDVISGLVHTSLAGKSKELETALDGLLSELQKELLIKVLDHIDDMSRRIADLDDFCRKQMKKYEDALDKLDEIPGIARRTAETILIETGLDMSRFPTAKHFARWAGLAPGNNESAGKRSSGRTTKGNPTLKSTLIQSAKVAARKKNSFFKARYQKIAAKRGANRASVAVAHSMLIAIYHILKSGERFKDLGEDYYNQFNREKKKNYYLKKLTKLGVNLKEATLSIQTAT

SEQ ID NO: 232089 - protein, 454 aa, unidentified
MRKPQVVPDEDHEVVYERVAAVDVAKASGVVCLRTPDPARPGRFVNRIWDNVPATRAQIAGLGRELLRCQVQMVTLESTSDYWRVWHYVLESIGLAVQLVSASQAKNLKGRPKTDRLDAMWLARLTQWGMLRPSFVPPAAIRRVRDFTRARQDLVAERTRCLQRVEKLLEDAMIKITSVASDGMKAKSVVAMVAALAAGQRDPHALADLAKGPLRAKKDALAEALDGMFDSHHGVIARMLLGQVAFLDQQITQMEDQAIAALAEVQESWGVDASGQTGPGCGVTPGSPVLAAAHRLAEIPGLSLWLAIVIIAEVGLNMAAFPTPAHLISWMGLCRSAAQSGTRHGKGKPKKGNSYARAAAGQAAIGAARTATFLGERYRRIARRRGKAIAQAAVARSIMIIVWHLLADPQARYRDLGPDWHATRINRDKKIRNHLRGLQALGVTVTITEDEQVA

SEQ ID NO: 232090 - protein, 347 aa, unidentified
MKFYTNMHKFYCGIDLHARSMYLCILDQEGHTLVHRNMPTNGDRFLKAIAPYREDVVVAVECIFTWYWLADLCHREGITFVLGHALYMKAIHGGKAKNDKIDADKIARLLRSNMLPQAYVYPAAMRATRDLLRRRNHLVNKRAELLAHIQNTNSQYNLPAFGKSIARQSNRKGLSERFLDPCVQQSIELDMALIDTYDQRLTELELYIVRTAKGHDANTFYRLRSVPGIGKILALVILYEIQDIGRFEQVGHFLSYGRLVKCARESAGKRYGSSGAKIGNAHLRWAFGEAACLFLRNNPEGQKLHQRLVKKHGKAKALSILAQKLGRAVYFMLKRQQAFDMNKIIQR

SEQ ID NO: 232091 - protein, 354 aa, unidentified
MKLYVGLDVGLEETSLCIVDSEGLTVREVKVSTEPEAIRSAVEGYADRLERVGVEASSLGIWLYRELQPAGLPIIVVEARHMRVSLSTMRNKTDRNDARGIAQMMRLGWYRAVHVKNIEMQKMRSLLANRKLLKRKLIDLENHIRGTLRAYGLMVGAVGRGEYEGRVRELIEHSDPIFSMMIEAMLDVRRAIFEGYERLHKVLLQVVQHDAICRRLMTVPGVGPVAALSFKVGVDDPLRFARSRTVGAHFGLTPRRHQSGTSIDYEGRITKQGDVAVREALCEAAASLLLRVRKWSALRAWGLRIAKRSSMLCAIVAVARKLAGILHRMWVDETDFHVGFGAKVTQRLRLRPAQ

SEQ ID NO: 232092 - protein, 344 aa, unidentified
MNKNWFIGIDVSKKTLDASIFVAGEVINKFPHTQVRNEKAGFKDLLRWAKEQGVDTKDALFGLEFTGYYSDALEHFLTDKELSYTMLPTTVVKHYQRGTHDKNDKIDSAKIADYLFRFNGTECIKLRVLPSKAMQQLKALKSERKFLVQQRVACENRLQVAKSKSEESHLQKLIDLCKEEIGQVEKQIEDVVTSDEEIYTTFRLLTSIPGIGFVNAVNTIANTQNFTAFETARQYAKYVGVAPSEHSSGTSVHWRRRPSPHADLQAKADLSMAALHAIELSAEMRQLYERKLGNRPKDKDMQRKALNAVKFKLIREMFAVAKQAKLFEMRGLDKAQAETHSTGK

SEQ ID NO: 232093 - protein, 450 aa, unidentified
MAKAKRRKHRKLDRSLPEMRPNAGGIDVGATEVFVAVPADRDKDSVRSFPTFTQDLYELADWLKQCRVDTVAMESTGVYWIPLFQILEARGIEVHLVNAQHVHHVPGRKSDVLDCQWLQYLHSVGLLRASFRPEQAVCEIRSLMRHRESLVEMSCVHVQHMHKSLDQMNLQIHHVISDITGITGLAIVDAIVAGNSDPKELAKLRDHRIKASVETVTKSLVGHYRPEHIFTLKQSLTAYRHYQQLIADCDQEVQRRIQAFDNHNAGPSAPTEASSSAAPDPARFDLRTHLERIFGVDLTLIPGFECLRIQTLLSELGADLWKFQTPDAFCSWLNLCPKDGSSAGRRIRAPKLKTKNRAAQAFRFAAQSLHNNQSYLGDYYRSQRARYGAPKAIKNTAHKLARIFYHLVTTRQPYDETVFAKLEIRNQQRRFRKLESSAKHMGFSLVQIHA

SEQ ID NO: 232094 - protein, 384 aa, unidentified
MQMMIEGQSHFQPFGLSYWGFEDLNKGVGSMTASYEYHIGVDYHKSYSHLVVQDSSGKTLRSGRVKNDRQSLGGFLERYRENSHAVVEATRNWMVMYDWLDDICDDVVLAHPLKVKAIADAKIKTDKIDATVLAHLLRADLVPEAWAPSERSRDLRVALRERMFYVRLRTMTKNRIVTVFDRYPERTAQLKKLGDLFGKAGRVQLAQVNVSEIDRIQIDRGLAFIGDIDMRIKQSEATIRAMTKANANVKLLKTIPGIGEFFARLIDAEIDNISRFRHPKKLAAYAGLVPSTYSSGGKTFHGKIIKQGNKWLRWAFVEAVTPAIASDPQLRAQYEHLKIKGINKARVAIARKLLTIAFQILRDQRAYEPRGTATMEGATISRLS

SEQ ID NO: 232095 - protein, 403 aa, unidentified
MTVRPLVWVGIDVGKTSHHACAVDETGKVLWNQKVSNEQRAIEQLIARAHKGADEARWAIDLTSPMALMLITVLLGAEQSVVYVPGHVVNTMTGAFRGEGKTDAKDARVIAETARMRSDLSAVAMPDELVVELAQLTGYRTDVMADWVRGVNRLRSLLGSIFPGLEAAFDYSNRTPLILVAHLCTPAEIRAAGIKGVTAYLGDNGGWPTAIAKTAATAVAAAKQQPLALPGEAGTAALVKRLARKLLDLDHEIKDIDKTITERFRDHPYAHIIESLPGFGPGLGAEFVVVTGGDLASFATAGRLASYAGLVPVPRDSGRISGNLHRPKRYNRRLRRVFYMAALSSIRGDGPSRQFYDRKRGERLIHSQALLALARRLVDVLWALLRDGREFTPDKPTPATAVA

SEQ ID NO: 232096 - protein, 464 aa, unidentified
MWTLEPHDALWSGNAYSDVVPSEDFSIRVAADQSPGARLKGVNMEPEKIDYAAWIGLDWGSYKNALCLQSADSGPVERCTVEQKPEALHSWFMNLLARFDGRKVAIAIEQTRGAVIHFLLGFDSVHVFRIHPKSLKNYRDALHPSGAKDDPTDAELLLQFLRLHQDRIKPWIPDEPPIRLLLRLVEFRRKIVGKRVRLTNELTQLLKEYFPAALDCAGDLDKAMACDFLSKWPTLEKLQKSRPDTIRKFYQEHGSRRRDVIEERLKQIRSALPLTTDAPVIEPSVFMVQSIAPQLHSVIEAIAQFDQRIKEVFQKLPDAPIFSSFPGAGPALAPRLLAAMGTDRSRFSSSLEVAEYSGIAPVTERSGKSKWVHRRFACSRFVKQSFHEFAAESILYCGWARGYYDQKKTEGKHHHAAVRALAYRWIRIIYRCWKDRIPYDEDKYVKALRQRKPAWLESLPISES

SEQ ID NO: 232097 - protein, 366 aa, unidentified
MIVIGADTHKQTHTCSAVFAGTGQLAGELTAPARKPGFAEILRWGRALDEERIWAIEDCRHVSGSLERFLVAAGERVIRVPPKMMGESRKGERIRGKSDPIDALAIARAALKEGPETLPCAHLDERALEVKLLLDHREDLVKARSEDQQRLRWHLHDLSPELEIPAGALDRLVWLDRISRKLARSEQSARVRIARELLCVIRRRTRRAAELQREISVLVKAQAPVLVELPGCGALTAAKLLAETAGVQRFASDAKLARLAGVAPIPASSGKRQRHRLDRGGNRQLNCALHRIAVTQGRVHPPARDYLARKQAEGKSRMEALRCLKRHLARTVWQALRSAEDRGSNTPLSHLTNSSNLRPVVGLALT

SEQ ID NO: 232098 - protein, 321 aa, unidentified
MDPAKICVGIDVAKDWLDVAERPGDGAWRLRNDEPGIAALVEQLRQREPQVVVIEATGGLECPLAAALAAAHLPVVVVNPRQVRDFARATGRLAKTDAIDAQVLAQFGQAVEPPPRPLPDHATQELAALVMRRRQLVEMLTAEKNRLHLAARPVRRDIQQHIRWLERRLGDLDGALGQAVQSSPLWRDRDHVLQSTPGVGPVASATLLAHLPELGRLNHKEIAALVGVAPLNRDSGTLRGRRTVWGGRAHVRAVLYMATLVASRHNPTVKVFYERLVAAGKPKKVALTACMRKLLTVLNAMVRSHATWHITNPTLAQQDSC

SEQ ID NO: 232099 - protein, 348 aa, unidentified
MDDITTIGLDIAKNVFQLHGVDAQGQVVLRKGLRRANMIAYFTKLPPCLIGMEACSTAHHWARTLMELGHEVRLISPAYVKPFVKRHKNDAADAAAICEAIVRPSMRFVSIKSEEQQATLMLHSARELLISQRTALMNALRGHFAELGIVVAQGARNVGDLLLILERMGQGSNEKALPETMWLALQPLANALIGIEAEIAKLDKEILAIHRKDAVSLRLASIPGIGPVTASFLSASIPDPGLFEGGREFAAFLGLVPRQYSSGGKPRLGRISKMGNRHLRKLLVVGAHAALYSIKNGKTKSPLADWARALLAKKSFKLVAVALANKMARIAWAIMTRAGHYQPNLATQ

SEQ ID NO: 232100 - protein, 391 aa, unidentified
MNKVFRSAEYQNLLRKYPIVYSIDTHDNSCYGYMIDTSTGEVLDDCNIAGKISSLVKYVEKHHGAYKEKMIIIFEAGPLGFSPYRALTKAGYICRMIAPSSIPRPSKRQKTDRRDAIDNLHYFTAGSLRFVTVPDEDDEQAREWLRYRQELNHRITRQKQRILGFLKRNGSEYSETKTNWTKTHLKWLHSTTLPNWTRQLLDIELDHLNYYEVQLTRIDNVLDTFFESNAAYNQLSQVFQCVAGIGRIGAMTMVLEAGDLSRFHHPNALMNFFGLVPQKFASGTSDPALHITKAGNTYVRLALVTAARAYRDRRLLRSKKFIESQPLPLQDFINRLQDRLYTRYHDLKQKGKHGNKVKCAIARELCGFLWELITIVLPQVNQSFPALKKTA

SEQ ID NO: 232101 - protein, 357 aa, unidentified
METAYDGRQVVGMDLHRRRSVLVRMTGDGRRLGTARIANSPAELRAQIARAGKSPQVVLEATYGWYWAADTLAAAGAEVHLAHPLGVKAFTYRRVKNDERDAADLADLLRMGRLPEAWIAPPEVRELREITRYRQKLVHLRTSCKDQVHAVLAKLGVPVTCSDIFGTAGSAWLDGLGLPQPYAGKVTSLRQLTGELSAEITMLSEVIADLLAGDRGYQVIQQLPGIGPVLAAVIVAEIGEVTRFKNAGQLCSWAGLTPRHRESDTKVSRGHVTKQGSRMLRWALIEAIQRVRADTVTGAVKDAIIARRGKEARSIAKVAAARRLLTLVFYGMRDEQIRCLSRSLADPPVTQPPARAA

SEQ ID NO: 232102 - protein, 401 aa, unidentified
MRFAGIDVGAERHMVAIVGEQGEVLCRSSPFGEDASGYAHLFELLGPPGGCLLALEATGHYWRNLFVALLAKGYAVAVLNPLRTRRFAEEELQRTKTDAIDALGIARFAAQKRPPATQLPDIATEELRELSRLRDRLQEDFASRLRQLHRAVDLGFPEFTRHVRTLESQLANTILSRYPTAASFRGASVKKVGRIVYDGSHKIGEELARALIEAAANSVGSHHSEPYRLRIEYLCEDLRVLRRRLKDLARDIESKLDDHEVGKLLTTIDGVGPLTAACLIAELGDPARFRSAAAIASYVGVAPRLRQSGKKRFSGSPTIPFGNARLRKALWMVVLNAVRCNPWLRQYYGRLRAAGKPGKVAVIAAMRKLLAAVWSVAIHRRPFVPHLSPIPATADAVTNNV

SEQ ID NO: 232103 - protein, 356 aa, unidentified
MEYIAFDAHKRYTQVSVETVDGKRRYEGRIAHARGALQQFLTTCERGSPVALETVGNWYWIVDEIEAAGQVPQLVHARKAKLMLGMVNKTDKLDARGLNRLQRTGTLPTVWIPPGALRDQRDLPRTRMVLTRERTRLKNRIHATLAKYGLRCEDASDLFGRRGRRWLQTALPVLPPHSRYATECLLEQLEVVTAQILGFEQRLRTVFAPTPELQLLRTLPGVGWVLAVVIWLEIGDIARFPSAAHLAAYAGTTPRVHASGGRIRYGQLRGDINRYLKWAFIEAASTICLHRQVQPHRHVSRLYARIQQRKGHPKAVGAIARHLAEASYWILTKRESYREPAARPASSTEEPARGTP

SEQ ID NO: 232104 - protein, 412 aa, unidentified
MEVLYSRCAGLDVHKDAVVASVRLATGRDVSVEVRTFPTTTAGLLALSAWLAERGCTHAAMEATGVYWKPVWHILADGDLTLVLANAAHVKNVPGRKTDVADATWLAELLAHGLVRASFVPDAPTQALRALLRTRKQLVREQASHVQRLQKTLEDANIKLGSVLASIVGTSGRAILEALIAGETEPAVLAALAHRRIKAPREKLEEALRGRITAHHRFLLRLHLRQVDALDAAIGDIDREVEADLEPFRAAVRLLSSIPGVSTLGAEVMVAEIGTDMSRFPTAGHLLSWAGLCPRNDESAGKRRSTRLRKGAPWLKTTLVQCAWAATHQKASYLQAQFQRLRARRGPKKAICAVAASILAAAYHMLRDGTFYQDLGPDHFGHRGRSDRTARLVKQLTALGYIVQPPAPVAPA

SEQ ID NO: 232105 - protein, 367 aa, unidentified
MSSVASQAGLIHLGMDTSKNTIVVATLLPGEDSPVTDRIANEEAAIRRLVGRFADRSVLRAWYEAGPGGYELWRLLASMGVACQVVAPSLIPKGGSDKVKTDKRDSRRLARLGRAGELTPVRVPSPAEEAVRDLARARDAMLADRKRAQQRLTAVLMRHGRIWRGATYWTAAHRAWIAAQRYGEPALAAAIGYYRATLAVREAELAALEAELMPWAAREPLAGPVARLGCYRGIAELGALTLAAEVVDWRRFPAARAFMSYTGLVPAEYSSGERTRRGHITKAGSEPVRTALTEAAWSYRHAPAIGAGLRRRQAGAAPDTLARSWTAQRRLHDRYVHLVHHGGKAAPEAAVAVARELAGFVWAEMTA

SEQ ID NO: 232106 - protein, 454 aa, unidentified
MSKSTKKTKTGVKKITQFEIIRPQVAGIDVSDNDAMMVAYPISDTEVKVEAFECYTRDLHRISSTLKLHNIASVAMESTGVYWIPLFLLLQEDGFEVYLVNSKHTKNVTGRKDDEGDAEWIQKLHRCGLLSASFQPDNQTRALRSVMRHRSSLVRTRSAYLNRMQKALEQMNLKIHTVISDIDGKTGQTIIKAILAGERSAEKLADLRDRRIKASREELIKSLEGFWHDEHLFELEQCYLLYEYHNKMIKACDLKIEKILKQTIRSKNNGIMPKLGKLKRKDNNKNDFTFDATNYLYLLNRVDIASCDGISGISEITALTIYSETGDDLSRFKDDKHFVAWLGLAPNNKISGGKIISSHVPKKKHAAGQAFRMAAFGLCSKKSPLSDYYRRIRAKAGHAKALVALARKIAVIYYRMMTAKEAYNPNLLIEYQEKYKERKIKYLEKYLSKLKEAA

SEQ ID NO: 232107 - protein, 408 aa, unidentified
MAAVMIGVDPRKASHTAAAIGRAEEPLGDIQVRAAASQAEQLLAWAAAWPDRAWAVEGAGGLGHLLAQQLVTAGELVLDVQPKVAAPVRLLASGNTNKNDPNDARSVAVAALRSPVRRRVTAEDHTAVLKVWSKRYRDLGRTRTQVACRLHAVLADLVPGGFNREITAGQAASMLKRIRPSGPAARARRELAAQFLADLRRLDTQIRDTRSKLAAAVQASGTTLTEIFGIGPVIAAAILGTVGDPSRFGDRDRFASYNGTAPIEVSSGGRKIHRLSLRGNRRLNHAIHMAAVTQIRHAHSPGRAYFDRKIAEGKTGKEALRALKRQLSDAIYARLQADAARCGRGAPVEAEGPGGQSGNGSVSGAAGSHPGRRLFGQATPGPQPSLRPAATARRVVQATAFKTSRRSP

SEQ ID NO: 232108 - protein, 434 aa, unidentified
MTFDSAAVRATKGKIMKPFNEITHYAGFDWARDHHDVVIVDRQGQTVADLRLQHTLEGWQQFRDQVKQYPVLAVAIETNQGAAVDQLLQMDGAVYPVNPISAKSYRERKAPSGNKTDHLDAWSLAEALRLDGQHWKALQPLDPLTQQIQLLCRDEIALIEQRTALVNQLQQALCEYYPAALQAFDDWTQPYCWDFILQFPTPEKLAAAGRRRWEKFLHTQKLWRPQTAPQRLEIFQNAGKFCGSTPVISAKSLLAVSLARLLKALQLQLDQYRQQIQALFQKHPDHDLFGSLPGAAQTLGPRLLGEIGGPPQRFEDTQTLQCIAGTAPVSFQSGQIHRVRVRYQCNKILRHTVHLWSQCCLRVSPWAEVYYRQKRAEGKSHACALRCLGQRLLKILWKMLQTRQPYDADLHARHQKQHGSWVLALIKPEVKACE

SEQ ID NO: 232109 - protein, 344 aa, unidentified
MATLVGVDLHAREQSVATLDTTTGEQQDLRIRHDGDEVERFYAALQPPVTVAIESTGYAIWFHALMHRLGHTVVVGDAAKIRASVVRKTKTDRRDARHILTLLAENRFPAIWVPDPTTRDLRALIAHRMRLVRLRTMVRNGVHAIALNYRLALGSSLFTRRGLAALRALPLPRHTAQRRDESLELLSWLDAHTDELDAQIATAASADPEACRLMTHPGVGPLTALATILVLGPVSRFPSSKHVVGYVGLAPAIASSAGKHHLGGITKQGNRLLRYVLGQAGQIALRRDADLKQLYYRVLNRRGKARAKVAVARVLLVRLYIMRRDQIDYPEFRRRGSQPVAAAA

SEQ ID NO: 232110 - protein, 420 aa, unidentified
MEVAQDDQEIIARVAALDIGKAEVVCCVRVPGVGPRARRMQEVRTYTTMTRSLLAMSDWLTGLGVTRVVMEATGDYWRPPFYLLENNFETWLVNARDVKHLPGRPKTDRLDAVWLCKVAERQMLRPSFVPPPAFRELRDLTRYRVDLVSTRTAEKQRVEKLLEDALIMMSVVASDIFGVSGRDMMAALVAGERDPKVLAQMARGRMRAKTARLEEAFTGRFTDHHAFLLRTMLARIDGITADIDVVQDRIDEQIAPFAATVTRLDEIPGVGVTTAQAIIAEIGLDMTRFPTPAHLASWARFAPGISESAGRKKGNSGTGKGNRYLARALGEAAVGVRRTDTFLGERYRRLAHRRGKKKAIVAVGRSILMIVWHLLSDDEARFVDLGSAYYESRVNLNRRTRNHVRELQALGYKVILEPAA

SEQ ID NO: 232111 - protein, 317 aa, unidentified
MTQTSMTTAGIDTSKSKLDIALHGRAEQWQVANTLPGWRILTNKLTKAGVSRVGIEATGGYECGVVQHLRAAGFTVQVLQPVQVKAFGRMHLRRAKNDALDAAMIAACTAALDQVRDAPDPRLAELAEQLTFLEQVEEDIKRFKTRLEHTGEPRLRRMVLGEIARMTVRRLTQLRYIARQLRAHRDLAARLDLVLSIPGIGERTALAILIRMPELGRIRREEAAALAGLAPFDNDSGQQKGQRRIAGGRARLRRSLYAAALPAAFRWNRALIALYQRLTAAGKAHNAALIACARKLLIYANTVVQRGTPWTERPLGV

SEQ ID NO: 232112 - protein, 342 aa, unidentified
MNHVAIDLGSQMSQVCSRGPDGAILAERKHPTRRLGELLRTWPASRVILETSAEAFRIADAALASGHEVRVVPATLVKTLGVGARGIKTDERDARTLSQVSCRIDLPSVHIPTARSRELKSVCGSRQILLEVRTKLINNVRGWLRTQLWRVRSGATGTLPARVRAQAASRQESLPEHVERQLLAIEALTAQVKAADRQVQRLACGDALCRRLMTVPGVGPVTAVRFVAALDEVSRFPNAHAVQSYLGLTPGEDSSSQRQRRTGITKAGPSALRHTLIQAAWVAYCRHAREPMAMWASQIAARRGKCIAVVALARKLAGILFALWRDGTVYRPRLNAEPSAES

SEQ ID NO: 232113 - protein, 422 aa, unidentified
MSYCPVAGIDVSKQFSDMCILSPDNKIFAQEKIYHDETSINRANALLQKAERLFFSKPVIVMESTSHYHLILFQFFSEHGYDVIVVNPLQSNSMKDFSIRKRKTDRVDAFKLAMMYRTKTLRPSQIPQTATRALRQLCRHRAELLNDVSSYKNRLTALLDQTFPGYDKVFSDVGGVTSCAVLVRFPTPTILLVEEESELVEVIAAASKSGYSFAKKKAGLLISAAQKAQTLGIHSCADETLIVCTIQMLRTLSESVLQIETAIDNLMAQIKEMRNNVSLLQSIPGIGSHSAALLLGEIGDISLFKKPKQLAAYFGLDPTERQSGSFRGTKNKLSKRGSPYARAALHMGVVNSICKRGKDSAANPVLLSYYEKKCKNKPAKVAQAASMHKLVFIIFAVLRDQKPFELKTPEQHAVEQGFVKAA

SEQ ID NO: 232114 - protein, 362 aa, unidentified
MPDGIRWVGLDVHAHESTFAIFDQGTGELVTRRVFGRPHELLAWLRGVARPARMVYEAGPTGYGLARRARAEGIEIAVCAPSRTDRRPGDRVKTDKRDAIRLARLLAAGELSLVSVPSVEHEQLRDLVRCREDIRADLMRARHRLGKFLLRREIYYEGPGRTWTHKHRAWLAGLRFADRASQLTIADYLQAHDVLIARRDHIEAELDQLATHSPWTAAIGRLRCPRGIDTLSALGLCAEVGDFDRFDHPDQLSAYLGIVPSENTTSERRRQGAITKAGSTHARRLLIEASYHDRRQPAVGQSLEHRQRDQPPQIISIAWRAQRRLNARWRALKDTRKKPNGIVVVAIARELAGYCWEIALAD

SEQ ID NO: 232115 - protein, 375 aa, unidentified
MSDHSEAFVGLDSSKLRNAVAIAEGVRGSEVRFLGEFENSAAATTKLVKKLAAKYQRLTFCYEAGPTGYGLYRLIKNLGHECIVVAPSLIPKKPGDRVKTNRRDALNLAKLLRAGELTAVWVPDRGHEAMRDLTRARETAMMDLRSKRQQISAFLLRQGLHYSERKRTWTKTHMNWLASQKLEYAEQRLVFEEMMLAMRQAQERLERLEQAIRVAVPDWSLAAVVTALMAMRGIDLISAATFLAEIGDLSRFQHPSELMGYLGLVPSEDSTGDKIKRGPITKAGNRRARRMLVECAWSYQHPPRVGQEKQEKVAAAPRAVREIAWKAQCRLHGRYRALVRRGKLKTVAVTAVARELAGFIWAVSRAITIARAVAK

SEQ ID NO: 232116 - protein, 318 aa, unidentified
MFPVGIDVSKNTLDLCMLYDGIKGRIKTRNIQNNRHSVENILRWLRLQHCGPEDVHVVMEATGVYHEQLATELHDAGFRVSLANPHRSREFARGMGIMTKTDKVDAYMLACYAFLKKPHRWEPPAPEIRYLGALLRRRDVLLGDALREENRLEKYLSTDTPADIISSCRRMAQLLREEVSNIERQIKAHIKASPALRRDYTLLTSIKSVGPQLGMHMLVVLRSHNFVSAEQAAAFLGVVPIEKRSGTSVRRRPRMSKIGPPQLRAKLYMSALCGKIYNKRMRNIYDEMCLRGKPKMVAIGALMRKLVHWCYGVLMTKT

SEQ ID NO: 232117 - protein, 352 aa, unidentified
MTSIIYVGMDVHTTNYTLCCYSMEDDRFFAEVQVEPDAKNILKNLARIEKQQSRDCRIVCGYEAGCLGYSLYHQLHAHGIDCVILAPTTMMTKPGKRIKTDRRDARLISKCLAFHTYSPVYIPTEVDDAVKEYIRMRDDANSALTRVKQQIIAFCIRHGKIHDGKSYWTNKHLEWLSSLDLGNKILSEVLQEYLIRYYQLREQVDMYDMRINELAQAEPYRQKVEKLGCFRGIAAHTALSFCVEVGDFRRFATAQQFASYLGLVPGECSSGDKQQYTGITKAGNSHLRKLLVETAQVFGRSATKSGKSVALKERQAKCDSLTVAYADKANARLKKKYFKVTPHKYKIYFSRQ

SEQ ID NO: 232118 - protein, 326 aa, unidentified
MEHELHYIGIDTAKEKLDVDVLRPDGRHRTKKFANTAKGHDELVSWLKGHKIDHAHICIEATGTSMEPVAECLYDAGYIVSVINPALGKAFAQSEGLRNKTDTVDARMLAEFCRQKRPAAWEAPHPLERALRALVVRHQALTDMHTQELNRTETAREVQRPSIDAHLLWLEAELKRLEKQIKDLTDDDPDMTHRRNLLESIPGIGEKTSAVLLAYIGLKDRFAHARQFAAFAGLTPRRYESGSSVRGESRMSKAGHVSLRRALYMPAMVATSKTEWGRAFRDRLAANGKKGKVILGAMMRKLAQVAYGVLKSGVAFDASRHNPVAA

SEQ ID NO: 232119 - protein, 387 aa, unidentified
MPQPNDLGRSLVALDQDSTLIAVIEMGQASWLIAAIVPGLNRHPLKKIAADEEQLLQVLRRWKKEAETAGRMIKRTAVAYEAGRDGFWLARWLGARGIEAYVIHPSSVPVSREHRRAKTDRLDTELLKRAFLGWLRGEPDHCSMAAIPTLTEEDAKRPGRERESLVSERTRIVNRIKGALARLGIRNFRPMLRNASQRLETVRTPEGVALPPNTLAELRRDMARLSFIKQQIKEVETARLERLQRAPGEGANAMVQLLTRVVGVGVETADMLVHEVFSRNLRDRKAVARYAGLTGAPDESGKRRRERGLAKSGNARVRRGMLQIAWGFLVHQKDSALAAWYRTRTADARGTTRKTMIVALARKLLIALWRLATTGEVPSGLVLRAAA

SEQ ID NO: 232120 - protein, 381 aa, unidentified
MYYIGIDISKFKHDCAVIDDSGEIVTPSWSFTNDAKGFSQLKLLLNSLDTETGIGLESTGHYGMNLKMFLESNNFSFMEFNPLLINRFVKSKSLRKTKSDSIDCMMIAHYLMTVEYKPYPSSFYHTEKLKSLTRFRDSLIRLRSRQLVELTNILDKVFPEFKPFFGSRFSVTALYILSNYSSPEKIANMNSKSYEALRKLSRGRFSTVDFAKLKQLAKNTIGTTEDYLLLQMQIVLDIYRQLDSKVDETEVSIKECVSDMNPPMLSVPGIGIESAAVILAEFGDFSKFKNASQMLSFAGLEPGYFQSGTSETTGKMVKHGSSYLRYALMNCAQTVVNYEPTFAMFYSKKRAEGKPHRVALLKSCYVSSTHCKLKTLHMMPI

SEQ ID NO: 232121 - protein, 313 aa, unidentified
MKKTICGVDVSKAKLDVCIEPGHRLASFNNDTAGIAELATFCREHAVELVVMEASGGYERRAFVGLWEQGISCALTNPRNVRRYAEAMGILEKTDRIDCSVIARFAHAKNLAPTPLPSQAQQRLKTLVTRLKQVTGDLTVQKQRRSGLLDNPEMLASLDEVIALLKRQSRSLEGEIASMIDDDPLWAKLAEAWREVKGVAGRTVARLHAELPEIGLLSNKAAAKLVGLAPIANDSGKRKGKRSTRGGRADVRSILFLVAATAARYHRSLGEFRDRLRKAGKEKMVIRVALARKLLIILNAKARDARAQYANAT

SEQ ID NO: 232122 - protein, 345 aa, unidentified
MEITTIGLDLAKKVYQIHAINGAGEVVVRKTLRRVQVLRFFERLDPCLVGIEACGTSHYWAREISKLGHEVRLMPPAYVKPYVKRGKNDASDAEAICEAVSRPTMRYVAIKSAEQQAALAVHRTRDLLVKQRTQLVNMIRGLLAEFGIEIRRGITHALSLAERIATGDMPGIPALAAKMIASLAGQVLDLQARLRPIERELLAWHRANDVARRLATIPGVGTICATAFAASVTDPHQFRSGRQFAAWLGLTPLQHSSGGKERLGRISKMGDKYLRRLLVVGMTSLVRRAKYKPDAVDRWLAALLSRKPVRVVTVALANKAARVIWAIMARGGVYRAPQPTVAVVA

SEQ ID NO: 232123 - protein, 408 aa, unidentified
MNPLYVGIDVSSKSNVVYLMLPNGDKHSSFELKNSHDGSTQLVKRILSAMTSRSLDTVLIGLEATSVYGDNLVYFLREDASLTPFNRKIHVLNPKQVNKFKESYNDLPKNDYVDSFVIADCLRFGRINKEVYIGDYRYKALQNLTRARYYAVCNLVKEKQRFMNVLFKKYSTMTQEKVFSNTFSTTALAVYEEFESAEALANMDLQELTDFIMEKGKNRFPAPDSVAKAIQKAARSSYRLPKTVNDSVNQVLSISITSMKALESQIKEFDKAIAAQMELLPNVLISIPGIGPVFSAGIMAEIGDINRFGNQAQLAKYAGLAWKQHQSGGFEAQTTRLINSGNRFLKYYLCEAAFSLVRCDKEYSDFYHLKYQEVNRYQHKRALALTARKFVRLVFVLLKDNRLYRPAK

SEQ ID NO: 232124 - protein, 408 aa, unidentified
MWFVGDDWAEDHHDVELQDSSGRRLARARLPEGVAGIARLHELVAGAVGPEAESDQVSLGIETDRGPWVAALVAAGYRVFAINPRQVARYRERHGTSGAKSDAGDAHTLADMVRTDGHQLRPVAGDSPLVEGIKVIARAHQNLIWDRHRHVLRLRSALREFFPAALEAFPELTAPDALELLATAPDPARAARLSRSKIAAALKRARRRDVEVKAEAIQTVLRSAQLTQPAELTGAYAATVGSPVALIAALNAQIAALGKQVDAHFGRHPDAEIYRSQPGLGDLLGARVLGEFGDDPDRYDGARSRKNYAGSAPVTRASGKKTVVLARHVRNRRLADALHQQAFCALTASPGARAYYDSLRARGAGHHAALRQLSNRLVGILHGCLKTRTPYDENTAWAHHTQDQPIAA

SEQ ID NO: 232125 - protein, 396 aa, unidentified
MYYVGIDVSKHHHDATVIDATGRVVIAPFRFLNTRQGVATLLSRLRPLNPVCIAMEATGHYWLPLYEALTDRGYSVSIFNPFQIKAYRQIGLRKTKTDAVDSFWIADFLRIGRGQPMVVPTPLVRQMRELARFRFSLLQRQGNIRRRALTILDRVFPEYLTLFPRPFSPTSRALLRRAVTASSFAAWPLEDLAQTLSRASRGHFGLREAGKLQCLAQDSLGIRSLGPVAYLEMQLLLDQLALLDDQIATLDEELARLLQRTGTYLTTIPGLSTTLAATILGEIGDIHRFANLKQLVAYAGLDPTVHQSGQFQASHSRLSKRGSTYLRWALWMAASIARQHDPDLKALYQRKRSQRKHHNVAMAAVCHRLLARIYVVLKEQRPYKVRDSDTRHSPID

SEQ ID NO: 232126 - protein, 363 aa, unidentified
MGDDSTKTEVKVIGMDLGNRETYMCELAEDGTVVSTHSVTTTEASLRTYLKQFVSPASVCIAMETGSHSPWVSHLLLAEGFEVLVGNARKLRAIWSQEYKSDVRDAEMLARIARFDPAFLHPIRHRSRQAHLDLTRLKARDILVRARSSLANFVRGTIRTAGLALKSCSVPALPKHARLLLREIPALHPALDGVLATMDHLTQQVRQYDREIEPLSEERYPETAGLRRIKGVGPITALGYVLALECPERFAKSRDVGPYLGLVPRRDQSGQCDRELPISKAGNAYLRRLLVGCARYILGPFGEDCDLRRTGERLVTRGGRAAKKKAIVAVARKLAVLLHRLWETGETYDPHYNQRPKTQHRAA

SEQ ID NO: 232127 - protein, 355 aa, unidentified
MLYLGIDQHARQITISLRNDDGDVVEARQVSTHPEKIQAFFQQLTRDRLQTDDEFITVLEVCGFNDWLIRMLQDYRCHRVILIQPDDRKKRKTDRRDTAALSELLWVNRGRLLAHKPVRGLRQIDLAASTDQANRRLTTLRKEARQARTRLINKIRHILRRHNLQWQMPTKTFPTKPAIAWLKNLVLPEIDRLEMNHLLADLDHVQQRFQELEKVIGERCGASQEAVLLSSMPGVAHFTATALACRVGRVERFPRSHSLANYWGLTPGCRNSGENNQRLGSITKAGSSMARWLLAQVAHQALRKDARLREWFKQIKRRRGATIARVAVMRKLATIIWHMLKKRKTYAECREFATA

SEQ ID NO: 232128 - protein, 367 aa, unidentified
MSNVTITAKEFDTQIQWKVVGLDLAKHDLSLVAISEEGEVYRIERISYEDLLEKASNMSPTVFSLEPCNAMNWLCLQLKNFGHECRVISGLAVSNYVNSYFSGQKNDLNDAEALAFLALDNRVKTIRPKGQVEQDLLVIQAIREQLVKTCRSMLVCIKSIAQSLGVSIPKYLQSETRLEQFIEQLAEQSNQSSEILKRFLKLYVLQRRELNRLTKKLEEFSKTDEICMSLLDVPGIGAIAATRLRATLGSISRFKAPKNLVAYYGLVPRNRTTGHLPKMGRITKRGDRLTRTYLVLGANALLQKEKKGQLGKCPLQKWISKKRRQLTYGKLVVALAAKLLRIIWAMLTKEEAFNLKKAGLARSALTK

SEQ ID NO: 232129 - protein, 340 aa, unidentified
MNITTLGIDIAKSVFHLHGTNKQGKLELKKRLRREQLLTFMKNIPPCLVAMEACGGAHYWARKFQSYGHTVKLIAPQYVKPYVKTNKNDYNDAEAINEAVGRPTMRFVGIKALWQQDIQSLHRARSRLMQLRNTLSSHTRGLLMEYGIVVPRQIGQLRQKLPLILADADNELSTDMRALFAGLYEQLQNADRLISEKDKQILAIHRESELSQRLGEIEGIGPLTATAFISAVGDAKMFKRGRDCSAWLGLVPRQYSTGGKTILGSISKRGDRYLRTNLIHGARSVIAKASNKTDARSRWIQQLKSRVGMNKACVALANKNARILWAVMASGERYRASEQL

SEQ ID NO: 232130 - protein, 420 aa, unidentified
MDVLVERCAGIDIGKNEVVACVRAPAASGRGRRRQTRTFSSFTASLEAMTEWFVAEGVTQVVMEATGSYWKPVWYVLEDRAFAELKLVNAQHVKIVPGRKSDVLDAEWLAELLEHGLLRGSFVPPAAIRQLRDLTRYRKRLVQAHTSECQRIQKTLEDAGIKLDSVASDVLGVSGRAMLTALIAGERNPDVLADLAKGKLRQKIPALRQALHGRFSDHHSLLIGLSLDHADHLECAVSRLDQRGDALFAAHTGPDDVPFTQARDHVSTITGVGKRAAECIIAEIGVDMSRFPTPAHLASWAGVAPGNNITGGKRGSGKTTHGDVWLIDILTQCAWAASHTRDTYLSAQFWRLARRIGKKKAAVAVAHSILVICWHLLTQNADYTDLGGDYFTRRNPDRQRDRLIQQLHSMGYRVTLDKAA

SEQ ID NO: 232131 - protein, 430 aa, unidentified
MHNKNYISVGIDVGSAFSFMTIVAPDGSVIQKPFKITHNKPDSLEKAVSAIKKAEELHSLESRTFLESTGIYHFPLFCYLVDCGFNASIINPIITHSTKNGNIRKVKNDKIDSKGIAKLGLSKDIPVSQFPAKLVLELRSLTRKYYDLTDERSAHINKLKGDLHTVFPQYLDVFCDVTGKTSTMILRQYGTPDKILRGHKKTMIEKISKASRKGLSKAAERYEKLCAAANAAKTFGCQIDSIYFNIFLTLDLVEKLDSALDSILNRIRQLITFNKNEKFIQQIKLLNTIPGVGFLTAVTIMCEIGDFSAFRNPKQLFAYFGLDPEVNESGKFVGTQLHMSKRGSRIARRAIFAVALASIRTKRNGEGINPYLRKYYELKSGQKPKMVAIGAVMHKVCNIVFAVLRDEKAFELRSPEEHCKQYQRPALAAA

SEQ ID NO: 232132 - protein, 324 aa, unidentified
MDVSKKKLDFCVMFEGKVVHEEATANHQTAIMSLLRHLEEDYGITSDRMLVCAEHTGQYTFPLACACKSVECKLWLENAAEIKYSSGVQRGKNDKVDARRIAIYAGRFQDKVRYYERPTEDIERLKQLESERTLYVTDLAKYKGQMKDQKDYMPKALYERKMKRLQALMDDLEEAIQAITDEMDEVIASCPVLFRQRELLMSIDGVGRVVATNMIIATEAFTRFDDPRKFNCYAGVAPFSYSSGSSLHSKARVSHRADKVMKRLLHLAAVAVTHRIGGELKKYYERKVAEGKNKMSVINALRAKIVARMFAVIKRNEKYKPILS

SEQ ID NO: 232133 - protein, 421 aa, unidentified
MIGALYGCEIEKDRPTMHENIRTADKKERIRDLQESVPGEALKGRVEELLRKLKASGSWESPLGANESAFSIGIDIGDKKSRYCILDAQGGILAEEALSTTQAEFTAYFSSIPKARIAIEVGTHSPWISALLESHGHTVYVANPRKMESIHKNRRKNDKVDARTLARLVRADPELLYPIRHRGVEVREDLVVLRARGALVSARTSLINSMRGLVKSVGERLPKCSAESFHNSVTDAIPERLGPALRPMLEQIQSLTAKIKEYDKLVDALAAKKYPETEVLRQVKGVGALTSLAFVLTIENPDRFEKSRDVGPYLGLVPKQDDSGDSSPQLRITKTGDMMVRRLLVGSGHYILGPFGEDCDLRRHGLKMAARGGKNAKRRAVVAVARKLGVLLHRPWRTGEVYEPLHNERSTNPALAAAAKG

SEQ ID NO: 232134 - protein, 424 aa, unidentified
MRVVKTVELEEVPMQIVGALDVHRRQITFKTLEPASGESSRGRISPAAREPLRQWLERFDGLEGEFVLEGTTGWRFVVEEIERAGHVARLADPAETAARRGRKRRAKTDDADCDLQLRLLLAGELPEAWIPPAGILELRTRVRLRKTLIDQRTAWLQRLQAQLFHQGVPPGLKPRTAAGRQALATVELSSGGREAVELYLRMLDQLDRELVPIDRALRAFARRQPGCRALTGQLYGVGAVTATAILAELGDARRFCSSDDAVRHSGLDVTVWQSDRKRAAGHLSHQGPSLLRWALFEAAQCAARRSSPDHAYYLEVAKRIDHNRACLSVARKLCRRSHHILRGARRRRTRPKRPADSKARRRRRLTSHVRLPIIRPMPLRPAPAMLPPPAHSALAGLHRPSGRKPRGDNTPSIISSPDTIRAPR

SEQ ID NO: 232135 - protein, 309 aa, unidentified
MENIALIGIDLGKNSFHIHCQDRRGKAVYRKKFTRSKLIEFLATCPATTIAMEACGGSHFVARKLEELGHFPKLISPQFVRPFVKSNKNDFVDAEAICEAASRPSMRFVQPRTESQQAMRALHRVRESLVQDKVKTTNQMHAFLLEFGISVPRGSAVISRLSTILEDNNLPLYLSQLLLKLQQHHHYLVEQIKELESQLKRKLDEDEVGQRLLSIPCVGTLTASTISTEIGDGKQYASSRDFAAATGLVPRQYSTGGGQHCWASASEATRRYEPCWFSAPEYLYKNWNTSQAGWPTGSGSYCAGKVTLS

SEQ ID NO: 232136 - protein, 338 aa, unidentified
MKKFSGIDLHSDNSMVVVSDEEDRIVYQRRLANDLAGIVQALEPHREELIGVVVEATYNWYWLVDGLMEAGYCVHLANTAAIKKYEGLKYSGDAADAAYLAHLLRLGLLPEGYIYPREARAGRDLARKRMQLVRYRTAQILAIENILARQTGGRMRSNEIKRLTADGVQALGFSADVTLALQTNVVVMHTLQSQIMMLEKRLQERVHLHEDYALLTTVPGIGQTLATTIMLETGSIARFAKVGDFSSYCRCVDSLRESNGKKKGAGNAKNGNQYLAWAFVEAARFSLRYCPQAKRFYERKKRQRNSIVATKALAHKLARACYHMLREHKAFEVERCFA

SEQ ID NO: 232137 - protein, 369 aa, unidentified
MKRKVYVGVDLHKGQFTVYWLREGEEKGRFERYPTKLSGYEGFERKLQAEQEAGYAVEVAVETTGNARYFKNRVERLGIRVRVINTLKFKVVTESAKKTDKHDAATIAEFLAKDMVPEAWVCSEESEELRRLLKSRRSLVRTIVSIKNQIHGLLWGMGLESARRSLQSKKSRRKLLHVLEEQGLAGGAVEPLVEIIDRLEEEVKKLEGLIEERTKADRTVELLRTIPGTGLITAATVRAFVDDRGRFKGYKQLCSYAGLVPWVQNSHQRERYGRITKRGPEELRTALVQMVLGMVRNQKRTLGYRLIQRYRAMKQVKGSGKSIVATARKLAKVIYYMLKKNEPFDPGRMTDPELRKAAVELDVATMSVA

SEQ ID NO: 232138 - protein, 367 aa, unidentified
MLSSVASAAGLIHLGMDTSKNTIMVATLLPGEENPVTDRITNEEAAIRRLVGRFADRSVLRCCYEAGPGGYELFRLLASMGVACDVVAPSLIPKGGSDKVKTDRRDSRRLARLHRAGELTAVRVPSPAEEAVRDLVRARGAVLEDRKRAQQRLTAVLMRHGRIWRGASYWTAAHRAWIAAQRYGEPALAAAIGYYRATLAVREAELAALEAELAPWAGREPLAGPVARLGCYRGIAELGGLTLAAEVVDWRRFPAARAFMSYTGLVPSEYSSGERTRRGHITKAGSEPVRTALTEAAWSYRHAPAIGAGLRRRQAGATPETLARSWTAQRRLHARYTHLLHGGKAAPEAAVAVARELAGFVWAEMTA

SEQ ID NO: 232139 - protein, 326 aa, unidentified
MCLVNETGQAIFEGKAKSDPGDLSKLLRKHAPLAERIGFETGAMASWLWHELRRVELPVVCIDARHAHAALSVRMNKSDQNDARGLAELVRVGWYREVKVKSEESQKVRAILVARFRLVSMRRDIENQVRSLIKECGLLFPRAIGQQFRNQVGELLGEDHQLLNVIGPLLSIHEHICQQQSKFDDEVRRLAKSDETTRRLMTVPGVGVVTALTFRHTIDDPSRFRSASTVGAYLGLTPRRNQSGETDTSGKISRWGDRLLRTYLFEAATVLLYRTKKWSSLKAWGMKLAKRVGMKKAKVAIARKIAVILHCIWVDGTSFDWGHAPA

SEQ ID NO: 232140 - protein, 348 aa, unidentified
MRFYTKQHKFYCGIDLHARTMYLCILDQEGKILLHRDIKTDPDVFLKTIAPFREDIVVAVECIFTWYWLADLCGREAIPFVLGHALYMKAIHGGKAKNDKIDAYKIAALLRGGMMPMAYVYPSDMRSTRDLLRRRTHLARKRAELIAHIQNTNHQYNFPDMGRISRKCDRNKAGVSEHFTDPSVQKSIDLDVALIEHYDKLLNSLEQELSNIAKVHDADSYFRLRSIHGIGRILGLTILYEIHDINRFPSVQDFVSYCRLVKSAKESAGKIVGSSGKKIGNAHLKWAFSEAAVLFLRGNPEAIKYRAKLERKHGKAKSLTILAHKLARAVYNILKKKEVFQPKVFFAK

SEQ ID NO: 232141 - protein, 345 aa, unidentified
MKITTIGIDLAKNVFQVHSVDEHGKAVFNKALKREQMAGFFVNLPACLIGLEACGSAHHWARKLQAMGHTVRLMAPQFVKPYVKTNKNDAADAAAICEAVTRPSMRFVPIKNVEQQSVLALHRVRQGFVKARTAQGNQIRGLLAEFGLIVPQGIGHITERVPELIEDACNELPGAFRLLMDRLLEQLKELDRQVRELEAQIVVWHRQSDLSRKLEQIPGIGPITACALVASLGDAKNFKDGRQVAAWLGLVPRQHSSGGKQNLLGISKRGDTYLRTLLVHGARSVIYHAQNKGQGSAECAWVNGVVQRRNKNVAALALANKNARIVWALLAHDRCYEPGYTRESA

SEQ ID NO: 232142 - protein, 311 aa, unidentified
MQLTIGIDISKETVVAYRLPDNQSIQVANDRAGQKTLVRWIGKQNGSLVVFEATGAYHRCLEAALAANGTPFAKINPRQARRFAEATGRLAKTDRVDAIMLAKMGAILGLKADQPKSEVLYILRELLTARRALMKDKVAAKARLQTTRQTLLKNQIKARLRQIEIQIRQVDAAIAEKVQLDEALSNKLAILISIPGIAETTAFSMLIEMPELGTLEGKQAASLAGLAPMSRQSGKWQGKERIQGGRAFLRRAIYMPALVATRRNPGLKAKYDQLIRAGKSGKVAVTAIMRKLIVMANALLRDGRKWSELRP

SEQ ID NO: 232143 - protein, 402 aa, unidentified
MDVHKSFLVTCIASTDERGVTTYKSRRFSTFTKNLRLCADWLKGNNCRDVCMESTGKCWIPIYNILEHSCKIVLAHPKYVKAIRGKKTDKKDAKWIADIFKHDLVSGGFIPPADIRQLRDLVRYRWKLNNFIVGEKNRAQNCLTVSNYKLDDVFSDVFDKVATNITSYLLEHPNEPLPDVSNFRTRGMKATDAEIRAATDGNMCAEQAEKLRIIRSHMHDLNRCMANPESLIISTAEKYTSQLSLVMSVPGIQTFSAISVIAEIGVDMSVFPSSKHLCSWAGLTPQNNESAGKKKTTKISRAGAYIKPLLVQCALCAIRAKRNPEILNRYLSIKKRRGHKKAIIVIARMLLTAIYNILKKNKPYNAELYRKADVPLAHRSVAIEEAVFILQRQGYLITPCTF

SEQ ID NO: 232144 - protein, 355 aa, unidentified
MSVGLDVHARSVVGCAIDEDTGEVIRHRFGYDPAAVVEWVRSLPQPAAVTYEAGPTGFALARLFTAAGIECFVAAPSKLQRPVGDRVKTDARDAMHLARLLRLGEIVAVAVPTIEQETARDLVRAREDNRGELMAARHRLSKLLLRHGIIYDGKQAWTGAHDAWLRRQRFDHPGLQAAFDADYEAVQQVRARKDRLDAIIEQMAAASTYAPVVRRLGCLRGISTLTGFGLAVEIGNWERFTGSSIGAFVGLVPSEHSSGQSRSQGSITKTGNTHARRLLVEAAWHHRKPYRPGAVMQARWAAAPSLAASRGDDGNRRLHQKWQHFTARKKRPTIANVAIARELAGWCWSLAVMPD

SEQ ID NO: 232145 - protein, 344 aa, unidentified
MSGVITVGLDIAKHVFHAHGVDDQGRALFSKRISRGKLLDFFAAQPSCTVALEACGGAHHWARQLTQLGHEVRLIPPAYVKPFVKRQKNDAIDAEAICEAAQRPNMRFVAMKSEQQQAAGLVFRTRDLLVRQRTQLINAVRGHLTEYGWIAPKGPSHVAELAHLIEEKRMAGSLPEAARAMFRLMLDQLASLNGRIAVLDKEIARRAREDEVSRRLMTIPGIGPISATAIAALAPPVETFAKGRDFAAWLGLTPVQRSTGGKQKLGATSKMGERTLRRLLIIGSSAVVQQASKRGAAKGSWLEQMLARKPRMLVTVALANKMARIVWALLVKQETYRAPVAARA

SEQ ID NO: 232146 - protein, 317 aa, unidentified
MTAPSLCIGIDVAKGELVVAQWPDPAPWVVANDESGVRTLVDQLRALGPALVVLEATGGYERAAVAAVAAAGLPVVVANPRQVRDFARATGQLAKTDRIDAVLLALFAARVQPEPRPLPDAARQTLDGLLTRRRQVLDMLTAERNRLAQALPPIRRDIAQHIRWLERRLHDVDQDLDRTIQASPVWRAQENLLRTMPGIGPVVSRTLLGALPELGTLSRKQIAALVGVAPLARDSGTRAGKRLVWGGRAPVRAALYMAALVATRRNPAIGRFYQRLLRAGKPKKLALVACMRKLLTILNAMMRTNTPWQPLAAPECP

SEQ ID NO: 232147 - protein, 357 aa, unidentified
MEKLYLGVDLHKRSCWVTVLDADGHLVESRKLGTEKWELEEFFGKVAKPAALAVEATFNWYYFLNLVEPLGLELHLVHPWKTRAIASARIKHDKLDSRVLAELLRTGFLAEAWIAPRAVREQRQLLRYRVHTVQWATRAKNSIHGVLNRNGIRLPLGSPFGPRGREFLSEVELPETDRWEVSGQLVRLDLLRHQLGELDREIRKRSKASPVAQALEQIPGIGPFIASLLIAEIGDIWRFPTAKHLASYTGLVPSLYASGEHRWGGAITKQGSTVLRWALVQAAHRAALSPRFQDFYQRQRARHGAGKATVALARKLAVIAYYRWRQALHAAGPPKVEKVRECSWGSAWSDDRPLNSD

SEQ ID NO: 232148 - protein, 419 aa, unidentified
MTRKNNSKVIKIVHPICCGLDVHKESISACVIFPDDRGEEQYEIKEFGTFTDDLTRLREWLLVYACPVVAMESTGVYWRPVHNVLEDSVQVVLVNARDMKNVSGRKTDIGDSRWLAGLLRHGLLRSSFIPPQTVRQWRDLTRLRKKYVQSVGDYRKRTHKLFESANIKIDSVVSDLFGVTGRNLMQLLVADRKLTLADIQSCVRGKLRGKEKELFRSIQGFFTEHHRFILKTILETISMLEAQIETLDHQIRLAMRGYKPLLDRMKEAPGISDVSSCDILAEIGPTLDSFPTDTALVSWSGLCPGNNESAGKRKSGKSPVRKHHLKTIMLEVAWAAVKKKGSYFKDKYYRLKARRGAKKAIVAIAHRILLGIYHVIKDGATFRDLGEDYLMHRNKPQKVFHLRKQALALGFDLVPQAAQ

SEQ ID NO: 232149 - protein, 370 aa, unidentified
MQTVRSFVGMDVHKETISVSVAEDGRNGPVRFIGVIPNQPDDIAKMAKRLAKHGELDFCYEAGGCGYNIYRQLTALGHSCTVAATSLIPRKPGERIKTDRRDSQKLAILHRSGDLTKVWVPDATHEALRDLVRARVDASMHLMRARQQLLAFLLRHGRSYPTGKHWTQRHRSWLAGQTFQQEVHRIVFQDYVETVWTAQERRDALIERIGAMTASWSLGPLVEALRGLRGIDLLSAATFICTTGDLSRFESPRMLMGYLGLVPSEHSSGGSVRRGGITKTGNREARRMLIEAAWSYRYPARVAKEKAEILVHLPKNIRDIAWKAQTRLCARYRTMTARGKKPTVVVTALARELAGFIWAIGQEMRTPMTT

SEQ ID NO: 232150 - protein, 386 aa, unidentified
MQKLNDLSRSLTRLDPDGTLIAVIEMSQSSWLVAGIVPGVERQPLKKLAVDESALLNLLNRWREEAEKAGRKIERIAVAFEAGRDGFWLARWLRARGIEAYVIHASSVAVSREHRRAKTDRLDTELLKRAFLGWLRGERDHCKMVAIPTTKDEDAKRPNRERESLVGEQTRIVNRMKAALIRLGIRGFNPKLKKAAGRLEDLRTPEGEPIPPNTLAELRRDMERRRLVSDQIRQIEDARLERIEQAPGDGPHAMVRLLARVIGVGIETADMLVQEVLARNMRDRRAVARYAGLTGSPDESGTKRREKGLARSGNARVRRGMIQLAWRFLMFQKESALAQWFRARTETARGTRKTMIVALARKLLIALWRLVREGVVPDGVVLRPAQ

SEQ ID NO: 232151 - protein, 338 aa, unidentified
MVYGAIDLHMRYSQIRIVDETGAVVRDQRVSTAREQLVQAFAGFGAMRVLVETGTESEWVAQTLEAAGHEVIVADPNFAPMYGDLQRRVKTDRRDVSALAEANRRGWYRAAHRTSAAQRGTRQVLRARRQIVQMRSGAVALIRSLVKQEGYRLRSCGAERVPARLAELRLPAPLRAILAPLVRMIETATTEIATLATDLEARAAADPLVQRLQTVPGVGLVVALTFRAQVDDVRRFRHAGQVSAAIGFVPREASSAERRQRGHITKVGPRELRSLLVQAAWACWRSKQSATLRAWVEQVAARRGRRIAVVALARRLSRLLYALWRDGTSFDVKKLAAA

SEQ ID NO: 232152 - protein, 395 aa, unidentified
MISVGIDVSKGKSTVCILKPGGEVIKPPFDMVHAVENLDFLISLINSFDEETRVVLEDTGHYHIPVASYLSSHGIFVCCVNALRMKKFCAQNIRRAKTDKIDAVRIASFGITYWSELTRAYDAPDTYDELRFLARQYYQITSILVKAKVNLSNLLDQVMPGISNLLQNQKDNHKLTEFVDRYIHFQTILDMGEKKFTADYCKWAKKKGYRCNERKAAEIFALAQNGIPSLPNSQSITIAVREAVKVIHSTEESRNTILSQMQEICKTLPEYSVVRDMNCIGDVLAPCIIAEIGDVRRFRNKHSLIAYAGIDAPPYQSGAFNASERKISKRGNSYLRKTGYEIMQSLIKHKPINDPVYDFIQKKRSEGKCGKEAMIAGLNKFLRVYYGKVMELYSE

SEQ ID NO: 232153 - protein, 393 aa, unidentified
MHVKADRPEAPSAIRSDLGAIFVSLELSRSTWLITSLSPGGEKMSKHSVPAGDIGALLARFSEIRQKALARTGKSFPIIVIQEAGLDGFWIHRVLQKEGIESHVVDPASIATSRRRRRAKTDRIDGEALLRALLAYKRGEPRVCAMVKAPTPEEEDRRRLCRERKTLIAERVRHVNRIKGLLFCQGVSGYEPLRRNRRQWLGELKTGDGRALPDHLKAQISRELDRLELLLEQIKAVETERDALFAVAKAAAATPTPAPAPVTMLLDIKGIGPEFAGILWMEAFFRSFANRRQVAAYAGLAPTPWQSGSVDREQGVSKAGNPRLRTTLIQLAWLWLRHQPQSALALWFKERVTRNGGRFKKTTIVALARKLLVALWKYVTAGVIIEGAVMKVA

SEQ ID NO: 232154 - protein, 398 aa, unidentified
MTESSDYESVQVFIAVDVGKDTHHAVAINRSGKRLFDKALPNDENKLRSLISDLKQHGQILLVVDQPATIGALPVAVARSEGVLVGYLPGLAMRRIADLHAGEAKTDARDAAIIAEAARTLPHALRTLKLADEQIAELSMLCGFDDDLAAQTTQASNRIRGLLTQIHPALERVLGPRLEHPAVLDLLQRYPSPEKLASLGEKKLAAQLCKLAPRLGKRLAADIAQALAEQTVVVPGTNAAAVVLPRLALQLITLRKQRDEVALEVELRVLAHPLYPVLTSMPGVGVRTAARLLTEVACRAFASAAHLAAYAGLAPVTRRSGSSIRGEHPSRRGNKALKRALFLSAFAALRDPLSRAYYTRKMSQGKRHNQALIALARRRCDVLFAMMRDGTFYTPQGS

SEQ ID NO: 232155 - protein, 386 aa, unidentified
MQASTVGTPTASHYGTIFITIELSQKSWLVTLHSPDQDKLSRHQLAGGDHAGLLALIGRIRDRAARALGGVPAVASCYEAGYDGFWLHRLLLAAGITNYVFDPASIAVDQRARRVKTDRIDGETMLRTLMAFLRGEPRVVRIVRVPSAEQEDARRASRERDRLVREQTAHTNRIKALLRLLGMAIGNPRRRDWLSWLATQRDWQGQAVPPQMLGEIRHEHARLMLVRERLDALAKTPAQADPTPAAAQMIERSELLLRLKCLGPAFATTLTNEVFYKDFRNRREVASYFGLTPSPWRSGGIDRDQGISKAGNPRARCAAIELAWLWLRHQPDSKLTLEYRKRTLDAGKRIKRVAIVALARKLVVALWRYLTTGLVPEGAVLKTVKV

SEQ ID NO: 232156 - protein, 343 aa, unidentified
MYYIGLDVHKKAISYCVKDAAGHVQGEGKIGSTRRELDGWIRALPQPRMIAMEATIFTGWIYDHLLPHAEKVKVAHPLMLRAIAAAKKKNDRIDASKIADCLRCDFLPECHMASTEIRDRRRTLRYRSLVIKQMVQMKNRVSGLLMETGVSYNKQRLHKLGYFEALMTSNEDVHDSIRPLLKLSREMISRSQKLDYALISSLERDPLLTERLRRLRTVPGVGPITALTWALEIGDFTRFTSNKQAISYCGLCGEEKSSADKVLRMPISKQRNKHIQRVLIEAAKLATRESPELAMIRARELERGNPNRATLAVARKMVIYLLAVERRQQDWVAAEQFRRTAAA

SEQ ID NO: 232157 - protein, 318 aa, unidentified
MPEAIVVGIDIAKQTFDAAIGIGGRIETFANDDVGHDGFVSKLAGQPVGLIVMEATGGLERDLACVLQAAGFAVAVVNPRQARDFAKAMGYLAKTDRIDARALAELAQVLARHPDRDRFVTALPTPEQQALQALVARRRQLVVMHVAEHQRLSVSHAIARKSVAALIKAIRAQLDEVEAELARHIETHHADLAQRLTSVRGIGPATVATLIADVPELGRLSRREISALIGVAPFNRDSGQMRGKRTIFGGRGQVRRGLYMAALAAIRFNVVIKQFYDRLVAAGKPKKVAIVACMRKLLTILNAMVRTGKSWDDSLHSA

SEQ ID NO: 232158 - protein, 345 aa, unidentified
MRIVGMDLGKFKTAVCIMEEDGTVLEEMAVETTRKALGELLQKVPGAKVAMETTFNCGWVTDLARSLGHEVHVGHTKYLKAISQAKSKTDRIDARKLAHLVRTGYFPDAYVPGPEVRSMRAVVRQRAFLVRERTRIKNRIHAVLSEAGERCPEEALFGKAGRAWLEEAPLDPLRGENLKQLLALIDFLDGQVARVSRRIDRLGLKHPAVERLETVPGISRYGALLIACEVDRIDRFDSPQRFCSYAGLVPTVANSGGSIKIGHLSKEGNRWLKWILVEAAQHAWRSSHPYHVYYSKLKRRKGSRIARVAVARRIAESVYWMLTRDEDFRCPAGRKEVSESTAIPA

SEQ ID NO: 232159 - protein, 423 aa, unidentified
MAESFTFFVGVDLGAERHHVVVLNATGGTVGRRSVEHNGAGVLELFSWLAKITADTIASLIAIAAETPRGSLVESGLERGHPVFSINPKQLDRFRDRFSVAGAKDDYRDALVLAASLRTDQHCFRGLQLGDPRLVLLRELSRTGDLLQRDLRRNCNQLWSLLQRYFPALLSLSPAADDPWLWTLLQSAPLPAQAARLKPRQLEKILADHQIRRVSASQLSELLHQPPLPLAPGAAPALAESAVLLLPHLRLLHQQTAQLARRIDNLIEELQQDPDFAEHRDIEILRSFPGLGRVFTATVLAEAHRPLVDRDYHALRALGGAAPVTRQSGKTKLVLLRRACNHRVQHAVFHSANVFVQKDPRAREQYHRLRLQGNTHARALRGVADRMLALLFTLLKNGSCYDPDRRLASNQPEGTPPQKNLDK

SEQ ID NO: 232160 - protein, 338 aa, unidentified
MAIVGGLDLHRRQITFDYLDTESGEVRGGRVVPADREHLRLWLHRFDGREAAFAVEACTGWRFVVDELERAGAVVHLAEPADTAALRGRKRRAKTDRVDARHLRELVLAARVPESWIPPAHVSEARTRIRLYKALVDERSGWLQRTHAVLFHHGAPAAPRLARKQARARLDLSQLPLAAQAVVEVALRSVDRINDELAPMRLELTRLARAQPGCHALQAHYGIGPLTSLAIWAELGDCRRFSSSADAVRHTGLDITVHSSDSKRGRGHLARQGPGLLRWALFEAAVCAARPASPDHDYYLTVRARLGHQRAVLSVARKLTRWCHHTLRALGEEALAAA

SEQ ID NO: 232161 - protein, 344 aa, unidentified
MEHFAGLDVSVKETSVCIVDEVGKIVREVKVASEPAALLAVLTNPTYHFKRIGLEAGPLAQWLFSALAEAALPVICVETRHMRAVLQAQINKTDRNDARGIAQMMRVGLYRPVHVKTLRSQKLRMLLTHRKLLQSKAIAIENDLRGTLRNFGLKVGLAGKVKFEARIKELVEDFPDLAVLVEPLLIVRRVLCEQIVSLHRRLLAIVRDDEVCRRLMTVPGVGPVVSLTYRATVDVPARFRKSKSVGAVFGLTCSKHQSGEIDRSGRISRCGDEMMRVMLYEAAQSMLRSKKWSWLKAWAMQIARRRGMKKAIVALARRLAVIMHRIWIDGTEFRWTREQVVAAA

SEQ ID NO: 232162 - protein, 338 aa, unidentified
MKLYGGIDLHSNNSVVALLDDEERLVYRKRLPNDAPSLLEVLAPYREAIVGLVVESTYNWYWLVDALMEAGYPVHLANTAALVQYSGLKYSDDDSDARWLAQLLHRGLLAEGYIYPKEDRAVRDLLRRRSRLVQQHTANLLAIQNLFARDRGHSLNANEVKRLTPETVSRLLPDPNQALAVQATLLPMRGQEAAIDLLEREALAQVRLRPAYRHLLSVSGIGQVLGLTIMLETGPIERFAAAGHYASYCRCVGSERLSNGKRKGRGNTKNGNKYLAWAYVEAANFAVRYNAAINRYYQRKRAKSNGVIATKTVAHKLARACYHILREGTDFDVAKAFA

SEQ ID NO: 232163 - protein, 402 aa, unidentified
MSVSIGVDIGAYKHAAAVCRDGAREAERGALKIPANRKGFEDLEVWMVRQGEPVTSVVMESSGHYWWNLASHLRRGGYDIALVNPLEAKYFAKSRLQRSKSDPADARTLAALGMRDQPRTSNPLAGAELKEAARFAMRLVREQAQACQRIQRLVDVGFPELREAWEDPTCVSALAVLRKAPTAKAVARLRVETLAKLKRPGDGGRAIGPLKATQLKQLAADSVAAPEMEAQVAFEMELLISQYDYLEGQIHQAETRLQSLLDGDVARVLLTIPGVGPATAAALMAEIGDIFRFEDVDQLLAYAGVHPKEQSSGKKGANPETSWTMAKTGNAYLRAAAYRMAVVGIQHNPVIRDHYARKRAAGKSKMNAVGHCMSKSLSLVWGVWRSGKDFDPVNRPGLRHVD

SEQ ID NO: 232164 - protein, 385 aa, unidentified
MAPPTRPRIVIGLDVGKSAHWACVVTREGELLASGPIPNREDAIDGLYAQYPGALVVVDQVRNIGSLALSRAKLAGMPRAYLPGLAAHGASKLFAGDAKTDERDAMVIAKTALGIPDALLAVADRPPEIEAARSLAAQRDFLTCENTRSKNRLRSILLESCPEFEAQADLSDPATLKLMAAVGGPWSISEASPQAVGAITRGCRGAKVAALVESAESSSRPHPAAVACEDRAVRLLARRISENAAEIESLTSEISALLAADETYRCLLTVPGIGPRTASELVISIDIADFAGHDRLASYCGLAPRNRRSGTSISSVSASRQGNKRLKNLLIFSCNCLARSRNRWGEYYARCRDRGMPHGKALKAVARKRLKVIYAIMRDKVPYAA

SEQ ID NO: 232165 - protein, 357 aa, unidentified
MTTMTNLTTAVTGGVDTHGQTHHAAVLDHVGRELGDREFPTTPSGYRALLSWLRGHGQLERVGVEGTGTYGAALSRHLRAAGVEVVEVDRPDRKARRAQGKSDPLDAYSAARATLAGRATGAPKARDGRVEAIRALRVARSSAVKARSQTTNQLKALLVTAPAELREQLRGLTTTTLIATCARLRPTGDVASPEHATKTTLRRLARRHQFLSEEISDADAELHTLVTAAAPRLIALPGVGTEVAGQLLTTVGDNPDRLHSEAAFAHLCGVAPIPASSGRTRRHRLNRGGDRAANNALYVVVLGRLRYDQRTRAYAARRTTEGLSKPEIIRCLKRFVARELYNALQPVNPPKDPANAA

SEQ ID NO: 232166 - protein, 400 aa, unidentified
MRVVFGIDVSKASSEVAILVNGEKVHGYTISNDAIGFARLLGDLRTVHKPEIIFEATGVYSRRLQTFLDDNGYAYTRLNPLEAKKQLDSLRVRKTDQIDAEKLAQSQFVLNRKPTYVQEEVYQNLRDLSRFYQNLTEDIVRAKNRLHKVLQVTFPELENILSTPSGEQYWNLVIAFPCKDCVLELSNDELSKSIRLSTSKRISDKRVAYLAEKLIALANQSYCAVKKTSPILEEVRYYAKELLRLYEQRQAVLDEMVELAQPLPEYDILLSIPGIAETTATSIIGELGDIRRFQYANQINAFIGIDLRHYESGNFLAKEHITKRGNPYARKILFKCIHNIASASHTNPCHIADFYEKRKRQSQTTSTKPHTIASIHRLIRTMYYLIMHNKLYDYASTQNR

SEQ ID NO: 232167 - protein, 383 aa, unidentified
MKKATRFVGLDVHAETIAVAVAEGGRSGAVESLGSIPNRPDCVRRLVKRLGAVSTWRACYEAGPTGYALYWQLAELGVHCEVVAPTLVPVRAGDRVKTDRRDAEKLARLYRSGDLTMVWVPDKPQEALRDLVRAREAAKKDQLRARQRLGKFLLRHGRRPPTPITAWTGKHLDWVRTLSFDEPAQEAVFVDYLAEVDHARTRIERLEQHIDDAVAGMPAQMKAVVDALQALRGVAQTTAVTIVAEVGCLSRFPRPKQLMGYSGAVPSENSSGARTQRGGITKTGNSHLRRVLTEAAWAYQYRPNLSAALRKRQQALPDEINELAWKAQHRLHKRYQRLLLRGKPRQHVVTAVGRELLGFIWAIGVTAERQQQADGQHARRRAA

SEQ ID NO: 232168 - protein, 365 aa, unidentified
MNEYIWVGLDVHLDSITAAILSGESTQAEIVKLSGDLMQTRRLFRRLATKGPVRACYEASGAGFVLQRVLAKDGFHCEVIAPSLIPRKPGERRKTDRLDAVNLARLYRSGHLTAVHVPSQEQEALRRLIRLRYEYVCYTTATKHRISGMLLNHGHVYNEGKSKWTKTHRRWLARLRDELDGAMYTALATELEHLEYLETQRGVLDDEITRYGQAPPYRGYVEALCCLRGVKTLTAMTLLCEIDDVRRFRSPRALMAYFGLVPSERSSGERERRGPITKAGNTHCRRVLVEAAWNNSHRSGADLVLKRRRQGQPPDVVAIAMKAQHRLYKKFWRLDRKKHRHVAITAVARELCGFVWAILKAAPQH

SEQ ID NO: 232169 - protein, 333 aa, unidentified
MEVGQTVADHGVVGGVDTHKDLHVAAVVDELDRVLESRCFATTRHGYQQMLTWMRSFGQLRRIGVEATGTYGAGLLRYMQNAGVEVLEVTTPDTHDRRKRGKNDDLDAQNAAHAAFAGRRTVTPKSRDGMVESLRVLKACRKTAVAARRVALQMIHNTIVCAPDELRETLRRMTRMQLIRTLAAWRPDLTDYRSVVSAYRITLKSLGRRYLELHDEIADLDTMIVAIVDELAPALVARNSIGHGSAAQLLVTAGDNAERLQSEASFAALCGASPVPASSGKTTRHRLNRGGDRAANSALHIIAIGRLRTDPRTKAYIAKRVAEGHSKLEAIRA

SEQ ID NO: 232170 - protein, 418 aa, unidentified
MKVVFPTCCGVDVHKSFLVATIIKTPENSLQPSYQKKRFSSFNSDLNRFADWLYENDCMDVCMESTGKYWVPVFNILEKREIRVVIANPKWVKAVKGNKDDTKDSKWIGDLFRIGLVKSSFIPDKDIRILRELTRYRYKLISMRSSEKNRFQNAFTVCNVALDSVVSDMFGKSAAAITDYLTSDEDFDPQHCVSLLQRSLKKKADDVLESIEGYEITQEQKTRIGIVRDHLHYIGSLVERVDTCIDTMVNRYEGYIILLCTIPGVDRSSAITILSEIGIDMTQFGSSKRLCCWAGLTPGNNESAGKKKSVRISRAGVYLKPALVQIAHAAVKDKSSPYYALKYERIAKRRGKKRAIIAIARMILTAVYVMLSNLEEWNPVDLYKVDMPEHLKEKQLAKAVKQAVRFLEAQGLTVLDSA

SEQ ID NO: 232171 - protein, 440 aa, unidentified
MDKAPRRCIGLDVHRDFAQVAIWQRGQVRQAGTFATTPEGVREFAAGLGPADEVALEATGNTWAIATLLASHAGRVVVSNPAKTRAIAEARVKTDKVDAEILAQLLAADYLPSVWMPDAATSALRRQVLRRAHIVRQRTRLKNQVQAILARNLVPRCPAADLFGIKGRTWLAVQELPPDEQAAAAALLRQLDFHAEELALIDADLGQAALGRPEVLRLMTIPGVDATVALSIVAAVGDFTRFRTPERLVSYLGLNPRVRQSGGQPASHGRITKAGPAHARGMLVEAAWSASKAPGPLRAFYQRVRSRRGMHIAVVATARKLAVLCWHLTIKGEDYAFALPSLVAHKQRKLELRAGAPPARGRKGQAARYSLAAVRAAERDLAAQGEAAYRTMVAAWQPTRPAATPSHTKPSKKVDGRSRQHRDAAHQAHRLSSAAGLPVP

SEQ ID NO: 232172 - protein, 320 aa, unidentified
MSKIKGMLSKRTINPANFSGLIMENISQWVGIDISKATLDVYLRPLSKAMKVANTKEDISKLVETLKSYTVNLIVLEATGGLETELVIQLQEADLPVALINPRQGRDFAKATGKLAKTDAIDAQILAHFGEAMQPQILAVESEESRQLGDLISRRRQLVEMRTAEKNRRERARGKALVDIEAHLEYLDNCLEKLNQEIEELTQANQQWLEKVNLLKTVPGIGQVISTTLVSDLPELGQLIAKQISRLVGVAPINPDSGQHKGKRMIQGGRAQIRATLYMGAVVAMRHNPVIKTFYKHLVGRGKSKKTGSDCLCAENLSYS

SEQ ID NO: 232173 - protein, 336 aa, unidentified
MFDYVTAIGLDVHARSISACAFDPMTGEVTRARFGYDPASVAEWVLGFESPKAVYESGPTGFHLCRALRALGVDCAVGAVSKMHRPAADRGRKNDRRDAEWLARLLACRNVVEVWVPDDLTEAARDLSRALEDARDDLQRARQRMSKFLLRHGLVFDETTPAGRRRSNWTEAYWRWARSIEFGEADDAAAYEHYMDAVERCAEAKRELERKVEEAAARPEWAPVVDALCLVKGIDVATAFLLAAEAGDFSRFPTAPSFASWCGLAPSERSSGETESRGGITRAGNGHVRRALVEASWHVPMSTRHPKKPRPGHGVAPAVSRHAAKCNRRLQDRCVC

SEQ ID NO: 232174 - protein, 331 aa, unidentified
MDTHSEVHVAAALDPLGGLLGTREFPATAAGYASLLGWLGKFGDVALVGVEGTGSYGAGLARYLAGHGVRVVEVDRADRQDRHRNGKSDPLDAVSAARAALSGRAAGVPKGRDGAVEAIRALMVAKRSARHERTQAINQARALILTGPDELRARFAGLRAAALAEAIAALRPRPGDAADYSLRIALRELGRRVEFLDAQVARLDELIVPLVAVRAPGLLSLYGVGPDTAALLLIAAGDRPERLRSEAAWAHMCAVAPIPASSGKTRRHRLNRGGNREANHALWRIVITRMSAHPATRAYVQRRTAEGLSKKEIIRCLKRYVAREVYPHLRG

SEQ ID NO: 232175 - protein, 458 aa, unidentified
MVQTKRSRSRRDIPAVHPDAAAIDIGATMHVAAVPPGRDPEPIRSFGTFTADLHRLADWLRACRIKTVVMESTGVYWIPIFEILEQEGFDVQLVNARDAKHVPGRKTDVSDAEWLQRLHEHGLLRGSFQPQGEIKALRSYLRQRERLLDSAASYIQHMQKALTQMNVQLHHVVSDITGVTGMRIVRAIVAGERNAATLAGFRDSRCKRTAETIREALIGNYREEHVFALTQALELYDIHQEKVAACDRRIELVLEQLKSTRPTPAKPLPTPRHKTKQPNAPHFAAREALYAILGVDLTQIHGFGPYLALKLVGECGTDLSAWPSAKHFTSWLSLAPRNKISGGKILSSTTRHNNNRAASLLRLAAVTVGRTETALGAFFRRLSARKGKAKAITATARKIAVLFYNTLRHGMTYNDPGAAYYEERYRQRVLANLQRRAKAFGYVLQDATLQPPQAAGVS

SEQ ID NO: 232176 - protein, 404 aa, unidentified
MDGIARYAGVDWATRSHAVCIVDERGEPVERFEVEHTEPGLRMLGRRLVKAGVARVAIERPDGPVIEALFAVGLEVAVIASRHVKALRTRYGTAGNKDDRADAFVLADVLRTDGHRLRPLQPDAPETVTLRATVRARKDLVQTRTRLTQQLRAQLELSFPGAIGLFADLDSPIALRFLLRFPSAAKAAWLSPKRMAAWLQAEGYPGRTSADELHRRLVVAPLGVTGSEAEGRAAVTLAFVRALLAVRDQIGELESRIREQLELHPDGMIFTSLPRAGQVRAAALLAEIGDVRERFPTPESLACLAGAAPSTRQSGQHLAVTFRFACDKKLRDALIDFAEDSRFANAWAAEVYRRAIERKKTHPHAGRILARAWVYVLWRCWQDRVPYDPARHRAFQRVVPAKAA

SEQ ID NO: 232177 - protein, 347 aa, unidentified
MKFYTQSHSYFCGIDLHARCLYVCILDASGEPCVHKKISASPDALLKLIAPYREDIVIGVECMFSWYWVADFCEDQHIPFILGHALYMRAIHGGKAKNDKIDSLKIALLMRGGMFPLAYVYPRELRGTRDLMRRRIHMMRKRAELLGHVHNTVSQYNLPPISKNLRYAFNRVGVADRFADTSVQKSIAFDLALIDFYDKQLSKIEWHIKQQARAFDQHALVLLRSVPGIGLILSLVILCEIHDIARFPRVQDFASYARLVKCKRESAGKTYGTSGGKIGNAYLKWAFSEAAVLFLRGNPEAQAWLEKKANQHNKAKALTILAHKLGRAVYFMLKRKVIFDQERFLAG

SEQ ID NO: 232178 - protein, 408 aa, unidentified
MKRYYMGVDWGDRLHQIYVGDQEGKKVREMEVQESPQGLAEIGRWLDEKRAEGFELWAAIEKPAGRIVDFLLDHGVEVYPVNPKAVDRVRDRYRMSGSKSDAFDAYVLAEFVRTDQAHLRVLRPSSEKAQELKMLSRDQRRVVRHKTRFLNQLTTTLKEYYARPLEVFDDLETEIALDFLQQYPTPAHLSALKRKEFNRFATKQHHLSKQRCEQLWEKLNQPQLAVPEHVVRAKAQLVEVLIEQLRASIKAVKIYNHKVESFFASSPAAQFAKTLPGGKSGTLVAAIWAELGDAQGRWESSGHLQAEAGAVPVTKASGKSRVVHFRFACNKHLRHTMYWFSFVSLNHSEWANLYYRGQRDKGHSHHQALRALGAKWLKIIFVMWRDHKPYDENYHLANIARQKMRQAA

SEQ ID NO: 232179 - protein, 399 aa, unidentified
MEQIRVGIDVGSREHCVGIASADGEILDEFRIAHTRAGFEEFFDRVGGWSSRLGCSVAVAMEGYNGHARPLDREILSRGWRLYNVNNLKLARYKEIFPGPAKTDRLDVVKILELFRLRETLPMAKDVLQEVLEVPCVNERLKRLTRRRRQLVEEKVRVVNRLHSDLQAVCPGLVGITGRVDNLWFLRFLVSRGDLRQLARMRRSSLLRIEGVGRRYAEAIVRWQAEAEFSGEVEYVGPMIISDARRVLGLLEEISGLEVQIVELSRGSEIASLLRTIPGFGRITSAELAGEIGTVERFEGEGSLALYLGMCPVSHESGRYRGSRSPRQVNWRAKLAMMTAVARHLEQVGESRAYYERKRSEGKRHNQAVRSLGRHLVRVIWAMLRDRRHYWLREEVCSS

SEQ ID NO: 232180 - protein, 355 aa, unidentified
MNQEKYIGMDVHQATISVAVMDSSGKLIMECILETKAATILEFIAGLRGTLSVTFEEGTSAAWLHDLLKPHVSHLVVCDPRRNALLKDGSKSDRIDARKLADLLHSNKLHAVYHGEHGLRSLKELGRSYLTITKDLTRVMSRIKALYRSWAIPCSGATVYAPRHRAEWLAKILEPGVRLRAERLYQQLDLLQPVRQKARRDLLVESHKHHAVKLLRQIPSIGPIRAALLVALLQTPHRFRTKRQLWAYSGFAVETHDSGEYRFVRGKLRRNRERITVRGLNHNHNHDLKNLFKGAAISASTRPGPLCDFYAALLEKGMRPTMARLTLARKMAAITLTIWKKGVEFDAKQLNRQAA

SEQ ID NO: 232181 - protein, 397 aa, unidentified
MYIVGIDIAKRKHEAAVIDGEGTVIIKPFSFTNNCSGYNRLLAMLAKAKLPLDEVSFAMEATGHYWLALFTRLQKEGFRVQVINPVQTNSIRSFYIRQAKTDPRDALLIAEVIRFGHFSESTLHPENIYELRELCRGRHAIVSMQADVKRKVVALLDQVFPEYETAFTNLFSDTSMAILQTCPTPKELSEMPLEELCHLIEVSSRKRFRMVKAQELQELARNSFGFAMAGDVFSTMIRLYAKHLVFLKQQVQEMDRKIAEIMDTLDTPITTITGIGPTLGAYILSEIGDINRFSSSAKLAAYAGIDPTMRQSGEYNGVRNRMSKRGSPYLRHAIWLATSSAVLHDPALKLYFQKKRDEGKPYMASVGHACRKMVSIIYAVMRDNKAYTPYIPNEISA

SEQ ID NO: 232182 - protein, 419 aa, unidentified
MSFKILKNNCCGLDVHKTWIYACIGITDSNKRTEYKQARFSSFTKGLNGLCDWLAKYNCNDVCMESAGKYWIPVFNILEKNNIRVTLSHPKYTRPQKGNKTDCKDAKWICDLYMCGMANPSFIPPADIRELRDLVRYRFKLTCMVTSEKNRAHNCLTVSGLKLDDVFSGIFGKSSRSITEQILQHPGETFDVTPFVDGRCKTPIEEIQAAVDGAISEEQAVKLRQCLNHIDESELHKAEIEREIFRLSEKYESVLNLIRTVPGFDKNPLAAIQVLSETGGDMSVFPTAKNPVSWAGCCPRNDQSNRKIKSTGISRAGSCFKPVLVQVANALIKSKKHPEFATHYRRIKARRGHKKAIIAICCMILTAIWHILTDLKPYTPEGFPESRPVNKEKVLTTSQALNLLKQRGYTFKDDVVPVT

SEQ ID NO: 232183 - protein, 449 aa, unidentified
MAEPQEIEDEEYEQILERVCAIDVAKASGMVCTRVPHPSRPGQRRTRVWDVAATTNAILELGEQLAGEGIERVTLEATSDYWRIWFYLLESCGLAVQLVNASDIKNVPGRPKTDKLDSVWQAKCTERGMLRPSFVPPAEIRRLRDYTRLRTDLTRERTRHWQRLEKLLEDALIKVSAVASTMGTLSVRDMLEALIAGERDPRVLAGLARGKMKAKHAALIEALTGRFDDHHAELARMLLDQIDHLTAQIGALTTRIEELITAIPAAQGVNADGTTGPGAGTGPDAAVADAITRLDEIPGISPLGAQVILAEIGLDMTRFPTAGHLVSWAKLCPRTIQSGAKNRSGKAGKGNPYLKGVLGEIATAAARTDTFLGERYRRIVKRRGKLKALVAVARTILVMIWHLLSDRAARYRDLGAGYYASRTDKDRKTRNHVRQLEALGYTVTIAQAA

SEQ ID NO: 232184 - protein, 386 aa, unidentified
MKIVGCDFHPSFQQIALLDTVTGEIEERRLVHGNGEAEPYYRQLEAPALIGMEAVGNSLWFEQLMAQLGHELWIGDAAQIRASYVRKQKTDRRDAGHILHLLMEKRFPRIWTPSAEQRDVRQLLLHRHKLVGIRTRVKTELQHLAMNRGLQKQRALWSVRGRACLEKLPLEGWTRQRREDLLAVLSLVESQVEKLDEAVSLIAANDKHARLLMTQPGVGPVTALAFVVTIGDVRRFKRGKHVGSYLGLIPAEHSSGNKRRLGAISKQGNVFLQYTAGRSRAIGMPLRPTVPQRVSTSLSPQAQGSGQGGGGTQAGHKTVLDAPQPNTLCVGGSQRGQLESFSGQPKLGRSSDWAPSHPAKAECSNKRIMADVLGRIDGWWSSSHRW

SEQ ID NO: 232185 - protein, 411 aa, unidentified
MDVVNARCAGLDVHKATVVAGVRVPGPQPGARRGETKTFATTTRGLRDLTNWLLTHGVTVVTMESTGVYWRPVYEALEGLVQLVVVNARHVKMVPGRKTDVKDCEWLAQLLECGLLRGSFVPPRAVRDLRDLTRLRKALIRERGHHVNRIAKTLELAHLKLSCVVTDLMGKTGRAILQALSAGIDDPERLAACAQGLLRKKQAALREALGGRLTPHYAFLLQQHLSLIDGLDAHIATLDTRIEAAMAPFAEAAALVQTMPGVAARAAQAILAETGVDMDLFPTPAHFASWARLCPGNHESAGKRQNTTTGKGAPWLRATLQETAWAAVRSKKSYYRALYHRLKGRRGAKRAIVAVQHAMIVALWHMLKHRVAHQDLGADSFERRNIARIRRHHVRRLEQLGYDVTLRGKAA

SEQ ID NO: 232186 - protein, 337 aa, unidentified
MTIIRIGLDTSKHVFQVHGVDESDQAVLRRQVRRSEMTKFFAKLAPTRIGLEACGASHHWARMLRGLGHAVVLMPPQYIKPYVKRGKNDAIDAAAICEAMSRPGMRFVAVKSAEQQAGLMLLKVRDLLVKQRTMLINAMRGHAAEFGVVAAKGPIKVSELLQRAQAEAAGVPALAREMLSVLSGQLDALEAKLKALEAQLIAMHKADPVSQCLATQPGIGPIGAVSFALKVSDPEAFRSGRHFAASLGLTPKENSTAGRHRPGRISRQGDESLRRLLVLGATAVIRFAKAGQASPWLLNLLARKPKKLAAIALANKMARILWAMMVSGEVYRHPKAA

SEQ ID NO: 232187 - protein, 466 aa, unidentified
MKKLFVGIDVAEAKFDVAFRDVKGQPVRPDVIFPNSPDGIRDLKGAITAAGSLLGARAKIVAGMESTSNFHKNLASALYSARPRKIEVHVINPFAVKQFKKMHLKVYKTDKLDAHMIALYLAQITPKPALPDLPGQEALKELTRIRRSFQEETTKFKNRLRRLIRIHFHGYKLLLGTKISMKMLVAFSMVSSPDEIIRMGKTKLGNLSVAFRHKVGPKFAASLIKLAETAPVKTLPEGTSLVIKWTAQRLIQLLAQIKTLDENIVSALDSTFPDHCLNSIPGLGPVSVATIIAEVGDIKRFETPEKFIGYIGLYPVVWESGEIKARFKMTIKGNKSLKMTFLVASAAARLFNPVIRDFYDHLRERGKSKKAAGGAVARKLALLAYTILHNNEPWNSEKAIAGLEKSAAMRCNLENTGDRHSIEVIPHNVVNATIPVRDNTELPCPPNIIVTPSLPIGKRGGFIKNP

SEQ ID NO: 232188 - protein, 360 aa, unidentified
MEAQTNQRARRKGAEHVDIGCDYHPGFQQIAFVDTETGECGERRLTHREEAEQFYGTLKERSVRVGMEASGHAGWFERLLRDMQLELWIGDAAEIRTKRVRKQKTDRQDAQLLLRLLIEDRFPRIWVPDAENRDLRQLLWHRHRLVQMRTQVMNQLHVVALNEGVRRKKALWRPAGRSELESIALAPWASRRRQDLLDLLDQLTPKIQELTGALEKEVEKRPVTRRLMTHPGVGPLTALAFELVIGTPERFHCGKQIASYVGLVPSEESSGDRRRLGHISKQGNVLLRFLLVEAAQVTVRSQPEWRSKFFRLSMRRGRKIAKVAMARKLAVHLYWMWRQGREFGKLGSHAGEPGNPHGDE

SEQ ID NO: 232189 - protein, 378 aa, unidentified
MNRIIKIGMDVHTTNYTLCIFEPSFEHDGTVHCITQVKPEVKNIIRVIETFKKKHENEELNIVCGYEAGCLGYSLYHELKEKGIECVILAPTTMKTEKGGRKLKNDYRDAKMIAECLAYGGYSAVHVPTELDNSVKEFIRMRDDIKENLKSIKQQIIAFLTRNGKQFDGKSFWTRKHIDWINTVSFSEPLLQDTLKEYMIEYNHLCDRVETLDKQIEEISVKEEYVEKVQQLQCLIGIKTHTALSLIVETSDFNRFKKGNMYSAYLGLIPGDDSSGGQENKLGITKAGNSHLRKLLVEAAQGYTRGKVGFKSKVLKSRQEKCSSEVVAYADRANERLRRKYYRMILRGKRYNVAKTAIARELACFVWGIMTDHIDLCS

SEQ ID NO: 232190 - protein, 455 aa, unidentified
MRKRKSSQAVNCSPVTRVLEPNAAGIDIGATEIYVAVPTDRDPHPVRCFGTFTRDLLQLADWLQKCAVETVAMESTGVFWIPLFQILEDRGFRVCLVNARHVKNVPGRKSDVSDCQWLQYLHAVGLLRASHRPNQSICALRSIWRHRESLVQMAAVHIQHIQKALDQMNVQLHHVISDITGTTGLTIIEAILAGERDPGRMARLRDARIAASEETVAQALVGDYRPEHLFTLRQSLRAYQQYQRWIRDCDVEIETFLSHLDARLEPIQKPLSRAKDRHRPRRNEPRFDLRTHLYKIFGVDLTEVPGVNSLIAHTLLTEVGPDLSKFRNPEAFASWLGLCPDNRISGGQILSVKTRKVTNRLAIALRMAAQSLHRSQSYLGQYYRRMRTRLGTPAAITAAAHKLARVLYHLITTRQPYDESVFAGLEERARHRQFFRLKRQAAALGFELTPTQCVP

SEQ ID NO: 232191 - protein, 402 aa, unidentified
MISVGVDVSKGKSTVCILKPYGEIVCSPFEVKHVEKELEDLAGLLNKLDGEIRVVMEATGVYHLPILTFLQEKGYFVSVINPYSMKKYAKDNSLRRAKTDRLDSIMIANYGIDRWFKLQKYEGDENTYAELKLLGRRYRYYMELHVKSLQELTHILDYVMPGIKAMFNSWDEASNKDKLSDFVERYWHYDLITSMSREEFTEDYLAWAKEKKYHQSSAKAEAVYEMASDGIPTLSSDTPSTKMLVQEAIAVLRAVDSSLFRIISRMQELAKTLPEYSTVRSMGGVGDVLAPKLIAEIGDVRRLHNAKALIAWAGIDPPPYESGQFVGSQRRITKRGSSTLRKVGYEVMRVLKSHREPEDNVVYNYILKKEAEGKSKKAAKIAGLNKFLRIYYARVMAVYQQQ

SEQ ID NO: 232192 - protein, 349 aa, unidentified
MTTIIGLDLGKFNSAACTFLTGDGEVRFQSLPTRIAALQQLFERERPDLVVFEACAQAGFTADLCRELGLKFLVANTNGEAWKWKNVKRKTDRDDALKLARLAYLGELPTVELPETATRQRRAFLNFRQLLVSQRVQLQNHLRSVLVAQGLEAPRGHHAWTAAGLAFFDGLARAPYECAADELWRGQLYVSLTLYRSVVVQLNGVESKLDALVRDDAPSQRLLSVPGVGPRTAETIAAYVDRPQRFKNSRQVSAYTGLVPRQYQSGQTDRRGRITRRGPRLLRKMLVEAAWVMLRYNEWARRIVQRISKGQRTRKRQAVVALARKLLVRCWALLRHETTWREPVPLTGA

SEQ ID NO: 232193 - protein, 356 aa, unidentified
MLYLGIDQHARQITISLRNDGGDVVLARQVSTRPEKIHAFFEKLTRERLGDGESFIAVLEVCGFNDWLIQMLNDYRCHRVIMIQPEERKKRKTDRRDAASLSELPWVNRNRFLAGKPIRGLRQVDHASTVDRENRRLTSLRKEASQARTRIVNKIKHMLRRHNLQWDMPTKTFPTRRAVLWLKELILPDIDRLEMNYLLADLQRSEQRVQKLERTIVERCGEDGNAQLLCSMPGVSYFTATSLACRIGRVERFPRARSLANYWGLTPGCRNSGENNQRLGRITKAGSNMARWLLAQVAHQALRKDARLREWYKRIRRRRGSTVARVAVMRKLATVIWHMLSKRQTYAECRAIAIAG

SEQ ID NO: 232194 - protein, 413 aa, unidentified
MDRLIERCAGLDVHQKTLTACIRVPKEGGGRHQETRRFATTTHGVIVLGDWLASHGVTLVGMESTGVYWKPVYYLLEDRFECWLLNAQHMHNVPGRKTDVADAAWIAELVEHGLVRPSFVPPKPIRELRELTRYRRVLVEERARETQRLQRVLEDAGIKLTSVATDVLGVSSRAMLAALVGGERDPGVLAGLAKGRLRAKLPELREALEGRFGAHHRLLVSELLAHIDYIEEAIERVSEEVERQMAPFAREIELLDTIPGVNRRTAEVLIAEIGPDMSRFASSAHLASWAGMCPGNNESAGKHRSGRTRKGSPWLRTALVEAAQAASRTKDTYLSAQFARLRRRAGRTGHKKAVVAVGHTLLVIAYHILDRHQGYEELGADYFTRRENTEVHRDRLVRQLQRLGYQVRLESAA

SEQ ID NO: 232195 - protein, 362 aa, unidentified
MFESTTIIAFDQHAASVVAAVLLPGQRTPAVHALSADLPTIGRFVDRLAADHTVRCCYEAGPCGFELQRFLAARHVPCEVIAPALIPRRPGARVKTDRRDAGQLAVLYRARALTPIHIPTDQEEAARDLLRCREDIRADLLRARHRLSHFLLRHGRRFTGTKRAWTKRHADWLQAQRWPLPALEQTHRAYVRAVDEAVGRLHAVDQELRDLLTIEPLQSRVERLRCFRGIDDLTALTLAAELGDPRRFPTAPSLMAFTGLIPSEYSSGTKRVQGAITKTGNAHLRRVLVEAAWQYRHHAFLGPSLRQRQRGAPPAVIDHAWHAQRRLHRRYRRLAARGKPKQLIVTAIARELTGFLWAALTH

SEQ ID NO: 232196 - protein, 418 aa, unidentified
MEVLHERCAGLDVHKKTVVACVRLARDGGVEKEVRTFKTTTVDLLALGEWLDGHDVNHVVMEATGVYWKPVWHILDDGDRELVLANAAHVKNLPGHKSDVSDCDWLSDLEAHGLIRGSFVPNRQTQELRGLLRTRKQKVRERSSNTLRLQKTLEEANIKLDSVISNVIGVSGRRMIEAMIGGETDPVALAALADRRIKAPPEVLCEALRGRVTGHHRFLLGLQLEHIDALDGMIDKIDQQIDASVEPFRAAAGLLTTISGVNQLAGRAIVSEIGIDMSRFETAGHLISWAGLCPRNDESAGKRRSTRIRKGAPWLKDILVQCAWAATRTKATYLHAQFVRIRSRRGPKKAIIAVAASILTAAYHMLKNGVPYRDLGPQHFHSRNKQAQAKRLLARLRDLGFTAEFDSLKPIPDAVVSY

SEQ ID NO: 232197 - protein, 368 aa, unidentified
MKERKTLTRYVGIDLGKRNYQMAVVGKGGKVTNSNGTTYAAGRQSLYKKLRATDKVALEACSLAFIMAKEMEAAVGCKVYVMNSGRLSVIYKSMKKTDKEDALKLAHILEDFSEDRLPVVPVPSDKEMKRRKILANYRRVQQNRTRCINLLHALFVAQGITTKKCKDLSTEEQRKEAIRELTGIERDEALYLVECLNLCEKRIEKLEYQIEEESLEDKEIERLQSIPGVGPKVAFAFVSHVGAERFENASQLSNYLGLVPRVYMSGDTVRYGPITKRGNSYVRAMLVQAAWSIVRAREGGKLREMFEYMTIIKSKNKKKAIVAVARQLAELMYVMLRDGTWYAKRPLIPYSVESGTLAKRLARIKLSA

SEQ ID NO: 232198 - protein, 351 aa, unidentified
MQHISRIGLDIAKRWFQVHAVQADGSEVLNKKLARKSVLSFFSDLPICDVALEACGSAHYWARELVRLGHRVRLVSPAYVKPFVKRSKTDAHDARAICEAASRPDMRFVPIKSEDQQAVLMQHTARQLLVEQRTAVVNSLRAHLAEFGVIANKGIQNVPELARMVDDGADELSPIPALGIVIMKLLVAHLRAIEESLETVDEQIATWQKASTPAQVLASIPGIGTITSAAVAASVPDPAAFRSGRDFAAWMGLVPRQHSSGGKERLGHISKQGNKYLRRLLVLAATSHLRWLHKRTGVVADWCRMLLKRRPARLVTIALANKLARICWAMMTTGELYHGEVMTATSASAAV

SEQ ID NO: 232199 - protein, 337 aa, unidentified
MRYIGLDVHKNNTTACVISAGGKVVKSLEVRSAESGLRTLHDYMGTAEYCVMMESSTYSYRTYRFFESLGVEAHVVHAQSLKVVTDSDKKTDKKDAEAIGRYLRLWKKNEIELSMSFIPTPEQCRLKDICRYKEEISSKLGDEVRRIRSHMTRNMEDMPYQYNNISAKKSRDYIRKTWPEDQTLIERLSHYAVLLDESERVKKEVQSMLAGDKTVELLMTIPGIARQTAVQIVSMIVDIGRFESPEKLCAYFGMVPRVRDSGGKEHHGRMTKTGDAMMRSVMERVTLSHILFCDSSVKEFYIRKEKEMGKKKALISASRKMLAVIWSVLSDGHPFRA

SEQ ID NO: 232200 - protein, 346 aa, unidentified
MDATTMAVDLAKHVFEVAIENPAGQVTRRQRLTRAQFARLLRTAAPTQIIMEACATAHYWGRTAQAAGHHVSLLPPHYVRPFVRRQKTDRTDVTGLLDAHRSGMSPVPVKTVAQQELLALHRIRRQWIETRTARINALHGLLGEYGIAFVPSTRRVESLVGQILGDAELPIPGRLRRALTDVLEEIRELTARVVQLERELAALADANDVITRLQTIPGVGLLTATALVGTVGHIHGFRRARRFASWLGVTPREHSSGSRRHLGAITKQGDVYLRCLLSQGARAVLQGARRALVAGRPLTPLQQWGVAVADRRGHNRAVIALVNKLARIIWAVWSRDVVFATPAVGA

SEQ ID NO: 232201 - protein, 347 aa, unidentified
MEYYAGLDVSLESTSVCIVDGGGRIVRETKLASEPEALVSFFRAHGVSMARIGLEAGPLSQWLYAGLTAEGLAAELIETRHVRAAFKAMTVKTDRTDARGIAQLMRLGWFRPVHCKSLPAQEVRALLTARKLLQAKRHDIEMSVRGILRGFGLKVGPTTPKSYAARVRELVAGHPVLSIIAEALLAAWDALLMQFRGLDRRLTALARGSNCVRNLMTTPGVGVIVALTFASAIDDPSRFRSSRMVGPYFGLVPTKYQSGETDVTGRISKIGDAEVRTVLYEAANVMLTRPVKGSALKDWALGIARRAGPKKAKVALARKLSVVLHQMMTSGEAFAPTGLPTRTRAAA

SEQ ID NO: 232202 - protein, 399 aa, unidentified
MRTIIGLDVSKASAKLSVAVDGKTTYDGDITLDAIGFQSLNSIIQSYGGAEVVFEATGVYSRRLEKYLIDNSILYHILNPLVAKKRLDDGSRMRKNDVRDARGLAITEFTKEPVPYVPRFSDPLYRELSDMSRYYDQQTEDIKREKNRVHKLIQLSFPNFTDEIDVDNISSLEVLRLFPHPDTIKGHTVTEIADIILELGLRGIGQGRARTLAERLWRAHSVSYPAIESSSSVVKQLRQQVTNIIEMTVEREVVISNMINLAKKLPEFDILLSIPSIAENTAVRLIGELGDVRRFEKRSQLNSFIGLDLTEIQSGDYIAQRHITKHGNPHARKLLYWTVVNMVNSTAQPNHIRDRYEKKRATATRKKPLLVSSMDRLIKTIHYLINTNQFYSYELARSL

SEQ ID NO: 232203 - protein, 352 aa, unidentified
MALPTLPHPQVLVTLGVDTHADRHVAAALDQAGRPLGTRTISTTPGGYAALLAWASTLGRVDRVGVEGTGSYGAGLARWLRAHGQLVIEVDRPDRAARRRQGKADDLDAHAAARAVQAGTATGQPKAGDGTVEMIRSLRLARRSAVKARTQAANQLKALLVTAPDGLRAQLRHLPLAELVTTAARLRAATKPATPTDAAKLALRSIARRWLQLTQEITALDTQLERLVAMAAPALVAVKGVGTETAAVLLVAAGDNPERLRSEAAFAHLCGVAPIPASSGKITRHRLNRGGNREANWALYLIAVGRMAWHGPTHAYVERRTKEGKSKAEIIRCLKRHIARELYGILASRPAT

SEQ ID NO: 232204 - protein, 367 aa, unidentified
MEKSSKVFVGMDVHKESIDITLAELGGEVRRLGQIGGDRVSLLKMVRKQQSKGGERVFVYEAGPCGFWIYREITALGERCMVVSPALVPKRAGDHVKTDRRDSERLASLARAGELEAIHVPDIRDEAIRDLVRGRDDAVIAQRRVRQQLKALLLRNDIRYVGKTSWTGAHRRWLSNLKLPEPAQQIVFEEYVDAIAVATGRIERLTRAIETQVLPWRFAPVVGALQAMRGIQFVHAVTLLAELGDLTRFGSARQLMGYLGLVPREDSSGEHRRQGSITKAGNSYARRALIEAAWAYRHPARVTRLIATRQTGLPKAACDIAWKAQLRLSSKYRRMNARHLHHNKIVVALARELSGFVWAIGQSVKPQ

SEQ ID NO: 232205 - protein, 354 aa, unidentified
MTKYSIKTFIGIDLGDIKDQICILDRSGEILEKTSINNTISDVNTFFDCFDAPRQVLVAVETGTHSPWISQLLKARGFRVLVGNARKLRLIWDSSNKTDERDAEMLARIARFDPQLLRPIRHRSRAAHMDLAILKGRDALVHCRTSLINFVRGSCKTAGTRLPSCSADAFAKTAIKHIPEDLLAATLPCINTIVELTQKIRQFDSQIEALCDEAYPETMRLRQIKGVGPVTSLAYVLTLEDPHRFRKSRDVGPYLGLVPKRDQSGCSDKSLSITKAGNTYLRRLLVSSAQYILGPFGQDCELQRYGMRIASRGGKIAKRKAVVAVARKLAVMMHHIWKNNTVYDPFYTSYLKAA

SEQ ID NO: 232206 - protein, 343 aa, unidentified
MEAYAGRQFVGIDLHRRRTVIVRTTESGEVLETVRIVNDVERLASVMARAGECPEVVLEATYGWYWAVDALQAGGASVHLAHPLGVKAFEYRRVKNDVRDASDLADLLRMGRLPEAWIAPPATRELRELVRHRAKLVGLRSHCKAEIHAVLAKCGVQVLMSDLFGVAGTQLLDRLDLPSPYAARIASLRRLIDDLDFEIDLFAGIVRGRMAREPGYTAVQNIPGIGPTLAAVFVAEIGDVTRFASAPKLTCWAGLTPKHHESDTHVHRGRITKQGSRLVRWAAIESVKNIPARSVTGVLRERVADRRGRNVGSVAAARRQLEFVFYALRDGHVRALEHPPRVA

SEQ ID NO: 232207 - protein, 380 aa, unidentified
MDKSVLAYKNIAKEHGKANLRIICEPTGEYHNKLMRTARRLGCFTNLVSGEAVAKFRVIETNDYNKTDQKDPRVIATLGKLNKVIRYRILPEDYLMLRKLHKMYDDCDVYITSIRCKISRLLVELFCDYSFKPDFIYSRSGQSLMLNYDANPYRIVADSFAVFAKKMKKYAPRVQKRTLERLYEDAEQSVLNELPRGYLGILEDNLCNLMTDYQRILRRKEKIVGDMKAILQRIRKNDPLIPPPTPAVISEKNLARLLAETGPLADFVSSKQLMRYAGLNLRTRQSGKYQGQNKISKKGRSLLRKVMNAIALPLVRRSQLYGEYYHSKKEQTKMPGSKAMTIVARKLLAKIFGWYRSGKQFNATRFFTCQSRYEELAKAA

SEQ ID NO: 232208 - protein, 338 aa, unidentified
MKITTIGIDIAKSVFHVFAVNKMGTLVKKKQLKRKELLAFIAQLEPCRIALEACAGAHHWAREFTKLGHEVKLIAPQYVKPYVKGNKNDYNDAEAIAEAAQRPNMRFVPIKTQEQQDIQALHRLRERTVKERTALANQIRGLLAEYGIVIRLGMTAVRKALPEILEDGENGLTLRGRACFVQLRDELVEIDATCARYEQQIVQVNQEYEVCRRLDEVIGIGPITATATYAAAGSAKEFRNGRHFSAWLGLVPKQHSSGGKDTLLGISKRGNAYLRTLFIHGARAVLRYAATKQDRFSRWANAVHARRGHNRACVAVANKLARIAWVILAKGESYRPAV

SEQ ID NO: 232209 - protein, 413 aa, unidentified
MFKIFRKNCCGLDVHKTWIYACIGITDANGRTVYKQARFSSFTKGLNELAEWLAKYNCKDVCLESSGKFWIPVFNILEKTCFVTLAHPKYTKPQKGNKTDRKDAKWICDLFMCDMIKPSFIPGLEIRQLRDLMRYRTKLTNMKTSEKNRALNCLTVSNLKLDDVFSDVFGKSSTSIIQYLLEHPGESFDVRPFIHARCKTPVEEIQAAVEGAISVPQAIKLRQCLNHINEIEKHREEINLEIQALAEPFSPVLELLRTIPGLDTQPITAIAILSEIGPDMSVFPTSKHFISWAGCCPRNDRSARRTKSTRISRAGQSLKPLLVQIVNALLRSKEHPEFKNRYRRIKANRGHKKAIIAICKMLLTAIWNVLSKVEPYSAKGYLEPKPAKEEKVLTQSQALDLLRKRGYTIIDSA

SEQ ID NO: 232210 - protein, 340 aa, unidentified
MDKAIMIGLDIAKNVFEVHGRSAAGEVVVRRSLKRSQVEKFFAKLPQARIGLEACGSAHHWARLLGKLGHEVRLMPPAYVKPYVKRNKSDAIDAAACCTAMSQPDMRFVPVKTVEQQAALSLHRSRDLLVSQRTQLGNALRALLAEFGIVAGKGKAGLARLIDELRAGTLELPDDAVAAATALADQHAALGAAADALERRITAQAKADKTAVMLKTAPGVGPLSAHATLATLPDPSLFKSGRDFAAWLGLTPRITGTGGKTRTGRITKQGNQPLRRLLVLGATAWLRQVRANPEKGSPWLRGMLARRPAKVVAVAQAARTARILWAMLTHNQPYRAPAIG

SEQ ID NO: 232211 - protein, 380 aa, unidentified
MEKACGLDVHKNSVFACILDEQGKKIFEKRFGTLTPDLEKLRDTLVDHGCGRVAMESTSVYWMPVWRLLDSDFSPTLVNPYFVRQLPGRKSDAKDAAWLAECLQKNLLKSSFVASEILQQMRQYTRQHRRLTKSRIRLEQQLDNILQRCNIRFSNYVSNQGNNASLRKIIKKLIDGERDPKQLCNLVHGRTTNKHGKQIITDSLSGVIGRADIEMLKQCMEQIELIEKQQATCLNHLEELADQNFAEEISLLCTIPGIQKFSALCILAEIGNDMSAFQKATHLVGWAGLRPRNDETAEKVKSRKILHGNKYLREILVNISWAAARSNKTFLGKKFYALSKRMKSQKALIAITRKILVIVYNVLKTKQPFDPKKNLQADKA

SEQ ID NO: 232212 - protein, 399 aa, unidentified
MLNPQTLQLRVGVDVGSQRHSVAVGLTDGSLLEEFEIPHTATGFGDFFARINEHAKRHPYPIAVAMEGYNGHVRPLDSLVKARGWRLFNVNNLKLARFKEIFPAAAKSDRIDSAKTLELFQLHDHLPMAGDVLQEVMATPEENDILKRLSRRRRRLVNERGRVMNSLQADLQAVAPGLLHITRDVANLWFLNFLTCRKGLLELARVRRASLLKVPGIGTTYADAIQAWQSRAFFGHDASLVGDMIQQDAARILELKRQIKALEERMADVAESSSIASQLASIPGYGSICSAELAGEIGTIERFRSEASLALYLGMATLDNNSGKYRGSKAPKHVNARAKAAMMVAVDHHRKRVPQSQRYYEKKRADGKRHNQAIRALGRHLCRVIFKMLSQDRPYRIDP

SEQ ID NO: 232213 - protein, 350 aa, unidentified
MSQTPKTVGIDIGKNSFHVVGHDERGAIVLRQKWSRGQLEARFANMSPCLVGTEACVGAHHLSRKLKALGHDARLMPAKYVRPYSKGQKNDFRDAEAIAEAVQRPTMKFVATKTADQLDLQALHRVRERLASQHTGIINQIRAFLLERGIAVRQGQRFLRAELPRILGTPPEVLSPRMVRMIEGLAGDWRRLDERIDGLSGEIEAIARRDAGCERLMSVPGIGPIISSAMVAAIGTGDAFSNGRDFAAWLGLVPKQMSTGDRTILGKISKRGNRYLRVLFVQAAWVVLIKPKIWERHGLKPWIEAAKKRLHPNVLAIALANKLSRLAWSVLAHGRGFETSPITNATAQPT

SEQ ID NO: 232214 - protein, 348 aa, unidentified
MDKITAVGLDLAKQIMQVHGIDAAGRVVLRKAVRRERLLALLAQLPRCVVGMEACSGAHHWARALRQLGHDPRIMAAEFVRPFRKSLAAKNDANDAEAVCTAVVQPNMRFVSLKSVEQQALLSLHRIRQGLIEERTATINRLRGVLAEFGVVLPQSSVVLQRALSAVLADEGRLPVLVQRSVQVLREHLHDLDSRVAEFDRDIAQHAKSSAPAQRLVALSGVGPLTASAVVATVGNAQDYRNGRQFAAWLGLVPRQYSSGGKTKLGRITRRGDAYLRALLIQGARSTLQAALRRAPARHDRLSAWIVQLAQRVGYHKTLVAIANKHARIIWALLARDQSLDLARASTH

SEQ ID NO: 232215 - protein, 383 aa, unidentified
MSTISFDQENIITVAIELSRSTWLIAAQLPGFEKPRFHKIVAGDTTALLSHLSLLRSCASEQLGCAPAVSCCYEAGRDGFWLHRFLTAHGIANHVLEPTSILVNRRARRAKNDRLDAQGMLRVLTAYLQGDRQICSMVRVPTTQQEDAKRIHREREHLVQERLRIENRIEALLFTQGIHKRPSLRSWERDLAAMRTGDGRVLARHLRAELNRLRRRLVMALELIREVEAERDAAACADPQSLTCRKIDALCRIRGIGANFATVLTREVFYRSFDNRRQLASYVGITPMPYQSGSMDRDRRISRAGNPRARTTMIQLAWLWLRYQPGSDLAKWFRDRVGTRTGRTRRIAIVAMARKLLIALWRYCEHGVVPAGVDFSIEVTAAS

SEQ ID NO: 232216 - protein, 319 aa, unidentified
MNTTTAAHINRSERNVGIDIGKSMLDTCIYEVDIYTQHPNTPEGVRQLLKQLSRYKITRIIVEATGGYERALVEACADKELPLVIVQPMQVRQFAKAQGIMAKTDKLDSRLIAQFGAVMKPEPKPLNSKKIRYIRDLLSRKRQLNDMRTQELNRQHKAPAVLAATYKRVLKVLDKDIDWVNKLLAKAVSEVTEWQRTYEIVSSTPGIGDGVAFTLLGELPELGNLSARKIAALCGLAPFNRDSGAMKGRRRIQGGRAPIRTVLYMAMLSAIQCNPIIKRFYQKLVAQGKHKKVALTACMRKMMTILNAIVRDNCEWQAS

SEQ ID NO: 232217 - protein, 354 aa, unidentified
MSQFIIVGCDLHDRSMRLKIAVDRGEPVSRTWANTPSSRKALIGDLYRRAGAVGGARIVMGYEASGSGFVVCDELEAAGIACHVLAPTRMEKSPKHARGKTDDRDALDVLGRLRGHLLAGNELPSVWVPDVQTRDDRELVRVRLEASDKKTRIKTQIRWLLKRQGQEQAPVEPWTIDYYAWLDGLCHGALPFGAAAALSSLVRQLNSVEQEIDQLDKAVRELSEQGRYQSAVKALRKLKGVGVLTAMVYLTEMGDLGRFVNRYQIGSFLGLTPSSNESGQADDRKGHITRQGSGRVRKVLCQAIWNRVREGGPDHNKYQRLVVRNPKHKKIAIVALMRELAVIMWHRASEAAAA

SEQ ID NO: 232218 - protein, 343 aa, unidentified
MKDTIYDHYIAIDWSIENMAIARMTKKSNKIILIDVPSDIVEMKVYLKKLRGSKILVVEETTTSQWLYTELRDYVDRMVICDPHRNKLLNDGPKTDKIDAAKLVHLLKAELIKEVYHSTDKFLYLRRFVSGYEDLVKAGVRLKNQRYSLLRACGKRGFEWAGTKLDSEGDQFVLDCMDRQIEAHKQEKEGYEKEFERLAKDYPEIRHQKSLPGIGPIHSVKIVARVVTPYRFADKGHFLSYIGLIKLEKISGGRSYGRKNSRYCRQLKSVYKTSTWAAIGGNNPINDYYEYLIREKRYPEHNARHKACRRLAILSLGVFKSGKKYQPYRRDHVKGNKEGISGL

SEQ ID NO: 232219 - protein, 385 aa, unidentified
MRSVGLDLGARHIAFCEVVAGKVVGRTSVRRLGELEALLGPETAPAQVAFEASREGWHVHDVLAGWGKQPVMLDTTRVQQIGVGQHSRKNDALDAEAMAIALDAGRVPMAHVLSPARRALRAQLSVRGELVEMRARQVTLLRGLARAAGVLVASSSTDNFLQKLQEAPVNRATRTLMAPLVATLAVAQEQLAAVDKEIAQVAKSDPIIRLCATAPGVALIVAATFVSVIDEAKRFRNAHAVSAYLGLVPGENTTGGKRRLGSITKQGNTHARLMLVQSAWQILRAGDANDPLRRWADTLAKTRGKKIAAVALARRLAGVLWAMWRDGTVYDPGLQARESAEGLQTHAQSQELRAQAMARVARKIQRRERTPSRTSRAKTSRTCAM

SEQ ID NO: 232220 - protein, 393 aa, unidentified
MVYVGIDVAKDKHDCFIVNSEGEVLYDVFTIQNNISGFEDLLFKIKTAEQNPDKVKVGLEATGHYSCNILGFLKTVGLETIVINPLYTSLSRKSMSLRKTKTDKVDARTIANMIMSDVSLKPYSDKLYHNEDLKSLTRYRFDKVSQRAKLKQSISRLVNILFPELETLVSTLHGKAIYALLSEFPSAHHIASANLKHLTHLLDSASKGRFKRASADKIRETARHSIGLYSPAKSLELKHTIKLIYELNEEIAEIEAEIKKIMDAINSPILSIPGIGMNIGAIILSEIGDFSRFDSPDKILAFAGCSPSTYQSGQLYSSHAKMEKRGSRYLRWALLNAAAYVCNWEPTFSAYLAKKRAEGKHYFVALSHAAKKLVRLLYHLETTGETYQPKKSS

SEQ ID NO: 232221 - protein, 343 aa, unidentified
MQTITTIGFDIAKSVFQVHGVDAAGEVVIRRQLKRRYVLAFFQKLSPCLVGIEACASSHYWSRELQALGHTVRLMPPAYVKPYVKRQKNDMADAEAICEAVTRANMRFVPTKTREQQSCLMLHRTRHLFIRQQTAVINSIRAHLAEFGIVAPVGRKGVTELLHVVADPSDKRVPEVARACLAALGTQLLSLKQQILEFDRLIMAWHRSNQTSKRLHYIPGVGPMLATALVASVADPRTFRSGRNFSAWVGLVPKQHSSGGKDRLGSISKQGDRYLRSLFVAGALAVIRYAKIHGTKHRPWLTALLARRPTKVAAIALANKIARMVWAMMARGERYKEPVALAR

SEQ ID NO: 232222 - protein, 355 aa, unidentified
MIIIGADYHPGFQQIAFVDTDTGEFQERQLQHREEAEKFYRELAAQGQKVRVGMEASGHARWFERLLAELNFELWIGDAAEIQTKRVRKAKTDREDARLLLRLLLEDRFPRIWVPSWENRDLRQLLWHRHRMVQARTRIMNQLQAVALNEGLRAKKKLWRECGRQQLESFPLAPWANRRRQDLLALLDRLNPTIAELNQAVNQEVERCPAAQRLMTHPGVGPLTALAFILIIGEAERFGCGKQIASYVGLVPLEKSSGNRRRLGHITKQGNSMLRFLLVEAAQVTARSIPEWRSRYFHLRMRRGRKIAKVAMARRLAVRLYWMMRKQWDYEQLKKFGSHAGQPGTGDGVYKTPRN

SEQ ID NO: 232223 - protein, 359 aa, unidentified
MRSQVKKIDFTGHNIYAGFDVHKKSWKVTIIAEDAFYKTFTQPPNPETLYNYLNNNFPGGNYHSAYEAGFSGYWIHEKLTSLGIKSMVVNPADIPTTNKERVQKEDKRDSIKIARSLSSGTLIPIYTPTIQTQRDRSLLRTRTMLVKDMARYKNRIKSFLFFYGINIDDAFEKPQSHWTQRFMIWLESLEIDQESGKEALQVLISEYKNLRIAMLKVTKQIRDLSQTARYKETVTLLKSVPGIGLLTAMTILTELESVDRFTNLDKMCGYIGLVPSTKSSGEKEKNGDLTSRGHGVLRSAIIESSWIAIRNDPSLMKSYLSYLKRMEPNKAIIKIAKKLLSRIRFVLVNKKPYECLIEK

SEQ ID NO: 232224 - protein, 343 aa, unidentified
MDHFAGLDISVKETSVCIVDGTGRIVQEVKVASEPEALLPVLTNPAYHIKRIGLEAGPLSQWLYSTLGESNLPVICVETRHMRAVLKAQINKTDRNDARGVAQMMRVGLYRPVHVKTLRSQKLRMLLTHRKLLQSKAIAIDNDLRGTLRNFGLKVGMVGTVKFEARIKELVENLPDLAVLVEPLLVVRRVLHEQLGILHRRLLAIARDDEVCRRLMTVPGVGPVVALTYRATVDVPARFRNSKAVGALFGLTPAQHQSGESDRTSGISRCGDEMMRVMLYEAAQIMLVRSARWSWLKAWAMNIARHRGMKKAIVALARRLAVIMHRIWIDGTEFRWTREVAAA

SEQ ID NO: 232225 - protein, 371 aa, unidentified
MENGITFVGLDAHKKKISVAVLMPDQTAPLQWDAPNEAGAVKRMVRRIEREAPGEVRFCYEAGALGYALQRQITEAGSEKVSCMVVAPSLIPRKPGERIKTDRRDARKLAELFRAGLLTEVQPPTPEDEAVRDLCRAREDAKEDLTRSRHRLGKMLLRKGVVYSQGNAWTARHRLWLRGLHFEHASEAEVSDDYLLAIEQLEERLHGLEEKLEGVAQKTPYVEPVGWLRCFRGIDTVTAMTIVTELYGFERFHSPRGLMAFLGLVPSEQTSGYDPKRGRITRMGNSHVRRILIEAAWHYRHRPAVASLRKRRQGQPAEIIALADKAQQRLHRRYHRMTEKGIPAPKAVTAVARELTGFVWAALRHTTKASA

SEQ ID NO: 232226 - protein, 340 aa, unidentified
MSVVIGIDPHKGSHAAAAVNGADQAVAELEVAASKRQIGELLAWAERFPERRWAVESANGHGYLLAQQLVAAGEHVVDVPSTLASRARVLDSRRSEKNDANDARSVAIVALHQSGLRRVAAEDHVAVLRMLAKRHKQLASLKTQAASRLHAVLAVLLPGGMSGELSSAKASRMLRRIRPQTMVETERKRIAHQHLAEVRRLEKEKKASVERLAVAVEASGTGLTDIYGVGPVVAGLLIGYTGDVTRFRTRHHYAAYNGTAPIEASSGGRRRHRLNPRGNRMLNHAIHLIAITQLRHPLTKGRVFYERKLEEGKTKKEAIRSLKRRLSDVVYRQLNTDHNR

SEQ ID NO: 232227 - protein, 412 aa, unidentified
MQVQYPHCCGLDVHKATVVACLLHVDSQGQRSKDIRTFGTTTDELLALGDWLRAGNATHVAMEATGSYWKPVYNLLEGQLTVWVVNAAHIKAVPGHKTDVHDAEWIADLLQHGLLKPSFIPDRFQRELRDLTRTRTNVVDERSAVVNRVQQVLEDANLKVAGVATDIMGVSGRAMLAAIVAGTTDSATLADLAKGKLRNKREQLERALSGRVGAHHRLLLSMHLAHIDFLDEHVAQLNAEIAERLKPFDDELSRLDAIPGVGRATAEVLLAEIGPDMTRFPTAGHLASWAGMCPGNYESAGKRKRGKTRKGSKFLRRALTEAARAAARKRGCYPAAQYRRLVVRRGPGKAAVAVGHTLLITAYYLLLRHDTYRDLDPSLLDERLRTRTRQRALTQLQALGYEVTLTEHPAAA

SEQ ID NO: 232228 - protein, 313 aa, unidentified
MSNSKVLKEEQVSNHPQAIATVIAGIKEELSMSNDCFIICAEHTGQYTYPLICACKSVGSKLWLENASQIKYCSGVTRGKNDKVDARRIAEYAMRFFDKAKPYQRPIEELMRLKQLEAERSLYLTDLAKYKAQLSDQEGFMEDKIFKRKAKRLKEMIKSLEKTLKEIAQEMADVIYSSEELSRQMRLLKSVEGVGPVVAMNMIIATEAFTRFDNPRQFNCYVGVAPFAYTSGSSQHSRNRVSQRAVKYIKCLLHIAAVAIAHKKTGDLKTYFERKVAEGKNKMTVLNAVRAKLVARMFAVIRNNRVYQPILSV

SEQ ID NO: 232229 - protein, 480 aa, unidentified
MAGDGKRFQTWRGSQKERKELARRLKSDDPGLDVVHPDAAGIDIGNASHYVAVSPQRDAEPVREFGCFTADLHRMARWLQQCGVKTVAMQSTGVYWIPVYDILEEYDLEVYLVNAKHTKNLPGRKTDVQESQWLLKLHTYGLLRNSFRPPEEIRTLRTYWRHRAEQVQGAAECVQRMQKVLTQMNVQLANVISDLSGTTGQAIVRAIVAGERDPHRLAQLRNYRVQASEEEVARSLQGNWRKEMLFALRQELELYDFYRQRVAECDRQLETELKQWPARDTAPVLEDKEGKGGTGNPRKPRRKPTGNLPQFNLAGELERITGVDLTRIDGVDLMTAQTVVTEAGLDMSCWKTEAHFVSWLGLCPRNEISGGKVLKRATRHVVNRIATALRMAATTLLRSQTYLGAQYRRLRTRLGAPKAITAMANRLARLIYRMLKHGNQYVDKGLQYYEEKYRAQQIRLLRKKALQLGYDLTEVAPATS

SEQ ID NO: 232230 - protein, 337 aa, unidentified
MKFCGIDLHSNNSVVVVTDETDRVLVSRRCPNELPVILSLLEPHRDELMGVVVESTYNWYWLVDGLKAAGFEVKLANPVAMQRYDGLKHSDDKDDAAFLAHLLRLGILPTGYIHPPEERALRDLARKRIQLVRTRTQHILAVENIAARQLGHSLSCNEIKSLSATSVDRLGLPTDVALAMKANVAVVQAVEAQIAGLESRLLHQVKLRPEFSLLKTMPGIGEILATVIMLETGDINRFADVGNFASYARCVKSAHYSNGKKKGEGNTRNGNAYLIWAFIEAANFARRFSEEAKRFFEKKKAKTNGVVATKALAHKLARASYHILKEKQPFDAKRCFA

SEQ ID NO: 232231 - protein, 390 aa, unidentified
MYLRNCPLGSLQSRGQAGVALPPAGGRATAGAGTIASGIRSQRDAPQSSFRPAHCPKLEPLLERFGPAAVAARIHASMSQNNTTILHVGLDIAKSSLQLDLAEKPHSLTNNAKGHAQLLKLLRAHPSAHVVCEATGGYEQPVVRVLHAAQVPISIVEAGRVRHFAKAKGLRAKTDPIDATVLSDYGRAIKPIPTPVPTAAQARLRELSTRRLQLIDTRTSESNRAFHYTDKLSQRQSRQLLGLLDKQIAACDAAIAELIAADENLQCQAARLDAIPGVGAVTAATVLAELPELGRISDEAASALVGVAPYNRDSGDQSGGRHIAGGRTAARCALYMAALCAVRFDPILKAFYIRLRTNGKKPKVALVACMRKLVVLMNRLLKNPNFHLAN

SEQ ID NO: 232232 - protein, 419 aa, unidentified
MTRRDDSRIIGVVYPICCGLDVHKESISACVIWADKDGVDQYEVEVFGTFTDDLMRLRQRLLDYECPVVAMESTGIYWRPVHNVLEGYLRVVLVNARDIKNVPGRKTDIGDSKWLAGLLRHGLLKSSFIPPQQVRQWRDLTRLRKKYVQTVGDYRKRTHKLFESANIKIDSVVSDLFGVTGRNLMDLLVTDRKALTLSDVAGCVRGQLRGKEAELFRSIQGFFTDHHRFILKMLLSTIATLEAQIEALDHEIGCAMKGNEPLLERMKKAPGISDVSAFDILAEIGPNLDSFPTDSSLASWSGLCPGNNESAGKRKSGRSPVKKHHLKTIMIEVAWAAIKKKGSYFKDKYYRLKARRGPKKAIVAIAHRILLGIYHVIKDGVDFRDLGEDYLTLKNKSQKIFHLRRQALSLGFDLVSQTM

SEQ ID NO: 232233 - protein, 336 aa, unidentified
MGLDQHRAQISAEWMDTITGEISRARVAPADRAAVRAFLKQFHGEPLEVALEATTGWRFVVEELKQVGAEVHLAEPAEASALKGKKKRAKTDWADARHLRELLLIGRLPESWIPPAHILDLRARVRTRHLLSHQRTEWQQRIHAVLYHHGVPQRRDLLTIQKREWLAELTLPAAAREQLTIALSVIDALDLKLVPFDVELRAYAKKQPGCRVLMDQIFGVGGLTSVTILAELGDPRRFDNSRDVVRYAGMDITVHQSDAHRAPGHLSRQGPPALRWALYEAAQRARFPASPDRPYYEQLAARIGGNRACLALARKLLKRSYHILRELGDEALAPVA

SEQ ID NO: 232234 - protein, 452 aa, unidentified
MTRAKTGDHPEMKLVNPGAAAVDIGSTMHMAAVSSESCAMPVRAFGTFTRDLHDLAAWFRSCGVTSVAMESTGVYWIPAFEILEQHGFEVILVNARYAKNVPGRKTDVSDAAWLRQLHSYGLLRGSFRPEAEIATLRAYLRQRERLVEYAAAHIQHMQKALMEMNLQLHHVVSDITGVTGMRIIRALVAGERDPDILASYRDVRCHSSLETIRAALVGNDRAEHVFALAQSLELYDAYQAKIAECDGRLEAAVNALTVRAKRPAPLPKPRFRQKPTGAPAFDVRAALNGVLGVDLTQIHGIGPSLALKLVAECGSDLTAWPSAKHFTSWLCLAPGNKISGGKLLSSRTRRSSSRAAALLRLAATTIGRSETALGAFYRRLSSRVGKQKAVTATARKIAVLFYNTLRFGMIYSDPGAAVYDERHRTRVLANLQRRARTLGYDLAPLPETARVS

SEQ ID NO: 232235 - protein, 353 aa, unidentified
MTSTKYIGMDVHKESISIAVRNDAGKIVMECVIETKANSILDFIHGLRGELQVTFEEGTWATWLYDLLKPHVTKLVVCDPRKNTRQGNKNDQIDARELADRLYMNKLSSVYHGGASVRTLKELARSYLTISKDLARVMSRVKAIYRSWGIPCAGKQVYAPRHRADWLAKITEVGVLRRAEFYYQQLDALRSLRHEVRRDLLAESKKHKATKLLCQIPSIGPIRAALLIALIQTPHRFRTKRPLWKYSGFAIETHSSADYRSVKGQLQKAKKQVSVRGLNRDCNHDLKNLFKSAATIASVKPGPFQEFYAALVAKGMRPEMARLTLARKIATIVLIVWKKGVSFDAQYLKPQTA

SEQ ID NO: 232236 - protein, 391 aa, unidentified
MVCVGIDVAKDKHDCCILDSEGTPLVDCFTIPNNMDGFKSLLQTIQDCSQKSDKIKVGLEATGHYSYNILGFLLDNDLPVYVMNPLHTNLYRKSLSLRKTKTDRVDAKTIATMLLSDVDLKSYTDTAYHNEELKSLTRYRFDKVQERAKLKQSVSRLVTILFPELEQLVSSIHGTSIYALLSEYPGAKQISEAHLTRLANILVKTSRGHYRKDKATHIRDAARTSIGSVMPAKSLELKHTIKLIQELTSEINEIEDALRKIMDELKPPILSIPGMGFHSAAMILAEVGDFSNFNSPDKVLAYAGCSLSTYQSGKLTNCYAHMEKRGSRYLRYALYTATKYVCYWNPVFTEYLTKKQAEGKHYNVALSHATKKLVRLIYALQKSGKAYLAVT

SEQ ID NO: 232237 - protein, 345 aa, unidentified
MQPMYYIGLDVHKQKISYCVKDSSGKLYAEGWIPATRFDLDRWMKTLPQPWSAALEATMFSGWIYDHLKPHATELKVAHPLMLRAIAAAKKKNDRIDANKICDCLRCDFLPECYMAPTAIRERRRTLRYRNLLVRQMVQMKIKIGTLLMEAGVSYNKQKLHKVGYFRELLTSNPDINEGLRPLLRLCRETVVRLSKLESALVRSLERDQFLVARVERLMSIPAIGPITALTWALEVGEVQRFSSIKKAISFCGLCGAEKSSGNTVQRTPLSKQRNKHLQTTLIEAAKMAPRYSPTLALLYDREKQKGNANRATLAVARKLVAYLMAVDRGQTHFLVVDQEIRTAA

SEQ ID NO: 232238 - protein, 347 aa, unidentified
MITLGVDAHKRTHTIVAVDSNGRQLASKTITTTTKDHLGLLSWAEQLARGNGLVWAIEDCRHLSRRLERDLLAAGHAIVRVPPKLMAHVRDSARTYGKSDPIDALAVARAAQREPDLPVARLDGPDRDVRLLGDHRESLVAERTRVINRLRWFLYELDPSWEPKARSLDRISTLDQVRTHLEPLTGTVARLARDLLERCRTLTQQIDELTAEITTLVTDMAPSLIAIPGCGAITAAKILGETARVDRFRSKDAYARHNGTAPMPVWSSNKARHRLSRTGNRQLNAALHRIALTQAHWHEPAKQMMTRRKASGDSGMEALRVLKRRLSDVVYAALQADLTTGVKTAAA

SEQ ID NO: 232239 - protein, 408 aa, unidentified
MERFYLGVDWADQFHQVWVSDFDGKKVVEKKVTQNVEGLAEFGRWLDEQRAKPIELWAAIEKPQGRIVDFLLDHGVEVYPVNPKALDRARDRFRMSRSKSDGFDAYVLAQFLRTDHGHLRALKPNSVQAQELKLLTRDQQRLGHQKTRLLNQLTATLKEYYSRPLEVFSDLETQIALDFLKQNPTPDDLSKLTRRQWNRFAKREHHLGAERAQELWEQLNQPQLTVPEHVVRAKAHLLRVLLGQLDPLRKAVKSYEERIKSFFGSMPTAELFKGLPGAKTGTIIATLSAELGDAKSRWESFRHLQAEAGVVPVTKTSGKSRVVQFRFSCNKIMRHAAYWLAFVSLNRSEWANHYYRDQRAKGHSHHQSLRALGAKWLKIIFVMWRDHKPYDENYHLANIARQKMRQAA

SEQ ID NO: 232240 - protein, 352 aa, unidentified
MSEKIIPEIAVVGIDIGKNTFHVIGLDCRGAVVLRQRWTRSQVAARFANMPPCLIGMEACVGAHHLSRQLKALGHDARLMPAKYVRPYSKGQKNDFRDAEAIAEAVQRPTMRFVATKTAEQLDLQALHRVRERLVSQRTGIINQIRAFLLERGIAVRQGYRFLRTELPGILAAPSDVLSPRMARIIEDLAADWRRLDERVERLSIDIELLAHNDAGCERLMSVPGIGPVISSAMVAAIGTGEAFSRGRDFAAWLGLVPRQISTGDRTILGSISKRGNRYLRVLFVQAAWVVLIKPKSWERHGLKSWIEAARKRLHHNVLAIALANKLARIAWSVLARGRGFEATFAASARAL

SEQ ID NO: 232241 - protein, 406 aa, unidentified
MNLNAVGIDVSKRKSTVSVLRPGGDVLMKPFDISHRTADFQTLADKLKALDGETRVVMECIGHYYEPVARELSQAGLFVSAVNPQIINKFQGQGNPLRKVKTDKADSVKIARYTLDNWANLKQYTLMDELRSQLKNMNRQFDFYMKHKTAMKNNLIALIDQTYPGANTYFNSLAREDGSQKWVDFLDTYWHVDCVRKMSLQAFTEHYQKWCSRKKYSFRKSKAEEIYGIAKELVPVLPKDNFTKCIIKQAVAQVNAASQTVEQLRSLMNETASKLPEYPVVMAMKGVGPSLGPQLMAEIGDVTHFTHKGAVTAFAGVDPGVNASGDYSQKSVHASKHGSPMLRKTLFQIMDVLIKTKPDDAVYLFMDKKRAEGKPYYVYMTAGANKFLRVYYGRVKEYLSALQESY

SEQ ID NO: 232242 - protein, 415 aa, unidentified
MDDRQLWYAGVDWGSQSHHVVLTDGDGRKIGERSFKHGGEGLAEMAAWLMAASCAAEPGQILAAIEVPHGPVVETLIERGFKVHAINPKQMDRFRDRFTMAGAKDDSRDAEVMASALRTDPRCFRPLAAADPIIVELREWSRIAEDLGVERNRLVNRLREQLWRYFPALLELEGDLGAEWLLELWEAAPTPNTASRLREATIAKLLKRHRIRRFDAAFVVNTLRRPPVCVAAGTVEAASAHVALLVPRIRLLNRQIKDAHSRIDGLTARLMPAEAAEPGQKKQHDAEILASLPGVGRTVLATLLAEASDALQRRDYAALRSLAGVAPVTKRSGKSCVVVRRQACHDRLANAVYHWARVAVQHDPRSRAKYAELRRRGLSHGRALRSVADRLLNVACAMLKSGAAFNPSSAAQKPA

SEQ ID NO: 232243 - protein, 424 aa, unidentified
MKFKMQDKQNQLIERISIKHLIIGIDIAQQFHVARAVNFRGIVIGDPLTFENNEDGFARLIQWINRFKALKGLDTTIVGMEPTGHYWINLSKWLYERNIEVVTVNPHLVKRNKENRDNTQSKSDKKDALVIADMVKNGYYSFIRPSSEIFEKLRVLMSNRDMTVKRLVSAVNQINRWVDIVFPELRQVFKDVKGKGAIATLRLFPTPLEISSMKPQDIVNGWKTLMKRQAGLRKAQLLIELATQSVGTPQALDAYKLHLEQLLEEFDLATAQLERVEKEVTEVLKKIPFAKKLLAIKGISEIALGGILGEAGDLSGFAHGNSLLRHAGLHLAEASSGKWKGQIVLSKRGRSRLRRFLYLATMSLVMNNPDFKELHSNNVNVKKMKKMKSIMKLINKFARILVGMARKNESYSSDKVKPLISMAA

SEQ ID NO: 232244 - protein, 440 aa, unidentified
MAKLKNKFSIINQHTAGIDIGSRKIFIAVANQDVRSFDTFTSSFKKAIAYLKDNNIESVAMESTGVYWITLYDMLEQAGFDVCLVKSTMIKNVPGRKTDVQDCQWIQQLHSYGLLRSSFIPDNYIRKLRSYVRLRRTNIRLASDHIRRAHKSLDLMNIKLHFVISQINGVSGLRIIKTILNGERNTDTLTELCEDQILKNKRELVRESLQGNFREEHLFALQQAIDGYEFYRQKTLECDKQIEKLLHQYTLNLPSPDKINKPKVIRHNKPQINNLHLNLMKMTKGNDPSQITGLTDSTLLQVISEVGTDLSRFPTEKHFTSWLGLAPNSHQSGISNKKKKFRNSSVAGQIFRISAQTLVLSKKNALGAFYRRVQSRKGKLTAMKATARKLAVIYYNVMTKGIDFVEYSIKQYEQTIKEQQLKRLQKQANHFGFTLTPQLD

SEQ ID NO: 232245 - protein, 354 aa, unidentified
MSRLHYLGLDAHCKESELKAVTPTGRVTHAWRGPTTIPDLKEAITAIPGPKHLAVEESAISDWLWRNLAPAVERFIICEPRRNHLIAKDVEKDDPIDAEKLAQLLRGGYLKAVHHAESFDRMVFKQHVGLYHDLVGKRVCEANRIMGYLRRYGIFVHEKAFADSKDRDAVLARMPNQPVARFNLRLLWEGYDAAAEQVKRSRRQLIQLARKEPQIRRFLELPGFSWIRAATFFVYIDTPWRFRNKSALWKYMGIGLERHRSGSGPGRLHVAWFANRPLKNVILGAAKSAIAAGNNPFADQYARWIDQGISCRNARRNVARSQAATLWGMWKAGSDYRPEWVGLSLASAGSVKCG

SEQ ID NO: 232246 - protein, 388 aa, unidentified
MPETSTNEGASTSFDRDTTLVLAIELSTKNWVLAAHVPGLPLKKAKQTILPAADALVAAIGSYRARAAAAGRSVERIVAIYEAGWSGFWLARWLTARGIDVHVVQPSSVLVDRRMRHAKSDGIDADLLLRTLLAWLRGEPRVCSMVPVPDEKDEDARRSMRERAELIAERIGLTNAIGAILATLGTGDFNPLRRDRRRKLEELRTALDTPLPPHAKSKINRLLTRLVLVLDQICQIEQERDLILQAEQPDAAGRMIQQLIQLRGIGVQSATVVVREAFVRRFANGKALGAYAGLSPTPYSSGGMEREQGIGKAGNRRLRSIMVELAWLWQRYQPGSLQVRWFRERSGPTGKRLRKVIIVALARKLLIALWRYTMNGVLPNGAVLKSQI

SEQ ID NO: 232247 - protein, 392 aa, unidentified
MFIVGIDIAKRFHEASVIAQDGSLVRKALRFANSQAGYNKLMNMVRGLNEPVVFGMEATGHYWMTLFTHLRNDGFTVHVINPIQSDALRGMYIRKTKNDAIDSMIIADVIRFGRYCETSMQPGDLQAMRELCRQRFYVIDMASDLKRKVLALLDQVFPEYEKLFSDTFGASSMELLSQYTTPEEMLSVSTEKLAELLETASRGRLGLAKAEEIQEAAKNSFGIVLASGSFALIIRQYIEQIRSLESSIAVFDTEIARLLAGFDTQLTTITGIGPTLAAVILSEIGGDIKRFSSPAKLAAYAGVDPTVKQSGDFTGTRMKMSKRGSPYLRRAIWLASTVAAFKDPAIHALYERKRSEGKDHMTVIGHVCRKMVSIIFAVLRDNTPYSPAVISD

SEQ ID NO: 232248 - protein, 338 aa, unidentified
MIVIGVDVHKQSVTAVAIDEAGRPLGERTIAVGSDELVGWASALGAGRLWAVEDCRQLTRWLERQLLAVGEELVRVPPKLTVPERRAGRTRGKSDPIDALAIARAALREPDLSRPRAGEQVFRDLKLLVDHRDDLVDARRRTQQRLRWHLHALDPTFVVPLRMLSRSSHLERVGRWLGRQDHEMQVRLARELVARCRSLNRTIAELDEELEHQVTEIAPALLELPGCAAVTAAKLLAEIGPIDRFKTDAQLARHSGVAPLEASSGRIQRHRLDRGGNRQLNSALYRIAITQSRYHADARAYLERKKAEGKSRREAIRCLKRLLIRVVFNTLKTSPALT

SEQ ID NO: 232249 - protein, 463 aa, unidentified
MMKRKKLASKAEKPRRGKVDWKTLEIVHPDAAGIDIGGREHWVAISPDRDEDPVRRFDCFTADLEQMAKWLVEKGVCSVAMQSTGVYWMPVYEVLEQSGLEVYLVNARHTKNLPGRKSDVQECQWLLKLHTFGLLNNSFQPSDEIRVARTMWRHRSSLVAQASSAIQRMQKTLTEMNVQIHNVLSDLSGVSGMAILKAILKGERDPWKLAALANPAVKASQTDIAKSLHGNWRNELLLVLRQEVELYETYQDKIAECDYQLRKHLQSLASRVDLQAQPLGARPKGKKAPRGNTPKFDLRSELYRITGIDWSQVNGIDVQIAQTVITEVGVDLSSFPSERHFASWLGLCPMNEQSGGKILNRRTPKVVNRATVAFRLAAQGLLRSQSYLGAQYRRLRTRLGAPKAITAMARKLACLFYRLLRHGQPYVDKGMQYYESHYREQQIRSLAKRAKKLGLELIQPNAT

SEQ ID NO: 232250 - protein, 331 aa, unidentified
MNYSHFVGLDVGKKTFDASLMSADEKELSHKSFNNTPEGIQSLLDWIAGYHLSLSKLLFCAENMGSYVTELSVSSVCMGFSLTLVCPLTIKKSIGLQRGNNDRIDAKRIANYVALHYRKLELYKLPDKDLVRLRGWIIVRDNLVKQKVSSIKLLETFSQMAKLADVTESISFLEEQLKSIKEKILKVEEAMEQLIAASSSLYTNYLLLRSIKGIGIINTIVLLCVTDNFQRFDNPRKFACYCGVAPFEHTSGISIRGKTQTSSLANKEVKVYLTRAAITAISWDPQMKAYYKRKIAEGKHKASVINAVRAKIIARSFAVILRQTPFVTLVP

SEQ ID NO: 232251 - protein, 420 aa, unidentified
MLKPETTPPFVACIGLDWGDQSHAVALQPVQGKTESCTLVNSPEVLHTWLQELAQRFEGRPVALAVETSRGPLIHVFSAYPWLTVYPIHPATSARYRSAFKPSGAKDDQPDALLLLELVLCHQAKLRPLQLQDTATRKLGALVELRRDLVDRRTQALNQLTSLLKSYYPQALELAGKDLSTALALDFLTRWPDLLALKTARPAALKSFYYRHCVRSEELVAQRLALVQKARALTTDEAVLEPALLHLQALVAQLRVFLKHVALLEKQIHSLFQSHEEAYLFRDLPGAGAALKPRLLVAFGQDRTLYPDPASFQKLSGVAPVIEKSGHQSWTHWRWQASRFLRQTLIEWAGQTVIYSTWAAAYYKAMKAKGKRHHIILRALAFKWIRILWKCWQTRIPYDEARYLKQLAARKSPLAVKINP

SEQ ID NO: 232252 - protein, 431 aa, unidentified
MTTSSVPMETEILAYVGLDWAEQQHVICCQAAGSASVETAVVRQRPEQLQAWVAQLQQRFPQGLVAIALEQSRGAVIAALMHYDFLRLYPINPKSLARYREAFFSSGAKDDPNDAALLLDLLVKHRDRFSPWVPDDPLSRQLALRVEHRRQLVNLQTELTHKLSSHLKLYFPQALDWVGELDSLQACDFLQRWPTLEAVQKARPAQLKKFYNQHHCRRPQLIEQRIEQIGQAQALTQDTALVEASYRMVLALVAQLRPLISTLVQWQQEISQLFAQHPDATLFASFPGAGPVFAPRLEAAFGSRRDRFSSAQEILQFPGVAPVTQKSGKSHQVHRRWARPKFLHQSFVEFAAFSIPHCDWARALYQQLRARGQRHWAAIRVIAYKWIRILFRCWKDRVPYDEPKYLKSLERRNPRLWTAIQQLALEKPEVA

SEQ ID NO: 232253 - protein, 376 aa, unidentified
MDVHSTNYTLCAMEPTIGSEDRIFGEVQVSPDYKEIMCFIESLKVKLGLDNNYSIECGYEAGCLGYTLYHQLTNAGIKCVILAPTTMLTQQGQRIKTDKRDARLIAQCLCYGGYHPVYIPTGEDDAVKEYLRMRDDHKLALKKLKQQINAFVLRHGHQYVGTKWTIKHVTWLNKLELDPMYRETLNEYMASYEEQEAKIERYDKRIEEISAEARYQENVKKLGCLLGIRTHTALSLIVETGDFKRFAKGNTYAAFLGLAPGEHSSSTSVNRLGISKAGNTHLRCLLIEAAKGICKGAIGHKSKELRSRQNGQTADVIAYADKGNTRLRSKYYKMIRHGKKKNVTIAAVARELACFIWGMMTGNISAGTSVPAVSQG

SEQ ID NO: 232254 - protein, 342 aa, unidentified
MSSTNTYIGVDLHKKTCYMTVMDKAGIVSKQTEIKNDREEINKFFKTYDKDSKVAVESTMNWIPFYEQVEKMGFEVVLSNPLMTKAVAAARIKNDKVDSKILAELLRTDFLPTAYIQPKAIRDLKELIRQRTVYVEMRTRIKNKVHSVLFKTGDKHDFTNLFGKGGRKFLSELKVAPVYRTELDRYLLTLDNLDLQVKDMEQDIKSKAKADYDCKLLCTIPGVGPYTALMVKSEIGDIARFRSSGRLCNYAGLIPSTYASGEKIRTGRITKRGSKWLRKALVDAVTSSCRNANKISVFYKKLKKSKGTGKAKVAAARKLCSVIFAMLTDKQPFKEFVPVKER

SEQ ID NO: 232255 - protein, 318 aa, unidentified
MSSNPESFVGIDVAKGWLDVAWLDGTALHIDHTEEAIVGLVERLRSQPPTLVVMEATGGLETELASALVAAGLAVAVVNPRQVRDYAKACGRLAKTDRIDAKILAAFAAAIRPQVRELPDEHTRALSDLLARRRQLIDMRVQEKLRLPRASSVQRISLHEHIAWLDERIDRLDVELTHALRSSPAWRDKDDLLKAIPGVGSLTRATMLGLLPELGTLSRRQIAALVGVAPFNRDSGKQQGQRVIWGGRAQVRRTLYMATVAAMRCNPVIRTFYEHLRTQGKPAKVALTACMRKLLVIMNAMLKHRSAWSPTLDTQHGC

SEQ ID NO: 232256 - protein, 401 aa, unidentified
MKEFNAEAVRIEAASALEAVRPAQAGRKYPAYIGLDVHKETIAVAVARVGRAAPESRGEIANKPKTVAKLVERLNQEFDGEVLLFCYEAGPCGYGLYRQLLALGHDCQVVAPSLIPKKPGERIKTDRRDACKLAGTLRSADLTAVWVPDEEQEAMRDLTRARDDMKGQERKARQQLNAYVLRHGHAWPSNKTRWTQTHYNWLESLKFAHDWQQVVLQEYIDAVKAASQRVADITAQMERVLPQWSLAPVVDSLVALRGIDKLAAMVLLAELSDISRIDSPKQLMAFLGLVPSEHTSGGRRRQGAITKTGNSHARRMLVESAWSYRFPARQTAHLKRKAANASDEAKVIAWRAQKRLCGRYRTLLQAGKNTKQTTVAIARELAGFIWDIVCHEMPKVQQAVR

SEQ ID NO: 232257 - protein, 346 aa, unidentified
MKIIGCDFHPSWQQVSWLDSETGETNEQKLVHAGGEAKMFYQRLAVPALIGMEATGNSQWFIELLQDLGHEIWIGDAAQIRASYVRKQKTDKRDAAHILKLVVEGRFPRLWTPDREQRDLRQLVLHRHKLVEIRSRVKNELQHLSLNKGMQKKRTLWSQAGQKLLRELPLKPWASCRREDLLGLLAMLDQQIGKLDRAVQQAAEEHPQAKLLMTQPGVGPNTALAFVLTMGDASRFPRGKQVASYLGLIPREESSGGRQKLGAITKQGNRLVRALLVEAAQIAVRFDPGFRKQYLHRCHQKPKGVAKVAAARKLAVRLYWMLRTQVAYPEIVRIESSPRVPLVGAS

SEQ ID NO: 232258 - protein, 399 aa, unidentified
MLAVGIDISKSKSVAAILNQDGSMHTSPFEFHHTQPELDAFIKYILNSKQSATILMENTGHYHYPVLKAFREAGLPVCMVNAYQIKKFGDMDLRKAKTDKKDAVRIARYALEKSYSLVPYTSMEQKYEDLRFLARQYNQRMLTLKTNKVFLLNLLDETMPGITNILPLTTRTPETSLSVLFINRFKSYDRIKKMGKSRFLDAFEKIARKSRNRQTKTYGLAIYEAALRNITTRGENEYTLAAQDQCLELVCESQKAADSIILKMQTLAETLPEYAVLRSMAGVGDRLGPLILAEIGDIRRFHSGKALNAYAGNDAPPYQSGIFESHNRHISKRGNAALRKYCFEVMQALKLTRPQNDPVYLFLLKKEQEGKPYNVAKMAGVNKFLRIYYARAMETLKQQ

SEQ ID NO: 232259 - protein, 338 aa, unidentified
MTVVMGLDQHRAQITAEWIDTETGEVSRSRVAPADRASVRRFLGRFSGQQLEVALEATTGWRFVVEELRRVGASVHLAEPAETSGLRGPKKRAKTDGADARHLRELLMINRLPESWIPPDHILDLRARVRLRHTLSHQRCEWQQRIQSVLYHHGVPARRQLMVSDGREWLAAQPLPGAAREQIAVFIAMIDALEVQITPLDKELRAYARRQAGCKALQGQYGVGELTAVTILAEVGDASRFSSSRDVVRYAGLDITVKQSDQRRSAGHLSRQGPPALGWALYEAAQVARRPGSPDRAYYLQAAERIGGNRACLAVARKLLKRCYHALRELGEEALQPA

SEQ ID NO: 232260 - protein, 351 aa, unidentified
MSTIVKQVVGIDVAQNELVVALGRMHSDWTPEIYAHKTFPNREAGFKALLAWVSKLSDPHLELLYVMEATGVYHESLAYFLDDQGYKLSIVLPNKISNYFRTLEVKTLTDKTASEAIARFGLERKLKTWKRPKTICKRLRQLTRERHQIVEQRTVAMNQLHAEKAAAEPAKSTITRLRKLIHFLDRQVEQVRKEIAALIKEDEEVHRQVTLLTSIPGVGELTAASVLSETNGFELITGKKQLTSYAGLDVREKQSGTSVKGKPKISKRGNKHLRRALHMPALSAIRHEERFKALYARLVARHGIKMKAAVAVQRKLPEMTYTVFKTNKPYDKNYLLSQTTEAGEKIRAVNN

SEQ ID NO: 232261 - protein, 431 aa, unidentified
MLKINPLSTLYIGIDVSSKSNYVCALDFFKNKYISSSFANNQTGAEELALKILECLKEHSDLTTVVAALESTSVYSIHIANYLSSGEELMRFKPYVFVLNPKCTANYKKSYIGLGKSDPIDAFVIADYARAGNIESEPWRGSQFLALKRLTRHRLHLVECMTREKTYLVSNLYLKFSELQMLEGDDQPFCDIYGATSSSVLMEYLSPEEILNSSEEDLIAFLAEKSRNRIKDISKTADLLKKAARDSYRLDKSLYEPLNVSISSSFNCIETFKREIKVIDNAIEKEIKGLNPNAFIILQSIDGIGPVFAGGIIAEIGDITAFHSSDALAKYAGLTWKSNQSGDFDGEDTPMTKAGNRYLRYYLGEAANSMRKHNVEYGAYYRKKYNEVPKHQHKRALALTSRKFVRLVYGLLARNQLYSGVSLDTSIKDSN

SEQ ID NO: 232262 - protein, 345 aa, unidentified
MQPMYYIGLDVHKKKISYCVKDGSGQVYKEGEVPATRSDLDRWMKTLPQPWSAAMEATIFTGWIYDHLKPHAVAVKVAHPLMLRAIAAAKKKNDRIDANKICDCLRCDFLPECYMAPTALRECRRTLRYRNLLVRQMVQMKNKISVLLMEAGVSYNKEKLHKVGYFRELMASNPDINDGLRSLLRLCRETVVRLGKTESALVRTLQRDPLLVERVERLMTIPAVGPITALTWALEVGEVQRFSSIKKAISYCGLCGDEKRSANTVQRTPISKQRNKHLQTMLIEAAKMAPRYSPALAALYDLEKQKGHANRATLTVARKLVAYLMAVDRGQRNFLVVENQASAVA

SEQ ID NO: 232263 - protein, 366 aa, unidentified
MKKISTVQIFESEIFKEQRLTIGMDLGDRSSCYCVLDEAGRILLEQKVAMTPEAMKQTFSKIPRSLIALETGTHSPWVSRLLTELGHEVIVAHAQKVQLITKSNRKDDRHDARTLARLARIDPELLGPVRHRSAQAQIHLTVIRARAELVRARTAMVNAARGLVKSYGQRLPKCGTRKVSRELGAGLPAELGEVLEPLLKEIESLNERIKEYDERMEKIAKESYPHVELLKQVKGVGTQIALTYVLTLDDPQRFAKSREVGCFLGLKPGRRDSGESQPQLHISKEGDRYLRTMLVQGAHYILGPFGEDSDLRRWGLRLAGRGGKSAKKRAVVAVARKLAVLLHRLWVSGEVYEPLRNSQKAMRAVA

SEQ ID NO: 232264 - protein, 429 aa, unidentified
MPYRIAGIDVHKKILAVVVSNVEIESEYQFERRMFGSNPEQLRSLAAWLLEQEAEEVVMESTAQYWKPVWGALERYWKPICEKREGARRKSGTLHLAQALSNRGRRGRKRDFVDAERLVKRLVARELVLSFVPDPEQRLWRTVTRKKYQLRCDRVRLQNQLESLLEEAHIKLSSLVTDLLGVSARRMLKALADGETNPAALATLADERLRATPEQLCDALGACTELNPVYRRLLKMALEELRLIDEQIAQLDQEMANLLRPHQDAVERLAEVPGLGVDSAQQIIAEVGPTAETFPSAKCLSSWVGACPGDEESAGVNYSHRSPKGNRHMRRLLNQTANAAARTKGSIFEIVYRRSVPRLGHNQAIGAIAHRQCRLIWLILHQRVRYEERGPAVTKQSRQKRTARMIRQLRSLGYRIEAPNPQPSKAQAQ

SEQ ID NO: 232265 - protein, 391 aa, unidentified
MQVTRIGMDIAKQIFDLHGVDRRGKVTLRKTLRRERVLEFFAQLKPCEVGMEACAGAHYWHRELSRLGHTVRLLSAHKVKPYVDGNKNNRHDAAAICEAMSRPSLRFVQPKTTAQQDLQTLHRARALLVRELTALSNQVRGLLHEYGIVMRKGAAALRRVVAELLTGDDARISAVLKAVVAEQFERFTYLALRIDRYDRQIGELCKQDQRCQRLLKVPGIGPLSATALVAALGHGHEFKNGRHFSAYLGLVPGHSNTGDHTVMRPITKRGNRYLRTLLIHGGRAAVYAARRRSDPRSSWLNRLREISCHNVAAVALANKNARVAWAMLRYGEDYRASRAHRQSADLAAARSARPAHRALAFAPHRARPASQRSEHFSAPPSSSNEGRGEKC

SEQ ID NO: 232266 - protein, 429 aa, unidentified
MPYRIAGIDVHKKILAVVVSNVEIESEYQFERRMFGSNPEQLRSLAAWLLEQEAEEVVMESTAQYWKPVWGALERYWKPICEKREGARRKSGTLHLAQALSNRGRRGRKRDFVDAERLVKRLVARELVLSFVPDPEQRLWRTVTRKKYQLRCDRVRLQNQLESLLEEAHIKLSSLVTDLLGVSARRMLKALADGETNPAALATLADERLRATPEQLCDALGACTELNPIYRRLLKMALEELRLIDEQIAQLDQEMANLLRPHQDAVERLAEVPGLGVDSAQQIIAEVGPTAETFPSAKCLSSWVGACPGDEESAGVNYSHRSPKGNRHMRRLLNQTANAAARTKGSIFEIVYRRSVPRLGHNQAIGAIAHRQCRLIWLILHQRVRYEERGPAVTKQSRQKRTARMIRQLRSLGYRIEAPNPQPSQAQAQ

SEQ ID NO: 232267 - protein, 313 aa, unidentified
MSASIPQSAGIDISKDWLDAHLHPDGSYRRFGNDTAGHKALFKWLAGWPVERIAYEATGAYHRALEQAGRTLPLVKLNPRRARRFAEATGTLAKTDRVDAAMLARMAAILKPDLRPVKSEALAQLSELVVARESLIKDRTALANRAKNLTLPMLKSKMSSAVYSFAKQIKTIDEAATALIDAHPDLARKRDIIVSIKGLGSVTANQLVADMSELGCLDNKQAASLAGLAPVARQSGQWKGKSFIQGGRANVRQALYMPALVAIRFNPDLKAKYAALIAAGKPTKVAITAIMRKLIVMANALLKDNRIWTESRP

SEQ ID NO: 232268 - protein, 315 aa, unidentified
MTNHKKSKTIINVGVDVGKQFLDVCIYEKALHWQEENTPDGIKRILKRLSHYTVEHLVMEATGRYEFNLAQAAYEKNIPVCIVKPLAVRRYAGAIDQLAKTDKIDAALIAEFAAVVQPRVTPQKSKNLIAIKDLIARRRQLMGLRTQELNRVKIMGKAFEVSCKRIIRTLDAEIVRMEKRLAKHVEEQAEWTDRHTILKTAPGVGNTLIYTLLADLPELGTMNNKEVAALVGVAPINRDSGKLRGKRRIRGGRHSVRTILYMATLSATQCNPVIKDFYKKLVAKGKHKKVALTACMRKFITMLNAMVRDECVWAY

SEQ ID NO: 232269 - protein, 345 aa, unidentified
MEQYVGLDVSLKMAAICVVDRTGKIDREGMVAADPAAIAAFVRLHAPHVARIGLETGATSTWLWTELNKMRLPVICIDARHAKAALKMQINKSDRNDAVGIARIMQCGWYKEVRVKGLDSHAIKALLVSRALLVKIKRDLENQIRGLLKNLGLVIGRAKMNVFVVRAAELIEDRPELAAAVEPLLKAREAVEKQIASLDRKVMRLAGNDVQVRRFTTAPGIGPITAFCYLATIDDPTRFKRSRSVGAYVGLTSRRYASGEVDWTGRISRCGDPMLRSYLYEAAGVLLTRVAKWSVLKAWGMRIAKRSGLRKAKVAVARKLAVILHRMWVDGTEFKWSKEVAGITA

SEQ ID NO: 232270 - protein, 442 aa, unidentified
MVLEPRAGYPPLLLRARVSVSCTDLGVLRAARLFPSVGGMPLQEVARRMKVLYERVAGIDVHKDMIKVGIRSPGDKPWTRKSEVLQYRTFYGVLQQMAADLRRRGVTHVVMEASGVYTEPVYYALAERDFDEVTVINPAHAKALKGHKTDAKDCLRVAELFECGLLRGSYIPAAGLKEVRDLTRYRMKTVQARTSEIQRLAKALESAGIKLGSVVSDLTGKSATAMVEALIDGERRGQVLADLALGRMRAARKLADLSEALVGRFTDHHALLCRLHLDRIATFDTAVAGLEDKIALKASPWQREQDLLRTVPGFGDVMARAWLGEIGPAPHTYFASHEKLASWVTLCPGNYMSAGKRKHGRTGDAGTYVKPMLVNAAWAAIRTPGRLQAKYGRLVRRFGGEKNPAAKKKAIIAIAHTLLKIAYQVLRSGKPVCGVSTGLLGR

SEQ ID NO: 232271 - protein, 444 aa, unidentified
MQLKQRIQPTIESAKTMSESIAAAALQAVAAYIGIDWADQKHDVVLRSASQPNKVEHRIIEHKLEALMEWVGQLQQRFGGQGKILVCLEQSRGALIYHLMGYEFFELYPVNPLQLARYRETFSPGGAKDDRADAELLCELLYCHRDRLRAWKADSELTRKLVFFTEGRREAVDQRARLSQAIKSQLKVYFPLALELLNNDTTTALAADLLLRWSSLEALQKQSAHTLRKFFCGHNCRGEAKMLERLQLVQEAQPLTQDAAVIEPAALRVQMLACQLKHLLPDIARYDKKIAELFAVHPDRFLFENLPGAGLALAPRLAVAFGSDPNRWESAQEIATLLGIAPTRRASGKKTGKKASVHFRQACPKFHRQSFHEFAGCSIRYCPWADAHYQTQRARGKGHHTAVRSVAFKWIRICFACWKQRIPYDPQRYLQALQRRGSPLADAC

SEQ ID NO: 232272 - protein, 395 aa, unidentified
MKNRVSQRLEEITANTLIVGVDVAKTLQWARFVDYRGVEIGKALSFPNNRKGFESIVARIREYFKNKLLQYPIETVMIGMEPTGHYWKPLANHLMNAGYRVVGVNPYHTKKAKELDDNSPTKSDKKDAITIARLVKDGRFFDPYLPQEEYGELRGLTNARVSVMKRQSAVKNTITAIMDEYFPEIWTVFKNPLKGKASRQVLRSCPFPSFILALGETDVLAEIKKAVKKTVGMKKVLELMSAAKDSIGVQYGLDAAKMRLGWLLDELELSEKQLAEVEQAMELVFHQTGYAAQILGIKGIGIVTAASFLGEVGDPLRFQNARQIARYAGYNLVEDSSGKSKSGTCISKRGRKQLRSVLYQMAFTMVGQNAEMKALYQYLITRKDKPLKKKQLQPS

SEQ ID NO: 232273 - protein, 337 aa, unidentified
MEYFAGLDVSMEETHVCVVDRDGKIILEARTPTAPKTIAAALAKGPPVERVLFETGRMAPTLFHGLTALGMPVVCVESRQAYQALRSMVTHKTDRNDARGLAHLARAGFFKPVHVKSLPSHAVRALLIARKKLVGQRVTLENQIRGLAVAFGVRLPRGLSSGFSEKAMAAGRGIPGLDGAMRGLLAARDAILKAIVAINADMKSLERSSAACRRLMTIPGVGRLTALAFVAAIDDPDRFRRSRDVGAYLGLVPRRYQSGEIDYTGSISKCGDGRLRTLLYEAANVMLTRYRGSLALKTWALDIARRSTMRKARVALARRLAVIMFAMLKHGAEFEPA

SEQ ID NO: 232274 - protein, 351 aa, unidentified
MLYIGLDVHKEFCQACVVNELGRALSNERFLSTREELDGFLAGFKDAKFVLESTGMWEFIYEGIEKRGFEVQLAHPLKVRAIAEARVKTDKVDAETLAQLLRANLIPRSWIPSKDMRDLRQLVRQRAYLVQQSTSFKNRIHAELLRRGVRRPQNFVMPFSKKSIDWMRSLEIPTVISCLNCLESVQAQIEEMNTQLLDEFNRRPDAQLIATVPGIGFYGALLIHAEIDDIKRFSHPEKLCAYAGLVPTVRQSASSVHYGAISKDGSSYLRWMLTEAVHTHTHCEPGSRLSKFHAKIARRRGKQKAVTATSRKLLLIVYWMLVRHEPYHSQGLDPGFPPARNECDIGIGAGP

SEQ ID NO: 232275 - protein, 375 aa, unidentified
MKEKLRFLGMDVHAETIAAAIAEPDGEVRSLGTIPNRMDSIRKLLKKLGPVEKLRVCYEAGPTGYVLYWQLAELGVLCEVIAPSLVPVKAGDRVKTDRRDAEKLARSYRSGDLTAVWVPDKGSEALRDLVRAREAAKQDQLRARHRLNKFLLRSGQHPPAGVRAWTHLHLIWVSQIRFTQIAQESTRLDYLHEVEHMRERVARLEQAIVEAVKLASLPLQEVIADLQALRGIAHISAVTIAAELGQVSRFPGARELMGYCGAVPSEDSSGKRTRRGSITKSGNAHLRRIVVEAAWSYDRPPAIWAGLRKRQQAASEEAKEIAWKAQHRLHKRYAKLAARGKDKRKIVTAVGRELLGFIWAIGTRAEANAAQRAAA

SEQ ID NO: 232276 - protein, 504 aa, unidentified
MQMDDRPVYYAGIDLALRAKNVVAVLDERGRRLGRPVAFGRTHDEFQAMFQAVTQRVPQGFGLVWGCEATGAAWRLITACLIREKQAVSLENPAAIAALRDVDSRFFKNDRVDARTIGELVCLRVSRGKPLCPPPSPQLQAMRTLTRRIEGMKNELSSAKTRFTAYLCDTLLPSLSPAAHEWSGPTLLRVLDKFADPRDIASKPLARFINSAIKAGGARTSRVALATLHQAATESLRSYGDTGLDYSTYALILRDTILQVNQLQARIVTLQGQLDSLLDKTRTHSQVECGLSVPGVGDDTLNVLMALCGPPGQWPAFKAIKQFAGTVPVLDESGNSRSTPRMSKLGEPILRKVIFQIGNVARRYDAEFAADYYHQMVSKGKGHTAACISAGLKALNALRAVLRDHRPYQPRDPRTGLPITKQESRQLAQANYSVPAAIRTARKKHKRGTDAPAKHTSKETAQAGHAQVKDMPKHSHRRAVNLPCAVPTVTIDHLSPARKALDDR

SEQ ID NO: 232277 - protein, 375 aa, unidentified
MKNKVRFLGLDVHAETIAVAIAEPDGEVRSLGTIANRAESIRKLVKKLGSAEQLKACYEAGPTGYVLYWQLAELGVNCEVIAPTLVPMKAGDRVKTDRRDAERLARSYRSGDLTAVWVPDEGSESLRDLARAREAAKQDQLRARHRLSKFLLRMGQRPAVGMKAWTAPYMAWVRQVHFTQVAREATMLDYLHEVDHMSERVRRLEQAITEAVKLATPAVQEVVKGLQALRGIAEISAVTIIAELGSITRFDTPRQLMGYSGAVPSENSSGKRTQRGSITKTGNAHLRRIVVEAAWSYRLRPAIGPRLRKRQEGVSEPIKEIAWKAQVRLTKRYARLAAAGKDQRKIVTAVGRELLGFIWAIGIKAETASKLQMAA

SEQ ID NO: 232278 - protein, 402 aa, unidentified
MNAVGIDVSKGKSMVAIMRPFGEIVSAPFEIKHTASDIHSLVELINSVEGESRIVMEHTGRYYEVLAHQLSKANLFVSAINPKLIKDFDNDSLRKVKSDKADAVKIARYTIDKWQNLKQYNVMDELRNQLKTMNRQFGFYMKHKTAMKNNLIGILDQTYPGVNTYFDSPARSDGSQKWVDFASTYWHVDCVRKMSLNAFIDHYQNWCKRKKYNFSQSKAEEIYGKAKELVPVLPKDAITKLIIKQAVYQLNSASTTVESLRTLMNETASKLPEYPVVMAMKGVGTSLGSQLMAEIGDVSRFTHKSAITAFAGVDPGVNESGSYEQKSVPTSKRGSSDLRKTLFQVMDVLIKTHPQDNPVYQFIDKKRAPGKPYYVYMTAGANKFLRIYYGRVKEYLSSLPES

SEQ ID NO: 232279 - protein, 412 aa, unidentified
MMEVLYERCGALDVHKKAVVVCVATRDGKQTRTFGTMTGDLLELADYLVSKGCTHVAMESTGVYWKPIYNILDGLGMELLVVNARDVKAVPGRKTDVKDAEWICDLLRHGLLRGSFIPDRSQRELRELVRYRKDLVQERAREVNRIQKVLEGANIKLGDVATDVMGKSGQAILESLVQGKTDPESLASLAKGRLKRKNEELARALQGLVGPHQRMMLSTQLGHIRFLDGQIERLNREVEERMRPFEEAVEAIDGIPGIGRRIAEEVLAETGTDMAQFPSAAHLASWAGVCPGNNESAGKRKSGRTRKGNPHLRQAVVEAAHAAARTKDTYLSSQYHRIAARRGSKRAAVAVAHTILIIIYHILKEHTTYRDLGADHFDKLNQDAAARRAIKKLEALGYKVTLEPLSALECSA

SEQ ID NO: 232280 - protein, 415 aa, unidentified
MGNEIDKGGGLDIHKKSVKAAIESEDGTILEAEFGMTIRELGCLKEWLLDNGCKRVIVESTASYWYRIDQVLSDEINVILVNPRDVKSSFGKKTDKIDARRLASRCLTMYEVKPSRKFSKEESELKRLTRAREQNVKTRTRFKNQIHKVLDAAGIGLSIFITDIFGKSGMYLLRGLVERKSLEELIPGIPTNRIRKRAHELYELIPVQLNETDVLLIRQALDTMDFVQKSINEIDAILYRIAESHKDDLQILMSVPGVRFVAAITILAEIGNYRDFKDGDQLACYSGLTPSVYDSGEKHTLGRITKHGSKHLRWILNQVAHAASKTKRSRMRKIYYRIMRKKGEGKAITALARKMLSIMHHILINREIWKEEGVKKRRLDFKFDRSSSSSTQLTWLDMLFKNGNEIGKAKPGGRG

SEQ ID NO: 232281 - protein, 381 aa, unidentified
MRTTYDEQHKADDRVLAVALELAKASWKVALSDARHKPRIKNADAQQPLERLEQVLALIKDARARWALPEDVRVVVLYESGQDGFWIQRALATRGIETLVIDPASLPVERKARRAKTDRLDACRLVEALLGWLRGERQRFRVVRQPSVAQEDSRHWGREREQLQREMQQHRDRMVKLLTTQGCWEKLDRAFTQRLANGELRDWEGKPLGATLLVRLQRELTRWQQARDQFKQLEQERAERFSAQQQAQLTQLVQLRGVGPVSAQRLVLELFWRHFANARQLGACVGLVPQPYDSGTMRKDQGISKQGNRRVRALLVELAWMWLRYQPNSALSCWFASKVQGDSKRSRRVAIVALARRLLIALWRYLERGVPPEGSQLKAVA

SEQ ID NO: 232282 - protein, 327 aa, unidentified
MVRKKVIGIDVSKDELVIFDTATGRHAKIVNNEKELQKACLQNHWLPDTHIAGLESTGDYGLVPMKALVEAGFHVRLLNPILTQSGIKHTVRGIKTDTTDSQLIAELTEKKEGQLVTENSLNISKKSNLRVERKLSAMAGDLKRLLNNIHKKEEAGIHMQDAEGILKQLIGSISDARRKIWDVIENPALQNHLSKQEQIINSHIGCGTKLSAIISEEAGDLKRFDNARQFVAYAGIDPKVKQSGSSDIRGRMTKRGNSNLRHALYLAAQSAIRFDPELKAYFEKKKSEGKHYMVAVCAVARKMCCRIYSTVTQDRFYEKRNQILSTN

SEQ ID NO: 232283 - protein, 452 aa, unidentified
MERSKSGALSMVNPRAAAIDIGSTMHMAAINPTANDNPVRAFGTFTGDLHDMARWFKTYGVTTVAMESTGVYWIPAYEVLEGHGFEVILVNARYAKNVPGRKTDVSDAAWLQRLHSYGLLRGSFRPEAGIATMRAYLRQRERLIEYAASHIQHMQKALMEMNVQLHHVVSDITGVTGMRIIRAIVGGERSPNTLAQMRDVRCHATIETICAALSGNWRDEHIFALGQSLALFDFYQTKVLECDRKLEVALKALEIDEGYDVRQLPKVRTKRRQVNTPDFEVRSALYRVLGVDLTQIHGIGPSLALKLVGECGTDLAAWPSSKHFTSWLCLAPGNKISGGKLLSSKTRRSSSRAAALLRLAATTIGRSDTALGAFYRRLSARAGKAKAVTATARKIAVLFYNSLRHGMAYHDLGATQYEERYRSRVIGNLRRRAKAFGFSLQEVPSEPEMSVS

SEQ ID NO: 232284 - protein, 401 aa, unidentified
MWCLQAHTLILEDSMLGTQIKAKFLPKDYDVFAGLDVDKKHIDVTFVDHEGRMKSMQLPYDANHLLAYSRRHFPGKRMAFVYEAGGTGFGLYDQLTAAGHPCLVVAPSMVPTAPGQRVKTNRLDSKKLSLALRGGELKSIYIPSAPYRALRQLVQLRDTFVRQAMQSQVRIKALLLLEGIAFPEPRERWTAAAWVALQSLCCAPAVRFKLDRLLSMATFAKEQVRQTTRELRRFCKAEPTLAHTLELLRSAPGIGGITATHLLARIGDGSFIHNIHQLPAFLGLVPSESSTGDDVNRGPITRIGDRRLRAKLNQASWVAIRQDPELKEFYDRIYGRHPKPVAAKKAITAVADKLCRRLACMLKNQKPYVAREASRTTEKEKTAMPQGIPRSPAETSALCVP

SEQ ID NO: 232285 - protein, 342 aa, unidentified
MQVATIGLDLAKHWFQVHGVDAAGAAILRKCLKRAEVIAFFQGIEPCLVGMEACASSHYWAREIARFGHTVRLMPPAYVKPYVKRGKNDAADAEAICEAVTRPTMRFVAVKTPEQQGLLMLHRARRLLVRQRTMTACAIRSHLAEFGFITGQGIGRVEPLLERLAEEEGERLPGEVRDILFMLAAELATLGERIAQIEARIDAQHRANPVSRLIATIPGIGPITATAIAATVPDATAFRSGRDFAAWLGLTPRQNSSGGKDRLGSITKRGDTYLRHLLFIGARNVIRYPKAREAAGTAWIEALVARRSRTVAAVALANKMARIAWAMMTTGEVYRSAREATA

SEQ ID NO: 232286 - protein, 354 aa, unidentified
MSQTPNTAIAVIGIDIGKNSFHAVGHDARGAIVLRQKWSRGQVEARLANIPPCLIGMEACVGAHHLSRKLASLGHDARLMPAKYVRPYSKGQKNDFNDAEAIAEAVQRPTMKFVATKTAEQLDLQALHRVRERLVSQRTGIINQIRAFMLERGIAVRQGIGFLRTELPTILATRTDALSPRMLRVIEELAGDWRRLDQRIDGLSGEIEALARQDQACSRLMTVPGIGPIISSAMVAAIGTGDVFSKGRDFGAWLGLVPKQISTGDRTILGKISRRGNRYLRVLFVQAAWVVLVRIKDWERYGLKSWIEAAKRRLHHNVLAIALANKLARIAWAVLAKGRAFELTRTDDAGVRPA

SEQ ID NO: 232287 - protein, 313 aa, unidentified
MSKRYVGVDVSLRSFDVAVRPDELHWVHPYTTEGVSEFVKRMNKLRPQLVVMEACGNLERSLARALEHGDIPVAVMNPRQIRDFAKSIGQLAKTDKLDAEVLSRFAETVQSEPRPLPDENQEQLRDLLARRRQLVDMITAEKNRLRRASPSVRTGIESHLGWLNEELKKLDEEIRQRQKSNAKWEERTRLLESTPGVGSVVSTTLVGFLPELGALDRRQIAALVGVAPFNCDSGVRKGKRAVWGGRAQVRSALYMSVLAGLRCNDRIRSFYHRLREQGKPAKVALVACMRKLLTILNAMIRDHTPWQPQSTTT

SEQ ID NO: 232288 - protein, 356 aa, unidentified
MTSSSKYIGMDVHKESISIAVRNSAGKIVMESVIQTKASMILQFIDGLRGEVHVTFEEGTWSAWLYDLLKPHVSKLIVCDPRRNALLKEGNQNDRVDARKLAELLQNNQLRPVYHGDHGLRAVKELVRSYLTITKDVSRAMTRVKAIYRSWGIPCSGTQVYSARHRAAWLEKIRETGVRRRAEHYYQELDGLRSLRRVVRKELLVESKKHQVWKRLCGIPAIGPIRAAVLLGIVQTAHRFRTKRQLWTYSGFGVEGHSSADHQVVNGQLQRKKKPIEIRGLNKNCNHHLKNMFKSAAINASTKPGPFQDFYAALVAKGMRPEMARLTLARKIATIVLIVWKRGVCFDANHLKPQTA

SEQ ID NO: 232289 - protein, 361 aa, unidentified
MHATPESLPTSTVAIDLAKDVFELAFADAHGRIVERRRLSRRAFAFALDNREPLQVVMEACGSAHCWARRFQRTGHRVQLLPAHDVRPYVRRNKTDRADAAGLLEAARCGAIHAVPVKTPQQQGVQGLHRVREHLKAQRTAAINLLRGLLREFGVIIPLGSAKVRPAVLSALEDADNELPMALRETLKALLDTIKTTEKDMLAIEDRLQAFADADPRSQRLQCAGGVGLITATALSASIGDFDRFPSGRRFASSLGLTPREHSSGSKRRLGRVTKRGDIYLRTLLIHGARAVLRSAKLAAKKQQQPLDRTRAWALALSERVGHNKAAVALANKQARRLWAAEHHRSAFDPDHVSVQNTPTT

SEQ ID NO: 232290 - protein, 366 aa, unidentified
MGWMAPLRHLSAKLLSDRISSEWEPSMGEVTTIGLDLAKHVFQVHGVDAEGATVLRKQLRRAQVLAFFSRLPPCLVGLEACATAHYWARELRALGHEVRLMPAQYVKAYVKRNKNDAADAAAICEAVVRPTMRFVPVKTADQQAAVLLHRGRERLVRQRTGLVNALRGHLAEFGVIAPQGLRNVGKLIAIVRDERDARLPDLARQVLQVLAAQIEQLEAAVAAIEKQLMAWHKSNPVSQRLASVPGIGPIIATAIAATVVEPSGFRSGREFAAWLGLVPRQNSTGGKHRLGGISKRGNQYLRRLLINGASANLLRSKATNADPWVIGLRQRRPSLVVAVALANKTARIAWAVMHRHENYQRVAAAA

SEQ ID NO: 232291 - protein, 344 aa, unidentified
MTQYKRIGIDTSKAVFTLHGIDQQDRPVLRINLRRAQMIAFFKKLAPTEIAMEACGGAHYWARELAALGHEVRLIPPQYVKPYVKRGKNDRNDAEAICEAAGRPGMHFVPVKSVAQQAQGMVLKVRETLVCQRTLLVNTLRGHAAEFGVIAAKGLRQVGPLLIAIEQETALPPEAKDMAALLGRQIVELDTKIKQIDVKLTAAHKANEVSQRLATIPGVGPVTALTLAVDIDPAAFESGRHLAAWAGLTPKDHSTGGKQRMGGISRAGNERLRVLFVAGATSVINAAMRPSSKLMTEWLQALLQRKPRKVVAVALANKMARVAWALMTRGEVYRPAAGTGAAAA

SEQ ID NO: 232292 - protein, 321 aa, unidentified
MLNSIDQNNNVILGIDVAKYKLDIAILPEKKHYVIENNKKAISSFIKKMKTPIELAVMEATGGYEKLCAYMFDKKGFPIHIADPSKVYHFAKSENVYAKTDKIDAFVLANYGKEKNPKRTKLKTKEDAELAELSVRERQLKEIIAAEKCRLKSPLQTSSAKRSIKRMIKQIEKEIEILTNRISEIIASDEEKKEKAKRLQTFKGAGKQLANTLIAQLPELGYLNRAKIAALVGVAPRNKESGQKKGYRKIEGGRLYIRNLLYMSALSSIRYNKKLREFYQALLQKGKKAKVALTAVMRKIIITLNAMLRDKKDWVDAEKQA

SEQ ID NO: 232293 - protein, 384 aa, unidentified
MQKPNDLNQSRIVLKQDSTLIAVIEMSLSSWLVAGIVPGVERQPLKKLAVDESALLKLLNRWREEAEKAGRRIERITVAFEAGRDGFWLARWLGARGIEAHVIHASSVAVSREHRRAKTDRLDTELLKRAFLGWLRGERDHCKMVAIPTTKDEDAKRPNRERQSLVGEQTRIVNRMKAALIRLGIRGFNPKLKKAAGRLEDLRTPEGEPIPPNTLAELHRDMERRRLVSDQIRQIEKARLERMEQAPGDGPHAMVRLIARVIGVGIETADMLVHEVLSRKLRDRRAVARYAGLTGAPDESGSKRREKGLAKAGNARVRGGMIQLAWRFLLFQKDSALAQWYRTRTEGGRNRKTIIVALARKLLIALWRLVTTGEVPAGVVLRAA

SEQ ID NO: 232294 - protein, 338 aa, unidentified
MKRYMGVDLHRNCFTVCTRTEAGRESMREWSIRSLEAFARTVKQSDEVAVEATGNTRLFTDALEGRGCRVAVVNPQQFEVISRSVKKTDEHDAKVLAEFLSKDMLPEVRMKDPVQAQVGSLLQTRDKLVKLRTTLKNKINNMLAARGILLRKESLASEKGLNQVLQAEVGEIQRVELEVLVEQIRHLNESIAKLEDAIRKQGPKLPGWKNLTSIKGIGDIGGAIMLATIGNVHDFADEGKLAAYFGIVPRVGDSDETERRGRITKRGNKLGRTALVQCSLIAMRYNPYLQAYYRRMAARRGTGKAIIALSRKFLGIIYKTLKYDWVFEDFPRFVLANG

SEQ ID NO: 232295 - protein, 348 aa, unidentified
MSQLLSTVTVIGIDIGKNSFHVVGLDGHGAPVLRQKWSRGQVGARLANMPPCLIGMEACVGAHHLSRKLKTLGHDARLMPAKYVRPYSKGQKNDFRDAEAIAEAVQRPTMKFVATKTAEQLDLQALHRVRERLVSQRTGIINQIRAFLLERGVAVRQGSRFLRAELPRILAAPPEVLSPRMVRIVEGLAQDWRRLDERIDCLSGEITALARQDAGCERLVSVPGIGPIISSAMVAAIGTGEAFSKGRDFAAWLGLVPKQFSTGDRTILGKISKRGNRYLRVLFVQAAWVVLIKPQSWERHGLKHWIEAAKKRLHRNVLAVALANKLARIAWSVLARSRIFEASKLRAV

SEQ ID NO: 232296 - protein, 412 aa, unidentified
MDVIYTHCCGLDVHKKTVVACLITSAEGLEPVKESRTFRTMTADLLALADWLQQAGCTHVAMESTGVYWRPVYNLLEGQCELLVVNAQHIKAVPGRKTDVKDASWIAELLRHGLLRGSFIPSKPQRQLRELTRYRSTLVQDHARTLNRLQAVLEDANLKLASVVTDIYGVSARAMLEAILAGQRDVEALADLARGRLRAKRDQLKEALEGRVTAHHSFLLSEHLSTLEYLDEAIERVSGEIDQHLTAEQEAIALLDTIPGVGQRAAEILIAEIGTAMSRFPSAKHLASWAGMCPGNHESGGKRLSGKTRKGSRGLRQILVEIAHVASKTKNTYLAAQYRRIAARRGKKRALIAVGHTVLTIVYTLLTRKQPYQDLGTAYFDQREQHRVERRLVRRLERLGYEVALQPRALAS

SEQ ID NO: 232297 - protein, 357 aa, unidentified
MKKLFIGIDFSKEKLDATIILACGMNEIGSREYGCFPNNNTGYRKLCNWVKNNAWDTIPGEWLFCGEDTGSCSIGLSKWLYGKGYDIWIENAYAIKHSSGIQRVKNDKADSAIIAEYAWRQQDKATPFEPLNESLAQLREVFLYRHKLVGQRVAMELRKEDKSQSNKSKAISFINRKSKHLIDEINKAIAECDKMIDNIIEADEELKENYAIITSIKGVARQNATCMLIYTNNFKKFGYDPRKIACYYGVAPFGKQSGTSVNTPAHTSHFANKLIKSLLGQAAHIAKIYNPEIRDYYQRLINKGKKPQVALNNVKNKLIRIIVALVRKKVPYDQNTYKYYEEREVVKGKKNEKLIYC

SEQ ID NO: 232298 - protein, 341 aa, unidentified
MSLSQTIVGIDIAKSVFQIHEVDKETGEVTSRQIKRARLLQHFINREPCFIGMEACGGAQHWARQFVAMGHTVKLLPAQSVRPFAGGNKNDIADARAIWIAVQQPGIKAVAIKTEAQQAVLALHRIRQQLVKFRTAQINALRGLLAEYGEVMPLGRDAVAKALPSVFARLVDRLPGVLIESLREQYTRIAQLDKEVSNIERRLREWHRDDESCRRITSIPGVGLLTATATVAAMGDPGAFSSGREFAAWLGLVPRQTGTGGRVKLLGISKRGDRYLRTLLIHGARSVLMTSKTPPAWAVNLATRRPLNVAVVALANKMARTLWALLAHQREFQPEYVSRPA

SEQ ID NO: 232299 - protein, 352 aa, unidentified
MGRQKEKMVDKEELFIGIDLHKQRWHVTIRTFDVEIFSASIPGTWEALQRVLARYHGHPRQAVYEAGYFGFRLHDRLVEHGIPCMVTPPSLVPKEYGNRVKTDRRDSRILAHLLAKGLLKRVWVPSEEELYHRQVIRRRRQLVRDRVRTQSRIKAELRFYGIHLEEPRGGWTQMYLGSLRTINFGNRWMQESFNRLLEQYEFLTAQIDKQTKLLRELSETEMYRDRMEILQSIPGIGVISAMELLLELQDVSRFRRAEQLAAYVGLTPSQYSSADKVRMGRITGIGKNTLRSLLVEASWTLIRKDQAMREKYDRIKIRSGGKRAIVAIARTLLLRMRRMLLDQQVYKLQLAA

SEQ ID NO: 232300 - protein, 418 aa, unidentified
MSEEANASTHCRYVALDIHKHYCVVAAVDREGRVMHPPERVEHEDLELWLQKHLLKSDQVVIESTTNAWHVYDLLSPLVERVVVANPIRVKQIACARVKTDIRDTLILARLLAANLVPAVWVPPEHVRQLRQLLSQRRQLVETHTQIVNRMHSVAHRHHLKHERGKRFNEKTTGWQKDKALSSLEQFQLSLEMENQAYIEKQIERISKEVRKRCHQKPWAESMTYLMQLPGFGVITAMTVLAAIGEIRRFETARHLASYSGLTPGLEQSGTKNRGKGITKEGRRELRWALVEAAQMAVKSDPLLKQHFQEMQKRMHRNQAIVAIARRLLEMVWHVLTRRQPYRHFSQEKIAYKFLTWAWQMDEEARDGLTRQQFARYYLMRLGIGHDLTRVALDPRHPRRLASEAELLALRPELIQIE

SEQ ID NO: 232301 - protein, 429 aa, unidentified
MNYTQNEKIEQVTDSTRVVGVDIGSQIHYARAFDNRGRELTKRVFSFHNDLEGFNSFNLWAETLKSENKKTAVLIGCEPTGHYWFAFAKYVKDHQKRLVMVNPFSVKKIKELDDNSPKKTDSKDPKTIAKLVVDGRYSIPYVPEGIYAEIKDLVYSRDRIMKQHNISANRIQRWLAIHFPEYLGLYTRFDAASGLAVLEKAPTPKDVIALGVNGIRKIWHDKKMRGRGVTEDRAKTLVEAAHNSVGLDGGIGTKSELYMLLEEHRLWTSQLEAVNKVLEEMILKVPHVEKLLAIKGVGSITIAGFIAEVGDIRRFDSPKQIQKYAGMELVENSSGKHKGRTRISKRGRRKLRKILYQVMVPLLARNREFREIYDYYVTRVKNPLKRRQAMVAVSCKLIRVFYAVLTKGMEYDRFKMMSDIHRKSDTIAA

SEQ ID NO: 232302 - protein, 352 aa, unidentified
MVVVLGVDVHKDTHTAVAVDEVGRNRGERTVRAIDAGHRRLVGWARREYPAGRVWAVEDCRHVSTRLERALLAAGERVVRVPPKLMAGARDSARTRGKSDPIDALAIARAALREPDLPVAEHDEASRELKLLVDHREDLVAERTRMQNRLRWHLHELDPELDVPARALDRLCHLDRLVGWLVRRSLSGVVGRLAAELLVDIRALTARVNALEREITSRVQQVAPMLLALLGAGALTAAKIVGETANVTRFRSEACFAMHAGVAPIPAASGRTNRHRLARGGNRQLNTALHRIAVTQIRIHDSLGQAYYQRRREQGDTTMEALRVLKRRLARVVYNLLQPTTTNTTGTMPAAA

SEQ ID NO: 232303 - protein, 340 aa, unidentified
MKNGLKLLGIDIGKNSFHLIGHDAGGHQVLRKCFNRNRLLQFAAQIEPCTIAMESCGGSHWLARKLASLGHRVKLIAPQHVKPYVTGNKNDFIDAEAICEAASRPRTHYVAVKTVEQQVLSVQHRLRQSLVCHRTEAINRVHGFLLEFGIALPATKAAIAKVPELIDDSRSDLPLQFKRVMEHLLEDIHRLDTEIKACDAQIKQQLAQDDAGTRLMTIPGIGPITASAFVADLGDASNFRASRDLSAFLGLVPRQFSTGGRPVLLGISKRGDRHLRTLLVQGSRALMIRIERRDDALGQWVRDLLARKHPNKVACALANKLARIVWAVLRRGSTYNASMI

SEQ ID NO: 232304 - protein, 352 aa, unidentified
MLAEQVEVVIGVDTHKHTHTAAVVTAATGAVLAQLTVATDLEGYQQLLELAGQHSPLRAWAMEGSGGYGAGLAAHLAEREELVVELDRPARPTRKAGAKSDPIDAARAARDALARVHLGQPRTGPERAALQVLLTARRAAVAASVDGQSQLQAMIVTAPEQVRARFWGLSTRAMLAAALKLRPAYYAAEVHVHTAMTTLKAIARRVQTLDDEAAGHEKAIKKIVSAWRPDLLALTGVGPIVAATVLAAWSHTGRCRDDAAFAMLAGTAPIPASSGMTTRHRLNRSGDRQLNRAIYTIVITRLRLDPATRAYAERRRAQGKTDREIRRCLSRYVTRQLYRQLESTPTQPLDAS

SEQ ID NO: 232305 - protein, 407 aa, unidentified
MDLLKTVFGIDVSSRKSNVCIMVNGQKVNDYAISNDMVGFNRLLGDLKQVTKPQIIFEATGVYSRRLQAFLDMHELRYVMMNPLEAKRKTKDDLHQNKTDKLDALYLAKLQSEHPQRLAYVQNKEYQELMANNRIYEQASHDLITNKNRLHKAVQLTFPEIEHLLANPRGKNYWSIALRFPHPDIVLETKEADIIDFLKGLSGIGKKRANDITQSLIRLAKVACPAVKKNSAHIRGLKMAINNILSAEEECQTALQEMAKLAPKRDLEILTSIPGIGENTALRIISELGDIRRFNNPSQLNAFVGVDPQVYESGNLTAHLSISKRGTAIGRKVLYLAINQIQSAKKAGNPCHIADYYEKRKRSSETASHKKAAIASIHKLLRTMFALIKNDQLYSYDVAKHNQRLLS

SEQ ID NO: 232306 - protein, 343 aa, unidentified
MNSFIKAGLGIDIGSETNFARLYLTDAKTGHPKRVGKRKFPNTSKGHLDLFNWAKKKTPTGVKLIITMEATGVYHEPLAYFLTESEMPVSIVLPNKIKSFSASFNEHSKTDWIDADMIARYAHDRQPKAWSPSAPSMREVKKLSRERQQVIDDITIAKNRLHAERSSGKPMNSILERYRKHIELLEAHEMEVMREIDRLCQADEKLGKMVLLLNTIYGVNTVTSVSILAETDGFRLFTKRSQLVKYAGYDIVEKESGTSVRGKTRISKRGNSHIRKVLHFPAMTAIRQEGIFLEIYERVFKQSKCKMKALVAVQRKLLITMYALVKNGSEYQVNYHKERQLVA

SEQ ID NO: 232307 - protein, 359 aa, unidentified
MQEKINQNSFHGQAIYVGIDVHLREWKVSVMSENIHYKTFSSPPEAAALGKYLFGHFPGATFYAAYEAGFSGFWAHRDLTKLGINAIVVNPADIPTTDKERKQKEDKRDSRKIAKTLQAGQLQGIYIPSEQIQQDRILLRTRDLVVRDITRNKNRIKARLYFLGIKYPERFASPSGHWSQPFVQWLESIKLEYESGKAGLNAILDMVKHQRMSLLKITRAMRELSRTPFYQENVTLLIGLPGIARLTAMKLLTELDNIDRFENFDKICSYVGLVPSTNSSGANEVVNGITPRKSSSIRDTLVESAWIAVRNDPAMLSAYQILCKRMKPNRAIIRIAKKLLNRAVYVIRKKEQYQKSVVR

SEQ ID NO: 232308 - protein, 342 aa, unidentified
MDHYAGIDVSLECSSVCVVDASGKIVREGKVGSEPEALIAYFGSLRLSVVRIGLEAGPLSQWLYAAMKEAGLAVELLETRHVRTALETMPVKSDRNDARGIAQLIRLGWFRPVHCKSIGAQETRAVLTARKLVQSKLLDVENSARGILRGFGLKVGKTTNRSFAGRVEDLVVHHASLHMIAAALLSVHAVLLRELKAFDKQVRSMARVDVKAKLLMSAPAVGPIVALTYASAIDDPGRFTSSRRVGAHFGLTPKKYQSGETDYTGRISKIGDATVRTALYEAAHIMLIKPIKGCAPLKSWAMRIARRSGMKKAKVALARKLAVILHRMLANATPFNAAMAAA

SEQ ID NO: 232309 - protein, 368 aa, unidentified
MRMDVIGFVTFIGVDLHKCTVTLRAVRADGELLGQLKCDTKCIERIAEWIKSLPGPKWLAVEACPFVEWFIDRFTPCVDRLDIADATELSMRRGKRRKNDPNDALDIALRLARGECPLGYIADPQLMQLRKFGRHWRQLSRSLGKAKQGMKSMLNAANIRGPQFDGPRAHRWFLTFGGLLQPAQRLAFGNYLDQILLIERQREILRREMLTAARSPQFAATEQLLKSVPGIGPIWALIIASEIGLFDRFPNADALEFWAGMTADLKESAGRTQSGNITKAGSATLRWALCQAAVTLCQSDAKQEATRQRFIARMPRAKANVVMGRRLLRTLYAMVRDGKPYQCGERRDRTKAANKAKAKRKARTVQPA

SEQ ID NO: 232310 - protein, 420 aa, unidentified
MKVVYSTCCGVDVHKTFLVATIIKTTKGVQPSYQKKRFSTFNSDIRHFKQWLLDNSCFDVCMESTGKYWIPVFNLLEDKINVTIANPKWVKAVKGNKDDTKDSKWIGDLFRLGLVPGSFIPCKDIRILREYTRYRFKLTCCKRSEKNRFQNAFTVCNVALDAVVTDMFGKSASSITDYLITSDEFDPETCKSFLQKSLKKKADSIIESIEGYQMTSSQKKRMLMVRSHLDFVQQSIDSLDSKLDELIAPYENAVSLLCTIPGVDRTSAITIISEIGTDMSQFNSSKRLCCWAGLTPGNNESAGKKKSTKITRAGVYLKPALVQCAHAAVKSSTSPYYKNKYERISKRRGKKRAIIAIARMILTAIYQMLSNGETWNPCDLYKIDMPQEMQDKQKTKAIKQALKLLVSEGVISPESASVAI

SEQ ID NO: 232311 - protein, 421 aa, unidentified
MEPHAEHFAALIGIDWSDTKHDVCLVDTATGSLEPSVIKHTPESLNEWARGLRQRFGGAPIAVCLEQSRGPLIYALLKYDFLVLYPINPKTLAKFREAFSPSRAKDDPTDAEYLVELLVHHRDRLKPWRPDDQPTRTLQLLVEHRRRLVGDQTRISNRLTALLKGYFPQVLAWFPEMTTVLVCDFLLRWSSLDALSGVRRATLEKFFREHKSHRTDTIEKRLDAITAATALTTDGAVINASVVMVKALAAQMKTTLTAIKEFDREIAELCQAHADYEVFASLPGAGPVYASRLLTAMGTRRERWASADELLRYSGVAPVIERSGKSEWIRWRYFCPKFLRQSFVEYAGESIRHCVWAKAYYQGLRAKGQSHQAAVRALAYKWIRIIYRCWQTRTNYDEARYMEVLRHKGSVLVPAAATAGA

SEQ ID NO: 232312 - protein, 353 aa, unidentified
MKYYAGLDVSQQTTSICIVDEEGKTVAERKVASCPEAISEALEPFAVTRAGLETGPLSVWLWNGLKERGVPIVCMDARHANAALKMMPAKTDRNDAIGLAQIVRTGWCKSVHVKSTASHEARALLATRSQFVRTRCDLENQIRGVLRTFGILFGKRVGGFAKRAEEIIDGELDASPTIQAVVEALMRARANILEQIRHLEAKVRLIARQNKVVRRLMSVPGVGVITALGFAATIDDPTRFKRSSSAGAYLGLTPRIYASGETMRSGRVSKRGDDFLRRSLYEAANALLTRIPRFSALKSWGLRIARRGGYRKAKVAVARKLAVILHAMWISGEPSVGHRKSRAIWHHYSDVHD

SEQ ID NO: 232313 - protein, 355 aa, unidentified
MESVKYIGLDVHQSTISVAVLNAEGKVMMQSVIATKATAVLDLLQGLRGVLHLSFEEGTYSAWLYDVVVRQVARVVVCNPRKNALLKSGNKSDQIDARKLAELLRAGMLSPVYHGEQSTRTLQQLVASYSALTEDTGRAMRRIKALYRSQAIACAGKKPFGKRHREEWLARLSNSGQRRRAEWLYQELDAVQILRREARQAVMVECHKNPAARLLRSMPFFGPLRAAVLIARVQTPHRFRTKRQFWTYCGLGLETRSSADYVEKDGQILRRRKPVYIRGLNWNYSHELKNVFKSAATTASAMDGPFRAFYEMRVANGMLPAMARLTLARKMAAIALILWKKGETFAAEHLKLQAA

SEQ ID NO: 232314 - protein, 410 aa, unidentified
MQTLVERGCGLDVHQATVVACLLIVLQNGKVQKQIRTFGTTTRELLSLREWLLSEGCTHIAMESTGVYWKPIYAILEGALEIVVANAQHVKKVPGRKTDVKDAEWIADLLCHGLLRSSFVPPKPIRELRDLTRYRRKLVESQTAERNRLLKLLETANIKLASVATDVFGVSGRLMLEALVEGKATPQEMAELAKGRLRQKIDELGPALEGKLEEHHRFLLRLQLDRLEAAEKDLAVLEQRLQEKLKPYAEQLTLLDEIPGVDWTLAAVIIAELGVDMSVFGSVSQLASWAGVCPGNNESAGKRKSSRIPKGNVYLKTALVEAANSAAKAKGTYLRDKFYRLKARRGYKRAAVAVAHKILVAIYHMFSDRVCYNELGDVYLDKLNKHHLTRNLVHRLERLGYTVTIEQKAA

SEQ ID NO: 232315 - protein, 500 aa, unidentified
MTTSTTTDPHPSGRARRRAAQREAELRRQAEAAAELDSLPVTNRHAAGIDVGDRTHWVCVEATPDGSDTVREFPARTPGLRQLVAWLRLCAVTTVALEATGVYGHVLFLTLLEAGFHVVTTSAKFTRQIQGRPKTDKRDCQWIQRLHRHGLLPSIFQPDGATQTLRDYVRQRANLVRLSAQHIQRLQKALELMNLKLTKVLGDITGVTGLKVLRAILAGERDPLKLAQRRDRRCKHTAAEIALALDGRYRPEHLLELRCNLTLWEKYQEVIATVDVAIAAQLRAMRRHTELPPLEPRTRVRGRKPHDPGFDVRTALYYVTGVDLIAIEGIDEVHALTLVSELGTDLSKWPTLKQFCCWLGLCPNWKKTGGKVQSSHTRRGKNRAARALRLAAWALMRSQSYLGAYLRRQRSRLGAPKAITALAHKLARIVYNLLRYGVAYMKQTEEAYAEQVRARLEKQLRRRAVELGYELRPIEPKLETLIVGGEELTVTADGEIVAAK

SEQ ID NO: 232316 - protein, 352 aa, unidentified
MGRQMALRLEPEQLPEPRARIRKAGPWPGFTPRRLMSDVFVGIDVSKAQLDVAVRPSGAAWSVTNDEAGIAQLVARLKELGPLLVVVEATGGLEVALVGELAAVVAVAVVNPRQVRDFAKAVGQLAKTDRIDAQILARFAEAVRPEPRPLKDEETRHLAALVSRRRQLRDMIVAEGNRLGAAPKKLHKGIQKHIDWLRRELRLLEKDLDDTIKSSPVWREKEDLMRGMKGIGPVSAATMLAEVPELGTLNRKQIAALVGVAPLNRDSGTYRGKRSIWGGRASARAVLYMATLSAIRSNAALRGFYRRLVANGKPKKVALTATMRKLLTILNALVRDRRPWDATLGLDAQHSC

SEQ ID NO: 232317 - protein, 342 aa, unidentified
MQIAVLGIDLGKNSCSVVGLDSGGRVVLRRRLQREGVVKLAAGLPGCMMAMEACCGAHHLGRRLRDQGHEVRLMSPEYVRPYVKAQKNDDRDAEAIAEAATRPTMRFVELKSEMQLDMQSLHRARDRLVGERTALINQLRAFLLERGIIAPQGRRKLETHLATLLAAEQVSLSLRTRLLIDDQRAEWRELDRRILAFDEEFAREARTDEAARLLTTIPGIGPLNATALVAAIGKAETFGRGRDLAAWLGLVPRQMTTGGKPKLLGISKRGNGYLRKMLIHGARAALPTLCKSETPLGGWLQGLVARAHVNTVVVALAAKLARIICVVLRTGQRFEMRAATVS

SEQ ID NO: 232318 - protein, 392 aa, unidentified
MIIVGIDVASQKHDYFMVRPDTGEVFSKASVTIRNSENGYKKLHEDITAFCGATGDYDVRIGLESTGIYHTNIIMFLLSQNYQVMMINPILTNMARKSSRVHCPKNDNLDSQTICKYLIENPDKFSPYTLSSYHNEALKSLSGKRFFIVDELRKAKLTVNNLIQVIFPEFKSLFSNIYGATAISILKHYQTPKRIAIAHADSLARFIHGSCSCTAAELIEAAKSSVGISNDYLAFQLADAIEEMEHIQQRVKKFDEQIKTYVDELCPELLSIPGVGYVTAGLIMGEIKDISRFRTVDSLIAYSGIDLETYESGNYKSKNLHPTKKGSKYLRYALFQVARVAWIHDPVFNAYYRKKLSEGKHYYVALGHLQKKILRVIYSILKNNSTYSVKIA

SEQ ID NO: 232319 - protein, 344 aa, unidentified
MDHFGGLDVSVKEASVCIVDDAGRIVREVKVGSEPEALLKVLGNPAYRFKQIGLEAGPLSQWLFSALAEAGLPVVCVETRHMRAVLKAQINKTDRNDARGIAQMMRVGLYRPVHVKTLRSQKLRMLLTHRKLLQSKAIAIDNDLRGTLRNFGLKVGMVGAVRFEARIRALVENQSDLAALIEPLLIVRRTLREQVVILHRRLLAIVRDDEVCRRLMTIPGVGPVVSLTYRATVDVPARFRKSKSVGAVFGLTSSKYQSGEVDWSGKISRCGDEMMRVMLYEAAQSMMHSKKWSWLKAWAMQIARRRGMKKATVALARRLAVIMHRIWVDGTEFRWTREQAVAAA

SEQ ID NO: 232320 - protein, 341 aa, unidentified
MGVVGIDSHKATLAACAIDEVGGVVDERTFPNEPAGFAALLAWLGGLEISRIGIEGSAGYGAAAAHFLLDAGLPAVEVPPQLSHRERLRTRRAGKSDPGDALAIARVTLREAELPPVRLADASHELKLLVEAREDLVAEATRVRNRLHADLVILVPGYGAAAANLVADKYRRSVARLLRGLPGVHAELARDRLGRLDRLSGEIRAFERRIEVLVADHPLRQLWGAGPLVTAKLVGEIGDIGRFRSADAFAMLAGVAPIPASSGQVSRMRLNRGGNRQLNRALHGIALAQVRTYPPAQAFVARKRAEGKGWFEALRALKRHLARIVFRLLSQSVAQASSLGA

SEQ ID NO: 232321 - protein, 426 aa, unidentified
MKSTTQNSKIAAITKKTLVVGIDVGSETHYARAFDWRGIEFSRHPLQFSNTEDGFKTFKAWIDELKEANGKERVLPGMEPTGHYWFNLGKFLQDNGMQPVHVNPHHVKKSKELDDNDPSKNDRKDPKVIASLVNEGRYSYPYIPEGIYAEVRNLSNLEVHNQSQLIRIKNRIARWFSIYFPNYKDVYGNPGAKSGLMILEKAPLPQDIVKLGIDGVNKIWRDAKLRGAGMKRAKTLVSAAEHSVGTHEAPDSARLELRILLEDYKRLAERETELINLIEAKIAEVPNIDKLMEIRGVGVKTAAGFVAEVGDISRFDNAKQLQKLAGLSIVANSSGKHNGESRISYRGRKRLRYILYEAAISLVGTNPEFKAIHQYYTTREKNPLKKMQSLIAVACKALRVFYAVLTKGVTYDAERLTADIRRPLAA

SEQ ID NO: 232322 - protein, 401 aa, unidentified
MKNIAGIDVHKDVLEIAYRKAGDIQVEEVPYTPDGMTRIIKILRTHGIREVFIESTGDYYYPLYYALKGAGIKVNVMNAYKIKRPEPNKTDERDAVWLLRIGETQLFNPSYIPEDDFLALRILVRERMWLSDKIADLKRKVTSLCWRLGIRIENLSSILRSRKRRRILLDILNGRGGGHGYDELSGVVKAVLRRRDVRAHIMILGIYLRTIDFLEEKSAKIDRELVSIASKFKGQVEILMSVPGIGFTLAVGILSEIGDISRFPSPSNLASYAGLAPVVHESAGKARLGGASKKSNKYLRRYMFMAAMTAMRSKSPRIKALAERLFSRGKHFKVVAVAVARKLLTIIWYLLTRNVSWSEENFSKIVKFPRRDGCKISVREAILILERAGYEVRLKRFGEKS

SEQ ID NO: 232323 - protein, 391 aa, unidentified
MNNLPSQKSQKESNFELINPSAAGIDIGSGEHWVCVPPSAAEENVRRFGCFTPDLIALADWLIECQVETVAMEATGVYWIPLFQILEAKSLDVNLVNAHHVKTVPGRKSDVLDCQWLQKLHTFGLLSASFRPDDQVCVLRSYLRQRDTLIKEAATHVQRMQKALIQMNLQLHKVVSNITGMTGMAIIRAIVRGERNPEKLAELKDRRIKSTVAEIAKALSGDYRAEHLFVLQQELTLYDIYQQQITVIDREIEQCLSNFESQTEDPPPPRKGKKRKKPPGNEPNFNLHRHLFRMTGVDFTQIDGLNVLTVQTILSEVGLDPNRFPTVKHFCSWLGLCPGSKITGGKVKSSQTRKVVNRAERCLQVSRSIPESLSFCPGSILPATVFSIGGT

SEQ ID NO: 232324 - protein, 372 aa, unidentified
MPDVSSNQPADVRLWVSLDVHKLSIVAATLPPTGGLPEVQRIETTRVAIRRFIERLGSPEGLAVCYEAGPGGFDLLRVLTELGVACDVIAPSLIPVRAGDRVKTDRRDAKKLVRLYRAGELVYVQPPTPETEGLRDLMRCRDDLRRARTAARHRVSKQLLRHGRIYRDGKSQWTKMHRGWVARQRLDDEFAQAALEQMLIHLDGLDRQLDALDRDLEQIARTGRWAETVQILTRFRGIATRTALGLISEIGDFHRFGHPRELCAWLGIVPTEYSSGDQRHRGHITKTGNHHARRLLIEAAWSYQHRPRRPDRGPEPDARAWQAQIRLHRRYRHLTTERGKRSTVATVAIARELAGFLWAAATNQPLAVEAAA

SEQ ID NO: 232325 - protein, 355 aa, unidentified
MNATTYGLDVAKRVFQMYWVDAQTGEIANRRFGREELIEFLARRPAGRVALEACGSAHWWARKIRALGHEVVLLHAKFIRPFVQTNKTDAADARAIWTAVQQPEMRTVAAKTEDQQAMLALHRMRSLLVKFRTMQVNQLRGLLYEFGATFRAGRVAGLAEIRARMAELAEVLPGTMVCGLQDQLQRIDALEQDIDRLERQIGSWQKQEAACRAIAEVPGIGKLTATALVATMGDAKAFRSGREFASFLGLVPRQSGTGGKIRLGSISKRGDPYLRTLLIHGARSVMCHAKVPTKWQCEIRARRPANVAAVALAHKMARTAWAILAHGRAYQKDYVSVKPTQPTNHEQDVDKPIGC

SEQ ID NO: 232326 - protein, 353 aa, unidentified
MFHQPGEATEMKSTTIGIDLAKSVFQVHGVDERGKTVLKKQFKRDQVMVFFANLPPCLIGMEACASAHHWARKLEKLGHTVKLMAPQFVKPYVKTNKNDVADAEAICEAVSRPTMRFVPIKNAEQQAVLALHRARQGFVKARTAQANQIRGLLAEYGIIIPQGIGHIAKRLPEILEDGENELPGVFRQLLQRLGDHLKELDRQVGELEVQIQIWHREHEASQKLAQIPGIGPITASALVASIGDAKSFENGRQFAAWLGLVPRQHSSGGKQVLLGISKRGDTYLRTLLIHGARAVIRVAERKAGYADSWLARLMGRRNKNVAAVALANKNARTVWALLAHGRAYEADYEPAAA

SEQ ID NO: 232327 - protein, 343 aa, unidentified
MEHYVGLDVSLKLTAICIVDQTGRIEREGVVASNPEAIAAFIKSHAPHVARIGLETGATSTWLWTELNKMGLPVICIDARHAKAALRMQINKSDRNDAVGIARIMQCGWYKEVRVKDLDSHAIKALLVSRALLVKIKRDLENQIRGLLKNLGLVIGRAKMNVFAVCAAELTEDRPELAAAVEPLLKAREAIERQIADLDRKVLRLARNDAQVRRFMTAPGVGAITALCFLATIDDPTRFKRSRSVGAYVGLTTRRYASGEVDWTGRISKCGDKLLRSYLYEAANVLLTRVAKWSALKAWGIRLAKRSGLRKAKVAVARKLAVILHRMWIDGTEFNWSTKKAAA

SEQ ID NO: 232328 - protein, 339 aa, unidentified
MKYTPFGVDIAKHLIQVHFINEHTGEVVDKQLRSKDFLTFFSNREPCLIGMEACGGSQHWARELKKLGHEVRLLQARFVKAFVMGNKNDVMDARAIWMAVQQPSKEIAVKTEEQQSVLVLHRSRRQLVKFRTAQINALHGTLLEFGETLHKGRAAMDREQPAALERMKTKLPPYLITVLEDQYTRLSELDMLIDDLEKQLNSVARQSEICKRLMEIPGVGPLIATAAVATMGKASAFKSGREFAAYVGLVPKQTGSGGKVRMLSISKRGDTYLRTLFIHGARSAALLTKEPDPWITELKKRRPTGVAIVAMANKLARTVWAIVAHDRKYDKNHVSIRPY

SEQ ID NO: 232329 - protein, 371 aa, unidentified
MKSIIYIGMDVHKKTYSLCALLKETGEIISETKIPADVSLIIKFIENAKKSVDSDDVQIKTGYEAGCLGYSLYWQLAAKGIECDILAPSTMHRSAKNKVVKNDRRDAKNIAANLANGTYKSVYVPTDEDIEIKEYIRMMHDFKIELKKVKQHINAFLLRFGHHYPGKSKWIPAHIKWLKELELSDMYREILDEYLSQLEILSEKIERFKYRLEELSQKETYNEKIGQLRCIKGIDTTAAMTMHAETSDFDRFPTANAFASYCGLTPGEDSSGDSYHRLGITKQGNSMIRTTMVEAAQVLVRGTIGKKGKKVKSKQKDQDVKVIDYADKAVVRLQKKYHRMIFRGVKRNIAITAVARELACFVWGIETGHIS

SEQ ID NO: 232330 - protein, 387 aa, unidentified
MPQPNDLSRSLAALDENSTLIAVIEMSQSSWLIAGVIAGVERQPTKKLEPDAAGLLRLLHRWRTEAEKAGRNITRIAVAFEAGRDGFWLARWLLAHDVEAYVIHPNSIAVSREHRRAKTDRLDTALLKRAFLGWLRGEREHCSMAAIPSLEEEDAKRPGRERENLIGERTRIGNRIKSTLARLGIRGFKLTLRTTAQRLERLCTPEGQPVPPNTLAELRREMARLRLVAEQIAEIEATRLERLERQPDQGAHPMIRLLARIRGLGVETADMLAREAFSRPLRDRRAVARYGGLTGAPDESGARRREKGLARAGNARVRRGMIQLAWRFLIFQKDSALAQWYRQRTADARGATRKALIVALARKLLIALWQLVATGEVPRGVVLRPAH

SEQ ID NO: 232331 - protein, 358 aa, unidentified
MRLLKSQTREPSVNQIIRIGMDTSKHIFQLHGVDAAEQPVLRKRLRRKQVLAFFAKLPPTVIGMEACGASHYWARELGRLGHEVRLIAPQHVKPYVTRNKNDGRDAEGTCEAMSRPTMRFVPVKTAEQQAALMLAGIREQLIARRTQLSNTIRGYAAEFGVTAAKGLDKIEPLLAQIAQQEDLPALARELFATEGREYARLQAELKAIEARLMAWHRANACSRRLAQIPGVGPIGATALVMKTPDPRAFASGRHFAAWLGLTPKDHSTAGKTRLGKITRAGDEVLRRLLVAGATAVIQQVRRGRGRPSPWLLALLKRKPPKLAAVALANKIARIAWKLMTTGESYDSARMPGVSAFAA

SEQ ID NO: 232332 - protein, 392 aa, unidentified
MRFYNRQHRHYCGIDLHVKTMYVCIVDTAGQVLVHRNLPSRPEALLETIAPYREDLVVAAECMFTWYWLADLCAAEGIAFVLGHALAMKAIHGGKAKNDKLDSHKIAVLLRGGMLPQSYVYPATMRATRDLLRRRLHLVRKRGQLLAHIQNTRHQYQLPEFERRIAYPANRNGLTERFPDPSVRKSIEVDVALLDEYDMLISDLEGTLVRDAKRHDADAFHRLRSVPGIGKILALTILYEIHDITRFDRVQEFASYARLVKSRKQSGGKLLGSSGAKMGNVHLKWAFSEAAVLFLRHNPEGKRLLAQIQKKHGKGKALSILAHKIGRAVYYMLARGTVFSREKFLAAGGSARTSQTSNSSRRDRARADRTGPVRPERVEASIMSQRSGSEIV

SEQ ID NO: 232333 - protein, 267 aa, unidentified
MIMLGIDVSKTKIDCCIFPQGLTGKRKNKIFTNTESGFGSLFKWLITLKIEPDQVTAIMEATSVYHENLGYYLYDAGVKVCVANPSRVRAFAKGMSMLNKTDKADSEALSRYGYTAKLIIWQPEPENVRLLKALLGRRDVYLGSLLQEKNRLEKAQSTHTSVVVIKLLEENIEYLNQQLEHIDKLINNHIDQDPTLKQDLKLLQTIPSIGERSGLLLLGLFHSHKFEKASQAAAYVGLVPVHQLSGSSVNKQSHLSKAGDSKIRSVL

SEQ ID NO: 232334 - protein, 322 aa, unidentified
MTNSDSFVVAGVDVSKAFLDVAVIGDSIRPSRFANTQAGQEALAQALGSIGCSLTVMEPTGGYEAATACALQLHDLPVAVVNARRARAFAQSMGHLAKTDSVDALALAELAAVLVRKPDVQKFLLPVKDNSRKELEALMTRRNQLIAMRVAEENRLELAPARVKPSIQAMLNAIQKLLDENDTDLQGQIGRHFQELDQLLQSIPGIGPATSRMLIGALPELGHLDRRAISALVGLAPMAKDSGSSQGKRRIQGGRATIRTTLYMATVAAATYNPTIKTFYQRLKVAGKPSKVALVACMHKLIIILNAMVRTNTRWQKVAIAV

SEQ ID NO: 232335 - protein, 362 aa, unidentified
MENNNLNNHGQKRAPVESGVIIKLGMDVHARQVTVCRQIGQATPQPTQRFSPDGLVGWVAKQVPTAAKVYSCYEAGPCGYVLHRRLVELGVENIVVAPRQLDGARRQKTDRLDARALLDQLDRYLGGNARALSVVRVPTVEQEQLRSQSRQRDQFSRLRRGIEARGRALLLTQGYYDEGKGPWWRPQRWEAIKPTLPDWIVERLTLWQPMAFQFDQQDRALRAKIEMGAPKGLPRGVGAMSWVILSREILDWSRFKNRRQVASYTGLCPGVHTSDGRGREGNINRCGNPRVRCALLELVWRLVRFQPDYRPVQLLRDKAALSPRRRRKVAVAAARHLAIDLWRLATGQTTAEKLGLNAVFTV

SEQ ID NO: 232336 - protein, 316 aa, unidentified
MIEQAFVGIDVSKDSLDVGVIPTGEYLSCRNGSSAIYKLIKKLKELAPSRIVIEATGGYESNLVDKLAKEGLPCSVVNPRQVRQYARSKGRLAKTDKIDAFVLADYGKSCNPRLTVLKSDKRIELEKLLRRRTQVVEMLIMEKNHKRTNEGDWLEQTDEIIELMDAQLSRLESTIEQIIASDDELNTYDKLMQSIPGVGPVLSSTVIAMLPEVNTLNRKELAALVGVAPFNCDSGKLRGSRHIYGGRKAVRNILYMATISAIRYNSVIKNFYTGLINRGKAGKVAIVASMRKLLGIIGAIIKTKTAWRTDYNTIYT

SEQ ID NO: 232337 - protein, 345 aa, unidentified
MELHTIGIDLGKTVFHLVGLNLRGEVVVRKKFSRKQLLHFTANLQVELIGMEACGGAHFLGRALREQGHEVRLMPAQYVKPYVKTNKSDYIDAEAIAEAVGRPKMRFVPIKSDDQLDLQSLHRVRERWVMRRTAVINQIRGLLLERGITFRKGRCHVDAALPGILEDASAKLSGALRVLLAQLKLELDHLQMRIDEADTVIKKTAGENEACRRLVAIPGIGPITATAIIAAIGNGAAFKKGREFAAWLGIVPGEYTTGGKQKLLGISKRGNSYLRRLFVHGARAVLQQSAKQSSGLSSWLAQLTTRTHRNVAAVALANKLARMAWAVLAKNEPYRPPMLADAATA

SEQ ID NO: 232338 - protein, 366 aa, unidentified
MKIMHWIGIDDHADKWTIAQFKGEEAKPAREFELVPDDAGYRKLIKFLKELDGEVRIVYEAGPCGYELYRRLKKAKLQCEVAAPSLTPRKPGERVKTNRRDASKLARYLRSGMLTLITVPDERRESVRDLVRARHAVQKDVVSIRNQIVKFLLRYGHRYREGKTGWTERFWEWVGKIKLEGEYGQFVLDEMIRTHEQRLQRRARYDEAIEEAASKPEYAPYVAALSVLRGIDRLSAMTVLSELGDLRRFPTAPQLMGAIGLVPSESSTGDTTSRFSITKTGNAHVRHIAVEAAWQYQRRITSGATIKRRRKDQPKALVDIAEKCDLRLNRKFHRMTSRGKRSTVAAVAVARELLGFIWAIGQIVHP

SEQ ID NO: 232339 - protein, 310 aa, unidentified
MAEIVITAGIDVSKDRLDLALWPEPGANGSFTPGEIEPLISWLGAHRVSRIGLEASGGYEREVVRRLSAAGFVVVVANPLRVRRFAQAKGRLAKNDRADAATIAEFTATLAPQRQLREAALDRLGEYLMVRRQLQQAVTDTVNQLEHLREAELRRLVAAQRAGLKRRIQQLDRRIAALVAEPPHWQALAKQLRSVPGVGPVLAHTLIALLPELGRLTRRQVASLVGVAPFDDDSGRRNGARQIAGGRTAVRGALYMAALVAKRCNPTIAAFARRLAGKKPKVILVACMRKLIAILNAMQRDGKPWQPVAA

SEQ ID NO: 232340 - protein, 339 aa, unidentified
MFIIGIDPHKGSHTATALTAEEVVVGEVRVVADRHQRARLLEWAAAFQPRTWAIEGATGMGALLAQQLVGAGERVVDVPPKLSARVRLLATGRIDKNDANDARSAAIVALRHATLNTVTGEHQDRVVLRLLADRYHQLNAQRTRTVCRLHALLCLVIEGGTGRHLDVARATKLLAGVSAGDAITVARRATCAQFVAEIGVLDEALAATRAGTGAAVAASTTTVTAVYGVGPIGAAIIVGHSGDIRRFPTAGHYARYNGTAPIEASSGPQVRHRLNPRGDRQLNHALHTAAITQIAHNTPGRLYYQRKQAEGNTPKEALRALKRRISDVVYRQLINDTRR

SEQ ID NO: 232341 - protein, 376 aa, unidentified
MLYVGIDVAKNKHDVTALNVPGKTVLKPLTFSNNKAGFELLDLSFRQLNQDCLIALEDTGHYAFNLLNFLHEQGYKVYTYTPLLIKEFAKSLSLRKTKTDKKDAHGIALKLLSDPNREQFQHDNRQVELKILARHIHRLKKKQSDWKVQYTRCLDIIFPELDKIVGKHSEYTYQLLTCYPNPQKRLEAGFDKLIEIKRLTASKIQDILSVAPRSIGTTSPAREFEIIEIIKHYKRLIDKAEKCVNDLMAEFNSVITTVTEIGNRLGAVILAEIRNIHAFDNPAQLQAFAGLDSSIYQSGQIDLAGRMIKRGSPHLRWALIQAAKACARFSPAFKAYLKTKLEQGKHYNIAIIHLAKKLIRTLFYILKKSCHLTNKK

SEQ ID NO: 232342 - protein, 336 aa, unidentified
MKHILGIDIASETFVGSIVTHEPVPNKTSEATTFFNTVTGFSACVDWTHTLGLVPTETCIVVEATGVYWEALALFFHQHHFTVSVVNPAQVKYFAQSVLQRGKTDALDANLIARFGAVMHPRTWEPPSALSEELQVLMRQRDAYLAMLTQERNRLHSYQRSGFPPQRAIAVSQKTIVFLEQQIKELETNFKNTINTDEHWKRMMELLQTIPSIGLVTAGILLTETQALESFHSSKQLTAFAGIAPAPHTSGKSVYKRSRISKIGNPRIRKAFYMAAISAIRFNPTMKTFYDRLVARGKSKKLCIVAVARKLLIVCFAICKSQQPFDKHYSSHPVLA

SEQ ID NO: 232343 - protein, 356 aa, unidentified
MRFYDRQHRFYAGVDLHARTMHLCVLDATGTVVCDVNLPCRPDAFLAAIAPFRADLIIGVECMFAWYWLSDLCAKEQLSFLVGHALYMKAIHGGKAKNDQIDAHKIARLLRGGNFPLAYAYPKGMRETRDLLRRRTYFVRQRAALFTHLQILNSQYNLPPFPKKLSFAANRQEMDLAARFADKSVRQNASVNLAVINCLDEQIAALELYLSRTAKVDDVQTYHRLQTIPGVGKVLALVLLYEIHDVRRFATVGQFLSYCRLVRCQHESAGKVLGSGGRKIGNAHLRWVFGEAACLFLRSSERAKLWKQRQAKKRGEGKALAILAARLGRAVYHLWRKREAFDEDRFWQGSGVTAKA

SEQ ID NO: 232344 - protein, 418 aa, unidentified
MKPWNELTHFAALDWADDHHDLVVVDAGGQVVRKLTFAHNAQGWQQAQQALAPWPGLPVALETSAGPAVDQLLQRGFTVYPVMPKAAARYRERKRPTGPKDDLHDAWSLADALRTDGHGWCALSPLDPLTAELRALCRDEIVLIEQRTALVNQLQAALKEYYPAAVEAFEDWTAPATWDFVLAFPTPAALVAAGRRRWEKFLHTHRLWRPQTVSKRLEIFARAAEFSGTAPIMAAKSLLAQSLARLLQALERQLEAYRARIRELFNQHPDHELFGSLPGAGSKLAPRLLVELAAVNWAQISQVQARAGTAPVTQQSGRIRRVKVRRACTHWLRATLHLWADLSRHDSAWSAAYYRAHRDKGQSHAGALRCLANRWLEIVGGMVRTGTTYNAEKHLAAIQKHGSYVLKLLPGPTAQTCE

SEQ ID NO: 232345 - protein, 474 aa, unidentified
MGNKELFLGIDASKGYADFALMNATHELAEPCFQLDDTNSGHEKLREIIETYFLTNPEMTLYCGIESTGGYERNWLNYLLFLGVRVKMKSALINPALVKGISKAALNRSITDETSAINIALYLANFKNKILYLQEDGQQNNPFESGRSLYTYQKMIVKQSVQLQNQLEKIIYQHFSEAIVYCRHGMPKWLLKVLNKYPSPKDICQAGTSKLVRIKGISQQCAQGLINKAEKNSQSCDRNIAFIISHTTAEIIHKEEEIAAIDKYMAKEYSQHPLVKLLGTIMGVGTMTAILILFEIENINRFATAKKLVAYFGLNPEYRLSGDGKMGNHLSKKGRKMMRARLYMCCLTAANRDPMMKQLYARYRGMGKDHYFTMGVLMHKMLRVIYGILKSGNPYDIAIDQQNREKASEKQGDVAKQKLQQARENRKKSRRYLTPKTEDLAPISKRKHKKIKELETSQTPEGVLIRDHPQPSQK

SEQ ID NO: 232346 - protein, 426 aa, unidentified
MKRTGFSSPGATAPLLVSCDVGMQHVHMMCRAVGDSPFPRVYSVDNRTEPIRRELTALREVAHAAGYVEVRLVLEPTGIYHHLLVQIAHELGFDVRFVNAEDVVKMRQVIFGDFGKTDDRDPQAINAVATHGRTIVVRELPATFRLMRGWGKIYQDAEDELVAAKGRIHRALKLLFPDFAFSTDFLYSASGEAIMDCYGWNPHRIVRDSPGRILDRLRKRSRILRRSVERLLEQARASVTSTPAGSLAELAEQQLALAWEELQRHDERRARAREKLETLYLEAREADPRMPEPVKGVVSLIGLARLFAEVGPLDDFESWRQILRYGGLNLCERKSGQYTGQTKISRKGRPQLRRILNELVLPLVRRGALYGDYYHHKTTVEKMEGTKAMTAVARKVVKMIWGWTRSNAAFDPARVFTCRAQYAKAA

SEQ ID NO: 232347 - protein, 506 aa, unidentified
MAQTAKAARQKEKESVSKRRSTPVTAESKAAKPKGKVKRGDRRRRTQKGEAIENRPVFEPNAAGVDSGAREVYGAVPPDRDKQPVRICETFTADLQELANWLTACGITTVAMESTGVYWIPVYEILEAHGIRACVVNARHMKNVPGRRMDWHECQWIQFLHAVGLLRAAFRPEPEVCALRAVIRHRGELVQMAAKHVQHMHKALTQMHRQIQHVITDLTGLTGWAIGDAILKGERNPSRLAQLRDPRVKASPETIEKSLVGHWQPEHLFTLKQSRRLYAEYQREIGECDAEIERLVGTFQPRVDPEVKPLPPDQKKRNRNYAKSRKRRARPQSSTREFDLRTEVYKLYGVDVTQIPGLEFLALQLFSELGRDMSRWASAACFVSWLALCLDNDISGGRVLWRTKRRVHNRAGQLFRMAAYALDRSPTPLGAYLRRMKAKLGPQAAHTATAHKIAVIFYAMIKNQTEYDETIWEQRDAQRHQRHMTGLKRQAQRLGYKLTPIEEEAA

SEQ ID NO: 232348 - protein, 422 aa, unidentified
MLEETQDTEELIERVAALDIGKAELVCCVRVPGEGKRGRRLQEVRTYTTMTRSLLVLADRLGELGVTRVVMEATSDYWKAPFYLLEAQGFEVWLVNAKDVKHLPGRPKTDRLDAVWLAKVAERQMLRPSFVPPPAIRRLRDVARYRADLVRVRTAEKQRVEKLLEDAHIKLSVVASDIFGVSGRAMLAALLAGERDPKVLAELARGRMRAKRSVLEEAFTGVFTDHHGFLLARMLGRVDGLDADIAELDHKLEELIIPFTAAADRLDEITGVGRTAACAIIAEVGVDMGRFPTPGHLASWARFAPGVKQSAAKTKGKSSTGHGNPYLARVLGEAAAAAGRTDTFLGERYRRIARRRGAKRAIVAVGRSILSIIWHLLADPDARFHDLGAGFYHTRINPERAKRNHIRQLEALGYKVTLQPAA

SEQ ID NO: 232349 - protein, 341 aa, unidentified
MWIIGVDYHPSMQQIAWVDTETGECGERRLAHCAEAEQFYRELKQKGVSVRVGMEATGHSRWFERLLAELNFELWVGDPAQIRAKQVRKQKNDRRDAAHILKLMLEDNFPRVWVPTAENRDLRQLVWHRHRLVGMRTRVMNQLQAIAMNEGVRRKRGLWSQQGRAQLESLSLPAWTSRRRQELLELLDQFDPSIDQLSEAIEQEAERWPEGQRLMTHPGVGPITALAYVLVLGSPDRFRCGKQVGSYLGLIPCEDSSAERWRMGHISKQGNALLRYLLGQAAQSVARCDELWRHQYAHLALRRNRAIAKVAMARKLAVRLFWMWRRGWDYQQLKKFGSHVG

SEQ ID NO: 232350 - protein, 387 aa, unidentified
MIYVGIDIAKLNHFASVMDSDGEVLAEPFMFTNDFSGFQKLLDCISSFPRDELYIGMESTAHYAENLTSFLFTRDFNVCIINPIQTSALRKSNIRKTKTDSVDTYLIIKALSMNHFRLYTQRDYDSLQLKNLCRFRQKLMKARTRVKIQLVTYVDLLFPELQYFFKSGIHGKACYALLKEEPNPDKIASMHLTRLSNLLNKTSKGHFGKQHAIALKELAAQSVGIKNDTLSLQILQSINQIELFDSQLNEVEGSINEIMDKLDSVIKTIPGIGSLNGAMIIGEIGDISRFEKPCQLLAYAGLDPSVYQSGNFSASRTRMSKRGSRILRYALINAAWQATLNNRTFRDYYDLKISQGRRHYNALGHVANKLVRVIHKMMTDNVEFDLD

SEQ ID NO: 232351 - protein, 409 aa, unidentified
MERLIERVCGLDVHKQTVAACVRVPGSKSAREQHVQTFGTTAAELLVLRDWLEAHGVTHVAMESTGVYWKPIYYVLEERFTCLLVNAAHVKQVPGRKTDVQDCVWIAQLLEHGLLRGSFVPPAPIRELRDLTRYRKVLIQDRTREANRLHKFLEDAGIKLASVATDILGVSGRAMLEALVRGTTDPEVLADLARGKLRAKLPALRQALTGRFRAHHAFLVSQLLAHLDYLDETITTLSERIEEVIVPFADELARLDTIHGVGRRTAEVLIAELGVDMNQFPSDRHLASWAGLCPGNNESAGKHKSGKTRRGNRWLRAALTEAALAAVRTSNSAFTARYRRIMRHRGHKKAVLAVAHAMLVTAYHLLARQTTYHELGADYFDRRHGERVTQRAVQLLERQGYRVTLERAA

SEQ ID NO: 232352 - protein, 394 aa, unidentified
MPELFVGIDVAKDTSSAQGIDRNGKGRFSLTFAMDSEGFMQLWKAITEHSKDVSEVSAAVESTACYHINLYSFLTAKGVSTVVINPLLIANFTKLSLRKTKTDKKDAMSIAQFLLVHRETISQLSLSQDLQDFRDIARERESVCNLLSAHKVEIKRLLQSTFPELERIGDISTKVMQEFIAAFPSARLVNMARPKAIQKILQRKGVGTRLTYTPEDLIRAAKQSVATISPAKEFILQGKVRTHQHLQERFEELTKILTEYCKASMLEDFEIITSIDGINKRTATTFLAEIGCISKYASYKKLIAFAGIDPTVYQSGKFEGASRISKRGNRHLRRVIWLMTTCVIQHNATFTAYFMKKRSEGQPFKKAVFATAHKLVRVIFAMLTQRTMFKEVCA

SEQ ID NO: 232353 - protein, 342 aa, unidentified
MSIVGGLDIHRKQITFDYLDTTTGEVRRGQISPADRGHLAAWLAGRFTGQAADFAVEGCTGWRYEELAAAGITAHVAEPADTAALRGRKRHAKTDKTDSRHLRQLLADGRLPECWIPPSHILECRALLETYHDLRVEHTAWTQRIHAALFHQGAPQLGGQRLRTGEGLAALRAAAAGLSPAGQLQIAVALDKLAAQDRYLDVLRRRLLEAARQLAGAKELHARLYGVGPVTALALVCWLGGAGRFSSARKAVRFAGLDVTVYSSDGKRSPGHLSRQGPEVLRWCVYEAGKTHARGSAPDYRYYASVKDRIDGKRAAISEARKIIRQAVHILAELGDDALAAA

SEQ ID NO: 232354 - protein, 355 aa, unidentified
MRKYSTEFFVGMDLGDSSNHICILDPDGEVVEATEVSNTIDEINAFFDRFAHPRRVVVAMETGTHSPWLSHLLEGRGFEVLVGNARKLRLVWDSSQKDDPRDAELLARMARFDRKLLSPIHHRSRSAHMDLTVIKGRDALVRCRTKLINFVRGICKSAGVKPPSCSAEAFPKVVIGHIPEDLLEAAVPCVNTVMELTIKIRQFDRKIEAICKESYPETMVLRDIGGVGPVTALAFVLTLEDPGRFKKSRDVGPYLGLTPKRDKSGKSDKPLSITKEGNSHLRSLLVGSAHYILGPFGRDCDLRYYGMRIALRGGKVAKRKAVVAVARKLAVLMHHLWKNHATYDPMFQQSRRKAA

SEQ ID NO: 232355 - protein, 312 aa, unidentified
MMQEVFVGVDIAKDWLDIFHPGSGLRRIDNTAAAARRFAKASAKDGVWVIFEASGGYDRLLRDALEAAQARFSRVNPRQARDFARAMGVVGKTDRVDARMLAEFGARLRPAATAAAAPERCALQALTTRRRQLVEIRKQELTRLPQTLDPAARADIRSLILILNARIRRIEGAMAAQVGATPDMAQAARRMQTVPGVGPIVAATLLAELPELGQLDRRRIAALAGLAPIARDSGKHLGKRRIGGGRPTVRAILYIAALHASRLSPPFKAFRDRLKAAGKPTKVTLVATAHKLLDILNAMLAASTDYKANTMP

SEQ ID NO: 232356 - protein, 409 aa, unidentified
MDVIYPHCCGIDVHKREVVACVVATDADGTPSKLIRAFGTMTLDVLALADWLASHGVTHIAMESTGVYWKPIYNLLEDQFTLLLVNARHVKAVPGRKTDVRDCEWLAELLRHGLLTGSFVPDRPQRELRELTRYRTSLVRERTAAANRLQKTLEGANIKLASVATDILGTSGREMLAALVAGRTDATELAQLAHGRLREKLPQLERALVGCVGPHQRFLVAEQLAHVDFLDAAIARVSTEIGERVRPDEEVLARLDTIPGVGRAVAETLVAEVGADLTRFPSAKHVASWAGLCPGNHESAGKRRGGAIRKGSPWLRACLVQAAHAAARTKGTYLAAQYRRLAARRGRAKAAVAVAHSILIIAYHLLMEGTVYRDLGANYFDERDRQAVERRLVHRLEGLGYTVSLQPAA

SEQ ID NO: 232357 - protein, 403 aa, unidentified
MDLSTRQARIWVGIDAGKGHHWAVAVDADGEAMFSTKVINDEAQILALIETACERAEDVRWAVDISGRASTLLLALLIAHDQDVVYVPGRTVNRMSGAYQGEGKTDAKDALVIADQARMRPKSFAPLDTPPELVSTLRVLTNHRADLIADRVRLINRLRDLLVGICPALERAFDYSSAKGPVVMLTEYQVPAALRRIGVKRLTTWLERRKVRSAGTVAAKAVEAAQSQQIALPGEKRAAKLVCDLAHQLLALDERIKDNDREIRETFRTDDRAEIIESMPGMGPILGAEFVAIVSDLSGYRDAGRLASHAGLAPVARDSGRRTGNNHRPKRYNRRLRHIFYLAAQTAMMRPGPSRDYYLRKRSEGLIHTQALLALARRRVDVLWAMLRDQRLFTPVPPVTQAA

SEQ ID NO: 232358 - protein, 351 aa, unidentified
MSEYIAFDSHKHYTWVDRQDHSGGKNSCHRLEHAPGAVREYLSGSEPGTAVAVEATGNWYWIVNEIEQAGLQPQLVHPRKAKLMMGLTNKTDKLDAQGLNRLQRNGTLPTVWIPPGPLRDLRELTRTRLVLVAQRTRLKNRLSATLAKYGTPASECSDPYGKRGRAELEKHLQGLPEQTRWVSGQLLAQLDFVSAQVKQLEQRLAELVQVTPEMQWLLTLPGVGVILAATIALEIGEVERFPSAMHLASYSGTTPRVHASGGKVRYGPLRADVNRYLKWAFAEAANSVAVNHLRCPERHVSQLYRRLRQKKGHPKAIGAVARHLAEAAFHVLRGKQMYQDPSFGRGRTSQV

SEQ ID NO: 232359 - protein, 429 aa, unidentified
MSEEKAKELRVSVDVGYRRHSVAIGLPSGEVLEEFEIEHRLEGFQDFFSRIEKHNPKQGYSVAVAMEGYNGWARPLDGMVRQRGYRLYNINNLKLARFKEIFPGSAKSDRIDARKGLELFQLRDHLPLAKEVLQEVSGTPKENEVLKRLTRRRRRLVNERVRVVNNLQADLQAVCPGLLEITSEASNQWFLNFLLSADTLPQLARLRKASLLKIPAVGRKYASLIEDWQKRAHFGAEVQWVSEMIQEDAQRCLDLEEKIKALETKIEQVAKDSKIAKILISLPGFGPVCTSELAGEIGTIERFGKEGSLALYLGMSTLDNSSGKYQGTKAPKHVNTRAKAAMMTAIDRHRKYVPESQKYYEKKRGEGKKHNQAIRALGRHLCRIIYKMLKEERQYEIRPRKGNTTTKVASRSSLKTQMRRPKIASKKNK

SEQ ID NO: 232360 - protein, 413 aa, unidentified
MDAIVERCAGLDVHLDTVVACVSYGKLDIKPKKEVKTFSTTTKGLLELLDFINQKECTHVAMESTGIYWKPVWSILESGAFELIVANAKKIKNVPGRKTDVKDAEWIASLLRCGLIEKSFVPLERIRDLRDLTRLRKELLGEVNRNKNRIHKVLQDANIKISSVLSDVFGETGKSILNQIIGNQCITEEFIYSLYEGRGKSKLKSTPMEMYEALNGKIRGHHVILLGMHNSNIVFLEKQINELEKEIDILLQKERDSLELLETIPGISKISASSIIAEIGTSMDVFKTEKHISSWAGLCPKNNESAGKKKRSGIKSGNNWLRSMLCECAWSATKKKDSRFKNKYWSMVPRMGRKKALIAIANMMLRLIYHLLKTKSTYKELEIQYFIDKDKRREDRIIKELKSKGYLVEKDSL

SEQ ID NO: 232361 - protein, 373 aa, unidentified
MPRYSTAFGMDVHLRSTTVCALDAETGEAVARRFRGNPWGEVAEWMSGFPGPSLAAYESGYLGFAPQRELSGLGVDCVVAAVSRVPRSAADLSSKNDRNDAARMAKAILSHDVTPVWVPSPEIEGLRDLAAAHDVATARLAAAKQRLLAFLARRGYAYGGTTPAGNPRRYWTYDFLRWLDKVRPADDGGIRALAALRSEVEAAAETRDDLLAEYRAAVAAGPLSAEVEALQSIKGCGFALAAAFASEVGDFSRFRSGRQVTAYFGLAPKQRSSADSVRLGGISGAGNALVRRLAVEGSWSYVQASHQPKLMPKGSGVPLEVRMHGRKGSERLLRRREEMLARGMPQAKANAATAAELVRWLWALGAMCREATE

SEQ ID NO: 232362 - protein, 417 aa, unidentified
MSPTPSASSSEEEVTIKYVCGIDVGSQSCAGCICGPDKRVVAKSSDFANTKEGWKVWEEKLAQLDAAPNQILIGMEATSRYHENLYHELEQKGYQMRLLHPGQTHLFHRQQGLRAKTDRLDAMTIARTAARVEKRAWATFEAEQVATYREVVRLHTQLSEEAARYQNQIQALVVVLFPEFCQIFAEPCLPSALAVLKAYPDALAVAKAGVEAVYQVLRAVPAAHFGRPTAKKLVAAAQASSSSGRALRGRANSLRILCDQLEHTQANLNRLEEELEQLITTDPDTKGLRQMPELGPKTVAVLRAELGEVKRFVRTDEAVAYAGMDIEIKESGKWKGKAKLSKHGSGLLRQILYLAALRSIHLEGSAFGAYYHHLVARGLKKMSALMAIMRKMVAVATHLMKTGEDYDPRKVWTGSTS

SEQ ID NO: 232363 - protein, 348 aa, unidentified
MTMIGGFDVHRQQITFDCVDDDGLVHWGQIRPATRTRLRDWLAKHCPDGNGEFGLEGCTGWRYVSEELLAAGARVHMGDPAEVAALRGPKKRAKTDRSDARLLRTLLLEGRFPESWIPPAQVMEVRTLGRLYCALMDERRSWQQRIHAQLFHQGCPPITALLSHAGREALAGAELSAAGRQYVGTTMRCIDQLNAEIVPLRAQLVDFARHQPGCQALQARHYGVGWLSAAIMWAEIGDARRFHSSDQLVRFAGLDITVYSSDAKRAPGHLAPQGSPELRWAAFEAAKCAARPGSPDYAYYHQVAARKDGKRPTLAVERKILRRCYHTLRELGDTALAVPSTKINHIAA

SEQ ID NO: 232364 - protein, 421 aa, unidentified
MLGVGIDWAEEFHLVALGRPGEGVFDIFRVEHRPADIDALVARIAAIEADPAEVRVVLETSHGMLVERLLDAGYVVVPVNPDLVARRRGPAKKKDDPEDARIACMIALDRFERLRVLVPHGEEAGELRAITRDDERAARDERRLLNRLRADLIATFPAALAIAGDDMGAPTFLRLLERWPTAEALAGATHDELVAFARAGRHGWPGRFAAQVATALATSHFVPRPYLVRAKEGTIRLLATQLLTLGAQRRAWERRMGELLLGAPRTGRTKQPKEGERGPTVPGGEIYLSFPGLGDRLAARVAAEIGDISNFDTPNGLQCYAGKAPVTRRSGKHELVVANRLACNGYLRDAVQHWAFCSLTRSGWARDFYDSQRSRGKGHHAALRALGNRWLEVLWHCLSKNLAYDEAIHVANRNRALARAA

SEQ ID NO: 232365 - protein, 397 aa, unidentified
MNKKVHYLGLDVHKETIAVAIAPGGDTEVRSYGIIGGTLDALDKLIKKLQRPDVELRLVYEAGPCGYVIYRHLKNPGLHCEVVAPSLIPKKAPDRGQTDRRDAQQLARLYRAGELTSIYVPDEEDEAVRDLVRARHAALIDQRKARQRLKGFLLRLGFRYTGKSSWNDAHQRYLARLTMPRLQQQIVFQEHIEAINVQTERLERLTQAMENALTGWKWEPVVRALMSLRGVQVIVAMTLVAEAGDMSRFDDPRQLMAYFGLVPTEHTSSDKRWQGGITKCGNGACRRVLIEAAWQYRLNPKVSPPLRQRQEKQTKTVRDISWKAQQRLHQRYKVLSARRKNKGVVVTALARELTGFVWAIACQLSAPNKLKAAKPSAPAPRGRDYILDPHKKFQKKK

SEQ ID NO: 232366 - protein, 365 aa, unidentified
MTKIAYVGIDYHLNSLSIAVLIEGEKEPDQMVHLKNDDRFIRKFMSKISQNFQIKACYEASTNGYCFQRKMASWGYHCDVIAPSLIPKKPGDHRKNDFRDARALVQTYAHGMLSIVHLPSEEEESVRSLIRCRYAFKEISKRVKQQINSFLLGQDQHWKHSKWTHQHRTWLGKLKMSNSHLQQVLEEHLAHLDYLETRLRHLNEQIEEIAALPRYAPAIKKLYALKGIQTLTAMLLIAEITDFRRFPTPRALMAFLGLVPSEESSGEKRKGGAITKAGNQRCRTALIEAVQNYAKSSHISTRMKSALSQVDALTASIAMKCLKRLHKRFWALTLKGKLRPVAITAIARELVGFIWAMMQTEPSLA

SEQ ID NO: 232367 - protein, 414 aa, unidentified
MEEIHERVAGLDVHRDSVAACVRTAGPRGGLANEKERFATTTTELARLGGWLADRQVTLAAMEATGVYWKPVYYALEHRFEVWLCNAHHVKNVPGRKTDMSDAEWLADVAAHGMVRPSFVPPPAIRELRELTRYRKTQIDARAAEIQRLEKLLQDAGIKLTSVASKVLTQSGRLMVEALIAGQRDPAALAELAKGKLRPKIPQLTEALNGHFGAHHAVGARRILGHVDFLDASIATLTEQIDLRTQPYGAVRCLLTQIPGFDRLIIDTVIAETGADMTRFPSAAHLANWSGVCPGNHESAGKRRRVGVVPGNRWLRRTLIEAAHAAARSKGSYFGAQYRQIARRRGPNKAAVAVAHSLSDLVWHMLSTGECFTDLGADYFQRRRDPQREADRLIRQLQALGYGVTVTEPPTPAA

SEQ ID NO: 232368 - protein, 320 aa, unidentified
MSPNTPQSMNPTPARVYAGLDIAKASLQLHLADRFHDLPNTPAGHARLVERLRAVPNLQVICEATGGYERDPVAALQAAALPVSVLNPARVRHFARAAGRLAKTDPIDASVLTAYGQAFRPAATPAPTPAQSQLAALVARRLQLQEILVAERPRAQAGPPPELRRRFGQLERQREKQLAKVDALLEQHLQSQSELATKAEKRDAITGVGRITALTVLAEMPQLGQLNRREAAAWAELTPWNRDSGNWKGKRCIGGGRAGVRRGPYMAALTASQFNPSLKAFYDRLRAAGKPAKVALTTVMRKLIVLMNHVLKNPHSALAN

SEQ ID NO: 232369 - protein, 348 aa, unidentified
MKYYVGLDVSMKTTFISIVNQEKKIVFESEVITDPCTIFSAIKGTKLDIENCAIESGAISHWLVKELLKRKIPVVCVDSRKMAKILSININKTDKNDARLIAEALRCGFYSEVHQKNQEDAEMQILMGTRRTLIEVSTKLKNTIRGHLKIFGIRLGTASNKKFDNLVRSALQNKPEVVQLGLKSLLETFKCTNNEIEFLEKKIEEMAREDEDVKLLTTIPGVGVITAFTFKTCLGDPSRFKRSRSVGAYFGMTPTQYSSGDIVKQGKVSKCGNSEVRSLLNEAAFSIIYSTKSWNRIKAWGLKIKKKKGHKKAMMAVGRKLSLLMYRMLISRKQFEYGVPKDNSQKTA

SEQ ID NO: 232370 - protein, 359 aa, unidentified
MLHNKGESAMYNITIGMDLGDKNHVLCVLDQNGTSCYQGSIPNKQETVKEFFLQYPRATVAIEAGTHSPWISRLLEDQGCHVLVGNPRRLRAIWDSERKDDYRDAEMLARIARFDPELLYPINHRGQQAQVDLELLQARDMLVKARTSLINHVRGSVKAFGERVRSCSAACFHRKAEEDLPDVLKPVLLPILEMIEQLSNQIKSYDKTIEDLCCNAYPETELLMGIKGVGALTALAFILVLEDPSRFDRSRQVGSFLGLTPRRDQSGATDKQLRITKAGNPYLRRLLVGAAQYILGPFGEDCNLKRFGKRLCDRGGKNGKKRAVVAVARKLAVLLHHLWRTGTIYDPLYKPSGTLAKAA

SEQ ID NO: 232371 - protein, 433 aa, unidentified
MKDCCCGVDVHKSFIIAVIAIFDSEKKEVKFTKYMRFSTFASGLREFKKWLEENNCKHVCMESTGKYYIPVYRAIADGSIQADVVHPKYVKAPKGKKNDKRDAKRIADMYMRDHIAEYSFIPPSDILALRDLTRYRRKTINSISAEKNRLQNCLTVSGIRLDGVLTDVFGKTGSGIIQNIIDTGGCVFDPAPFIQKRVKAKPDEFVEALDGNITPSILKVMELSKNRLEFLGNQKAELESSLESLSKDFSRQINILSSAPGIDFISAVSIIAEIGVDMKGTFGSVKKFLSWCGMVPQNNESAGKKYSTRIGKGNSWLKPVIVQSAVSAIKSKKHPEIREKYETLKKRRGHGKAIVAIAKFLMTAVFFMLLNDEEYSSNLARTQAPNRGTIQLKKLLAYYNSKGITVVTDVGEIVEARPPDTQPTEGESTKSTA

SEQ ID NO: 232372 - protein, 407 aa, unidentified
MTATRKQHSTKRRTKRIQAPAQPKAAEVLYVAFELSWNEWKMAFATGPADNPRLKSIAARDTQALLQEIARAKKRFGLVDSALVRTCYEAGRDGFWLHRFLESKGIDNQVVDSSSIEVKRHGRRRKTDRLDAGKLLSMLIRWHQGERKVWSVVQVPSVADEDRRQLHRDLLELKAERTRHTNRIKGLLAGCGLAVATIDARFLEVLAKLQTWDGQAVPPELQRRLQREHERWKLVDRQIRDLENERVRTIRNAKEPVMDKVRQLLRVRGIGFNSAWMYVMEFFGWRRIRNRKQLAALAGLTPTPYQSGDDHHEQGISKAGNRRLRTMAVEIAWCWLQYQPDSALSQWYQKRFAKGSSRQRRIGIVALARKLLVALWRYLETGEVPAGAETVSWKKGLLKRTEEAVPA

SEQ ID NO: 232373 - protein, 340 aa, unidentified
MENTSEIQRFSWILGVDVSKDSIDTCLIRSEDGQLFESKFHNNLSGFRHLKCWCKETGSECDETTLCCLEHTGLYTRQLVHYLLGRNVKVWLESSLQIKRSMGLLRGKSDKIDAQRIARYAFLHQGKAEIMKISVLTLEKLKDLQANRRRLMKSLQSLKTTTQELKEVDPGSGKDIERINREAVRGLEKSLDKVDEQILTQIGQDQELKNKYDLMLSIKGVGKVLAAMLLVYTHGFQRLNDSRKLACYSGVAPFVYQSGTSVRGKTGVSKFANNELKKVLHMAAVSSVQHNPDLHDYYQRKVKEGKNKMSAINAVRNKLLHRVVAVIKRGTPYQLKLENS

SEQ ID NO: 232374 - protein, 408 aa, unidentified
MESQIIFGIDVSSKSSTVCVVNDRIKQGESFRISNDSFGYQKLYEQLNQYLITPLVVFEATGVYSLSLQAFLEDYHIKYLKLNPLKAKKLMDNNLRHNKTDKVDAYRLALIQFNAPQKLRDPQPREYHELQNASRYYEELTRSIVTTKNQLHRNLQSTFPQIEEILSHPSGRIYWALVSLFPHAGYVLEKNETQVTQMLNSISGIGQQRARYLTTRLYAFAREAYPYDSKDSIIVRAIQRNISNLFSLQQERDYVINYMEKLAKAVNARALSIYLSIPGVARITAVRLVAELGDLRRFSTSAQIDAFVGIDPGRYQSGEKDSSLGITKHGNHIARKILYRVITQMETVKATQPCHITDYYDKKKRSSNSQGYKKIAIASVHKLIRTMFALIKHDQLYDYNIATENKRL

SEQ ID NO: 232375 - protein, 449 aa, unidentified
MQVGNRKVSRVSKQIESAVGKGWVIHCEFVTEGFHMFAVGIDVSNGKSMVAVLQSATKTVLKPFEVAHTAEGLAGLVEKLNKLDGEKRIVMEHTGRYYEAVAMYLHNAGFFVSAINPLVLKDYQDGISVRKVKTDKADAMKIARFTLEKWELLRPYSPEDEVRYHLKTLNRQFQLSSKMKTACVNNLIALLEQNYPGLRDCFDSPAREDGRQKWVDFADTFWHVDCVRNASLNAFTERYRKWCKRRGYNFSQAKAAEIYEGAKSKIALVPKSDVARTLVKEAVAQLNAVSRTVETYRAEMSRLASQLPEYETVMGLYGAGDSTGPQLMAEIGDIRRFAHQKSLVSFAGADPVKNESGDSKPKSAKASKRGSSYLRKTLFVIMTVLLQNKPADNPVYQFLDKKRSEGKPYYVYMTAGSAKFLRIYYGKVRDCLREKGLWDEKAANPVKPC

SEQ ID NO: 232376 - protein, 319 aa, unidentified
MKNISQWVGIDVSKATLDVYIRPMGKAFQVANTETEIANLVQQLQSYDLNLIVLEATGGLETELIIQLQAALLPVALINPRQGRDFAKATGKLAKTDAIDAQVLAHFGEAMKPEVLAIESEMARQLGELISRRRQLVEMSTAEKNRRDRARGKALADIEAHIDYLEQRLQELNQEIETLTQNNQQWIDKVNLLKTTPGIGQVISTTLVSDLPELGKLTAKQISRLVGVAPINHDSGQHKGKRMINGGRAYIRAILYMGAVVAMRHNPVIKTFYERLVERGKPKKLAITACVHKMLVILNAMIRDHLPWSISHDSQPISA

SEQ ID NO: 232377 - protein, 352 aa, unidentified
MRSTAATGLVVGVDTHRDTHRDTHTAALCDLAGQALAVRQFIAGPGGYAAALAWARQEAGEAGLAWAIEGTRHYGLGLARYLTAAGEHAGEIDASKHAGKRRNGKSDALDAVRAAREMLARPVAAQMRAAGDREALRLLMCDRDNAVASAKTARTLLTSVIVTAPATVREQLRHLSRDRRATVCASLTSPPGADRQTRVLYQTLARLGQRITTLARTAADLQKQISALVEDMTPGLVAAEAGLGALTAAQLLLSYSHHGRIRSEAAFGMLPGTAPVPVSSGRTDRHRLNRLGDRQLNRALQVIAVARMRSHPPTQAYVQRRLTEGKTLREIRRCIKRYSPATSTARSETSPV

SEQ ID NO: 232378 - protein, 376 aa, unidentified
MNKVRFVGLDVHADTIAVAVAEPDGEVRALGTIPNRPDSIRRLVKRLGPPDRLRMCYEAGPTGYVLYWQLTGLGVPSDVIAPTLVPTKAGDRVKTDRRDAMKLARSYRAGDLTPVWVPDATHEALRDLVRAREAAKKDQLRARHRLGKFLLRTGRRPPLTMKAWTQQHLRWVKTVQYDHAAQEATLQDYLQEIEHVADRIARLEQAIDEAVKSVPDRMRAVIAALQALRGVAQVSAVTMVAELGELSRFASARQLMSYTGIVSSEDSSGTRTRRGAITKTGNAHLRRIVVEAAWAYRHRPGLGAAFHKRQATVSPEIKEIAWKAQHRLHTRYRWLMAKGKHKQQVVTAIGRELLGFIWAIAVKVEAPRSDGQATAA

SEQ ID NO: 232379 - protein, 355 aa, unidentified
MTSTKYIGLDVHKESISIAVLNSAGKVVMECVIETKASTILQFIHGLGGDVHLTFEEGTWAGWLYDLLKPHVTELVVCNPRKNALLKEGSKSDRIDARKLAELLYMSKLSSVYHGEHGLRMLKELSRSYLTISKDLGRVMNRLKALYRSWAIPCAGTQVYAPHYRSEWLAKIHEAGVRRRAELYYLQLDALRLVRQQARKELLAEARKHRATKLLRQIPGIGPLRAAHLVALMQTPHRFRTKRQLWTYSGLGLETHDSAQYRVVEGQLQRSKKPVTLRGLNDNHNHDLKDIFKGAAMRASTATGPLRDFYEALLAKGRKPTMARLTLARKIAAITLIVWKKEVRFDANYLKQQAA

SEQ ID NO: 232380 - protein, 403 aa, unidentified
MPTFRKETHLMICVGIDTASDKHDVCIMNKEGEIFKRIFTIHNNKTEYKKLFNEIESAKKFWNDSKVCIGIESTGVYSETLVNYLSKIEAYEIIYINPILTNMFQHSEIIHYAKTDKIDAKGICIFLSDKRKRLYTYTPPSYTILEMRSLGREINHLNKQINKTVNRLTGMLHVVFPEFFQVFDKVKGSTCLEYLRLFPTPDMIVRKHSLNDVYKKLDGRGRKIENLNKLIHFAKETIGHSTKSDAIAISFLASQLQLSYSQKEALIDRMDILVTENAMNLAQIPGIGAITACTIMGEIGDISNFRGADSLVAYAGINPMVYQSGKYEAKGLSMSKKGSSYLRNAIILVSRLIIQYDEKFKTYYEKKRAEGKSYNVAIGHVSNKLTRVIYHILKYNEPYDETK

SEQ ID NO: 232381 - protein, 350 aa, unidentified
MPKRNVPRPAAVYGIDIGKNIFHVVGLGSDGVPVQKVRFRRDTLLQFFERAAPAIVGMESCAGSQWIARKIQALGHKVRLIPAQFVKPYVKSNKTDIIDAEAIAEAATRPTMRFAALKSEEQADLQALHRVRDQMIGTRTRLINQMRAFCLEYGIALRQGAGLFKLDLPQVLEDQSNDLSPAMRKLLANLFADLRQLEHRIGDLTREIEAVANREDIARRLMTIPGIGALGATALLAAIGNGRQFQKARDLAAWLGLVPREYSTGGKQRLLGISKRGNRYVRKLLVHGAGSCFRHLDRTRDRLGSWLDGLQARMHPDKAVVALAAKMARIVWVVLTKPGALYERRDPAFT

SEQ ID NO: 232382 - protein, 422 aa, unidentified
MNRNHNTQHQDPAPAAWIGLDWGHRTHAFALQEAAGRTEEGSVEHTPEALHAWLGQLAARYGGRPVRLALEGKGGAALPALLEYPWLQIYPVNPVTSARYRKAFTPSGASDDLPDARVLLELVRDHAAKLRPLETQDEYTRQLDALVQARRDAVDRRTQVLNQLTSLLKSYYPQALQLLEDLNTELAVAFLSRWPDLLSLKNARPATVRNFYYAHNVRRPERVQQRLDLIPKAKLLSSDPMMLDVAVRQLRLLLDQFKALRKHIALFDQEIRRVFAEHPEAPLFRDLPGAGAQMAPRLCAAFGTLRDLYPEPAALQKYAGVAPVREKSGRQLWTHWRWLAPGFLRQTFVEWAGQTVGYSAWAGEYYRQMEAKGKTRQVILRALAFKWIRVLWKCWQERTPYNEARYLKQLAHRKSPYAIPAS

SEQ ID NO: 232383 - protein, 342 aa, unidentified
MVRNIVGGVDTHADTHVGAAIDANGGILGVESFPADYAGYEALLGWLVNFGEVTMVGVEGTGSWGVGLSRFLHDHGIMVVEVDRPNRQTRRRVGKSDPTDAISAARAALSGSASVVPKLRNGPVEQMRILLVARRSARQQRIATLNQLRHLIFTGPDSVRARFKDRPKAGLVTEAAKLRPRTGSDPILFTTLVVMRGLARRIQAFNDEIKGLDVMLAELLNETAPSLVALYGVGTDTAASLLVAAGDNPERLHSERSWAHLCGATPIPASSGKTTRYRLNRGGDRQANAALYRIVLTRMSGDERTRAYVTRRRDEGMSTREIMRCLKRYVARETFTHIQHAN

SEQ ID NO: 232384 - protein, 411 aa, unidentified
MDVLYPVCCGLDVHKKTITACLRFASARARAEEVRTFGTTTRELLRLADWLTAAECTHVAMESTGVYWRPVYHILEASFEVLLVNAQHVKAVPGRKTDVKDCQWLAQLLEHGLLRGSFVPPAPLRELRELTRYRRQLVQEHAREANRVQKVLETANIKLGDVATDVLGVSGRAMLHALIAGERDPERLADLARGALRQKAEALREALVGRFTLHHAFMLQGLLDHIEFLDQQIARFDERIEEQTRPFGPAIERLDTIPGVGRRSAEQILAELGDDMRRFPTAAQAASWSGICPGNHESAGKRRNGRTRKGNAWLRSTLVESARAAVRNRGCYLSAQYHALARRRGDKKAVVAVAHSILVAAWHILRDGVEYHDLGPDHFDRLNRERLVQYHTRRLAELGLTVQLPGAQATA

SEQ ID NO: 232385 - protein, 307 aa, unidentified
MFVGIDVSKDRLDVHVQPSGEGFAVARQGEGLDQLVERLRVLPAALVVLEATGGYETVVAAALAAAGLPLVVVNPRQIRDFARAAGQLAKTDRLDARIIARFAEAMRPEPRPLPDAAAQALGELVARRRQIVEMIGAENNRRRHLTHQRVLRGMARIQALLQAQLSEIEREIDDNIRGTPAWRDKEDLLKSVPGIGPTIARTLIAELPELGSLDRRKIASLAGLAPFNRDSGTLKGRRTIAGGRRTVRSALYMAVMVSIRHKLPLAQTYNRLRQAGKPPKTAITAFMRKLVIILNAILRDQKPWATA

SEQ ID NO: 232386 - protein, 334 aa, unidentified
MDKVTTVGIDLAKSVFSLHGVDGAGRVMLKRTVRRDQLIQTVAALSPCLIGMEACSGAHEWGRRFQGLGHTVKLMAPKFVAPYRKSGKNDGNDAEAICEAVMRPNMRFVPVKSAEQQALLVLHRVRQGFIVERTATINRLRGLLCEFGVVLPLRSKTVRRQAAQAAEAVPELARRAIRDLLDQLRLLDERIDGYDREIEAQARLSEPAQRLMKIRGIGATTALAIVATVGNAREFKNGRQFAAWIGLVPGQYSTGGKTRLGHISKRGDAYLRNLLVQGARSVLHSASGHQDRMSRWILELQPRRGYYRTLVAIANKNARIAWALLAKNESLRPA

SEQ ID NO: 232387 - protein, 410 aa, unidentified
MRKENIIYVGIDLHKETHTAVMLDCWNQKLGEITIENKPAEFHKLTRKVSRFVTEEKTPIYGLENAYGYGRTLAVWLIEKGYIVKDVNTALSYAQRKSVPMYQKSDSYDAEAVALVLINMLDKLPDAIPDDKYWTLSQLVNRRDNINVHQQRLKNQLHEQLCMAYPSYKKFFEDIGRPTALYFFGEYPSPVHLRGKTAEELAGELRPVSHNNCSVKKAEKILELVRTDGETLRDCQESRDIITRGLVRDLQHYKEQTEEVEEVIKSILPYFQCTLMTMPGIDIVTAANILSEIGNIERFPNANKLEKFAGIAPVNFSSAGKGKDMCPKQGNRRLQAIFYFLAIQMVQVSPSGTARHPVFREYFQRKQDEGKNKQQTLICIARRLVNIVYGMLKNHTEYREPERRTEEETV

SEQ ID NO: 232388 - protein, 319 aa, unidentified
MSQSTMAYAGIDTGKHKLDLAVHGAKARLQVANDEAGHAKLVTWLRRQRVGRVGIEASGGYDKAVVARLRQDGFEVVVFQPAQVRAYARYRLQRAKNDRIDAVLIAACAADCKDEDIHAPPDPRLAARAEHLTMIEQITEHIAQLETRRASCRDDAIRRRWDLEIRRYKLWLKHELADLVAGLRQHPDLAERLDLIESVPGIGLRTAVAILVRMPEIGSLSREKAAALAGLAPYDDDSGDHHGERHIAGGRKRLRKSLYAAALPAAYFWNPQLKALYRRLSAKGKDHKLARIACARKLLLYANAVVARRSPWILASTES

SEQ ID NO: 232389 - protein, 368 aa, unidentified
MSAREPTTTLAREDQVITIGVDAHKRVHVALAVDEAGRELEHWRGPNSAAGWQDFMRWAAALGPERRVGIEGAWGNGRGLAQYLVELGVEVYEVNARWTAIGRRSARKSDKTDQLDARAVALFLHREGRDLPRVAPEDETAILSLLTNERESAIAEATRLRNQIHALLLQLDPQYQSDLPAMKSKAGLAKLLTYSASDEKAVSRERAGAVRRLAQRLQLALAQADELADRIRAEGRSRYAPLTRLCGVNALTAGMLAGLLGPGRRFMNDAALAAYAGVSPLEASSAGVVRHRLNRGGNRRLNAILYMIALTQARHSEQAKAYLARRVSEGKTRREAVRALKRFLVRAIWRLWQECYPAAEAPPQLAAA

SEQ ID NO: 232390 - protein, 412 aa, unidentified
MQVVYARCAGLDVHKKTVSACISVCEAEGAKQQQMRVFGTFTNDLLALADWLQEHGVTHVAMEATGVYWRPVWAVLEGHFQQMLVNPQHIKVVPGRKTDTKDCEWIADLLQHGLLKGSFVPPTPIQDLRDLTRYRAELRQSQNRVANRIQKLLEQANLKLSSVASNALGVSGRHILEAIIAGQQNALQLAQMARGKLKTKIPQLEQALAGRVRNHHRFLLAEYLDEWEALGERIRRIEAEIGEQIRPFESAVTLWQTIPGVDRVTACNLVAEIGVDMNQFPTAQQLASWAALCPGNHESAGKRKSGQTRDGNKWLRRSLCQAAWAVTRKKNCYLSAQFKRLAARRGVKRAVMAVAHTMLIIGYHMLKTGQAYYELGGNYLEQINKDQLQRYFLKRLERLGLKVTIEPATAAV

SEQ ID NO: 232391 - protein, 360 aa, unidentified
MFTERTSVGLDVHARSVAAAAIDGQTGEVFKARLTPSRAEVLDWIGQLPGRCAVVYESGPTGFGLARALIAAGLRCEVAASSKLQRPAGNRVKTDARDALHLARLLRLDEVVPVRIPGPAEEAARDLVRAREASRQDLMRARHRVSKLLLRHGIVYSGGKAWTELHDRWLRQQRFDAVPTQAAFDDGYETVVLTTARRARLDEKIIALAGDSEFTAVTRRLACLRGISTLTGFALAVEIGDWDRFTGASIGAYVGLVPSEHSSGQSRVLGAITKTGNAHVRRLLVEAAWHHRTTYHPGVVLRRRWDQAPAAARARGHAGNQRLHERWVNLNLRKKRPVIANVAVARELAGWCWSLAVLPD

SEQ ID NO: 232392 - protein, 386 aa, unidentified
MQKLNDLSRSLTALEPDGTLIAVIEMSLSSWLVAGIVPGVERQPLKKLAVDESALLKLLHRWREEAEKAGRRIERIAVAFEAGRDGFWLARWLKVRGIEAYVIHASSVAVSREHRRAKTDRLDTELLKRSFLGWLRGERDHCKMVEIPTMKDEDAKRPNREHDSLIGERSRIVNRMKAALVRLGIRGFNPKLKRATTRLDGLHTPEGEPIPPNALAELRRDMERRRLVNNQIRQIEEERLERIEQAPCDGAHVMVRLLARVMGVGIETADMLVHEVLSRNMRDRRAVARYAGLTGSPDESGRKRREKGLARSGNARVRRGMIQLAWRFLLHQKNSALTKWFRSRTENARGTRKPMIVALARKLLIALWRLMREGIVPDGVVLRPAQ

SEQ ID NO: 232393 - protein, 348 aa, unidentified
MTNQPHIIGVDLGKHWFHVMGLDREGAIVLRKKLSRAQLRAFAATIPRSIVAMEACCGSQYWGRVFAHAGHEVRIMPAQFVKPYVKTNKNDFNDAEAIAEAASRATMRFVPLKTTEQLELQASHRIRRRLVHERTAVVNQLRALLLEYGIVTPVGRETFARRWSQTLGSASEQLSPRLLVLIQRLRAHWVTLDGQIAEATQELTAWADGSPLCQRVATVPGVGPMIATALVSAVGDARMFARGRDMAAWLGLVPRQHSTGGKSTLGRISRRGNGYLRQLFLQGAVSAYLWMKRDRSALGAWLQQLDRRRHRPVVITALANKLVRICWKVLTSDTPFRLHPARPVEHAV

SEQ ID NO: 232394 - protein, 403 aa, unidentified
MYNAVGIDVSKGKSTIAVLQPGGVIVRKPFDVFHTSQSLKELSNYLASLEGDTRIVMECTGRYHESMANSSLMPVFVTVVNPHLIKNFGNNTLRKVKSDPADAKKIARYTLDNWAELRQYSCMDNTRNQLKTLNSQFSFFMKQKVAAKANLIALLDNTYPGVNKLFNSPAREDGSEKWVDYAYSFWHVDCVRKTGLKAFTVRYEAFCRKHHYIYQPSKPEELFNASKELVAVFPKETSYKLLIQQSIQQLNLASAHIEQLRREMNALASTLPEYEVVMGMYGVGKTYGPQLIAEIGDVSRFTHREAITAFAGVDPGVEQSGQHNSKSNKASKCGTGRLRKTLFQVMTTLLQNAPENEPVYQFLNRKRSEGKPYYVYMTAGANKFLRIYYGKVKAHLRSLEQNE

SEQ ID NO: 232395 - protein, 387 aa, unidentified
MLHDHPSDGLAAIRTQFGAIFVSLELSRSTWLVTSLSPGKGEKMSRRSVEAGALAGLLKLFAELKRKAQMRTGESYPIITVQEAGLDGFWLHRALQQEGIESHVVDPASIATPRRRRRAKTDRLDGETLLRALLAYKRGEPRVCAMVVAPSPEEEDRRRLCRERRTLIAERIEHVNRIKGLLFAQGISDYAPIRRDRRARLEALRTGDGRLLPAHLKAQISRELDRLELLLDQIAAVEREQEALLAESKPTGEKAAPDPVTMLLALKSLGPNFAAVLWSEAFYRQFPNRRQVASYAGLAATPWRSGGIEREQGVSKAGNPRLRTTMIQLAWLWVRHQPQSALTQWFKAHSQRGRKRAIVALARKLLVALWKYVTQGVVIEGAVMKTA

SEQ ID NO: 232396 - protein, 344 aa, unidentified
MQIASIGIDLGKTTFHLVALRERNKILVRRKFSRSQLLADTANLASSLIGLEAGAGAHFLGAVLREQGHQVRLIPAQFVKPYRKTNKNDFIDAEAIAEAVSKQNMRFVQIKSQEQLDIQAMHRVRDRRVQRRTALINEIRGFLLERGLTFAAGPIHLRKNLPSVIEDAEQNLSSRLRWLLDRLWQEWKQMEVDIKAITEAIERIGKENALCRRLRQIPGFGPLVSTATVAAIGHGAAFRRGRDFAAWLGVVPRQYSTGGKQKLFGMSQRGNTYLRRMLIHGARAVLLRVKYDTGGFGQWVHRLAQRAPHNKVVVAIANKLARMAWAVLSSGKDYRHQPLQPAAA

SEQ ID NO: 232397 - protein, 391 aa, unidentified
MPEDAPRPAQAAIRTDLGAIFVSLELSRRTWLITSLSPGAGEKMSKHSVPASDVSGLLRRFAELRRKAVARTGRDFPIIVIQEAGLDGFWIHRVLQSEGIESHVVDAASILTSRRGRRAKTDRIDGETLVRTLMAFKRGEPRVCSMARAPTPQEEDRRRVCRERRTLVGERVRHVNRIKGLLFAQGVFGYEPLRKGRRERLEDLRTGDGRPLPVHLKAQIIRELDRLEVVLEQLKTVEAERDALLKPANDEMPSPAAMLAQLKGIGSETAVLLWSEGLFRRFDNRRQVAAYAGLAPTPWQSGSIDHEQGVSKAGNPRLRATMVELAWLWLQNQPTSTLSLWFHERVQRLGGRMRKTIIVALARKLLIALWRYTTAGIVIEGAMMKPSSATT

SEQ ID NO: 232398 - protein, 433 aa, unidentified
MKKRTYKTVELHKLDLAGVLAAIAGAVTVAIDVAKEAVVVGFADAAGQTHGLCRFSHPTQTPLLVQIVERIRELGRTVAIALEPTGSYSQPFVYQFQHRRFEVFRVDPKACHDMASVLDGVPSQHDAKACTLIAYLHAHGVSRPWRERTSTERTARALAAEHLLWSKPAMMLYGQLEAITASCWPELNAMMEIRTQWYLPLLVAYPGPSAVAAASHDEVRALLRRVSQRLLSNERIERVIQTSATTIGVPLEESEKILLRTTASELIRARDGIAEVDKRIRAFIRDSGPRSIRLIAEVVGPACATAIFADVGDPTSYSSAAALEKACGLNLREKSSGQHQGKLRITKRGPSRVRQLLYYAAMRMILEHSKAKSWCERRSGYTTGTKTKALVALMRKIVRALFHVARGASFDIDKLLHTTERSCVDPAASSAHI

SEQ ID NO: 232399 - protein, 419 aa, unidentified
MKLFVGLDVSKAKLDACFLLREDDTNTILWQETVANSESGATSIKDQILRFHEELDFDKILVGMEATGQYSMHPSLFFSNDPELKLINVETIVENPRVIHRFSKVWTEEKNDKLDAQIIAEFLTTGKHTKSQPREEKFVALLRFTRTRYQLIRQMTEAQQHYVENLYYKCNTLSSDLKAENISTSVFSSTMIQLMNGDISMAEIRTMNSVELAALLQKFGRGRFKDPVKLAKVIRKSVSDSYRLGKLTQDSIDINLGVQMRVIRGFEQEIKIIDKAIENIMETIDSAKTLLSIPGIGPVYAAGIIAEVGQIDRFNHEAQLAKYAGLYWPKHQSGNYQKEKTPMSKSGNRYLRYYLVQAANSVRRYIPEYEAYYQKKYTEVPKTQHKRALVLTARKLVRLVFALLSDHQLYIARSEAMES

SEQ ID NO: 232400 - protein, 453 aa, unidentified
MAQRKAGKIPKAKGARVNLVITHPNAAGIDIGSAAHFVAVPPDRDDEPVREFPSFTEDLFAIADWLSACGVEVVAMESTGVYWIPLFELLESRGFQVLLINARHVKNVSGRKSDVLDCQWIQQLMTFGLLSGAFRPAEQVCVLRSFMRQRTMLLKSQATHVQHMQKALTQMNIQLANVISDVAGETGQKILRAILAGERDGHVLAAMKNSRIRASDEEIAKSLRGNWRAEHLFALRQAMAGFDFVGSQLAEVDLEIERQLQDLEAHEGDPVPGKKRGRARNAPRFDLRSLLFRMCGVDLTRIDGIDVTTALAVISETGTDMSRFPTEKNFTSWLGLCPGTRITGGKVMSGRTKRCANRAAQALRLAAVALRTSKSALGAYYRRMCSRMEKAKAVTAAAHKLARLIYTLLTKGQEYTDQGQEYYETRYRQRVVNNLAQRAAQLGMKMVPIEQAL

SEQ ID NO: 232401 - protein, 313 aa, unidentified
MKPYIGIDVSKDRLDVAVGDSAQCFSVENTENGIEGLVKQMKELEPELIVMEATGGYERLCAAMLAAAGLALSVVNPRQVRDFAKSKGILAKTDRLDARVLAHFGAAIKPEPRALPDAQQQLLDELMLRRRQIVAGLVAEKNRLGMAHTDAVKKSLRKAIAFYERLLADVDRQIGEHIERSPLWRAREDLLRSFKGVGPVSSRTLIGDLPELGTLDRKRIAALVGVAPVARDSGKRKGTRAIFGGRAQVRAALYMVAITAIRTNAPIRQFYQRLRAAGKPAKVAIVACMRKILIILNAMVKTHTRWNEHLTVS

SEQ ID NO: 232402 - protein, 312 aa, unidentified
MADLFHGGIDVASDRLDVMLLPHGQCFWVGNNAVGWGELVERLRGLCIAAIGIEASGGYERGVLRALLAAGISVRQINPFKLRQFAKARGVLAKNDRLDARMIALFVATMPTRPAQRNEAAERMAEIVTARRQLSDEKVAAENASRLFEDAILRRLYRRRLMRLALDIALLDKRLAAMVSANVALAQRYRLLTSMPGVGPVLAFTLIALLPELGQMSRRQVAAIVGVAPYDFDSGKLKGMRCIWGGRAPVRRVLYMAAVTACRYNPSLKAFHERLSAAGKKSKVAIVAVMRKIITTLNAMIRDNAAWNARFA

SEQ ID NO: 232403 - protein, 410 aa, unidentified
MEVILGCCAGLDVHKDSVEACVRRTSAGGKVEHDVRHWGTTTRELVEMAEWLSSLRVTHVAMESTGVYWKPIFNILEERFEILLANAHHLKNVPGRKTDIGDCQWIAQLLQHGLLKGSFIPPRPQRELRDLTRQRTQLVDETSRISNRIQKVLEDANVKLGSVASNVVGASGRLMLEAIVAGQNDPSQLADLAKRRLRAKIPQLEQALYGKLTGHHRWMLKLLLDQLQTTEQFIARLDERIAELTRPQQPILEKLDAIPGVDRRVAEVVIAEIGPDMTPFPSDAHLASWAGIAPGNNESAGKKRSGKTTKGSRWLRQALVQAAWAASHKKDSYFQAHARNLMHRRGRKRGLVAVAHSLLIVIYHMLNDNTAYRDLGTQFLDQIRANHLTRFHVRRLQQLGLQVTITPQTV

SEQ ID NO: 232404 - protein, 432 aa, unidentified
MSLADILSLAEVHVTASLSQHFTAYVGIDWADTKHDICLQAGDDNHRQFDCIPHQVDRIDEWAKALHLRFGGPIAVALELAKGPIVSALLKYDFFVLFPINPSTLAKYRVAFKPSRAKDDPTDAELALDLLLRHPERFTALRPQSVAMRSLLSLIEQRRDLVNDKTRFTNRLCNTLKQYYPQALEWFEQRDTLLFCDFLTRWPTLLSAKRARKATLEAFFYAHNGRRATLIEARLALIRAASALTEDAGIIEPCRLHALALVEQLRTVLTVIDRFDKEIERVASALPDYALFRGLPGAGPHLAPRLLAAFGEQRERFHGADELQKYSGIAPVTERSGKKSWVHWRWQCPTFLRQTFVEWAGQTINKSFWAGAFYRQQRAKGSTYQAAVRALAFKWIRILYRCWQTRTLYDETTYLNALRKRGSPLLKNLDLG

SEQ ID NO: 232405 - protein, 425 aa, unidentified
MTRPQLTPPAGVLVAIDVAKARNEVLIEVPGSGRRRRLSVLNTRAEHDRLIAILSDLGQPVTCGFEATGNYHRPIAWRLLQAGFAVRLISSVGLARTREALHNGWDKNDPKDAQVMLHMIRIGASQVYHDPLAAGINDVQELSKTHDAVSRAKTEVLHRILTHYLPLYFPEVDRFRHNSRSDWFFAFLDRFPTPASITALSKEAFIAAAWDVVGRKVAKAQLLGDIYETARSSIGLPVPPDAPAVSMFRLVIGEARGLIRQRDAIEATADALLTDSSDYKLLRRIPGIGPINALTILAEAGDLRRFGHHRQFLKFCGLDLATQQSGTFRGQTKLSKYGNARLRRTLWLAGQVAIRQRENGFRDKFERYIARDRHNADLRRKALTAITAKMARVVHAVIKTGADYRPFVEGPVPGGRTPLSRAVRA

SEQ ID NO: 232406 - protein, 343 aa, unidentified
MEQISTIGIDIAKTVFQVHGIDETAGVVVRRQLRRRQVLSFFAKLPACLVGMEACATSHHWARELEKLGHEVRLMPPRYVKPYVKRNKNDAADAEAICEAVMRPTMRFVPIKTPEQQSVLMVHRTRQLFVRQRTTLINAIRAHLAEFGIVAGVGRNGVETLLALISKGEDERLPSSARECLMALAAQLELVKRQILEADRRVRAWHRTSKTSKRLEAIPGVGPLIATALVASVPDPHVFRSGRDLSAWIGLVPKQNSTGGKNRLGSISKAGNRYLRQLLVVGALSVIRRAKQLGYTRHPWLVRLMARRSVKVAAIALANKIARIAWAMMARNESYRTPLPQSA

SEQ ID NO: 232407 - protein, 361 aa, unidentified
MRIIGCDLHTRQQTLAMLDTTTGEVTNVTLMYEGNQVREFYSQLPHPVLVGIEATGSMYWFLDLMAELGIECQVGHPATIRAAEPRKQKHDRRDADLILKLLVEKRFPAIWLPSKELLDLRALLLHRHQWVRIRTRIQNALQAIALANGLRRGPGLWSYDGQAKIAFLPLLPHASYRRSQLQALYRKMEEEIENLTQRVAELASQRPGARRLMTHPGVGPVTALATEVFLGDPRRFADGKALASYVGIIPREYSSGGKQRLGGVTKQGSPLLRFLWGEAGAHAVRKDPELKQFYRRKLIQKGLGKTRVAVARKLGIRLWIMLRDEIDYEEFCRRGQKPQSGAACAGVLEVGNGANRHRPVD

SEQ ID NO: 232408 - protein, 337 aa, unidentified
MEKKFNYFIGVDVSKNTLDYSVVKENKEVFSFQSENSNKGIKSFIKELKSKGIKDLSEVLFCAEHTGIYNNRLVYFINENKGTLWLESAIHIKRSIGLQRGKNDKVDAQRIALFAYKNREDVKAFEAPREVIKQLKVLSGLRSKLVKSIKGFNVQLKEIKSFEGKNLAKSFEANCKGSIAALQKDLKNIEAEIQKLIKSDEQLNRLFKIIKSVDGVGNVIATAVIISTNEFKNINDPDKYACYSGVVPFDHSSGTSVRGKPRVSSMANKALKTLFHMAALSVIHMEGEFKIYYERKIKEGKNKMSVINAIRNKIIHRIFACVRDNRQYQKIYSYKFV

SEQ ID NO: 232409 - protein, 349 aa, unidentified
MAQPPRERTIPAGDVARLQQEIARAKQRFGLLADAHIMSCYEAGRDGFWLHRYLVAQGITNHVIDSASIEVNRRQRRAKTDRLDVRKLLTMLLRHSAGEKKVWSVVRVPRVDEEDRRQLHREMQTAKQDRTRVINRIKGLLAGHGVQLALQGDVEAQLDQVQQWDGAPLPSALRTRLKRAWQQVGFLTAHIQTLEAERRALLRRREDPVIAQVRQLFTLRGIGINSAWLYVMEFFAWRDFQTPKQVGALAGLTPTPYQSGQARRELGIAKAGNRHIRAMAIEIAWAWRRFQPDSALSQWYERRFGAGSARLRKLGIVALARKLLIALWRFVKTGVLPEGAVLKPAAPSR

SEQ ID NO: 232410 - protein, 319 aa, unidentified
MNNLAKIYVGVDVSKNRLDIHLHPIAEALAFANSKEGIELFINKLGVHAVEQIVCESTGGYEDLMLKMLRSTGYKVWQAEPNRIKSFIRSKGKKVKTDASDAYMLALFSAQERQEHPHVEYGVNHNLICDLVKRKRDLGIMVTSEKLRLGRPNKSTCFMEIKDHIVFMEKQVKALEAKIEQLIKDDDDFGKKAKIMQSVPGVGKATAARLIAGIPELGSMENKKAAALVGVAPYAQESGQYRGKRFISGGRSAVREALYMAAMVASRYNPIMKEFYRRLRDIGKKPAKVALVAVMRKLITILNIMIKRGTMWDENATSC

SEQ ID NO: 232411 - protein, 337 aa, unidentified
MIGGVDTHKDVHVAAVIDDRGKILDSSSFETTTAGYRKLLAWLRSYGELQSVGVEGTGSYGAGLAHYLATEGIEVLEVNRPNRQMRRRRGKSDPVDAEAAARSVLNGEATTVPKSGQSLVESIRVLRVAFTSARNSRTRVILQIRDLIVTAPDQLRGALNPLSTKERVARCARFRVCGDLADPTEASRLALRTLARRYVALSEEMEELKLTLDDLTARANPALRAVKGVGPDVAAILLVAAGDNPERLRNEAAFAAMCGASPVLASSGKPTRHRLNRSGNRQANHALWRIANARLITDAQTRAYAARRTSEGKSRREIIRCLKRYIAREVFRTIIFF

SEQ ID NO: 232412 - protein, 375 aa, unidentified
MKDQAVSLYVGLDVHKDSVDIALAQAGRDGEVRHFGTVAGSVEAVSKALRRLVAAGERLHVVYEAGPCGFVLQRHLAALGYACEVVAPSRTPRRSGDRIKTDRRDAVMLARLSRAGELTAVRVPDAADEALRDLVRAREDAVREQRNSRHRLKALLLRNGIAYSGRTSWTPAHLRWLASLTLPHPSQQIAFQEYLHAITEASARIERLEQALRDALPQWSLLPVVAALQALRGFGLIAAATLVAEIQDFQRFANPRQLMAYLGLVPSEDSSGQRRRQGAITKAGNPAARRILVEVAHQYRFPAKVSVEIARRQVNCPKPITDIAWEAQVRLCARYKRLAARRLPCNKIIVAIARELAGFVWAVALKAAPAPQPAA

SEQ ID NO: 232413 - protein, 441 aa, unidentified
MIHAEIERCAGIDVGKQRLAVCVMAGPLAGEPRVETREYGTICAELERLRDWLKEEGVTHVVMESTGSYWRPIFHVLEDSVRVYLANPQEVKNRKGHKTDKKDSWWLAHLLRHAMIRPSFIPPRAIRELRDFTRRRKRIIGDATSERNRVEKILQDANVKLSSALSNIFGVSGQLMLEALLEGQATPEQIAQLAQRRAKQKVPEIIASLEGHRMSDHHRKMIRFSLEHLRFLEQQILELDEEIATKIREAGYVPQWELLQTLPGFQQTSAANVLAEVGPDTKPFASQRHLSSWAGVCPGNNRSAGKNKGSRPTRGNRWLRGTLTECAWAAAATKDCFLKEKFWRLATKKQRKGPAVTAVSHTLLQLVYQVLSTQQPYQERGSPILNEKQKERIIRHHIRRLGKLGVTVRSPASSQPRHSRPAAAPPQKTKQCKAKPEPATS

SEQ ID NO: 232414 - protein, 422 aa, unidentified
MLAVGIDWAEEFHLVALGRPDEGVMQVVRVEHTPTAVEALVERIAGLEPDPAEVRVVLETRHGLLVERLVDAGYVVLPVNPDLVARRRGPARKKDDAADARICCLLALDRHAALRPLVPHGELAGELRAIARDDDRAARDQRRLLNRLRQDLLATFPAALQVARDDLGAPTMLRLLQRWPTRQQLAAATRQELVAFARAGRHGWPERLADQVTTALTGDHFVARDYLVRAKADTIRLAATQLLAIGTQRRAWERRMGALLLGAPRQGRARQPRKDEPGNAIPGGKIYLSFAGLGDRLAARVAGEIGDHPEQFESPNALACYAGKAPVTRRSGKSELVVATRLACNRHLADAVQQWAFCSLSQSGWAREFYDAQRARGKGHHAALRALGNRWLEILWHCLIRGQLYNEATHVANRNRALGRAA

SEQ ID NO: 232415 - protein, 408 aa, unidentified
MEVLHARCAGLDVHKAQVTACCRIAVDDQVSQEVRSFPTVTSGLLALAEWLGEAGCTHVAMEATGVYWKPVWHVLEDLFDLVLANAQHVRNVPGRKSDVSDAMWLADLLAHGLIRGSFVPPAPVQEMRDLTRTRKQVVREVAQHIQRIQKTLEDANIKLGNVISNIVGTSGRAFLAALIAGETDPSKLAKLAHPNLKAEPKELIEALRGRATDHHRFLLKLHLQQIDSLQSAVRELEARMGEAIAPFRGQIENLKTMPGVSDTVAQVIAAEVGLDMSRFRTAGHLVSWAGLCPKMDESAGRRRSTRVRKGAPWLKTTLVTAAWAAARKKTGYFRAQFQRLKARRGPKKAILAVAASMLTAAYHMLRGDVPYRDLGADHFDQRDKRHTANRLIKRLAAIGYTVEIKAAA

SEQ ID NO: 232416 - protein, 317 aa, unidentified
MTQISTTTAGIDTSKSKLDVAVHGQAGHWQVANSMAGWRKLRAQLIAAGVTCVGIEATGGYERGVVEHLRAAGLTVLMLQPIQVKAFGRVHLRRAKNDVLDAVLIAACAAALDQVRIAPDPRLTELAQHLTFLEQAEEDIKRCKTRLEHIEEPGLRRLVLGDIARLKARRLAQIRHIARQLRSHSDLAARLDLVLSIPGIGERTALALLIRMPELGRVSREQAAALAGLAPFDNDSGRQRGQRRIAGGRARLRRSLFAAALPAAFRWNKALIALYARLIAAGKAHNAALVACARKLLIYANTVVQRGTPWTEKPVHV

SEQ ID NO: 232417 - protein, 328 aa, unidentified
MFLCILNGSGEVLLHRNIATSPESFLKAVAPFRDDLVVGVECMFAWYWLADLCSREGIEFILGHALFMKAVHGGKAKNDKIDSQKIAVLLRGGSFPLAYVYPPEMRATRDLLRRRNYLVHKRAELLAHIQCTAIQYNLPDIGVDLSYEGNRKEVGQHFPDPQVRKIVQVDLAVIDAYDDVLKVLEPDIEKTAKRQDWHALMLLRSVRGIGQILGLVKLYEIHDIERFQTVQDFASYCRLVKCVHESAGKKKGTGGAKIGNAHLKWAFSEAAALFVRHNPSAKKMVDDLIKLHGKGKALTILAHKLARAVYYMLKKNVPFNLEKFLATA

SEQ ID NO: 232418 - protein, 341 aa, unidentified
MKTFIRIGVDLAKNFFQVHGIEHEGGLALTRKLTRAKFREFCSRLAPCSIGMEACGSSHYWARELRAMGHDVVLIAPAYTKPYVKRGKNDAADAAAICEAMSRPEMRFVPIKSADQQAVLMLHKTRDLLVKQRTMSVNALRGHLQEFGLIAAKGIHRVKELVALALADESLPEEAKQAAILLAAHGDELDEKIDALERKIARASAKNPTSRLLDEVPAIGPLIASAMTASFPDPSAFKSGSDFSASLGLTPSQHSSGGKEKLGGITKKGNRYLRKMLVVGCTSVLRVAHKYKGALADWIAAMKAKKPERVVAVALANKLARICWAIMSTGESFRTELYTRA

SEQ ID NO: 232419 - protein, 357 aa, unidentified
MLSSNVKYIGLDVHKEAIAIAVLNGAGKLVMESIVEAKASTVLDFLHGLRGELHVTLEEGTWAAWLYDLLKPHVAEVVVCNPRRNALLKEGSKSDKIDARKLAELLRSGMLRAVYHGENGLGTLRELTRGYLTISKDLRRVMSRLKALYRSWGIPCSGSQVYAPRHRERWLSKITQLGVRRRAELLYQQLDGLSVVRHTVRGELLAESRKHHAVKVLRQIPLIGPLRAALLLALMQTPHRFRSKRQLWTYSGLAVETHDSAQHRYVDGQLQRSKKPQQIRGLNQNHNHEMKEIFKSTAMSASRCAGPLQDFYEGLLAKGMKPDMARLTLARKIAAITLTLWKKGERFDAEHLKSQAA

SEQ ID NO: 232420 - protein, 414 aa, unidentified
MEPILERCAGLDVHQETVVACFMHGSLDKRPKKEIKTFATTTKGLMQLVEWLAAFECMDVAMESTGVYWKPVWNILEQEFRITLGNAQRIKNIPGRKTDVKDAEWICQLLRCGMIPPSYVPPRDIREARDLTRRRRKMVQLLTSEKNRLHKVLQDANIKLTTFVTDLFGVSGRALIEKLIDGEILTEDEVRNIVKTQLRKKVPQIVEALNGRLTEHHRKLMARIMKHYEYLKEEITDLEQEIQTLLKPYQRELELLDTIPGINKDGAADILAEIGPDMSAFPTEHHLASWATVCPGQHESAGKKKGAKTGKGNKYLKTALCQAANAAIRSKDTRLGSFYRSVLKRKGHLKAVVAVSHLIIRIIYHMLKTSTPYQEMGDRFMKKKNSPKVESLIKQIMKLGYSIQITALGESQAS

SEQ ID NO: 232421 - protein, 315 aa, unidentified
MAMPVSVSKPIVGVDVAKNELVIYHAEVDLLETIPNTKAAIKKWLKALSCKVAIAIEATNIYHLEFADLAHEAGCVVYMVGGYELKHYRESVKIRAKTDALDAKLLVRYLRKEADELRPWTPPSPLYRHLLSLFRRRAALVQARVSLTQSWANEPLLKASFAEQVKSMQRLEGLIEKMISDCLKEASLLGQLKRCLKVEGIGFLTGARLIATFQRGEFRNSDAFIAFLGMDLRVNKSGQKDGRRSLSKRGDSEARRLLHNAAMAASRTETWKAFYQAQRARGYSTTQALVILARKLARVVFALLKGQSEYQPKVG

SEQ ID NO: 232422 - protein, 332 aa, unidentified
MNKRSIREMNIIGIDVSKAKLDCAWLRDENKVKTKVCANHPEGWNALITWAQENTGSDFCELHFMMEATGIYHENLATWLHDSGAKVSIVNPAHVKHYAQSLGVRTKNDKKDSAVLARYGLKESPTFWQPAPLEIRTLKALLTRLAAIEKDLHREKNRQEKAIVTDTPASILKSIAQMIGHFETEREELDKLIDNHIKAHKNLKENKALLESIPGVGKVIALQMLMVLGSHQFESASQCAAYLGLVPVQKESGSSIKGRPQLAKNGNPAIRAKLYLAAVTATRYNPDIRAQYERLTGKGKSKMSALGAAMRKLVQICFGVLKHQKNYQPQMG

SEQ ID NO: 232423 - protein, 345 aa, unidentified
MGIHTIGIDLGKTVFHLVGLNARGEVVVRKKCSRIQILRFTANLQVSLIGMEACGGAHFLGRALREQGHDVRLMAAKYVQPYVKTNKNDYIDAEAIAEAVGRPRMRFVPIKTDDQLDLQSLHRVRERWISGRTAVINQIRGLLLERGITIRKGRHHIEASLPGILEDADNKLSGALRVLLTQLRLEMQYLQRQIDECDKLILRIADELDDCRRMLSVPGIGPMTATATIAAIGNGSAFKKGRGFAAWLGVVPGEHSTGGKQTLTGISKCGNKYLRKLFIQGAHAVLQQRMKQSNGLNTWLAQLTSRKRIQVAAVALANKMARMVWAVLSKGESYRPPLKIETAAV

SEQ ID NO: 232424 - protein, 366 aa, unidentified
MTKCIWIGLDEHAESITAAILVGDSPDAEIVTLPGDLNQVRRLFRRLSKQGTPRACYEASGAGFVLQRVLSKDGFHCEVIAPSLIPRMPGDRRKTDRRDAVMLAKLYRSGHLTVVHVPTEHQEALRRVLRLRATYQAYCKATKQRIAGILRNHGIVFREGKSTWTKRHRAWLAGLRRDLEGPLQTALAVELEHLEYLETQRGALDDELERYARAEPYRRQVEALCCLRGIKTLTALGLLCEIDDGRRFASPAALMAYFGLVPSEYSSGQRERRGPITKAGNTHARCLLTEAAWNNRHRPAATLHLQRRRQGQPPAVVAAAVKAQHRLAKKFRRLDARKQRHVAITAVARELCGFVWAVLNAVPQSS

SEQ ID NO: 232425 - protein, 325 aa, unidentified
MEAKKLCCGIDVSHAKLDVCYQNNLGELFHLQVANSKQGFAKIMEHTGPDYHFVMEATGVYYIRLAFYLHKQGCELSVVNALAIKRYIQMHLERNKTDKKDAAWICRYAIDQRPAYWQMPDSAYFESRQLYNTIREYTEQIKRFNNQLHSLRLLPVPSKDTIKSLEKVILYMGKQIKQLEQKLQQLLEQWQPEQLKSVSSVKGIGKRAAAMLIVFTQGFKHTQNHRQLISFAGLAPTQYSSGSSIHGKPRIYKRGGKNLRDVLYMCSMNAMKTNTACKALYDRLRANGKTGKQALIAVCNKLLKQVFAVAKNNSLYQPNYCSAKP

SEQ ID NO: 232426 - protein, 342 aa, unidentified
MQITTIGLDIAKNVFQVHGIDADEKVVVRKQLRRSQVIAFFKALPPCLIGMEACATAHHWGRELTQLGHEVRLMPARDVKAYVKRNKNDAADAAAICEAVRRPTMRFVRIKSPEQQGQLMQHRTRDLLVRQRTQLINAMRAHLAELGIVAAKGDAGVTELLAIVADKKDTRLPIDARASVIVLATQLEGLGTVIGAIEKRIKSQHRANAASQQVETIPGIGVIGATAIAATVPDPTVFRSGRDFAAWIGLVPRQDSTGGKPKLGAISKQGDRYLRRILIVGAHSVVRRAKENPGKYPWITQLLARRPAKVVAVALANKMARMAWALLAHGGTYRAPELAQAA

SEQ ID NO: 232427 - protein, 391 aa, unidentified
MSMYFAGIDISKYKHDCCIISAADQQVVSKFTFKNDKNGFSELLTALHSLSSPEDIRIGFESTAHYALNLELFLEKAHHSFMEVNPVLISEYKKSTTLRRTKTDRIDCESIARWLMTVEYKPHSKGFYHSYSLKSLTRLRDKLIRQRSFYLVKITNVLDHTFPEFKPFFNEHFSKTALYLLENYGSAEKMARMNAVSYEKLRSLSRGKFSPQQFLTLKSLAANTVGINNSIFDTELNSLLTLYKATAEQISILEVQITELIEEVHPHYMSIPGIGPISAAVIYAEYGDISNFSNPSQMLAFAGLEPGVNDSGTESHGGRMVKRGSSQLRYVLMNCALPLIRFDMTFAAYYARKRAEGKPHRVALSHVTKKLVRVIFALERQNTDFTAQALR

SEQ ID NO: 232428 - protein, 401 aa, unidentified
MVSDFMKGRYNLMKIFVGIDIAKLNHFAAAISSDGEILIEPFKFTNDADGFQLLVSKLESFDKNSIIIGLESTAHYGDNLVRYLVAEFYQVCVLNPIKTCQMRKNNVRKTKTDKVDTFVIAKTLMMQDVLRFITFFDLDMMDLKALGRFRQKTIKQRTRLKIQLTTYVDQVFPEIQYFFKSGLHQNAVYALLKEAPSPKEIASMHMTHLANLLKVNSHGHFTKEQAKELRVLAQKSVGANDSAISIQITQTIQQIELLDSQLEKIEAEMTDIMKFNDSVIMTIPGIGYINGGMILGEIGDIHRFSNPNKLLAFAGLDPSVYQSGNFQAKTTRMSKRGSRVLRYALVNAAWNVVRNNATFKAYYDAKRAEGRSHYNALGHCAGKLVRVIWKMLTDEVEFNLE

SEQ ID NO: 232429 - protein, 331 aa, unidentified
MAVHVGLDVGSRTTAMGWRDKGRSAGAWEITQTPKGRKAAVKKLLALKPLSVVMEATGIYYLDLAIELSAAGLPVSVINPKSSRNFARLKLQHSKTDAIDAQLLAEYGERMTPRLWTPPTAAQLELRAIGRHINRLVGHRTQAKNELHALKATDTSSALLIEDEEEAIAAFDKRIERFRKAGLDLVASCPVLQGQFDNMLAAPGMGEVSTLAALAEMATLPTTLKSGQVSRHAGLDVRLTQSGTSIDKPGRLSKCGNAYLRCSMYMPALTAIRCDPYVKGFYEALVGRGKRKMQAVCAVMRKYLTGLWACMRSGEDFNTAKLFSEKHLQKA

SEQ ID NO: 232430 - protein, 322 aa, unidentified
MAMLSFCGIDVSKDRLDVMVLPEQQCSSVGNNVAGWSELIERLRGFSIAVIGLEASGGYERGVMRALLAAGMSVRQINPFKLRQFAKASGVLAKNDRLDARMIASFVAIMPTHPAQRRAPAVERLAEMVTVRRQLSNEKIAAENASRLLENAMLQRLSRRRIARLATDIAVIDQHLVEIVASDAALAHRYRLLTSMPGVGAVLACSLIAFLPELGQLSRTKIAALVGVAPYDFDSGKLRGMRCIWGGRTPVRNVLYMAAMSASNWNPRLKAFHDRLAATGKKPKVVIVAVMRKMITMLNAMVRDDILWADRYCGRHSVPTAR

SEQ ID NO: 232431 - protein, 467 aa, unidentified
MMHNSTRERKEKPARLSVSLLERIQPDAAGIDCGQNSHFVAVPPDRDPQPVREFRTFTADLHRLADWLVQCGVKTVAMESTGVYWIPLYEILEQRGFQVVLVNARDVHNVPGRKSDVKDCEWLRELHSVGLLRASFRPAAAIVPLRSFMRQRETLVEEAATRIQRMQKALTEMNLKLHTVLTDLTGQTGLRIVRSILEGDRDPEQLAAHRNYRCHASHAEIVAALTGNYRAEHLFALRQNFAAYEFLLKQIAECDTEIERLLTTLAAQQPPPSAPLPVARRKRASKHQPQFDIRGPLHRLTGGTDLSQIDSIGPQAALQLIGEIGTDMTRWPTEKHFTSWLALAPNNKISGGRLLSSRTPPSANRAAVILRRCAMSLTKTSTALGAFYRRLAMRVGKAKALTATARKLAVLVYRVLSSKLVYNDPGADAYHQLNRTRELKSLRKRAKLFGFDLLDRATGEVLVNPVF

SEQ ID NO: 232432 - protein, 417 aa, unidentified
MKKNSKSPTKKEPKAKRAKAQRPVQRETKEVLSELVEKLRGKLELKPTPASPVKAGQRPERSPNLDQLTVGVDLGDQWSRYCILGLQGETLSEGPLQTRQAELAEFFQAFPPARVVIEVGTHSAWVQEVIAAEGHEVLVANPRLMEGSKRRKRKNDRIDAHKLARLGRVDPQSLHPITHRSREARQDLVLLRAREALVEARTELINATRGLVKSLGTRLPQCSSRSFGHKVGDAIPAEAREALLPLVQLADGMSACIKDYDRRIEELASEKYGHTKLLRQVKGVGPITSLAYVLTLEKPERFPKSRDVGPYVGLVPKQEDSGESQPQLGISKAGDTMLRKLLVGSAQYILGPFGPDTDLRRYGLRLCERGGKNAKKRAAVAVARKLAVLLHRLWVSGEVYEPLGYASSAAMVQKAAA

SEQ ID NO: 232433 - protein, 313 aa, unidentified
MLKETFVGIDIAKDKLDVHVLPKGTHFTCQFDASGIASLLSRLQEENPTMIIMEATGGREAIVAAEMGAAGLPVAIVNPRQVRDFARGIGKRAKTDAIDALVLARFGETNRPEAQPIPTEQQSQFKELVTRRRQLIGLRSAEKNRRHSARSQRVRQSINTVITTLDRELAEIDRDIDDLIRKSPLWREDEKLLRTFKGVGPVVSRVVLAKLPELGKLDRQEIACLVGLAPLNKDSGKMRGKRMISGGRKDVRDALFMAARTAVNHNKVIKPFYERLIKAGKLYKVAMTACMRKILVILNAMVREKRPFQVVSP

SEQ ID NO: 232434 - protein, 422 aa, unidentified
MLEQTQDNEQVVERIAALDIGKAELVCCVRVPDPKASGKRLQEVTTYSTMTRSLLAMADRLRQLGVTRVVMEATSDYWKPVFYLLEAAGFDTWLVNAKDVKHLPGRPKTDKLDSVWLCKVAERQMLRPSFVPPPPIRVLRDLTRYRIDLVGVRTAEKQRVEKLLEDAQIKLSVVASDIFGVSGRAMMAALISGERDPRVLAQMARSSMRAKISQLEEAFVGRFSDHHAFLLTKMLARIDAINRDIADVEAQIGEQIVPFADAVACLDAIPGVGVANARVIIAEVGLDMSRFPTAAHLASWAKFSPTVKESAGRKKGKNATGHGNSYLARALGEAAIAASKTDTFLGERYRRIARRRGKKRAIVAVGRSILVIVWHLLSDPRVGFVDLGPDFYDIRGGPQRAIRNHVRHLEALGYQVTLHPAA

SEQ ID NO: 232435 - protein, 392 aa, unidentified
MSSTTVKILNNEEQFVHVAVDLAKNYFQVAYKDPVSGKFINRQYKRSEFTEFVTNKDTFKKHFYVESCGACQYWCRLAVSHGHKGTVIPASATKTFISNNKSDCNDAKAIWQLSFVPDIKEIHVRSEANQVMGMVLKCREKLIAEKTKISNWLRGQLYELGEITSLGGSEKVVTLSNEVLSKALDSKKEWADMYQLINSSIESVINSIDAKLEAIDKFMKDYVARDPLCQKLMTMPYIGPVNAYALAYVMEDPKYYKNGREFAAKAGTSPSFTGTGGEVRILGVGKKGCTVLKRTIYQPALMMYQRNKVNCEGCDELKEKRTTNSIWISKMADRKPLKKVVCAICNKMARIAWAIAADKNCCGYDDSKTSLIYKIKRGDTDSIDKSAEEQLN

SEQ ID NO: 232436 - protein, 311 aa, unidentified
MEHSHFVGIDVSKNHLDVHVRPTGDSFRVPYDDAGLVTLVEHVRPLAPAVLVLEATGGYEVPVAATLASAALPVAVVNPRQIRDFARATGQLAKTDTLDARIIALFAEAVRPAARPVPDEQAAALGERIARRRQLVDMLGAEHNRRRLLRDRRLQRHLDAHIAWLEEALRRLDQDLTTLIRSTPVWRETDDLLRSVPGIGPVTACTLIADLPELGRLDRRRIAALAGLAPIARDSGAFRGRRMIMGGRPHIRRVLYMATVTAIKHNPAIRAFHQRLVAAGRPGKVALTAAMRKLLTILNAMLRDRRPWQPA

SEQ ID NO: 232437 - protein, 312 aa, unidentified
MTKIICGVDVSGDHLDARVGQTGPYQRFARTPDGIAQLASFCRQHQVTLVAMEATGGYEKLPFALLWQEGLPCTILNPRQVRRYAESMGTIEKTDRIDTGMIAAFAKAKKTKPQTPAQAGQKALSALTTRLRQLTDCKTAQTNQGRLCDDPIVVADIASLVADLDRRINSLLAAMLELIEQDPLWSILSDCFRSIKGVADHTVATVLAFLPEIGTISNKSASKLTGLAPIAHDSGKRSGKRPVRGGREPVRSILVVIANGVIQHNPDIRAFHQRLIDAGKPKLLAKVAVAHKILVRLNAKARDARKNLAIAT

SEQ ID NO: 232438 - protein, 357 aa, unidentified
MVTGLKHQMEKRSMEHFAGLDVSVNETSICIVDDTGRIIREAKVASEPDALLTALNNPTCRFKRIGLEAGPLSQWLFSALAEAGLPAICVETRHMRAVLKAQINKTDRNDARGMAQMMRAGLYRPVHVKTLRSQKLRMLLTHRKLLQSKAIAIENDLRGTLRNFGLKVGVAGAVRFEARIRELVKDLPDIAILVEPLLVVRRTLREQLGILHRHLLTIARDDEVCRRLMTIPGVGPVVALTYRATVDVPARFRNSRAVGAVVGLTPCKYQSGESDRTGAISKCGDEMMRVMLYEAAQILLMRSTQWSWLKAWAVQIARRRGVKKAIVALARRLAVVMHRIWVDGTTFRWTREEATAA

SEQ ID NO: 232439 - protein, 412 aa, unidentified
MDAQTPAERRITVGVDTHADLHVAAALDHLGRLLGTEAFPTTAAGYAALLRWAGRFGAVERLGVEGTGSYGAGLARWLRARGLAVVEVERPKRPARRRRGKSDPLDAEAAARAVQAGTATAQPKAGTGPVEMIRTLQAVRRSAVKARTQTLNQLRALVLTAPEDLRARLRRLPPARLVATAAAFRPRRPLATPAAATRWALRSLAARHRRLSAEIEALDAQLGELVAAAAPDLVAVKGVGTDTAATLLVTAGDNPERLRSEPAFAHLCGVAPVPASSGRTTRHRLNRGGDRQANRALHLLAVRRLRWDPATRAYAARRRAEGRSTPEILRCLKRYLARALYPLLARPPSDGVGRGAARPPLPGSGERRSPGGPERSGGPRPQAGLTAAGGGAPETFLQQSGSHDRAASPLTA

SEQ ID NO: 232440 - protein, 340 aa, unidentified
MSDIIRIGMDTSKSEFQLHGVDLQEKPVLRKKLRRAQVLGFFAKLEPTKVGIEACGASHYWARELGAMGHEVVLLPPQYVKPYVKRGKNDAADAEAICEAMSRPTMRFVPVKSPDQQAAQMLIGLREGLVRRRTQLSNTIRGYGAEFGLTAAKGLARIEPLLARIAQDERLPALAKELFDTLGQEYTRLQAQLQKIEAKLMAWHRSNEMSRRLAQVPSIGPVIATVMAIKVPNPKAFRSGRDFAAWIGLTPKDHSTAGRTRQGVITRAGDEKLRSVLVVGAMALIQQVKRGRGHPSPWLVELLARKKPKLAAVALANKTARIAWKLMVSGERYMPRPGTP

SEQ ID NO: 232441 - protein, 361 aa, unidentified
MQIIGCDLHARQQTLAMLDTTTGEVVNLTLLHEGNNVREFYSKLPRPVLVGIEATGSMQWFLNLMQELGIECQVGHPAKIRVAEPRKQKHDRRDADLILKLLAEKRFPAIWLPTKELLDLRALLLHRHQWVRLRTRIQNALQAIALANGLRRGPGLWSYDGQSAIAFLPLLPHTAYRRSALLAMYGKMEAEIEKLTQQVAEQAGNRCGARLLMTHPGVGPVTALATDVFLGDPRRFVDGKALASYVGIIPREYSSGGRQRLGGVTKQGSPLLRFLWGEAGAHAARRDPELQHFYRRKLVQKGLGKARVAVARKLGIRLWIMLRDEIDYQEFCRRGQKQQSVAACAGMPETRYGANSHRPID

SEQ ID NO: 232442 - protein, 318 aa, unidentified
MSVAHGYWGIDVAKDTLELAEFEASEQGQVTNDSAGIAALLNRMTEAPPQLIVLEATGGYEQEVVWALGTAGLPVVVVNPRQVREFARATGQLAKTDRLDAKVLARFAATVRPEPRPLPDASALELEAYLTRRRQLRDMLTMEQQRLALVRPREVRQSLRKHIAYLQRELRSTESDLSQLIKGSPLWREADDLLQSVPGIGPTTAQTLIALLPELGTLGRRAIAKLVGVAPLNQESGRLRGARRTWGGRAPVRRTLYMAALVGTRWNPVIRAFYQRLIAAGKARKVALTACMRKLLTILNVILKTKRPWQPTMVSTSA

SEQ ID NO: 232443 - protein, 308 aa, unidentified
MAIRKQSIGIDISKLTFTACLCQQAEDGKLTFSKVLDFSNDNKGFNQLLRWTKGLIVSGCELVFLMEATGVYYENLAHHLHKIRKKVHVVLPNTSKHYFSSLNVKTKTDAVDARILSQFGVERVHKLWSPPPGALLQLRNLTRYYVQLQEQKTALGNIKHSKDCSYDIQIFITKSNKKLISEIDKEIEKCLKEIKKTILEDKVLKERIRKVLTIKGVGLITAATIIAETMGFDQFHSSKQLVSYSGYDVVQRESGTSIKGKTRISKKGNRYIRNALYFPAMVACRHNETLKETYIRINRNNKTSKMIG

SEQ ID NO: 232444 - protein, 346 aa, unidentified
MNNYYAGLDVGLKSTFICVVDVAGIQVHESEVASDADVIANKLGTLKLNYKLVGLETGQLSIHLTKGLRIRGFNAVCMDARQVAAALSTVINKTDRNDARGIAHLLRYGLFRQVHVKSDDACDKRILLASRRQLKMQVASLESTIRGLLKIHGVVLGPANRLSYLVRVKEAVGMLDAPSRLGMEALVTSLEGLRTACKTLDAAVKKHAGNDARSRLLMSMPGVGPLTSTTLVATLDDAARFTKSRSVGAYLGLTPRQYSSGETQRQGRISRAGPAECRAMLYEAAHCLLHFYKKPSNLKAWGMKLAKKKGMKRAIVAVARRMAIIMHRMLITGQAYDDTRLVPVKA

SEQ ID NO: 232445 - protein, 338 aa, unidentified
MYYVGIDLHKLDLVIAVEDEQGPVGKPRRLLCEDEAAIVELFEKLRPFRAVIEASSSYRWLYERLSPMGQVVLAHPLRLRAIVASRAKTDKLDAAMLAKLLRMDMIPAAYIPPREFQELRELTRTRAKLAHAATRAKCELHALLCRANVHPPFRNPFGVRGRRWFRTLGLGIAGNIARDELLLRLEHYERETAKLDEHLAKMAEQFPEHEALTALYGIGVYSALLIVAELGEVERFGNGRQVGSYAGLTARVHQSGGHDYHGHITRQGSGWLRWVLVQAAMKLLRVDSALNAFYTRIRKRSSKHIARVAVARKLAGICWCRLRCWHREHGQAGTAAAH

SEQ ID NO: 232446 - protein, 337 aa, unidentified
MEYFAGLDVSMEETHVCVIDRDGKVILEVGTLTVPKAIAAALAKGPAVERVLFETGRMAPMLFHGLMALGLPVVCVESRQAYQALRSLAAHKTDRNDARGLAHLARTGFFKPVHVKSLPSYAVRALIIARKKLVGQRVTLGNQIRGLAVAFGVRLPRGLSPGFAEKGMAVGRGIPGLDGAMRGLLAARDAILKAIVAIDADMKTLERSSAACRRLMTIPGVGRLTALAFTAAIDDPGRFRRSRDVGAYLGLVPRRYQSGEIDYTGSISKCGDGRLRTLLYEAANVMLTRYRGSLALKTWALDIARRSTMRKARVALARRLAVIMFAMLKHGTEFEPA

SEQ ID NO: 232447 - protein, 316 aa, unidentified
MLYVGIDVAKNKHDVTALNVQGKTVLKPLTFSNNKAGFELLDLSLRQLNQDCLIALEDTGHYAFNLLNFLHEQGYKVYTYNPLLIKEFAKSLSLRKTKTDKKDAHGIALKLLSDPNREQFQHDNRQVELKILARHIHRLKKKQSDWKVQYTRCLDIIFPELDKIVGKHSEYTYQLLTRYPNPQKRLEARFDKLIEIKRLTASKIQDILSIAPRSIGTTSPAREFEIIEIIKHYKRLIDKAETCVNDLMAEFNSVITTVTGIGGRLGAVILAEIRNIHAFDNPAQLQAFAGLDSSIYQSGQIDLAGRMVKQGSPHLR

SEQ ID NO: 232448 - protein, 325 aa, unidentified
MSSHEIVGIDVAAKTLAVAGDCPRLRAEYENSREGRRGLVKALGGGRRPVRVVMEATGIYFLDAACELVATGIAVMVVNPRASHHFAEAVLQRRKDDPVDAAMLRDYGQRMPFVPWLPPAENHFALRAIGREVRAQGKALSAAKNRLHAMGATRLVPRELVRALERQIAETEALVDALVAAAVTLIDGDPELKRKFQRTDSMPGFAAKAVVTVMGELIVLPPMSATQWTAQAGLDVREVRSGTSVKRPARISKRGNKRLREALFYPALTAARCCPQARAFVARLVARGKTPLQAQVALMRKLLHAIHALWKTDEDFDADKLFLNA

SEQ ID NO: 232449 - protein, 391 aa, unidentified
MIYVGIDVAKDKHDYFITNSDGEVLFKSFTISNNREGFETLFQKVQSVSDDFAKVKVGLEATGHYSYNLLGFLLDKGLPTYVINPLHTNLYRKSLSLRKTKTDKVDAHTIASMIMSDVNLKSYSDTSYHNEELKSLTRYRFDKVKERAKLKSSVSRLVCILFPELEKLVPQLHMASVYALLSEFPSAHAVASIHITRLTHLLSESSHGRYGKDMAIIFREAARNSIGSNMPAKSLELKHTIKLIQELTSEIDEIEAEIKAIMDEINSQILSIPGISYNMGAMIVAEIGDFSRFDSADKILAYAGMSPSTYQSGQLDNCYSHMEKRGSRYLRYALYNATKYVCHWDNSFGAYLTKKRAEGKHYNVALSHATKKLVRTIYAIEKSGRVYLPTV

SEQ ID NO: 232450 - protein, 343 aa, unidentified
MKLHVIGIDLGKTVFHLVGLDSTGRVVIRKRCSRTQLLTFTANLQVQLIGMEACSGAHFLGRALREQGHEVRLMPAQYVKPYVQTNKSDYLDAEAIAEAVQRPRMRFVPIKTEEQLDLQALHRVRERWVMRRTAVVNQIRSLLLERGLTLPKGRSHLDKQLPRILEDAELHLSDSFRVLLAQLKLELEQLAARIEEMDRVIQKTARENEACQRLTEIPGVGPVTATALIAAVGNASAFGKGRKLSAWMGIVPGEYTTGGKQKLLGISKRGNKYLRRLFIQGARSVLQQRHKQAPGLNRWLEQLLGRAHQNVVVVALANKLVRMSWAVLCKNERYRAPVFAGTA

SEQ ID NO: 232451 - protein, 333 aa, unidentified
MEKKWFIGIDISKKTLDVVIYVPTKKHADETNYERFLNKEEGYKSLLCWLKKKNMAKKRLVISMENTGIYSFDLCLFLEVASIDYCSFNPLHLKRSLGLVRGKNDRVDAERIAYFAYLHRDELSYSKLSGSSIIRLRDFAAERKRFVKQQAEYKGFLTDRKDCEMTSTIERAAHMVKILDEEIASVEEEMLQIINSDPSILRNYELLNSIKGIGTINAMNTIIHTNNFQAFETARQYACYLGIAPFEHSSGTSIKGKTRVYPTGAKLLKADLSQAANSAIVWDKEMKEYYERKRKEGKAYGVVLNAVKFKLVGRMFAVVKRGTPFVELMTYKK

SEQ ID NO: 232452 - protein, 344 aa, unidentified
MKYFAGLDVSLEETAICVVDESGEMVKEMRALSEPAALIEALAIGLPLERVGMEACPLTAWLHDGLHAAGLPAVCIETRRSSAAMKTMPNKSDRNDARALAQIMRTGWYRQVHVKSRQCRLWRSLLLARRTVLKQMGSLKSVVRAVLRENGLKVGKVSRSGFVGRVRELAGGAPEVMALVEPLLAVLATVSKQLAHLTKQVLAIVRREEICRRLMSAPGVGAITALTFRATIDRPERFASSRAVGAHLGLTPSRYQSGETDIQGRISRCGDHLARAALYEAANTLLTRSKKWSSLRAWGMALARRRGLEKAKVAVARKLAVILHRMWCEVTEFRFGKAEACATA

SEQ ID NO: 232453 - protein, 347 aa, unidentified
MVIIGCDFHPGFQQIAMMDMDTGEVRQLRLAHREEAQGFYAGLRGRELLVGMEACGYTQWFEQMLEEMGHRYQIGDAAAIRASYVRKQKTDRRDAGHILRLLLEGRFPALWVPRAAERDARQLIVHRHKRVQMCTRVKNQLHALALNQGLRLRWKLWSREGLEQLRALPLLPHAAARRADLLKQLEEMNAEIERLDRAVRQEAAARPAAVRLMSHPGVGPVTALAFVLTIGDTRRFEKSRQVASYLGLIPSEHSSGGKQRLGHISKQGNSLMRFLLVEAGQSAVRKDVELRRFYLRVQHRHSTGVAKVAVARKLALRLYWMLRHTMEQAQLQAGPYAGKPVSFCGRS

SEQ ID NO: 232454 - protein, 451 aa, unidentified
MEREERRLEQYRRLRKEIRGSQDYLVVGIDISKDLHHALMRTVSGKIYRRLTFHNTREGFDTLLLQVEAVRVQHGLKEVVFGMEPTANYHKPLGEFLINQQHQVVLVSPGAAKQNRALLDGRWNKHDGKDCANIADLICQGKCLFYDYPSAELRDLRNLLSLNRKLKKLEQGLRLRIRNHLVAQYFPELDQYCHWGASEGLALVRWCLDPALMAALSDQELTQRLGSIGRTIAQRKRLAAVREKAPNSIGCRFGSSVEFEGQSVVKLLKEVRQRIKDTQEQIEGVCQKFKEYCYLLSIPGFGPTLSAMVLGAIGNPWRFHNGAQVIKMVGLDLSASQSGKSQGSAVVSKKGKAEIRFALYQAAMVASTRDKHFVAYFTNQLRGREKEKGIKTKKRVKLAAKMLMIAWTLMKKQQPFDPAYLVATEPMTARKTRNEENRGIPKVQPDADRCL

SEQ ID NO: 232455 - protein, 374 aa, unidentified
MHPKQRHIYVGVDLHKHKNVAVIINCWHEKMDVIEFENKPAGFDAFVQSVKKHRKKGITPVFGLEDSGGYGRALAVYLVEHNHIVKDVNPSLSASERKNKPMTQKHDVWDAECVANVLLNKLNELPNSNPIDVYWTIKQLVNRRTALVRENAKLKQQLHIQVNQNYPSYQEFFSEIDLKSALAFWEKYPSPDVLLGTSTSPNTKSNSPDEITNQNISPAAELTSLLQVNSNYVLSLSKAEEIIELVKADGMEMRPYQEQRNFLIQSIVRDIRFKQEEVAKVEQQIQVMMNQVDYRLETMPGIALVTAASFVAEIGDITRFANADKLARLVGIAPTAFGSGENGGRGDNHKKCKQGNRVLHELFYQLAVQQELLK

SEQ ID NO: 232456 - protein, 437 aa, unidentified
MEEVTDEPLYRDRVCGIDIGKAGMAATIRVPSDKDPARRAAETRSFGTTRREVLALADWLRSWQVPAVVMEASGDYWKGPFYRLEAEGFECVLADAKQVKNLPGRPKHDPGDSRWLAACLERGAVTSCFVATPEFRIIRLHTRYRRDLTEERTREKQRAEKLLESAAIKLSSVVTDLHGVTGRDIMDHLIAGERNPKVLAQLARARARRKITELEQALEGAEFFTPGHAALLAAMLARIDRVNAEIARLSEVIETLLEPYEEQLQQAESMPGWGRRAAQDAVAETGTDMTRFRTGAHLASWAGRTPLDNSSGKRKGKAKSKKGNRYLGGLLGETAIAAGKTQTREGARYRRLARRRGKAKALVALGNTQLNVYHKLLSSPGMRYQDLGPDYYERRAEVSRQVRHHVGKLGALGFDVTLCRIPEPGPEPGGTGNSHAA

SEQ ID NO: 232457 - protein, 343 aa, unidentified
MDYFAGLDVSVKDTSVCIVDDTGGIVREVKVASEPEALLAVLMNPLYRFKRIGLEAGPLSQWLFSALVEAGLPAICVETRHMRAVLKAQINKTDRNDARGMAQMMRVGLYRPVHVKTLRSQKLRMLLTHRKLLQSKAIAIENDLRATLRNFGLKVGVVGTVRFEARIRELVENHPDLTLLVEPLLVVRGVLREQLDILHRRLLAVVRDDNVCRRLMTVPGVGPVVALTYRATVDVPARFRKSKSVGAVFGLTCSRDQSGERDRPGAISRCGDEMMRAMLYEAAQSMLRSKKWSWLKAWAMKIARHRGMKRAIVALARRLAVIMHRIWVDGTEFRWTREVAAAA

SEQ ID NO: 232458 - protein, 408 aa, unidentified
MRIIGLDIHRAFAEAVAWEDGKLRRLGRIDMRRDRLDAGAATLSKGDVVVVEATGNAAAVAAVIAPHVTRVVIANPKQVRIIAHAKIKTDTIDAGVLAQLYASGFLPEVWIADEATQALRRQVTRRNQIVRQRSRLKNIIQSILHAHLIPSCPHQDLCGPRGRAWLSEQVVPEDERLAVERHLREFDRLGEDLKVIERDLARSALADESITRLMTIPGIDRVVALALKAAIGDIQRFERSQKLVSYLGLNPSVRQSGPGPAYHGRITKQGRGHARGMLVEAAWAAARAPGPLRAFFLRVRARRGQHVAAVATARKLAVLIWHLLRKGESYLWARPALHAKKVRDLELKAGHAPSRGQKGAAHAYNLRSHREQERRWVEQAETAYARFVAGWNPRGPKARTGAAKEGRR

SEQ ID NO: 232459 - protein, 348 aa, unidentified
MRFYTQQHQYTCGIDLHARSLYVCILDDTGHSLVHKQIKATPEALLKLIQPYQDDLIIGVECMFSWYWVADFCAAHDIKFVLGHALYMKAIHGGKAKNDKIDSDKIARLLKGGMFPMAYVYPRPWRSTRDLMRRRMRLMHQRAELIAHIHNTLSQYNLPPNTDNLRYSKNRDQFRELFSDTSVQRSIDLDLDRIDFYDEQLGKLEWYLKKTARSIDPNTIIRLKSINGVGDILSLVILYEIHDINRFARVQDFVSYCRLVKCQRESAGKIYGTAGKKIGNAYLRWAFGEAAVLFLRGNPNAQAWLEKKTRKYNKAKALTILAHKLGRAVFYMLKRKTLFDQDKFLAPG

SEQ ID NO: 232460 - protein, 410 aa, unidentified
MEVLHAHCAGLDVHKDTVVACVRHMAGSAVKREIKTFKTTTKDLMALSDWLSAEGCTHIAMEATGVYWKPVWHVLSDGEFSLVLANAAHVKNVPGRKTDVNDAAWLADLLAHGLIRGSFVPDEQTQEMRDFLRTRKQLVRERSSHIQRIQKTLEDANIKLDSVIADIMGVSGRAMIEALIAGEADPAKLAGLAHRQIKAPRDDLVEALRGKVTKHHRFMLRLHFQQIDALDAAIAEIDQEVDANVEPFRALIEILSSIPGISALSAKVILAEIGADMNRFPTDAHLISWAGLCPRNDESAGKRRSNRMRKGAPWLKTTLIQCAWAAARKKGSYLQAQFHRLRSRRGAKKAIGAVAASILTAAYHMLKDGTCYQDLGPDHFDRRAKAAQTKRLVTRLQNLGFAVQISPLAA

SEQ ID NO: 232461 - protein, 353 aa, unidentified
MRKPVTKRALPKGQKVFIGIDVHKKTLSVTCVCEGEVIERLTMVNDAAALSRFLKRRFAGAQLYSAYEAGFSGFGLHRHLCRAGIHNIVVHAAAVEVSARDRVKTDKRDSLKLAVQLAAGRLQGIRIPSEAEEGQRLVTRTRAQLVQERSRLKNQIRSKFHQFGSIAPTDERELSLPMVRALLTQGASAELELVVRALVAVWESINLQLKHLLAELKQQAERDPYEPTYRSVGGFGALTARELSNELGDMRQFRNERRLFSFTGLTPQEFSSGEHQRQGPISRQGRSRLRALLVEAAWRALKKDRALATFFARLSARVGKKRAIVAVARKLMGRVRAALRKGELYQCGYGYAA

SEQ ID NO: 232462 - protein, 336 aa, unidentified
MEQITTIGLDLAKNVFQVHGIDDAGEVLVRKQLRRAEVLRFFAALPPCLVGMEACATAHHWARELTGLGHTVRLMPPAYVKPYVKRGKTDAADAEAIAEAVTRPTMRFVAVKTVDQQSVLMLHKVRDLLVRQRTMLINALRGHLAEFGIIAARGPAGVSAAITALHDAQDGLPVLARQVLHGLIDQMRTVGAAITAAEKRIMAWHRASAASQRLATIPGIGPITASAIAATVPDATLFRSARQFAAWLGLTPRAHSSGGKERLGGISKQGDGYIRRLLVIGATAVIRFARQDNASKTWAARLLERKSARLVSVALANKTARIAWAVLARNQAYAAM

SEQ ID NO: 232463 - protein, 364 aa, unidentified
MKRKVYVGMDVHKETIQIAYLTSNSKEILKEQQIKHNEVQIKKFIKKLKTEWNEIHCCYEAGVTGYPLYRYLKSLGVNCILVAPGKIPRQNTDKIKTDKRDAIKLARLMRSGELESIHVPSEEDEAVRDYLRSRDSLRLDLGRNRQRLMKFLLRKDIKYSTTKYWTVSHYKWLNNLHFNNEILQETFNDYYSRVRVQEENLKAMDKKIQEIAESEPYREKVGILRCFRGVDYLTAMFLLCEVNDFKRFKTAGSFMSFLGLVPGEYSSGSKRKQTGITKTGSPRLRRILTEAAWQHRFSGTGSKIITARRSGQPALVVALAEKASLRLHKKFRNLQLRGKTPQVMITAVSRELSGFLWAAMNLVA

SEQ ID NO: 232464 - protein, 449 aa, unidentified
MGRYAGVDWAAEKHDVLVADEAGEELLAATFAHDEKGLRALCCTLVRLKVERVAIERPDGLLVERLLDAGLRVLALHPNQVAAARPRFRVSGGKSDRFDAFVLCELARTDSHRFRVLEPDTDETKALRALTRAREDLVHAKVALTNRLRSELECFWPGPIGLFTKLDSAISLAFLERYPSPVDARGLGEQRLAAFLARQHYPGGQKPAQLLAKLRRAPEGRVGEAELNARRQLVLGLVATLKTLIAQINQLERQIATAVRAHPDGEIFLSLFKDPNSVVTAAELLAEIGDCRARYPTGDALAGDAGQAAVAIESGKRKAACFRWGCNKRLRGAFCTLSDSTRHRHPWAQDRYAAARARGHDHPRAMRTLGRAWCRIVWRCWQDRVPYDPARHRGLQQHVTVTIPTPSGPRPDLAATQRMAGAAVTHKAAQRAEREALDGKPPSANPLPA

SEQ ID NO: 232465 - protein, 312 aa, unidentified
MMDAVYVGIDVSKDRLDVHALPQGAAFMVARNGEGVAQLVERLKGLSPALIALEATGGFETVVAAALAAASLPIVVVNPAQVRHFAQALGQRAKTDPIDAAVIARFAQATQPAARPLPDEMTQLLADLVARRRQIVEMMAAEGQRERRADKRLKKSIARLRKALEKELAELDGEIDDYMRGTPAWAEKQDLLASVPGVGPVIARTLIAELPELGALDRKRIAALAGLAPYTRQSGQWRGKSFIGGGRKTVRSMLFLGAMVAARHNPVLKAFRDKLVDSGKPKIVALIAVARKLLTILNAIIRDAKPWRAQNA

SEQ ID NO: 232466 - protein, 338 aa, unidentified
MGTYAGIDLHSSNSYIGIIDEQDRRQFGKRLPNSLTQILVALEPFKKNLEAVVVESTYNWYWLVDGLQEEGYKVHLANPSAIKQYEGLKHTDDKWDSFWLAHMKRLNILPEGYIYPKEERPVRDILRRRLLFVQQRTAQILSLQSAISRNLSLRMSGNAIKKLKEEDTEDLFDSPFLVLAAKSNIAVIQFLTKRITAIENAIKPHAKLREEFQLLKTIPGIGDILAFTIMLEVGDIGRFPKVGNYSSYCRCVKSERISNKKKKGENNRKNGNKYLSWAYVEAANFAIRFSPEAQKFYQRKMAKTDKIVAIKALGNKLARASYYIMRDRVAYDSSKLFG

SEQ ID NO: 232467 - protein, 370 aa, unidentified
MSSNLHYVGLDVHAETIAVAVAEPDGAVRPLGIIPNHPEAVAKLLRKVGPREHLQVCYEAGPCGYVLYWQLTRLGVHCAVVAPTLIPTKAGDRIKTDRRDAERLARCFRAGDLTPVWIPDAATEALRDLVRARQAAKQDQLRARHRLGKFLLRHGRRPPEGMRAWTQRHRAWLASVRFAASAQQATLLDYLTEVDHAADRIGRLDAAIDEAVAGAPPALQTVIAALQTLRGIKQVAATTIVSEVGTLRRFRHPRQLMGYSGTVPREHSSGSTVRRGGITKTGNAHLRRVLVEAAWAYRHGPSCTGALKRRQVGQPEAITALAWKAQHRLCSRYRRLVGRGKPHQHVVTVIARELLGFIWAIGVAADPVAA

SEQ ID NO: 232468 - protein, 429 aa, unidentified
MRTESTPGARGPVFCGVDTHADSHWLCVLDWRGRKVLSRQFPADAAGYEALAGAIAAAGEPACVAMEGTSSYGAGLTRHLASLGMPVREALSPARTQRRRPGQGKCDESDAERAARAAMSGSKLGTPKSQDGWVDGVRCMLAAHPGAVKARTSAINTARSLLTTAPEGLRSRFRGMGGPRLMEELPSVRAEGALGAALGALADLWAAARDAALDMERAIEASLEENCPALLAMYGCGPVSAAKLAVAAGDNPGRLRSEASFAAICGACPIPASSGKTVRHRLNRGGDRQANSALHEIARQRVMRDPETAEYAERARGRGKSDREVMRCLKRYVAREAYRALMHPHEIRRPEDASELVAARRAAKVSQVRAASILGTSEKYISMLERGQRELKPIRRAYEAWVEAGLPLDWDRQAFEAERKKDSKKHLAK

SEQ ID NO: 232469 - protein, 408 aa, unidentified
MPVDSSREVTRMFYAGIDIAKRKHEVSIIDTEGRALSQSLSFTNDREGSDRLLALFERLSISPQELVIGMEATGHYWLSLYSWLLEKGYDVKVINPIQSDAFRRLSIRKTKNDSKDSLVIAQLMRFGEYSTTRLSEENIHALKQLSRYRLSLVEECGNCKRRVIALLDQVFPEYETLFSDTFGTTSKELLLNCPTPEDMLAISSRKLTTLLTKTSKGRFRDEKANQIRKTASNSFGVTFSRDAFSFQIRQLIEQITFLEKQTEELEKKIAALLRKTNTVITTIPGIGETIGAAIIGEIGDINRFDTPGKLVAFAGLDAAVHQSGEFSGTKGGISKRGSPYLRRAIWMAASRAVFCDPILSKYYQGLKERGKHHLTAVSAVARKMCNIIFTILKENRPYEVNPPKPLRN

SEQ ID NO: 232470 - protein, 420 aa, unidentified
MDEITEEPAALVERVAALDIGKATLTVCVRVPHDDKPGARRQEVRTYATLTPALLELRDWLICQGVTLVVMEATSAYWKPPFYLLEDDIECWVVNARDVKNVPGRPKTDKLDAVWLAKLAERGMLRASFIPSRPQRQLRDLTRYRRTLTQERTREKQRAEKLPGDAQIKLSAVISDIFGKSGRAMLDALIGGQRNPHELAALAYRNMRAKTSVLQEALTGHFTGHHAFMLGMMLARIDALTTQIDTLTTRIGEAIAPFAAQVAQLDEIPGIGITAAQDLLAEIGTDMSRFPTPGHLVSWAKFAPTARQSAGRSKAATTGKGNPWLGGTLGEAATSAARTKTFLASRYKRIARRRGRQRALVAVGNSLLTIIWHLLSDPAARFTDLGPDWHDRLAPLRRKRQLIAELERLSGKKVTLNDAA

SEQ ID NO: 232471 - protein, 405 aa, unidentified
MTSCASDATRLPRPKVPEESALLRPFQGLSEKGEWSNRPRSAARPAPNNFDVPETNVTGLQPPAETRFYAGVDLHARSLYLVVLDRDGQTRFGRNLPAQPEPFLRAVEPFRDGLLVACECVHPWYWLADTCRDHQIAFVLGHAWAMKAVHGSKTQCDRQDAFAIARLLKGGNFPPAYAYPRERRGLRDLLRARLRLVRQRAELYGHVHTARRQANLPPVSSDVKYKGKRAAITADIADPFVRRRVETDLALLEPLDTAIRRLEAEIEEAAQEHYPAELAVLQSTPGVGPVLSLTILLEIDTIGRFATRQQFCSYARLCGAAQESAGQRTGTGNRKAGNAWLKWAFSEAAVLSAQKDERIGRLLERLASRLGKAKALSALAHKLGRAFYHMLHTKEVFDVNRFVRH

SEQ ID NO: 232472 - protein, 337 aa, unidentified
MEYFAGLDVSMEETHVCIVDRDGEVVHEVKVPSTPADIEVALASAPACRRVVFETGRMAPMLYHGLTACGVPVVCIESRQAYQALKSLTTHKTDRNDARGLAHLARTGFFKPVHVKSLPAHAVRALIIARKKLVGQRVTLENQIRGLAVVFGNRLPRGLSPTFIEQALRASEGITGLSVAMRGLIAARAAVLAAVGAIDADMKKMVRASDACRRLMTIPGVGQLTALAFTAAVDDPERFKRSRDIGAYLGLVPRRYQSGEVDYTGSISKCGDRRVRTLLYEAANVMLTRYKGPLKLKDWALAIAKRSTMRKARIALARRLAIIMHAMLRHGTAFKPA

SEQ ID NO: 232473 - protein, 382 aa, unidentified
MITMTRPNESTAPACGLLLAFELGQRSWKLGFTVGIGQRPRIRQIPAGAVGALATEIERAKTRLGLSSDSPVMSCYEAGRDGFWLHRYLVAHGVTNYVVDSSSIEVNRRARRAKTDRLDLAGLLSLLARYVLGDRRAWRVVRVPTVAEEDARHLPRTLEALTQDRTRLMSRLKSLLTTQGVSLPIDAKFLNRLEAAHLWDDTPLPPGLQERLTRTWTQLQEVDGQIRDLKALRLTRPEHLTPATSHALAQLLTMRAIGPIGASVLATEIFGWRRIRNRRELGALVGLVPAPYQSGETDYDQGITRAGNAHVRRVIVQLAWGWIRHQPDSALTQWYQQRFGAGGKRLRKIGIVALARKLLIALWRYLETGVVPDGAQLKPMEV

SEQ ID NO: 232474 - protein, 377 aa, unidentified
MNDYTTYVGMDVHARSIMCKGMCKQTGELYTKLFADSPSSTEVHEWMATLPQPVYSAYESGCTGFWLARELRELGDDCDVIAISTLPRSAKDRQGKCDKLDAKVILREIMNPLSDCSVVWLPDVEVEAARDLARARQDAVKAVKSAKQKVSSLLLRYHFVWNEKTPTGKLKKAWRGDYRKWLDKIALPDPGAQAALEHYKRAVKRAEEELAEMDGLVRARAEEPRWKPYVDALVHLKGVDVCGAFLACAEFGDFSRFASGRKVSCWVGTVPTNSSSGPRESHGGITKAGSTHLRMGLVEGCCGIDRWRAADKAVKGHPASAEVLAIAGKANERLRKRYRHLRDDLGKTPNKARVAVVSELARWIWVIGLQVQAEQAV

SEQ ID NO: 232475 - protein, 365 aa, unidentified
MHKLNSAATLIQRTTTEAPRDHMYYIGLDVHKRTISYCVKDAAGHVHQEGKIGSTRCELDAWIKTVPQPRMIAMEATIFTGWIYDHLLQHAEKIKVAHPLMLRAIAAAKKKNDRIDASKIADCLRCDFLPECHMASTAIRDRRRTLRYRSLLVRQMVQMKNRVSGLLLETGVSYNKSRLHKVGYFADLMSTNEEVNESIRPLLKISREHIVRTQRLDYALVSSLERDPLLAERLKRLRTVPGVGPITALTWALEIGDFTRFRSIKQVISYCGLCGDERSSADKVMRMPLSKQRNKHIQHVLIEAAKLAPRECHELAMVRERELQKGNPNRATLAVARKMVSYMLAVERRKQEFVPAENFKCTTAA

SEQ ID NO: 232476 - protein, 331 aa, unidentified
MKSTTIAVDLAKSVFEVAVSERPGRVRVRRRLSRGQFARFLAEQPPATVVMGACGTSHFWGREARTRGHQVVLLPPHAVRPYVLRNKTDGADAKGLLEAVRNEAIRPVPVKSIDQHVLASLHRLRSAWMATRTARLNTLRGLLRELGFAIPVGARQVVPAVWELVSDAESELPDALRPVLAEAAREVAELEVRIRETMVDASELLGRLRTIPGVGLLTATALVAFVGDVQRFPSGRHLASYLGLTPREASSGLRRRLGAISKRGDPYLRMVLIHGARSVLLHAKRRPVQQHNRLRNLGAGSRVRARPQQGGRRPGQQARSHRLGGLADTPC

SEQ ID NO: 232477 - protein, 338 aa, unidentified
MSEITTIGLDLAKRVFQVHAVDAAGAVATRRQLRRRQVVPFFAKLPRCLIGLEACGTAHHWGRTLQALGHEVRLIPPAYAKAYVRRNKTDPADAEAICEAVSRPSMRFVPIKSEADQAMAAVHRVRERLIAQRTQMINMLRGQMSEFGKVVAQGPQHVKELVAELLKPESVPEPLRQVLLGLVRLLAALREQIAVLDKQILSWHRRNECSRRLVGIDGFGPILSSAMAVRVQQPERFRCGRDLSAWIGLVPRQNSSGGKIRLGAISKKGDVYLRRLLINGAQAVLNSKRAKQDPWIARLLQTKPRLVAAVALANKMARIAWAVMVRGTDFRRAPATAT

SEQ ID NO: 232478 - protein, 342 aa, unidentified
MDLGDKTSRYCVLNGEGEVVLEGACPTTKKGMAQLFGAMAHCRVAIEVGTHSPWVSRELKKLGHEVIVANARQVKLISQSSRKNDKLDAQMLARLARMDPALLRPIRHRSEEAQKDLMTIRIWAALPEARTGLVNAARGLTKAAGERLASCDADQMNVGKLEELPADLRDSLKPLVAEVESLTGKIKECDRKVEQIARDRYPETKLLRQVSGVGPLIALTFILTIEDKERFEKSRDVGCYVGLRPKQSESGERQPELRITKEGDVYLRKLLVQGAYGVMAERAPDTDLKRWGKKLAGRGGKNAKKRAIVAVARKLAVLLHHLWVTGEVYEPLRNGHAMAKAA

SEQ ID NO: 232479 - protein, 317 aa, unidentified
MTHHDALYLGIDLSKEWLDAHLLPAGQTWHVATEPAALEAWVQALPGKLKLVVMEATGGLETAVAALLAERGLSVAIVNPRQVRDFAKSMGILAKTDKLDARVIALFAERVKPEPRPLKDEQQQELDELLTRRRQLVQALAGEKNRLGQARGKAVRASVEAHIDWLERQIKKVDERLDTMIKASPLWRAREDLLRSAPCIGPGTSRSLLADLPELGTLGRRQISSLVGVAPFLHQSGKWKGQSFCSGGRAGVRTALYMAVLSGLRFNPVIKEFYQRLTARGKRPKVAMVACMRKLLTILNAMVRENKKWNEYLLVHA

SEQ ID NO: 232480 - protein, 318 aa, unidentified
MNVIGLDVSKDTIDATLITTKGSKDYIKISNNIQGFENLINWIKTKRIRKIAISMEATGIYYEQVAEYLSALYTVYVINPLKIKEYAKSQFSNTKTDKADSKLIAEFANRHLDKLTPFRPSENPILYKLVNLLQQLKEQQKETQNRLHTAKDIYIKSTHEAIIELLEEKIDQTSKRIEGMIKQKESLNIEYQNLQTIPAIGKETAVILLRHLTDKNFETANKFVAFAGLSPKIEQSGTSVNKKGRLSRYGHRQLKRALFMPALVAYRMNAFPQLVSNLEAAKKPKMIIIVALMRKLAKIAFYIHKTKKPFDKARHQTV

SEQ ID NO: 232481 - protein, 428 aa, unidentified
MKESATSKLEAITNRTLVVGIDIAKKTHWAQAVDYRGILIGKAVRFSNDKKGFELILATIEQICKERGLESAIVGVEPTGPYWKALAYWLTGQGVQVVGVNTHHTKQAKCLDDNSPTKNDQKDALVIARLVKDGRYFYPYLPEGLYAELRVASVTRIGIIGRLKSVKNRIIGFLDEYFPEYASVFRCPLQGKASSHLLRSCPFPDDVIRLGEEGVLVEIRKAVKRTVGRKKAAELVQVAESSIGIRQGLIGARIRISALLAEHEFLVIQLNDVESEMERLLVETGYQELLLGIKGVGVVTAASFLGQVGDPLRFQSARQICRLAGYNLTEESSGQSKSRTHISKRGRKDLRNLLYQMAYVMVAVNPEMKRLYRYLISRPVNPLARKQALVVISKKVITVIYQILKTGKAYEAELVLGERRQEQIRLAA

SEQ ID NO: 232482 - protein, 391 aa, unidentified
MTYVGIDVAKDKHDCYIINSDGEILADVFTITNDQAGFNLFFQKLQSVAPDLGKVKVGLEATGHYSYNILGFLLDKGLATFVINPLHTNLFRKSTSLRRTKTDKVDARTIAAMLASDVVLTSYTATSYHNEELKSLTRYRFDKVQERAKLKSSVSRLVSILFPELEKLVPTLHMNSVYAMLSEFPGAKQISSCHLTRLTHLLSETSKGHYKRNKAVEIREAARTSIGSVMPAKSLELKHTIQLIKVLTEEIDEIETSIREVMDKNPSPILTIPGINYRMGAMILAEIGDFSRFDSPDKILAYAGLSPSTYQSGKLDNAYPHMEKRGSRYLRYALYNATKYVCIWDSTFAGYLAKKKAEGKHYNVAISHAAKKLIRVIFALQKSGMPYCPAT

SEQ ID NO: 232483 - protein, 312 aa, unidentified
MEAKFVGIDVSKARLDVDCLPVSTARQFSNDAGGIAALVEWLLGSGVERIVVEATGGYEIAVASALAAAGLPVVVVNPKRVRDFAKAQGVLAKSDRLDARVLALFGERIAPPVRALPEAAQRDLTELLDRRHQLVTMRAQEQARLATVLPVARGDVEQHIAWLDQRIRKHETVLLKRLRANEIWDAKVKLLDSVPGIGPVNVFTLVGRLPELGTLNRQQIAALVGVAPFNDDSGKRRGQRYIRGGRAEVRCALYMATLSAKRWNPVIAQMFERLIAKGKPFKVAMTACMRKLLTILNAILKSTQPWENRLAT

SEQ ID NO: 232484 - protein, 342 aa, unidentified
MHITSIGIDLGKTTFHLVVLGEQCRILVRKKLSRKQLLAYTANLPSALIGMEACSGAHFMAAAIRSQGHQVRLIPAQFVKPFLKSNKNDFLDAEAIAEAVTRQNMRFVPIKTDEQLDLQALHRVRDRLVQRRTAVINQIRGFLIERGIIFPKRPSNLRNNMAALLEDADANLSPRMRRLLEGVWQEWKQLETHITEADDEIERIASADASCQRLRQIPGVGPLASTATVAAIGNGAAFRKGRDFAAWLGLVPKQRSTGGKAKLLGISKRGNEYLRRMFIHGARAVLYRVKYDTGGFGRWVHQLEARAPRNKIIVAIANKLARIAWAVLFRGEGYQHQPIAAA

SEQ ID NO: 232485 - protein, 331 aa, unidentified
MKNVTQTIGIDVSKLTLDVCIRTTAVHKQFSNDTKGFKQLICWVIKQKSDLESSLFCFEHTGWYCLMLSYFLYENKYDYCCINPIEIKRSMGLRRGKSDKADAWEIANYAWLRRDDLIPSIPPAKNLLELQRMMALRDQLVKQLTACKNLNSGMQEITVNRSKDISLGILSKSMRHLEKQIKAVEKAMDGLISQDESMVANYKLSKTVKGVGRVLAVQMLLHTHNYTRFASPRQFSAYCGLVPYPYQSGTSIHGRNKIHPISDRKMKSLLSMSAISAIQHDNELKLYYRKRVEEGKPKMVVLNIIRNKIVSRVFATVNRGTPYVEINKFLA

SEQ ID NO: 232486 - protein, 312 aa, unidentified
MERIFVGIDIAKDQVDVHVRPTDERFQLSRDDAGLAGLVSRLQPLGPQLVVLEATGGYEIPVAAVLASAGVPVAVVNPRQIRDYARATGQLAKTDALDARIMALFAEAVQPEVRPLPTPEAQALGDLVTRRRQLVDMLGAERNRHHQARDLRLQRRIATPIRWLTKALAESEADLGTRIRSSPIWRERDTLLHSVPGVGDVTAYTLIADLPELGHLDRRKIAALVGIAPFNRESGHWRGRRMIAGGRPAVRRVLYMATLTAVRFNPAIAHFYQRLVAAGRPKKVALTAAMRKLLTILNAMLRDQRPWQPQSA

SEQ ID NO: 232487 - protein, 323 aa, unidentified
MQGKVSFQEDAMPVVYAGVDVSKEWLDVHLHPLGESRRFSNDKTGIRQLKRLLARHQPKSIVMEATGKFHRPAHRSLWLDGFAVAVVDPLRARMFARACGYLAKTDRLDARFLALLAESLRPPADTPPSPHVEALQELVNARSAAKCDITALQNRSKTATTALLRGELNRLLRRLEQHVERLDKEIERCVGEDPQLYRKAEILTSIPGIGRVTALALMAGMDELGSCSGKQAAMLAGLAPIANDSGARTGRRSIRAGRPAPRRALYMAALSACRYNPALARFADTLKAAGKPAKVILVAIMRKLLVLANCLLAHDRIWTPNPP

SEQ ID NO: 232488 - protein, 348 aa, unidentified
MRFYNTTHQHYCGIDLHAKSMYVCIINHDGETVLHCNMKTEPEHLATAIEPYRQDLVISVECLFTWYWLADWCAKENIPFVLGHALYMKAIHGGKAKNDRIDSEKIARLLKAGMVPQAYAYPAKMRATRDLLRRRIGFARQRADLIAHIQNTVSQYNLPPLGVRLGRKKDRLDIADHFPDPVVRQMVELDLNVIDHLDEQLRVLEQDLVLKAKAHDAGAYHLLRTVPGIGRILAMVILYEIEDIGRFPTLGQFVSYSRLVKCSRESAGKKSGYSGKKIGNAYLKWAFSEAAVLFLRGNPPAQNAIARVASKHGKGKALSILAHRLGRAVYVMLNIRQPFDEERFMKTL

SEQ ID NO: 232489 - protein, 388 aa, unidentified
MLLDHPSDGPTAIRTQFGAIFVSLELSRSTWLVTSLSPGTGEKMSRHSVTAGDTAKLMKLFAELKRKAAARTGQTYPMITIQEAGLDGFWLHRVLQQEGIESHVVDPASIATPRRRRRAKTDRLDGETLLRSLLAHKRGEPRVCAMVVAPSPEEEDRRRLCRERRTLIAERIVHVNRIKGLLFAQGIFDYVPMRRNRRAELDVLRTGDGRVLPAHLKVQISRELDRLELLLEQIAAVEREQDALLAASRPAGGTDGSDPVAMMLSLKSMGPNFAAVLWTEAFWRQFANRRQVASYAGLAATPWRSGGIEREQGVSKAGNPRLRTTMIQLAWLWIRHQPQSALTQWFNANSPRGRKRTIVALARKLLVALWRYVTAGVVIEGAVMKSAA

SEQ ID NO: 232490 - protein, 345 aa, unidentified
MTIVKTRAITGGVDTHADVHVAAALDPIGGLLGVQEFPATAAGYAGLLGWLGGFGTVALVGIEGTGSYGAGLARHVTAAGIRVVEVDRSDRQDRRRQGKSDPLDAVSAARAAQSGRAAGAPKGRDGAVEAIRALMVAKRSARSERVQTINQARALVLTGPEDLRTRFARHTAASLVSGLASLRPRPGDVVGYATRIALRELGRRAEFLDGQLERLDELITPLVAARAPGLLALHGVGPDTAALLLVAAGDHPERLRSEAAWAHLCAVAPLQASSGKVTRYRLNPGGDRQANHALWRIVLTRMSAHPPTLIYVERRTREGLSKKEIIRCLKRYVAREVYRHLRAAG

SEQ ID NO: 232491 - protein, 338 aa, unidentified
MQVMTMGIDLAKQVFQLHGVDAHGKTVLKKRLSRSALGPFMANLPPCRVGLEACASAHYWSRQLRAFGHEVRLMSPQFVKPYVKSQKNDSNDAEAICEAVSRPTMRFVSPKTIGQQDLQALHRIRQRRIHNRTALSNQIRGLLMEYGITLPRQVAQVRRRLPSLLEDAAHQLTSLGRELLADLYQELVALDRQLHEIEVRIKRIFAATELCRRLAQVEGVGPLIATAMVAAVGDPRAFKNGRQLAAWLGLVPRQHSSGGKHLLLGITKRGDRYLRALLIHGARAVVVRAAAKQDARSRWIADLQRRRGTNRTSVAVANKNARILWALMTTEQRYRRAA

SEQ ID NO: 232492 - protein, 362 aa, unidentified
MRTITIGVDLAKQVFSVCSADVAGRVQERRDLRRDAFIQWLPSVPTGTIVAMEACSGAHHWARRCQELGLQPRLMAAQFVAPFRKSRTAKNDRNDAEAIVTAARQGNMRFVPIKTVDQQVRLSWHRVREGYKAEALATSNRLRGLLAEFGVTMAQSDGALRRTLADLDALSLPSSLVELLRDVDAHWQQLRERIVQSDRRIQAHAKGDEACTRLRAIIGVGPITADAVVATIGSAQSFANGRQFAAWLGLVPMQHSSGGRSRLGRISCRGDGYLRTLLIQGARSSLQRAKAVAWEKATPEQRWIQDIERRLPFGKVLVAIANKHARQLWAMLARGEHYDADAWLKHPMVQRPASRRAQSATN

SEQ ID NO: 232493 - protein, 370 aa, unidentified
MKKNNTVAQSPKRASARKQGPITIGIDLGDKTSRYCVLAENGEQLSEGSVATTRKAMTQKFAGMRRCRVAMEVGTHSPWLSRWLTSLGFETIVANARQVQLISASSRKNDRMDAHLLARLARVDPQLLRPIRHRSEQAQADLMTIRIRAALVEARTSLVNAARGFAKAQGDRLPACDADAMGVEKMEALPAGMRERLRPLLEQVESLTEKIKTLETKIEQIARTEYPETALLRQVSGVGTLIALTFVLTVEDRDRFQKSRDVGCYVGLRPRQSESGQSQPQLRITKEGDRYLRTLLVQGAHCILSRRGPDTDLQRWGLKLAVRGGKNAKKRAIVAVARKLAVLLHRLWVNGEVYEPLRNSQPAPSSKQAA

SEQ ID NO: 232494 - protein, 331 aa, unidentified
MKYRFFVGIDVSKLTIDVASLSSENSQVIIHNIFSNDAKGIKEMADFLKKTFAGYHHNVTLFCMESTGMYCNALLNFFKEASANVWVENAIQIKRSSGIVRGKQDKTDAHRIAMYAYKNADTVRLWKPAREVMEQIRNLTSLRDRMVQTQKKLQTPIDELEATGENKMAELLAKSISKSLKAIDADIKEIELKITDLMNKDESLDHLFKLVTSVVGIGFVTATNLIIHTNEFTIMKDSRKLACFCGVAPFPHQSGTSIRGKTRVSHMANKKLKTNLHMASLSAVKFDNELKAYYERKVAEGKHKMSVLNAVKCKLLARVVSVNNANQGLIN

SEQ ID NO: 232495 - protein, 312 aa, unidentified
MEDNLILAIDLAKNSFQVCYMRINGEVLMNKAISRTSLIKLLTGKKKFSLVVMEACGGSHYWARLAKKNNYEIKVIPPRAVTGLQLKQKTDKNDAYAIGVAALLPHISSCSQMSEEEQGLQCLDRARALQIAQRTALSNQMRGFLMEFGIVLPKGITPLVKRIPEILEDAENELPDSLRQVLASQSDLLAMYTEQIEYYDGLITEHVSQNKICKKLSKLEGVGPIVALGLMVRLGNGKEFVRSRDASACIGLTPKQHSTGGKERIGHISKSCADKRLRSLLYQGAMSIVYKVTLRAPTTYPPHEPTGDITNV

SEQ ID NO: 232496 - protein, 411 aa, unidentified
MYYVGIDIAKSFHVVSIINETGTMVFKKPFRVENSLDGYSKFIDKLTKISSKTSEFIIGLEATGIYGENLWEFLNSKGYNVKLLNPFQTSRYREQITMKKVKNDNIDSLIIALLLKDGKFSSGYVTDDEYQSLRTLYRNRASIQSDMKEVKKRILTQVTVTFPELENFIDIFTVSGLALLNKYPTAKHYERSSVDRILKVFRHIQGNNFNQTKALEVLNLSQVSVYSGKAKDARAIAIRSSIRLLKMYQEELSIIENEITILLSKNSTSSKEDETTEPNTLIQNLKTIPGVADKTIAAILSECGDITRFNNVTKFIGYLGLFPTENSSGNSTKTGHLSKRGSSLVKHALYMSSISCLVHNSQLKQLYDTKRSQGKSKQEAIVVLSRKLATIIYAIFKYNTPYNPARVFAKS

SEQ ID NO: 232497 - protein, 349 aa, unidentified
MNNITYLGVDFHPYQQTIAFVDKFGEIKTRSFDHTDKSALRKFYQQFPNGTIVGVEASQSFQWFENLLFELHFELRIGNPTAIRKMAISPHKSDKLDAQHILDLLLSNRFPAVAPRSEKSRMILAWLNYRDSLVRQRTMIGNQLHAMARNFGLPRFQSQAKSAKSRMLGATDSADWLFLINSRFTCLENLTKEINLLEAKLRQEANQDERAKLLQTHSGIGALTALCVVHTLGDVRRFARPEQVTAFVGLAPLNKSSGERNRIGKISKHGSRLLRFLLGQAAQSSKDERLKSFYHRVSRRRGTPKAKVATARKLLVNCYLMLRDNIDYEEFRRRGEVGLPGKPGKLSAI

SEQ ID NO: 232498 - protein, 358 aa, unidentified
MQPEASREAKKMKYVGVDIGKWKCQRAFMSSSGTIIGEFTFPNDAEGIRNLASRLTAEDRVVMESTGSVWTTLYNNLEERRIPVTLANPLKTKAIASARIKTDKVDARILAHLLRSDLVAECYVPPHELREIRTLVRHRAGLVRMRSTVKNRVHALLDERGHRCAYSDLFGKRSLKWLRELELGSLDRLMLDNHLCHVESLNAQIGRVDVEVRRRASLDEDARLLLSLTGVDVYTALLIRSEIGDIGRFPDYKRLVSWAGLAPSLHQSGSVEIHGGVTKQGSKMLRWIMVEAARSAVRHDERMRRFYERVKRRRGDGKAVVAVACKMLKIIWFMLTRREPYMSRNERRYGVKLKSLEG

SEQ ID NO: 232499 - protein, 387 aa, unidentified
MQITDRSEAPTAIRTDLGAIFVSLELSRSAWLITSLSPGSGDKMSKHSVRGGDIAGLLKRFTQLQEKTQARTGNSFEIIVIQEAGLDGFWIHRLLQSEGIDSHIVDPASIATSRRRRRAKTDRIDGEALVRALLAYKRGEPRVCAMVKVPTPEEEDRRRLCRERKVLIAEQIEHVNRLKGLLFSQGISGYEPLRRDRWTRLEELQTGDGRLLPKHLKALVRRELDRLELLLEQIKAVEVERDALLATEETSAPAPGAILLNIKGIGPEFAAVLWSEGLFRHFDNRRQVAAYAGLAPTPWQSGAIDREQGVSKSGNPRLRTTLIQLAWLWVRHQPRSALTLWFEARVKRNGGRLKKTTIVALARKLLVALWKYVTVGVLIEGAAMKAV

SEQ ID NO: 232500 - protein, 298 aa, unidentified
MKYKFFIGIDISKRTIDVAIKTINVKELLHKQFENNKAGFTSMLKWIKQVTKAIEQELFFCMEHTGIYTLPISCFLSEKQIVYRLENPYHLKHSMGIQRNKNDKADSRMIAKYAYMHNEELIPTEFSGTEIIKLQNLLAHRERLIKTRTLYKVAPKELSEFSGKEVHAFISDSSLDIVKLINEKIKLTEQEIETLVEEHEELKRNFELARSVKGVGLVIAAYMLVYTQNFTSITNARNFASYSGVAPFGERSGTSINKAPHVSHLANKRMKSLLNNGAWSAVKSGLMDKIEAKIAIFY

SEQ ID NO: 232501 - protein, 385 aa, unidentified
MAPIRMPEAVIGLDVGKSSHWACVATRDGEVLLSTPVANREDDLDSLFGRFPDALVVVDQSRNIGALALARARAAGMSAAYLPGLAAHGAARLFAGDAKTDERDAMVIAKTALGIPDALLPVGDPGPTIAAARALAAQRNFLTCENTRNKNRLRSILLESCPAFEALVDLSDGPQLRLMASLGGAWSVADAGTRRAAALTRGAARGKIEALVRSTTSSTRPDASVVAAEDRAVKLLARRISENSAEIEAITAEISALLEGDDTYRCLLTVPGIGPKTASELAISIDIEDFPSHDRLASYCGLAPRNRQSGTSISSVTASRQGNKRLKNLLIFSCNCLTRTEGRWGDYYTRCRERGMSHGKALKALARKRLKVIYAVMRDRVPYAA

SEQ ID NO: 232502 - protein, 408 aa, unidentified
MNPLFVGIDVSSRNNVAYLMKPDGSKHSSFSVQNNLGGAKLLSERIVSALRSMQLSDVVIGLEATSIYGDSLVYALREDGRLGQFQRKIHVLNPKQVRKFKEAYPDLPKNDFVDAFVIADHLRFGRIAREVYMDDYRYKALQTLTRARFEVIQNLTREKQRFANYLFLKCSGMAQDKDIANSSSTTIALMERFETVDDLANSDLEELTAFVTETGRGRFADPAATAKAVRAAAKGSYRLPKTVNDTVNQAMSVSIASMRALKEQVKVLDKAIEQQFEIIPNTLTSIPGIGKVYSAGIIAEIGDIHRFDSQASVAKFAGLVWHKNQSGEFEAEHSRMIKSGNRYLRYYLLEAANSVRRCDSEFRRYYDLKFKEVNKYQHKRALALTARKLVRLVFRLLKDNRLYIPPES

SEQ ID NO: 232503 - protein, 351 aa, unidentified
MDHFAGLDVSVKETSVCIVNDTGRIVREVKVASEPEALLAVLKNPAYHFERIGLEAGPLSQWLFSALAEAELPVVCVETRHMQAVLKAQINKTDRNDARGIAQMIRVGLYRPVHVKTLRSQKLRMLLTHRKLLQSKAIAIENDLRGTLRNFGLKVGMVGKVRFEARIQELVENLPDLAELVEPLLIVRRALREQIVILHRRLLAIVRDDEVCRRLMTTPGVGPVVALTYRATVDVPARFRKSKSVGAVFGLTCSKYQSGEIDRSGRISRCGDEMMRAMLYEAAQSMMRSKKWSWLKAWAMQIARRRGMKKAIVALARRLAVIMHRIWVDGTEFRWTRESHSSMKTVQDQTR

SEQ ID NO: 232504 - protein, 343 aa, unidentified
MYYIGLDVHKRTISYCVKDAAGRVHREGKLGSTRRDLDAWVRTLPQPRMIAMEATIFTGWIYDYLLPHAEKVKVAHPRMLRAIALAKKKNDRIDAGKIADCLRCDFLPECHMAPTAIRDRRRVLRYRSLVIKQSVQMKNRVSGLLMETGVSYNKQRLHKVGYFRDLLTHNQEVSDSIRPLLKICREQIERSQKLDYALVSRLERDPLLKDRLERLRTVPGVGPITALTWVLEIGDVARFTSIKEAISYCGLCGEEKSSADKVMRTPISKQRNKHIQSVLIEAAKLAPRNSHELAMVYNKELLRGNPNRATLAVARKMVAYMLAVERRQQDFVPAEEFRPTAAA

SEQ ID NO: 232505 - protein, 463 aa, unidentified
MHKKTVKVCMLIRQADGQPHKEFRTYGTTTRELLELADWLKEQGCTQVAMEGTGVYWKPVYNLLEGSFELLVVNAQHIKAVPGRKTDTKDAEWIADLLQHGLLKASFIPGAPQRELRELTRYRVRLTEERAREVKRIQKTLEDTNLKLGDVVSEVMGKASRMILGARADGESDPSRLAAFALGRVRADQQQLEAALTGHVDDHHRFLLREHLTQVEHLERAIERVTAEMARRFTPAPSPDEAEPTQQDAEETQAAKAGPPPTAQELPSSPKVTLSWAQAVVLLCSIPGISERAAYAILAEIGIRMQQFPTAGHLASWAGVCPGNHESAGNRLSGKTRTGNPWLRRLLIQAAHAAARQKNGYLAAQFRRIAARRGANRAGMAVAHSILVILYHLLSEGTSYEERGETFFEEQERQAAEKRLVRQLTRLGYQVELHPLAQAARMLKQPISGCCSIASPCVRPVRA

SEQ ID NO: 232506 - protein, 392 aa, unidentified
MVISVGIDVSKDKHDCFIVSAEGEVLADVFTIPNNMDGFHCLLQRIQTCATPQDKIKVGLEATGHYSYNLLGFLLDNGLPTYVLNPLRTNLYRKSLSLRKTKTDRVDARTIASMLLSDAGLKPYTDTAYHNEELKSLTRYRFDKVKERAKLKSSISRLVCILFPELEKLVPSLHIASVYALLAEFPGAKQIAAAHLTRLKALLETASKGHYKRDMALEIRDAARNSIGSWMPAKSLELQHTIRLIRELDDEIVEIEEQIQAIMDELNSPITTIPGLGFRMAAMIFAEVGDFTRFDSPDKLLAYAGMSPSTYQSGQLKNCYPHMEKRGSRYLRYALYNATKYVCHWDPTFAAYLAKKRAEGKHYNVALSHAAKKLVRLIFSMEKSKRPYCLAA

SEQ ID NO: 232507 - protein, 371 aa, unidentified
MLHSDYTIGCDAHKHFSLFVVLGGSGDLVQRTRVGHVPGAIGAFLSQFAEGTPVALETVGNWYWIVDEIEEAGCIPLLAHAAKAKVMMGNVHKTDKLDAQGLATLLYLGKLPSVWIPPAEVRDERELPRTRMTFAKHRTMMKNRIHSTLAKYALSLDTASDIFAPKWRPELEATLQQLPDETGRCALQQLQILDALTDHVKQLEDRILDCIQTTPTIQLVQTVPGPAKVLAILIDREVGSIDRFSAAKHFTSYCGLVPKLSASAGRAHYGRMVKQCNTYLKWAFIEAANVIVAHRDHPNWRRKYVVHLYESTRRRKGHSVAVGATARYLAESTYWVLKKSEPYREPPHWAPAGKRSLVSLSQEQARAQHGS

SEQ ID NO: 232508 - protein, 370 aa, unidentified
MHKPTTLFVGLDVHKDSISVAHAPEERAAEVTFVGPIGTRQYDIDKLVRRLHSKASRLVFAYEAGPCGYVLYRYLTEKGLDCLVVAPSLIPKKPGDRIKTDRRDAVELARLLRSGDLTPVYVPSIEDEAIRDLSRAREDAVKDLKAARLRLKSFLLRLGLTYEGRADWNDAHLRYLARVVCPTPAQQIVFQEYLHAVTEIADRLKRLESELREHSSSWRLSPLVEAFQALRGVQDTVAITTVAELGDITRFDSPRQLAAFVGLIPSVHATGNSRRLGSITKTGNGHARRALVEGAWAYRYPAKVSEAIQKRLENLPQPIQDIAWKAQVRLCKRYRRLIARGKHPNVAVTAVARELAAFMWAIAREVPITA

SEQ ID NO: 232509 - protein, 387 aa, unidentified
MYYIGIDISKFKHDCAVIDDSGEIVTPSWSFTNDAKGFSQLKLLLNSLDTETRIGLESTGHYGMNLKLFLESNNFSFMEFNPLLINRFVKSKSLRKTKSDSIDCMMIAHYLMTVEYKPYPSSFYHTEKLKSLTRFRDSLIRLRSRQLVELTNILDKVFPEFKPFFGSRFSVTALYILSNYSSPEKIANMNSKSYEALRKLSRGRFSTVDFAKLKQLAKNTIGTTEDYLLLQMQIVLDIYRQLDSKVDETEVSIKECVSDMNPPMLSVPGIGIESAAVILAEFGDFSKFKNASQMLSFAGLEPGYFQSGTSETTGKMVKHGSSYLRYALMNCVQTVVNYEPTFAMFYSKKRAEGKPHRVALSHVVKKLLRVIYTLQTKNIAYDADFVR

SEQ ID NO: 232510 - protein, 341 aa, unidentified
MTEVSTIGLDLAKNVFQAHAASASGAILFRKKLRRDQVLAFFAAQPRCLVAMEACASAHYWAREIAKLGHAVRLIAPTYVKPFVKRQKNNAADAEAICEAAQRPTMRFVAVKSEAKQASAVVFRTRDLLVGQRTQIINAIRGHLAEYGLIAPQGPSHVDQLIAQIEDPSSSIPDPARSCLAVLVETLRALQGKIAALDTEIAARAKRDDGARRLMSIPGIGPLIATAIEALAPPVETFRSGRDFAAWVGLTPLQRSTGAQERLGKISRMGERTLRRLLIIGASGVVRWARRKGVPAGSWLARMLARKPPMLVIVALANKMARIAWALIAKGGSYRAPAVAA

SEQ ID NO: 232511 - protein, 275 aa, unidentified
MNQYIGLDISLKDTAISIRQEGKRIWRGKCPSDPKLLAQLVRKHAPHAKRVVFETGPLSTWFYHALTAEGVPAICIEARHAQKVLNETLNKTDANDADGLAQLAEAGFYKAVRVKAFDSMLTRTLVAARNQLLSISTQLSNQIRGLMKTFGLIVPKGTGRIFDGNVRNLLDGNDGLARIILPLLEAWRDIRRRGADLDRQLVAAARESQATKLLMTIPGIGAVTAVSYVAAIEDPDNFRTSRSVGAWLGLTTRRYQSGEVDYDGHISRRGDNHLR

SEQ ID NO: 232512 - protein, 390 aa, unidentified
MFFLGIDIAKLNHVASLVSDNGNIVFSNFMFKNSLEGFLSLIDKVKSIPKDDIVIALEFTGHYSDNFVNFFFNRKFNVTLVNPANVANFRKSYGRDSKNDRIDSINIAKMLLSREYSLVTQSDIEYLSLKKLNRIRDSLVKQKSKCKILLTRNLDSIFPELQYLLPSGIHSKAVYALLKKYPSSEEIAALEIDVLTNILKTNSRGHFCEKTAYIIKSQAKSSVGFEDISLSFHISQLISSIELLEEQIRNTEKQINAIIEKLKPVILSIPGISNVACACILGEIGNISRFRSPSKLLAFAGLDPKVRQSGQFRALSCRMSKRGSKYLRYSLIYTAWNAVRNNEVFSNYYALKRSQGKNHYKALGHVAHKLVRVIYKLMKDNIPFNAEQLI

SEQ ID NO: 232513 - protein, 342 aa, unidentified
MQTKLYCGIDLHSSNCYLGIIDQTGQRVFHRRVKNDLELILKYLAPFREAMESMTVESTYNWYWLVDGLIDSGYSVKLANPGAIQQYSGLKHGDDKTDSFWLAELLRLDILPTGYIYPRAERSLRDMLRRRSRFVQQRTAHILSIKSAMSRHLGKTQSTSSLLMLDSEALEELFGSGTDDLQMTIGLSMSTVRFMSEKIKQLERYAEKKIHLRDDYKKLLNSPGIGKILGLTIMLEIGDISRFEKVGNFTSYCRCANASRFSNGKKKGNNNSKNGNKYLSWALVEAAHHAVRHYPAIQKFYQRKLAKKNHILAIKATAAKLSKALYFMLTNDEEFNMKRAFC

SEQ ID NO: 232514 - protein, 363 aa, unidentified
MFTERTSVGLDVHARSVAAAAIDGVTGELLQSKLTPSFEHIRSWVGDLPGPVAVAYEAGPTGFGLYRSLTAAGIRCEVVAPSKLQKPAGDRVKTDAKDAIHLARLLRIDEYTSVAIPTIDQEAARDLVRAREDCRSDLMAARHRLSKLLLRHGIVYYGGKAWTGRHDQWLRTEALRQLTTRATRLAFDSGYETVHAVNARRGRLDAVIEEMAADSEFTPVVRRLGCLRGIATLTGFALAVEIGDWHRFTGNTIGSFVGLVPSEHSSGSTKSQGSITKTGNGHARRLLVEAAWHHRSRYTVGATLRARWDLAPAAARVRGDEGNRRLHHRWVKFIDRKKRNTIADVAVARELAGWCWSLAVMDD

SEQ ID NO: 232515 - protein, 376 aa, unidentified
MNKVRFVGLDVHADTIAVAVAEPDGEVRALGTIPNRPDSIRRLVKRLGPPDRLRMCYEAGPTGYVLYWQLTGLGVPSDVIAPTLVPTKAGDRVKTDRRDAMKLARSYRAGDLTPVWVPDATHEALRDLVRAREAAKKDQLRARHRLGKFLLRTGRRPPLTMKAWTQQHLRWVKTVQYDHAAQEATLQDYLQEIEHVADRIARLEQAIDEAVKSVPERMRAVIAALQALRGVAQVSAVTMVAELGELSRFASARQLMSYTGIVSSEDSSGTRTRRGAITKTGNAHLRRIVVEAAWAYRHRPGLGAALHKRQATVSPEIKAIAWKAQHRLHTRYRWLMAKGKHKQQVVTAIGRELLGFIWAIAVKVEAQRSDGQATAA

SEQ ID NO: 232516 - protein, 342 aa, unidentified
MEYYVGLDVSVKLTAVCIVDGAGKVVREAVLCTEPSSLASFLEGTGLGFVRVGLEAGPLSSWLHDGLEAAGLPVVCVEARHMQSALSAMRNKTDRNDARGIAQMMRTSWFRPVHVKSAESRELRLLLVNRRMLVTKRRDIENAIRGTLKVFGLKVGQVSRLRFEARVLELLGDRPRLLEMVAPMLLVREALMEQYHVLHRKLLETVREDAVCRRLMTVPGVGPVVAAVYRSGVDVAERFDRSRSVGAHFGLTPRTYASGEIERTGRISKCGDELVRTSLYEAANILLVRVKKWSALKAWGVRVAKRAGAQKARVAVARKLAVILHRMWVDGADFRWGKAAAA

SEQ ID NO: 232517 - protein, 361 aa, unidentified
MSFEPTTVGLDVHARSTTACAIHDPTGEITTTKLTSDHAQILNWLHTLPGLVRAVYEAGPTGFALARTLNDAGIDCVVAAPSKLQRPSGDRVKTDARDALHLARLLRLGEVTPVRVPTPAQEAARDLSRAREDARADLMRARHRLSKLLLRQGMLWEGKNTWSRAHHDWITRQRFTPPALQAAFEAAHEQVLLTKDRRDRLDQAITATAAEPDWAAVVGRLRCLRGVSTTTAFGLATEIGDWHRFTGSSIGAYVGLVPSEHSSGTRRVLGPITKTGNTHVRRLLVEAAWHHRRPYRHVTQEMRQRWEQAPATARARAHAGNHRLHQRWVRFDERGKKPSVAVVAIARELAGWCWSLAVTEE

SEQ ID NO: 232518 - protein, 381 aa, unidentified
MKKISTVQSFGNEIFKEQKLTIGVDLGDRWSFYGVLDEAGKIILEQKVPTTPEAMKQTFGKIPRSRIALETGTHSPWVSRVLTELGHEVIVAHAQKVQLITKSNRKDDRHDARTLARLARIDPELLGPVRHRSVQAQIHLTVIRARAELVSARTALVNAARGLVKSYGERLPKCGTYQVSRELAAELSTELRDVLEPLLKEIESLNERIKEYDERMEKIAKEVHPEVSLLKQVKGVGTQIALTYVLTIEDPYRFLKSREVGCFLGLRPGRRNSGESEPQKRISKEGDRYLRTMMVQGAHYILGPFGEDSDLRRWGLKLAERGGKNAKKRAVVAVARKLAVLLHRLWVSGEVYEPLRNSQKAMRAWHREFRSEQLSSTAESR

SEQ ID NO: 232519 - protein, 412 aa, unidentified
METLVERGCGLDVHQATVVACLLMVRKDGKVQKQVRTFGTTTRELLSMREWLLSQGCTHVAMESTGVYWKPVYAILEGAFQIVVANAQHVKKVPGRKTDVKDAEWIADLVCHGLLRQSFVPPKPIRELRDLTRYRRKLVESQSAERNRLLKVLETANIKLASVATDVFGTSGRLMLRALIEGKNTPEEMAELAKRKLRSKISQLELALEGKIEDHHRFLLKLQLDRLERAEGDLAVLEEHIQEKLEPYAAQLALLDEIPGVDWTLAAVIIAELGVDMSVFQSVSQLASWAGVCPGSNESAGKRKSSRIPKGNVYLKTALVEAAHAAARTKGSYLRDKFYRLKARRGYKRAAVAIGHKILVSIYHMVSQNVSYNDLGDLYLDKLNKNHLTRNLVHRLERLGYSVTLAPQQKAA

SEQ ID NO: 232520 - protein, 391 aa, unidentified
MVCVGIDVAKDKHDCCILDSEGTTLVDCFTIPNNMDGFKSLLQTIQDCSQKSDKIKVGLEATGHYSYNILGFLLDNDLPVYVMNPLHTNLYRKSLSLRKTKTDRVDAKTIATMLLSDVDLKSYTDTAYHNEELKSLTRYRFDKVQERAKLKQSVSRLVTILFPELEQLVSSIHGTSIYALLSEYPGAKQISEAHLTRLANILVKTSRGHYRKDKATHIRDAARTSIGSVMPAKSLELKHTIKLIQELTSEINEIEDAIRKIMDELKPPILSIPGMGFHSAAMILAEVGDFSNFNSPDKVLAYAGCSLSTYQSGKLTNCYAHMEKRGSRYLRYALYTATKYVCYWNPVFTEYLTKKQAEGKHYNVALSHATKKLVRLIYALQKSGKAYLAVT

SEQ ID NO: 232521 - protein, 529 aa, unidentified
MIPSVHLSPGQRVEVTEASVVLRARELGGSREAAATTLVARLEVTPFGRLLSSPPSRARCSGELYLEEGILKRDRRKEKRRPSSLVAINWHAAGSDIGAQEHWVAVAPDSAPQPVGRLGACTADLEAIAAWLPQCGVTTVVMESTGVYWIPLFELLEAGGLAVVLADAREVQRAPGRPKSDVHDCHWLQRLPPYGLLAGAFRPPEQVCVLRSYLRQRAMLVTYASQHIEHMQKALTQMNITLQPVISDVTGVPGLTSLKAILAGERDPQKLAPFRDRHCQQSEAEIARALQGNWRAEHLFALQQAVELYEFYHRQIPAYDRQIEAHLQTFTDKSAGKVLAERPRKRKRRATEPRVEARAPLFRLSGGDLTAIEGIDENTALVLLSEIGTDLSRWPTENHFASWLGGGPHHKISGGKVLSRQVRPSANRAATALRLAAQCLHHSHRALGAFFRRLKPRLGAPKAVTATAHKLARLVYRLLKYGEDYGAHGMEEYEQAYRERTLQNLMRKAKALGYKLLPTTEPAAQEALA

SEQ ID NO: 232522 - protein, 306 aa, unidentified
MLACGVDVSKAALDVAIHGSSQVRSFANSIAGFRKLAAWLLPQAPSQVVLEATGGYEQAALDALFLSGLPMVRVNPRQVRDFAKASGQLAKTDRLDARVLAHLAATIPLMRYQPKSDWQRRLTEWHQRRGHLVEMIGAERQRLERITDSALRTWSRRHLASLQKEVRRMDIEIKSQVAAQASLDPLRSLKGVGPVLQTTLACQLPQLGTLDGKAIAKLVGVAPLARDSGLMRGRRHVWGGRSEIRAVLYMATLTTIRYEPKLRDFYHGLRARGKVPKVAIVAAMRKLLVILNARMRDALASQPQVA

SEQ ID NO: 232523 - protein, 485 aa, unidentified
MSSHVISLWRVVTSGEFLVSTGGRALVLLDANLVPPAAPPSAPSPAARVQVGIDAAITANHHVAVRRLGADGTVTTTRFVVPPTLSGLAMLTRRLADCPGVLAVAEPTSMTWLPLAAAVSDAGGALALVGSRHAARLRGAISGKNKSDVIDADVLARAGEVFDLVPLRLPGPGQLALRRAVTRRGVAVVDGNRCLRRLISLARWAFPDVWNAFGGSLPTAKTVLARWPHLEALAAARRSSLTAVVAEHTRGVPDVPARVEAIRAGARDWAAFWAGRADLDALAWDVSEYLSDLAVAADRVERATVAATAYWERLYGQDELLTSLPGMGPVTAPTVRAFLGDAAGFPTAKAAAGYVGITPSNWSSGTVTQPGRAITKEGPAVLRLAFYQAANAARRGDPQLAACYHRLMSERGHCHTSATVAVARKLVERTWTVLTRGEAYQLRDLEGQPITERAAKALVASRFTVGADVRARARSAATHRAKLTR

SEQ ID NO: 232524 - protein, 342 aa, unidentified
MDHFAGLDVSVKDTSICIVDDTGRITREVKVASEPGALLAVLMNASHRFKRIGLEAGPLSQWLFSALAEAGLPVICVETRHMRAVLKAQINKTDRNDARGIAQMMRVGLYRPVHVKTLRSQKLRMLLTHRKLLQSKAIAVENDLRATLRNFGLKVGMVGTARFEARIRELVENVADLVVLVEPLLVVRRVVREQIGILHRRLLAIVRDDEVCRRLMTVPGVGPVVALTYRATVDVPARFRKSKSVGAVFGLTCSRDQSGERDRPGAISRCGDEMMRAMLYEAAQAMLLRSAKWSWLKAWAMQIARRRGMKRAIVALARRLAVIMHRIWVDGTEFRWTRQVTA

SEQ ID NO: 232525 - protein, 314 aa, unidentified
METELRVGVDVSSTTLDVAWSDGREEQVANHHALVEKLVLKMKEAGVSLVVFEATGGYERDLHCELSRADVPAAMVNPRQVRDFAKAMGRLAKTDRIDAKTLCDFAMRVRPEPKPAPSEATQELQALARRRAQLIEMKQAEENRLIHALGKVVTKNLKAHIRWLETEISSVDGGIDKHLKGHDEWKRELTLLDSVPGVGRVTAFTLLSELPELGTLSRKKVAALAGVAPLNRDSGNMRGKRCCWGGRSEVRAVLYMATLAGLKHNPEIRSHFDSLVARGKGGKVAMVACMRRLLTWLNAIVASSTPWNPILVAT

SEQ ID NO: 232526 - protein, 337 aa, unidentified
MSMYCGIDLHSTKSWVAILDDQLKVVRERGLKNNLEDIVRLLEPYREEIEGVAVESTWNWYWLVDGLMGAGYRVHLTNTWAAKQWDGLKYTDDRHDARWLAHLLKLGILPEGYIYPKEERPVRDLLRRRAFLVRKRTSFLLSMRGAFECRTGMRTNSNDLKKWEAEDVEAYLDDDMSALGITCLLEPVKALTAQIRTIEKEALKRARLRDEFAPLLTVWGIGKILALTTMYEVGDIRRFRKVGNFASYCRLVDTARLSVGKRKGSGNRKNGNPYLSWAFSEAAHHANRHHEEARKYFQRKKSKTNGIIAIRALAHKLARASYHVMRDQVDFDSTKLF

SEQ ID NO: 232527 - protein, 410 aa, unidentified
METVVERPAALDVHKEQVTACVRVPVGGGGREQHVAEFKTTVRGLLALRDWLKAHGVTQVAMEASGVYWKPPWAILEDEFECLLVNARHVKQVPGRKTDVSDAAWLCQLLEAGLLKASFVPPKPIRSLRNLTRYRKAQIGERQREANRLHKILEDTGIKLDCVATNILGASGRAMLDALVAGTTDPAVLADLAKGRLRQKLPALREALEGRFDAEHGIVVSAILAHIDFLDEQIDGLSEAIEEQIRPFAAAVELLCTIPGVQQRTAEVIIAEIGDDMSVFPTAGHLASWAGLCPGNDESAGKRRSGRTRKGSRWLGIALTEAAQANTRSRDTYLAAQYRRLRIRRGHRRAIGAVRHSIIVACWHMLTTGETYNDAGGDYFTRLDPDKQTRRLVAQLERLGHTVTLQEAAA

SEQ ID NO: 232528 - protein, 392 aa, unidentified
MNTLRVAVDVGSRFHQVAIGDDSGKLLDEFQIDHGRVGFEQFFARVSHHAATDVRVAMEGYNGWARPLDQQVLARGWRLYNVNNLKLARYKEIFPAPAKSDAIDSHRMLELFGFDEQRPLGRDVLQEVTTSTTTQRELKYLTRRRRQQVADRTTRLIRLQGDLLAVCPDLLALTRSVNNLWFLRLLTCRDRLTALPRLHAKTVTSIRGIGAKTSPRILAWQKTATFGGSIDLVDTDIVADAAAIVALNEQIKAIEMRIEATALECPMASRLRTMPGFGVIGTAELSGEIGSLYRFDTEASLALYLGMAPLDHSSGLRHRGKRPKCVNARCQAALMTSTVRHIACVPESRAYYDRKCAQGKRHNQAVRALGRHLVRVIWRMLTDGRDYQARDE

SEQ ID NO: 232529 - protein, 372 aa, unidentified
MNYNTVYVGMDVHKESFTLCSCKYEDEKASHYQRTPASYKNVLRYLAFLRTIYGEYTRFVCGYEAGCLGYSLYHQLENFNVECVILAPTTMLEQRSKRRIKTDKRDAEIIARSLAQHNYSPVHIPTETDNQTKEFIRMRDDHKAELKKIKQQILSFCLRQGYQYDGSGNWTAKHVKWLRSLKPAGLYKEILDEYLLTYTILTDKLNRLDQRIEELASKEEYKESVSKLTCFLGIKTHTALSVIVEVGDFQRFVSARKFAGYLGLVPGQHSSGDDRNGLGITKAGNTHVRRLLVESAQSYTRGKIGYKSRVLRSRQAGNSPQVINYADRANERLRRRYYKMVLKDGKKYNIAKTAVARELACFIWGMMTDNIY

SEQ ID NO: 232530 - protein, 405 aa, unidentified
MYYVGVDIAKEKHYVCILDDAKELACKPFWIYSDILGLRELLKRLAELSLDMDDFIIGIESTGAFSENFYSYITDADYKVILLNSYQTSKYRDFSTLKKIKNDSIDAYVIAELLASGKYKASYISNEDYHNLKVLNRLKKSLDDKIKTIKREISTVVATVNPEIEKVFPNIFTKTAIAIIKSYPTAMDISKATPEKLTKIFRHIKGNSFNLEKAKYLIELAKSSIYTGRANESRALMIKTNIKILELYIQERDEVEKQIQILIDNQLDDDSSNIENLKSIPGVSNKTVTAILGECGDLRRFESAKAFIGFLGLYPTLYQSGKSLSTGTLAKRGIPIAKHALYMAAVSSVRHNTELNKIFRDKLSAGKSKKEALIIIAKKLASIIYSLFKYDQPYNPNRVLIQHKR

SEQ ID NO: 232531 - protein, 347 aa, unidentified
MNFYTQQHKHYCGIDLHAKAMYVCLLDQKGTKLVHKNLPTTPDAFLRLIAPYREDLVVAVECIFTWYWLADLCQKEGIVFVLGHALYMKAIHGGKAKNDKIDAHKIAVLLRGGMIPQAYVYPAEMRATRDLLRRRCHLVRKRAELLAHIQNTNSQYNLPEIGKKLAYKANREGVEEHFPDPSVRKTIEMDVSLIDHYDQLLGEVELYLTRSAKAHDSQTYARLQSVPGIGTILALVILYEIQDIARFPRVQDFVSYCRLVKCAKESNGKRLGTSGKKIGNVHLRWAFAEAAILFLRQNHPGKEYFTKLEHKHGKAKALTVLGHKLARAVYYMLTREQPFDLQRFVSA

SEQ ID NO: 232532 - protein, 379 aa, unidentified
MKTVRSFVGMDVHKATIAISIAEDGRSGPIRFLGVIPNTADDVAKLAKRLSNHGELDFCYEASGCGYGIHRQLTALGHKCMVVAPSMIRRKPGERIKTDRRDSEKLAILHRSGDLTPVWVPDTTHEALRDLVRARVDASMHLMRARQQLLAFLLRHGRSYPTGKHWTQRHRSWLAGQTFQEHAHGTVFQDYLETVWTAQQRRDALIERISAMVGSWSLGSLVEALRGLRGIDMISAATFIASTGDLSRFEFPRLLMGYLGLVPSEHSSGGTIRRGGITKTGNREARRMLIEAAWSYQYPARIAKDKAEILIRLPKKIRDIAWKAQTRLCIRYRSMIARGKKPTVVVAAIARELAGFIWAIGQEVRISMTSCQLVEATAS

SEQ ID NO: 232533 - protein, 369 aa, unidentified
MKERGLRSSWLPFMLGVLNANRFEEAPVSESYEGRQFVGIDLHRRRSVLVRKTETGETLETVRISNDPQYLRQVMARAGEAPEVVLEAAYGWYWAADTLAELGAQVHLAHPLGVKMFSYRRVKNDERDAGDLADLLRMGRLPEAWIAPPQTRELRGWVRHRAKLVALRSSVKSQVHAVLAGAGVQVRMSDLFGPGGLRLVAAAGLSVESRARVDSALRLIRNLDFEIELFGKLVTNRLRTHPGYRAIQQIPGVGPLLAAVFVAEIGDITRFPGPAQLASWAGLTPKHHESDTTVHRGRITKQGSRLVRWAAVEAVQRVGAHTHTGAVRERVAARRGRNIGAVAAARKLLELVYYGLRDGEIRALARATA

SEQ ID NO: 232534 - protein, 416 aa, unidentified
MSGKREIACGVDVHNKFVMATILSSDGLKLQSRFETSLEDLLKFKSWLKENGCHKVALESTGNYWLPIYHVLEGHVNFILANAYQIKHIPGRKTDTLDSEWIAELCLKNLITPSRIFTQDHRELRSLTRARESLIKVRTKIKNRVTHELEAACIKLSSVIADVFGKSGRHIVDGLLNGMDLEKILESIPSGRVRKNKEEIRGIIQANLSTSQIFLLRSHLNTIDVLTRQIKEIDAKISDQISLRNEDMKIALSMPGMGFISASTILAEIGDFRDFSSANKLAAYCGLVPSVYQSAGKLINGHITKHGSPHIRRIIIEVAHAIILTKKLSKLKKFFLRIKARRGAKIGIVALARKVLCILYHLLIRREFYQDDLLSEPRCIKNPRLNTIKAMDLDEMIRTIVRAGYEVRKNECLESG

SEQ ID NO: 232535 - protein, 311 aa, unidentified
MTEYTIGIDISKSHLDVFRLEDESARRFENSAAGFRALVKWLGKGVVARIVFEPTGPYHRAVEKALSGKFPLVKVNPLQARRFAQACGTHAKTDAVDARMLAHMGAALDLEPDALVSDKLHDLRDLQVARTGLVKERTRLRNRAHVQTIALLKRQTKTRLAQVERHIAELNAAIAARIADDQSTARKRDILRSIPGIGPIAAALILTFLPEIGTLERKQAGSLAGLVPYSRESGTWKGKSFISGGRKPLRDALYMPALVAMRFNPDLKAKYAQLRKAGKPAKVAIVTLMRKLLETANALIKADRLWVEKTA

SEQ ID NO: 232536 - protein, 420 aa, unidentified
MSEMFDWYVGIDWASEVHQVCLVDDRGVVRGERAVRHGGEELAALAAWLIATTGAAPERIAVGIELPHGPVVESLMERGFAVHAINPKQLDRFRDRFSVSGAKDDRRDARVLGDSLRTDTRCFRRLKPDEPRLIDLREQLRMTEECKHERIRLTNRMREQLWRYYPQMLELSDDLSAAWFLDLWALAPTPAKALRVRESTIAKLLKKHRVRRFDAAEVMRRLRRPALTVAPGTVEAASVHVSALRDRLRLVTRQIAAAERRVDRILTELAASPEEPEAAPGQPPQQSDVTILRSLPGVGRIVCATLLVEAGGPLKAGDHQALRALSGVAPVTRRSGKSCIVLMRQACSQRLRDAVYHWSRVAVQCDATCKARYQALRKAGHTHGRALRTVGDRLLEIACAMMRSRSLYDPQRTARELQAA

SEQ ID NO: 232537 - protein, 356 aa, unidentified
MNSLTDLREVVDVVIGVDTHVHTHSAAVVDAATGGVLDEITVEATAQGYAELVEFANNHATLRAWAIEGTGGHGAGLSRHLLEMSEIVIELDRPKRAARRNGAKSDPLDAIRAAREAMARPRLGTPRTGGERQALSVLLAARRSAINASTEAQQQVFSLVIAAPEPIRVRFRGQKLAAMLNTAANLRVHASWDTETTSTVVALRTLARRAHAMLKEARELQKAIVAIIRSWRPDLLEEFGVGPIVAATVLCAWSHPGRIHSEAAFAMLAGVAPIPANSGQVTTRYRLNRYGDRQLNNALHTVVQSRIQYQPATRDYVARRTAEGKTGRETKRFLARYVARDLYRVLETRPHLLDEA

SEQ ID NO: 232538 - protein, 348 aa, unidentified
MHNTPTLFIGLDVHKDSIAVAYAPEERSAEVTFLGPVGTRQADIDKLVRRLQSKAPRLVFAYEAGPCGYPLHRYLTRKGLDCLVVAPSLIPRKPGDRVKTDRRDALQLARLLRSGDLTPIYVPSVEDEAIRDLKAAQQRLKSFLLRLGFNYTGKANWNDAHLRYLANVVCPTPAQQIVFQESLRAVSEQVDRLQRLEAEISEHITSWRLYPVVEALQALRGVQQTVAATTLAEIGDLTRFDSPRQLAAFLGLIPSEHSSGEKRRQGSITKAGNGHARRALIEGAWAYRFPAKVSELLQKRLEKLPQPIQDISWKAQVRLCKRFRRLIARGKHPNVAVTAVAREVPIPV

SEQ ID NO: 232539 - protein, 413 aa, unidentified
MDVFCGIDWAEDHHDIALVDRDGTLLARRRISDDAAGLAQLLGLLAEHGDTAEDPVPVAIETPRGLLTACLRATGRQVYPVNPMAVARYRDRHSIAGRKSDHGDAVVLAGVLRTDAHAHRPLPADTELAQAIAVLARAQQDAVWARTTCHNKLRSHLREYYPAFLAAFADMRGGINRPDARAILAAAPTPASAAKLTPAQLHGLLRKAGRKRGIDAEAARLREAFTAEQMRQLPLVEQAMGRQAIALLGQLDAACAAADDLEQATIESFNQHPDAEIITSFPGLGPLTGARVLAETGDDRSRFADAKGLKAYAGAAPITRASGKTTAVLHRRIKNQRLAAAGYLWAFSALTASPGARGHYDKRKADGDRHAAAQRNLFGRMLGCLHHCLATGQHYDEHAAFPAAAPRQQAAAA

SEQ ID NO: 232540 - protein, 346 aa, unidentified
MELFIGLDVSLASTAICVLNTHGKEVKEATVASEPEQLVAFLRDLSASIAVVGLEAGPLSQWLHKHLKEAGFETVLMETRQVKGALKAMPIKTDRRDAAGIARLLQMGWFRPVHCKSVSAQEMRAVLTARKSIQQACINLELSLRGVLRNFGLKIGKISRGGFEFRVRELTEGNHMLEAAAGPILEARAALRSELATLEKLTRDHAKSDPVCRLMMTMPGVGAVVALTVKSAIDDPERFRSSKDVGPWVGLTPRRDQSGERDIIGQITRAGDTTLRKALYQAATIMLHRGRSSWLTAWALRVAQRRGKKRATVGLARRMGVVLHRMWRDGTEFRFTRESAMSVDVA

SEQ ID NO: 232541 - protein, 368 aa, unidentified
MAEITRALIARVGVDIAKSVIHVHAVDAAGRRVVARSLRREQFLPWCEQLPKGCLVAMEACGGAHHWARRLVAMGLDARLIAAHFVAPYRLEGKGGKNDANDAAAICEAASRPRMRFVPIKTAAQQGLMALHRLREGYKEERTACINRIRGVLTEFGLVFGKSPKVLRAALPEVLEDGANELSGTARMVLQDAFEHWRHLDERMRWCDRQIGQHVRSCAAARRAARIPGIGEIGASALTAGVGEFAQFGSGAQFSAWLGIVPRQNSSGGKPSLGCITKRGDDYLRTLLIQGAKSVVMSAHKRNDPTSAWLQQLIARVGWQKACVAMANKNARILWAVMTREHEFDARHVSLKPQAKSPKPPQPVPAFA

SEQ ID NO: 232542 - protein, 316 aa, unidentified
MEANLGLDIAKAKFDAALLIGEKFKTKVFSNDPAGFAALSAWLAGQPVTVVQVCLEATGIYGLAVASYLHDQGHHVSIVNPAQIKAFGMTLLTRNKTDRADARLIARFGALHRPAAWQPPPAEIRVLQALVRRLAALQDMLQQEQNRLAGADPVVAATITRHLEFLHAEIMAVRQQIRDHINRHPDLRHKRELLDSIPGIGEATVAQLLAFIDAHNFASARQVAAYVGLSPRQRQSGSSVHGKAHISKTGSSNLRKALFMPALVAWRHNPTVSAFCARLAAAGKPKMVIAVAAMRKLLHIAYGVLKSGKPFDPTLA

SEQ ID NO: 232543 - protein, 309 aa, unidentified
MIGIDVGARRCHWYDTSDNTTAALTTDQTITRLTTMPPTTVVLELTGPYGRRIAEIAYQAGHTVLIAHDTDSAALRTLLRNRRKTDRLDARLLAHLAQLELPGPNPHLTPYDRIRPLLAARALAHQWRYLVELRAAIRNRNKNPLTEPIPIEDTLTQLIEHYKQRTIETVPTPTLQLLTSIPGVTPPLAALIYVTLGDITRFHNRDAAVSYAGVAPRHTPLSGATAQRPRRYRYAKLLTSHLHMYALRVAQHPDQFDRIGDTYVRVRKRTDGRRALHAVKRHLIRIVYGVLRTETPYLPRSRAADEASA

SEQ ID NO: 232544 - protein, 311 aa, unidentified
MEKDKVYVGIDISKDGLDVAIHASDKSWHFSNDNPGINNLRKMLVKLKPALVIFEATGGYELPLYLSLDKAGLPVSPINPRQIRDFAKSTGKLAKTDVLDARVIAHFGYAIQPIPHHLPDTQELKVAQSRRTQIIEMITMETNRLRGAQQPIKSRIEAHITWLKKELEDADNELRESVLNDPVWREKDALLQSVPGVGPVLSATLIAEMPEMGTLDRRQIAALAGVAPLNRDSGSFHGQRSIWGGRAHVRAVLYMATLVATRRNPLIREFYLRLCAAGKRPKVALTACMRKLLTILNAMLKHHIPWCYSPC

SEQ ID NO: 232545 - protein, 414 aa, unidentified
MEKNCRIAGIDVHKKMLAVVAAEGSSEGQLGFERAKFGTMESELRRMASWLKERNVGEVVMESTAQYWKPVWQQLEGQCQLYLAQAQSNRGPRGRKRDFVDAERLVRRQMAGELILSFVPDGEQRLWRIMSRTKYQLRRDRVRLQNQLEAFLEEARIKLSSCVSDLLGISSRRILEALSEGESDLEKLAAMVDANLRATPEQLQDALQGAKRLSEPHRQVLGLFLARLKLIEEQIEALNSNLGQGLRQYNDAVVRLAEMPGLGVDSAQQVIAEVGPTAATFPSPQELCSWVGTCPGKEESAEVSKSNRSPKGNRMMRRLLNQAANAAVKTQGSVFQNLYHRWVPRLGHNKAIWAVANRLCRLVWKILHQGDRYIEYGNRPNPKTVKARAKRMIRELQALGYQVQIVPPAEPLLS

SEQ ID NO: 232546 - protein, 452 aa, unidentified
MAKLQNKNSKRTSNSTQALLERIKLKAAGIDIGSEMIFIAIMGQMVKSFTTFTSGIQEAVNYLKENDITTVAMEATGIYWFPIYEAIDEAGIEVYVVNGGHVKNVPGRKTDVLDSEWLRELHTYGLLRSSFVPREDIRKLRYYIRLRSDHIGVGASYIQHIQKNFDAMNLKLHNVISDIMGKSGQRVVRAILAGERCPEKLLQLCTTDIRKNKADRVLKSLEGNYRQEYLFGAKQALEMWEIYQQKIADCDKEIEKLLKEITKNKNEVTKLSSPKQIRHHEPAIKDLHMLMMKLTDNKDATQIAGINDYTLLQLVSETGLDLFKWPSDKHFTSWLGLAPPANSSGKQGKKGTKKKRKPNEAGKIFKQIAMSVGNGKHCALAGFYKRIKSRSGAAVANKATARKIAVYYYLLMTKGIEFVDEGLKKYEERYSEQRIKSLEKKAKEMGMKLVAA

SEQ ID NO: 232547 - protein, 343 aa, unidentified
MDVIIGIDPHKASHHAFAVSDREVELAQLSVRATRTQTQRLLAWAASFESRTWAIEGADGLGYLLSQQLVAAGERVVDVPATLAARTRVLGSSHSNKTDPNDARSVALTALRHPSLREVRPVGHSEVLRLVAKRNIDIGDRRTQVVGRMHSLLVELVPGGIAKEINASDVDGFLAKVSPATPVEQIRYDLAVELLDDIRRLDEQLKASHKRIRAAVAASGTTVTNLFGIGPILAAMLIGYTVDITRFRNRDHYAAYNGTAPVEFSSGGRVVHRLSQRGNRQLNHALHMAAICQMRHPHSEGRAYADRKIADGKTKREAIRALKRQISNAVYRQLVIDNHRATH

SEQ ID NO: 232548 - protein, 363 aa, unidentified
MKSNLKAEQQVIAASNGESTIGVDLGDRWSRYCIVDLAGTIATEARVRTTPEALEECFEKIQPTRIVMEAGMHSPWVSRLLEKLGHQVIVANPRKVRLIYESDHKNDRVDARVLAKLGRVDVSLLAPVQHRSAEAQTDLVLARGRDALVAARTQLINAVRGVVKSTGARLPSSTTAAFASKAAPLIPVTLKSALGPLLKSIQHLSEQIQRCDKRVEELADQKYPETKLLRQVKGVGPLISLAYVLTLEDPARFRKSRIVGSYLGLQPKQNQSGASAPQLGITKAGNSFLRRLLVQAAQYILGPLAPDSRLRRWGLELAKRGGKNSKKRAVIAVARKLAVLLHKLWATGEVYDPLYGVASLQTI

SEQ ID NO: 232549 - protein, 329 aa, unidentified
MSEATQLKRFSQSPDPDALYAHLVRNYPEAEYHSVYEAGFCGFWIHYRLVGLGIHNIVVNPADVPTTTSEKLRKTDAVDSAKLARSLRAGELKGIYVPGSESLETRSLIRLRDSITKDQTRLKNRIKSHLRYLGIEIPEEFSGPGRCWNRRFVVWLKGSETGTAYGRQTLDFLVRQYEALRGQRLEMLRAVMALSRTERFEKPLENLMTVPGIGQLTGMSLLSEIDDIRRFKSADQLAAFIGMIPMCHSSGEREGVGDITVRRSARLRSVLVEASWVAVRQDPALSMAYGNYCKRMAPGKAIIKIARKLVNRIYFVMKRNQPYVKCVVA

SEQ ID NO: 232550 - protein, 394 aa, unidentified
MIKVCAVMSAAAPSLLGGEKEARGGGRREIDCVSEALDPVTKRDPRRAAGLKPEQSLERRLQHRQLACARKGISMSGSAHPPLFGGIDVSKDTLDVVLRPTGEYFQVPNTPEGHQQLCVRLKVLPVVCIVLEATGGYERACVAALLDVELPVAVINPKRARDLAKGLGILAKTDKIDGGTLAFCAEYCDLPRAKKTPEIQAQLEALVVRRRQLVALRAMELPRLEQTAHPQTRKDLQQTITFLTKHINTIEKKITALIDSDDHWAGLAQRLRSVPGVGATTAAVLLAELPELGQLNRQEIAALAGVAPFNRDSGKHKGKRVISGGRAALRHALYMAALTATRSNDKIRAFYDRLIAAGKPFKVALVACIRKLLTILNQMAKNRTQWNEHVASTV

SEQ ID NO: 232551 - protein, 369 aa, unidentified
MKIVGCDFHPRWQQIAVFDRETGEITEHRLMNGDGEAERFYSGLGEPALVGVEACGNSQWFLDLLEGLGHTVWVGDAAQIRASYIRKQKTDRRDAVKLARCHRAGDLTSVWVPDADAEALRDLVRAREAAKQDQLRARHRLSKVLLRSGQRPVAGIKPWTQPYMAWVRQLRYEQAARDWTRLDYLHEVEHMAERVRQLEEAIREAVKLAPAGMREVIRGLQALRGIAEISAVTVVAELGRISRFESARQLMGYSGAVPSEDSSGKRQQRGGITKTGNAHLRRIAVEAAWSYRLRPAVGPGLRKRQQGLPEEVKEIAWKAQLRLHRRYAGLAAAGKDQRKIVTAVGRELLGFIWAIGVRTETAAGQQMAA

SEQ ID NO: 232552 - protein, 422 aa, unidentified
MRDIGLDAHRDFCEVAIAEEGEVRSAGRIETTPQALELFAQSLGSEDRVVLEVTGNAWEIARIIEPHVARVLVVSPADTGIRQARAKTDRLDARALAKLLASGSLEGLWMPDAATRALRRRLARRSQLVRARTRAKNEVHAALIRRLVPKPRVSDLFGVAGRRWLEDLELPAEERETVDSCLRQIDFCEQELAELERVIATDALGSVEIRRLMSVPGVNVITAASFMAAIGDIGRFPGPRRLVGYLGLDPRVRQSGPGPATHGRISKQGSAPARYALVEAAWSVVRAPGPLRAFYERVRARRGHQVAIVATARKLACLFWCLLTRQEDYAYAQPSLTKKKLRRLELTAGAPRGKAKPGIWAANKAMREAERELARQGEVAYKRTVADWQAQKKGAGATPERASRGSSSDQAARQGSAPEPAL

SEQ ID NO: 232553 - protein, 315 aa, unidentified
MATLSREAHIAPVICGIDISSTRFDARIGRDGPCLQAPNTDDGADAALAFCRQHGATLCVMEATGGYERAAFARLWAKGMPTAIANPRAVRQFAQGMGVLEKTDRIDAGVIAWYAEAKRIQPTQPASADQQRLVDDADVLASFAAVLGAINAQIKATASKVAALIEADPVWAKLDAAFRTIKGVADRTVARLMAELPEIGTLSGKAIAKLAGLAPLANDSGAHDGVRHIRGGREGVRSILFISAGVAARHEPDFKAFDERLTKKGKPRKVVRTALAHKLLTRLNAKAREVRAELADAARKLEQANRERNDAAQPA

SEQ ID NO: 232554 - protein, 386 aa, unidentified
MSQGSGRNDIVHSSSKNNFMQVIRYGIGLDMAMEKFDACISTIDVKQAVLVKSTRSFDNNSKGYQQLYKWVSSQCVLPVPMIFLMEATGIYHEGLASYLHSQECFISIVLPNKAKKYKQALGLRSKTDSIDAKSLSRMICEQALPAWNPMSKAIYLLRGVTRQIQSIAKDITRIKCQLHAQEFAMYKNNDVIKCLKQQLRLLQKQKDQLEEEVLKILETDPALKEKCEKICRIKGLGKLSLAVIIAETNAFSFFENIAQLVSYVGYDVVEDQSGKHKGRTKISKQGNGRIRRILHLPAFNVVRLKQPPFVGLYQRVYERSKIKMKAYTAVQKKLLILIYTLWKKDAVYQPYYQQSSREKELALSFVKVDAFIKEKNSSAVEQSYTR

SEQ ID NO: 232555 - protein, 351 aa, unidentified
MLAELVDHVVGVDPDRDWITVALIEARTSGVLATERFPATGDGYRDAVLWADGRSEASERAWVIEGTGSYGRGLAVMLQRRGEWVIEFDRAERKAAKDGAKSDALDAIRAGREALGRERLAQPRAHTGMREAIRVHSVTRAAAVRARTAAINELKALVVTAHDKQRHELRGLRTPQLVERCARFRDNACRDVDQRCTRAAMRALARRIIHLDDEVADHDRALKALLDQAAPQLIAERGIGYVTAAAFYLAWSHPGRCRNEAAYARLSGTAPIAATSGQSQTRHRLNRGGDRQLNRALYLVAITKQRCDPATKAYIARRTAQGKTERETIRCVKRFLARRVWRLLEHPPISP

SEQ ID NO: 232556 - protein, 429 aa, unidentified
MIMGFTKPIEHFNLKRKKVITMNTLYVGIDVSSKSNVVYLMLPNGDKHSNFSVANSHEGSTQLVKRILSALTSLSLDTVLIGLEATSVYGDNLVYFLREDASLAPFHRKIHVLNPKQVKKFHDTYNDLPKNDYVDSFVIADCLRFGRINKEVYLGDYRYKALQNLTRARFFAVQNLIKEKQRFMNVLFKKYSTMTQEKVFSDTFSTTALAVYDEFDSAEALANMDLHELTDFIIEKGKNRFPDPDAVAKAIQKAARSSYRLPKTVNDSVNQVLSISITSMKALESQIKEFDKAIKAQMELLPNVLISIPGIGPVYSAGIMAEIGDINRFDNQAALAKYAGLAWKQHQSGDFEAEVTRLIPSGNRFLKYYLCEAALSLVRCDKEYSDFYHLKYKEVNRCQHKRALALTARKFVRLVFRLLKDNRLYCPAK

SEQ ID NO: 232557 - protein, 311 aa, unidentified
MPAKAEPHYVGLDIAKDQLDYCLSETAEGRCASTTTGRAQLVQIIRSVPGARVICEASGGYEKLIVAELLHAGIEVCVVQPGRVRAFAYAEGLMAKTDRIDARLLRRFGEKITLRLAVPADPAAATLRELLEHRRQLTTQLTEVVGRLALAGPTLGKLLATQQKFLERQIAEVEKMIEQLIDQDPDLKKKSARLQQITGVGPVLSATVLAYVPELGQLESPQLSALLGVAPYSHDSGGQSGPRHVRGGRAQVRHVLYMAAVSAARFNPILTTFYQRLRAKGKPAKVCLVAVMRKMVCLMNKMLQDPDFVLA

SEQ ID NO: 232558 - protein, 385 aa, unidentified
MTATTRSLPRIATRSTLFLALELGETSWKLAFTTGMGQKPRERTIAARDRGAFLREIVRAKQRFGLPERAARVASVYEAGREGFWLHRFLVAEGIDNRVVDASSIEVNRRRRRTKTDRMDARRLLGLLLREHSGENKVWSVVHVPTPEAEDRRHLHRELLTAKRDRTRVTNRMLGLLANQGVRAEPRRPLRAQLERLRLWNGAQLPEGLRRRLERECEKVDLLNRQIERLEAARREALREGADPAVQKVSQLLGLKGIGSNSAWLYVMEFFGWRGFRSRKQVGALAGLTPTPYQSGEASREQGIAKAGNRHIRAMAIEIAWGWLRFQPRSALTRWYQERFGRGSSRLRRIGIVALARKLLIALWQYLETGSLPEGAELKPALKIR

SEQ ID NO: 232559 - protein, 318 aa, unidentified
MKTVGIDISKLTFDVWSEELGHAQFSNDKDGFKVFKKLLSEEDHCVMEATGCYHFQLAEYLYDLGFKVSIENPLVVKRFIQMKQQRVKTDKHDAKMIALYGVEQRPVLWEPEPKFIEEGKLLTTLMQMYVKQQTQLKNKLDNLQSGGLTKGVMISSLNLQLKRIKAELKKLETSLEELLKENAPEVLTNIRSIPGIGKKTAMLLMVTTNNFRDFTSAKQVTSYVGLAPVERASGSSIRGRSYISKKGDPMLRHHLFMCSFTACQNNPQCRALYERLVAKGKSKKLALIAVCNKLIKQAYGVCKNNLVYDENYRSRLIA

SEQ ID NO: 232560 - protein, 368 aa, unidentified
MMGWMAPLRHLGAKVLVGENQPADREPSMSEITTVGLDLAKNVFQVHGVDAEGSTVLRKQLRRAQVLAFFSGLPRCLVGMEACATAHYWARELRALGHEVRLMPAQYVKAYIKRNKNDAADAEAICEAVARPTMRFVPAKTAEQQAAVLLHRGRERLVRQRTMLVNALRGHLAEFGVIAPQGLRNVGRLIAIIRDEKDARLPGLARQVLQVLAVQIEQLEAAIAALEKQLMGWHKSNPVSQRLATIPGIGPIIATAIAAMVAEPSGFRSGREFAAWLGLVPRQNSTGGKNRLGGISKRGNQYLRRLLINGASANLLRSKATNADPWVIGLRRRRPSLVVAVALANKTARIAWAVMQTKEDYRHRAVAA

SEQ ID NO: 232561 - protein, 485 aa, unidentified
MIVIGADTHKASHALAAVDEGTGKVCGSREIRADDAGHLAAVRWARGLDDERVWAIEDCRSVSRRLEQALLAAGERVVRVPPQRMGASRRGEREPGKSDEIDALAVARAVVKDGVERFPVAYLNERAIEIRLLLDHRDDLVAERTRTINRLRWHLLELCPELERSLKRGAFNQARVLDRVDRRLRKPPAAARVRVARDQIAHLRSLNRQIDQLKAELAELVAAHRPKLLAEQGCGALTAAILIGHTAGNERFRSEASFGLQTGTAPIPCSSGQRTQHRLNHGGDRQLNHALHIIAVTRAQRDPATKEYLARKEAEGKTSKGALRSLKRHLARRFHKLLSEPPADQQQASDGKPIIEPRPAAIVGKLPEIPRLATREHRPTPTAKARRRSRWSASARSTSPDDDYGPFSGPLPAAVITHRRPRLPQIAAIGRHDALTLFNRGVLSRSKARHDPPTTYSTPNSGRCPASRATGESAQKPANSESPLT

SEQ ID NO: 232562 - protein, 362 aa, unidentified
MTKVIIGVDPHKLSATIEVVDRHEKLLGSGRFSTDQAGYSAMRTYAKNWPDRLWAIEGSNGAGRPLAQRLLEAGEHVVDVPAKLAARVRLFDTGHNRKTDARDAHSIAVVAVRTKTLRVLRPDGELEALRMLCDRREELTRLRVQTVNRLQRLLAELIPGQAKKDLTALQAKAILATVRPRDIAGKTRRRIAAEELADLVAVEAKMKKATAELKVLVKARGSRLMDLTGVGPVVAARTLADVGDIARFADRNRFASWTGTAPLDASSGEQNRHRLSRAGNRRMNHMIHIAAISQIRLDTEGRAYYRRKRADGKTKLEALRCLKRRISDASYRQLLADAGRAQLDNAHQPVGTGRALRGALLH

SEQ ID NO: 232563 - protein, 320 aa, unidentified
MRNAVGLDISKLTFDASAMVGNAEYSAKFDNDSKGLDQFSDRLKSLGCQNLHICMEATGNYYEEVADYFAQYYSVYVVNPLKISKYAESRFKRTKTGKQDAKLIAQYCRSAQESELVKRQKPTDEQYRLSRMTAAYAQIKSECAAMKNRHHAAKDEEAAKAYAQIIKAMNEQLEVLKEKIKEQTEKPNCKEGVKRLETIPAIGRMTAAVLFHHLTSSKFETSNKFAAFAGLSPQQKESGTSVRGKGKLTKFGNRKLRAVLFMPAMVAYRIRAFPGFIKRLEEKKKPKKVIIAALMRKLAVIAYHVHKKGGDYDPSRYKSA

SEQ ID NO: 232564 - protein, 383 aa, unidentified
MKMNMPEGSRLIGLDLAKKSFVGCILSGESFLKKRIFSGKMTQDEEGWKYIQSQVKDDDLVLMEAGTSSFSLARYLIAHSAAQRVVVLNPGMLRVIWMSQRKNDKSDATKIACIARDMAEEAWPTVPIPMEQEQAERSMINSYGFIKKQETQLVNRLYGLYNSLGYPEIKRTILRDDPEGRRPLAKQLLSNHRLALYDAEMMMDQLDLVQLQVEAKLESLRMICLAHPGPALSWLSIPGIGLVNAATLVAYVSDGSRFSNPHQLLNYAGLIPKQDQSGELDKHLGITKRGNRAIRRNIVQGAWVVMNLKPACPITKYAYRKKKEGKQKQKVAVAVANKMLRIGFSLLRSGELYRPMMENGDKKLKEKLRTYKLQALMKTVLND

SEQ ID NO: 232565 - protein, 586 aa, unidentified
MTQSQPSKTVVGVGIDTHRYFHQATFLDADRQRAAPHLRLAESAEGYAQLRRALEKIAARQPDVHFHIRVDAAGQYAANLERYLRDLPLSFTFSVGEPARNKHYRQAISPKAADDLIDSYACGRFAVVERPPATLEVPEAFQVLREVASRLESQVRQTTRASNALHNLMSRVFPELATLVSSFKTQYLLELLDKYPTPEKLARARRESLLAIRYIKQQQVDKIQATAKQSVGSLRGEIAEQLVGDQVKQVRQSQQAEERLEKLLLQAYHALPDSPHRRVETILGIGSVTAAVLVAKIISIDRFETKGKLVSYFGTFPERNTSGTDKYGNPVAAGTMEMSRQGCDLVRRYLWMAAMSAVQCNPAVKSLYARLRARGKRGDVALGHCMRKLLHLVFAVWKTDKPFDPNHYPWDKAAPRQPAQEETAGRKRDMPEKQAITAAESSVETADATVKQVEPPKSTSPNDWVDFAWLRQQITLEQVLSQARCLDDLRKRGSQRRGRCPVHAKPGDHDRSFSADLKKNVFQCFDPSCGIHGNVLAFWAAWRRLPLREAALDLAATLHISPSPNREEEPVSQQRYSAPPTSGTQT

SEQ ID NO: 232566 - protein, 400 aa, unidentified
MHLTANISISQKNFIAIDLHSDNAVICVRRNALNKAGELVGKNIWCGRVSIRDGLDNFIKVLVPHCQDFDHVAVVESTYNWYCLADAFEERGWLLRVADPSTVSQANLKSSDDRTDAQYLAERLRVGSLKHYLPLNYSSRALRDLCRYRMAMVQDCASLKIKLINLYRNQLSKNVRVADLLKRCQPHMQPNYRFNSDILEEFKDPNIRLRVAFEISRIAMLEEMIEECNAEIQKQCKDQELVKLCKTIPGCGPVLSAVICTEIGTMQRFKSAGDFVSYCRLCSTSKLSNGKSKGLGNAKNGNAYLSWAFTEVAQYASRNPVIREILQRLLRKYGGLRVKAIRTLAAKIARVTFYVLNNKQPFNAAKCFGMELTKSIVKKFPHKSLREDAAVVLPAVAGQA

SEQ ID NO: 232567 - protein, 318 aa, unidentified
MKTQSRYLGVDVSKDLLVVAFERHRWQFANSKEGHRKLIAQIGKQSGSIHVVCEATGPYHLAMGLALQEAGIALTVSNPARIKYFGRSEGVLAKTDPIDAALIERFANAKRPEADPPISREQIALNELVNHRAQLVGSRKSMLASRQQLLDATVRKEIDRAIAALDRCITTTERRLKEKIESSPSWKAKLARLSSVRGVGFITAVVLLAKMPELGSLSRGQCAALGGLAPYDNVSGTYTGKRSIHGGRSDVRSALYMSALSATTYNPVLRPFYQRLIGAKKPFKVAITAVMRKLLVYLNSLLKSLLQAPALSGGQTYP

SEQ ID NO: 232568 - protein, 386 aa, unidentified
MSQTTHQPSGPFYIGIDFHKHYSVFCVIDDRNTILERGRIDHKIPIGFELLIKRYPGCRVVFETTMNWHWLYEILEAHMDHKDIVLANAYKMRIIAEAQVKTDKVDAYMLAKFLKAELISTVHIPSKSTRQRKEVLRQRCFFVRQRTMLRNRIQRLLSAQHNLQLPQCSDLFGKKGISALGKLELPDPAGLLLRQQLEMLENLKTRIAEDEMALKKMLEASPELEFVKSIPGMGPILAAVVVSEVDDISRFASAQRFCGYAGLCPTTYSSGGKTHNGRLMRACNKWLRWAFVEAAWVSVGCSAYFGDYYKRKRALGKKANTAIIATARLMARICWQLLTEKRAYASFPPAQKLQGRPEEKPRVSSGSVKEKKDFAMPNETFPSRSE

SEQ ID NO: 232569 - protein, 404 aa, unidentified
MYNAVGIDVSKGKSTVTVLQPGGTVIRKPFDVSHTSQNLDELSSYLRSLDGDTRIVMECTGRYHEPVLKALSEAGLFVSVVNPHLIKNFGNNTLRKVKSDPADARKIARYTLDNWAELRQYSSMDNTRTQLKTLNSQFSFFMKQKVAAKTNLIALLDNTYPGVNKLFDSPAREDGSEKWVDYAYSFWHVDCVRGIGLKAFTDRYQAFCKRHHYNFQADKPEKLFNASKELVAVFPKEKTYKLLVQQSIQQLNLSSAHVERLRKEMNELASTLPEYNTVMGIYGVGKTYGPQLIAEIGDVSRFTHREALTAFAGVDPGVDESGQHKSKSNRASKVGSARLRKTLFQIMTTLLQNAPEDDPVYRFLDKKRSQGKPYYVYMTAGANKFLRIYYGKVKECLRNLEKES

SEQ ID NO: 232570 - protein, 456 aa, unidentified
MVIKMNMERKEHGNYSLLRLISVGNKNTLAGGVKAMRKKNDNRQVEKRQRITGATLVIGMDIGCEFNAMCLMNKEGTVLGRYPKVYNSRKGFDYFHGVIESMKKKYGFADVLIGMEPTGNYWRKIAFFAMDQNYEVRFIRTTALKHQRELDESSSSKNDIRDAYTIANIVREGKYIDTVIEDGVFRQLRTSAHTRERIQRISTGAKHALKGVLEDYFPELKSIFRSMKAKGLLALLEQCPFPADVLTITPDMLTEIIARSTRRKARAREKALMVYEAARKSVGLKRIGQADRHRVATYLSEIRHSEAQLKEIELQMKGLLQKVPFAEYILSIPGIGVLTCGVFLGELGDPGNFKNPKQIVKYAGYDPREHDSGQSIGRKIISKKGRWLLRKYLYFMAMRAVHRSPFFKEYYGNKQKTMEKKEALCAVAIKLIKVIFAPLRDKRTFTEKQGCLKQAA

SEQ ID NO: 232571 - protein, 315 aa, unidentified
MTRVQVFVGIDVSKAQLDVALRPEGRFPAPNTEVGIAQVLTRLQAVSPTLVVLEATGGLEIPLTGALAAAGMPVVVVNPRQVRDFAKATGKLAKTDTLDAQVLAQFAEVIRPEPRPLPDDQTQLLAALLARRRQLVEMLTAEKNRLASARLPIRKNLRAHIPWLERALHQADADLAEAIQQSPVWREKDEWLRSVPGVGPVLTTTLLANLPELGTLTDKQIAALVGVAPLNRDSGTLRGRRTVWGGRAQVRMALYMGAIVAARFNPVIRSFSQRLCAAGKAKKVALVACMRKLLVILNAMLKHQTPWQPHEAQHA

SEQ ID NO: 232572 - protein, 356 aa, unidentified
MKYVGIDVHKKYCQAAVLDEDGELVDQIRFLNKKEDIKEFAVKLLGFRDDVKAVVESTGNLWIQIHDILEKFGIEVSLSNPGKTRLIAEAKHKTDKVDAKILARLLRADMLFTCYVPGEELRNRREFLRARQMFVRNKTQVKNRIHSILDKHGLRFPGTPYSKKSIAWLREQDLGFMDNAIVKGQLAIYETLEEQIRVLEDKIAAMGMEDPQVKLLMTMPGIGYFTASMLVAEIGDITRFGNDKKIASWAGLAPRISQSGERINMGRVGQGNKRVSGLLVQCAHNARQHDPRFKRFYDRYSKRRNKQKALVAVAHEMIRIVYFMLKRNEPYRGENVELTTRKLKSMKYRASIGLQI

SEQ ID NO: 232573 - protein, 339 aa, unidentified
MKVSTLGIDLAKNVFQLHGVGCNGQTVLKKKLTRDKFLPFLMQLEPCLIGMEACASSHHFARVLRQYGHEVKLIPPQYVKPYVKTNKTDAADAKAICEAVARPNMRFVQIKTAEQQAILVLHTERNILIRERTACANSMRAILAEFGIIMPRTLSQLYKKIPEILEEYDNELSPFVRCSVARQLEHLQGVEDQITLIEQELSRWAKTQPACQRVMKVPGVGLMTATYLVASVGNGQQFHSAKQFAAWLGLVPREFSSGGKQRLGRISKRGDRYFRYLLVHGARAVAAVIERHKDNMPWLYRLLNKKAYNVAVVAQANKTARILWSMLVHHTEYRTLSAV

SEQ ID NO: 232574 - protein, 451 aa, unidentified
MAQAKPQVIDDEEHERVYERVAAVDVAKDTGMVCTRTPHRSRPGARQSTVWTVKARMASIRTLGCQLKADGIEMVTLESTSDYWRIWFFVLEAAGLAVQLVNAAQARNLPGRPKTDKLDAMWLARLTELGLLRPSFVPPAAIRALRDYTRARTRLVQERTRCFQRLEKLLEGALIKLSSVASKLTTESAKDMIRAMIAGERDPHTLAALARTRMKAKHDDLVEALAGLFDDHHGELAQILLDQAAFCDARITQLNARITAAVAAMPAAWGVDADGTTGPDAGTGPDAAALPAVARLAEIPGVSPDLARSIIAETGLDMTRFRTAAHLVSWAGLCPQARQSGPRTRSGKKNQGDSWLRNSLGQAATGASRTATFLGERYGRIARRRGKAKAQVAVARSILTIIWHLLADPAARYTDLGASYYQTRTDTDRKLRNHIRQIQALGFEVTLTKGA

SEQ ID NO: 232575 - protein, 431 aa, unidentified
MRFIGLDIDRDFCEVAIAEGGELRLAGRVQTEPEALALFAQSLGGDDEVALEATGNALGIARIIEPHVGRVVLANPKAVKGIRRAGPKTDKIDARTLAQLLAGGFLPAVWLPDEQTRILRRRISARAQLVRQRTRAKNQVQATLMRNLKGKPPVSDLFGASGRRWLAAQDLPADQQETVAACLRQIGFLDGEIGLVERTLAEQVLASAEMRRLLTLPGVNFVTAAALLAAIGDIRRFPSARQLVSYLGLDPRVSQSGVEPARHGRISKQGPGETRQVLVEAAWQAARTAGPLRAFHQRVAARRGGNVATVAVARKLAVIAWHMLSRGQDYAFARPSLTREKIRKLELATGAERQKGKRIGVWVTKEQHRLDKELARRVRKFDRADLQANPAERRRRATTAAAGGPSSPDGCRGSLRYRATPTPSAPETSGI

SEQ ID NO: 232576 - protein, 387 aa, unidentified
MYFVGIDISKFKHDCAIVDELGDVITPSWSFQNDREGFSLLKELLDALNGEKKIGLEATGHYGQNLKLFLENNDFSFMEFNPLLINRFVHSKSLRKTKTDSIDALMIAQYLMTVEYKPYPPSFYTLEKLKSLTRFRDSLIRQRSKQLVELTNILDKVFPEFKSFFKGRFSATALYILSHYASPEKISNMNSKSYEPLRRLSRGRFSIVDFVELKTLARNTVGSTCDYLLQEMEITIDIYNQLQSRVEEIELQIHDCVLGLAPPMLTIPGIGVASAAVILSEFGDLSKFNSPSKLLSFAGMEPGYFQSGTSESTGKMVKHGSSHLRYAMMNCAQTVINNEPTFAAYYAKKRAEGKEHRVALTHVAKKLLRVIYTLQTKELSYNPDLVR

SEQ ID NO: 232577 - protein, 314 aa, unidentified
MTIQTPIIGIDVAKENLSLYRLDTQQSATLANDRRTIVTWLKTLPADCAVAIEATSTYHVLLADLAYQCGHRIYVIDGYRLSNYRKGIGGRAKTDQSDARLLARYLAHEQNQLHPWNPACKAYRRLQLLLRRRATLVRSATALRLSFAQDRQMARELKPVLERIKRLERRLNEQVHKALQDAGLAEQAKRCQAIEGIGPLTAAALNLAFLRGSFRNSDAFIAFLGLDVRVKESGRYSGRRKLSKQGDSEIRRLLHNAAMAASRTAAWQQRYQQYLQRGLKRTEALVILARKLARIAFALMKTQQPYRPAVDTVG

SEQ ID NO: 232578 - protein, 495 aa, unidentified
MTPARSRWDGCPDADSPVARFPHPPPETAVTPRTPPAAPAPTTPAELDSLPVTNRHAAGIDVGDRTHWVAAPGADPREFPAHTPGLRQLVDWLRQCGVTAVALEASGAYGHVLYLTLVQAGFEATVTSPAFTRQIKGRPKTDRLDCQWIQRLHTHGLLPPIFQPDEATHTLRAYVRQRANLVRISGQYVQRMQKALVLMNLKLTSVVGDVTGVTGLRIIRAVLAGERDPVTLANLRDRRCKASAAETATALDGRYRPEHLSELRHSLAMWEAHLTVIAELDAEIDAHLGTMRRHSALPPLPAKPRVRGKKPHDPAFDVRTALYLATGVDLTAIDGVDEVHALTLVSELGWDMTKWPTVGQFASWLGLCPQFKKTGGKVKSSRTRAGKGRAAQALRLAAWGLMRSKSYLGAYLRRQRARLGAPKAITAAAHKLARIVYHLLRYGEAYVRKDEAAYAAQVRDRVEQALRRRAKELGFELVKATGDAPPEPTGTPLSV

SEQ ID NO: 232579 - protein, 381 aa, unidentified
MKRNDLSQSLIAFDHSSTLVAVVELSFGSWLAAGLVPHLSRQPLKKLRPDPDALLRLLLRWRDQGIKAGGPIKRIVLAFEAGRDGFWLARWLRARGIEAYVIHPASIPVSREHRRAKTDRLDTGLLMRAVLGWLRGEPKHCNMVAISTIAEEDARRPTRERETLVRDQTRSVNRIKATLIRFGIRTFKAKLRQATKHLEQLRSPEGEPLPPNTMAELRRDLARLQLIRGQIGEIERARLERLKRAPRQGTHPMIRMLARIMGLGIETAEVLSRKLRDQRAVARYGGLTGSPDESGSKRRERGLARAGNARVRRGMIQLAWRWLMFQSKSTLTKWYRARTAGAKPGLRKAMIVALARKLLIALWRYVTIGEVPAGTVLRPAI

SEQ ID NO: 232580 - protein, 351 aa, unidentified
MTEMTEPLMAGIDLHSNNLVIGIMDQSGQRLKHQKLDCNLQQVEQFLAPFKAQLKSIAVESTYNWYWLVDGLRARSYPVVLANPAQIDQYSGIKHADDKNDAYFLAELQRLNILPTGPIYDPVLRPVRDLLRRRMSLVHQRTALMLSFKSLYARTTGQAMSLSRLKSMEMAEAKTLYEHPANCLIATVQKEHIEKLDQSVERIEKAVLQSARELPCYERLNTLPGIGRILGLTVTMEVGEIKRFKTPGDFASYCRTVDSKRLSNGKKKGDNNQKCGNKYLAWAFVEAANFAKRYDEHCRKWFDRKAAKTSTVIATKALACKLAKAAWHVMSQGTDYEAKRMFPELALKTTT

SEQ ID NO: 232581 - protein, 349 aa, unidentified
MLADEVDYVVGVDTHRDQHVLAIVAAPVGVVLARRSVRASARGYVEAVRFAEQHAGGARVWAVEGAGHYGAGLARYLSGRGETVLEIGRGRREGRRLRGRDDSLDAIRAARTALASETLTLPRTGQRREALRLLLLVRRGAVDVRREALVQLRSVVVTCPDRLREQLRGLPAGRLIVRCSRLRRSSAYTPDELASRLVLRSLARRVEAATAEAAELEREIHAHVRALAPQLLEEPGVGPIVAAQLIVAWSHPGRVRSEAAFARLAGVAPIPASSGQTIRHRLSRGGDRQLNCALHTIILHRRQHDPTTKDYIARRVAEGRTSRDAVRSLKRYLARHLYRLLQNQEPLMA

SEQ ID NO: 232582 - protein, 338 aa, unidentified
MNNHTVIGVDLAKTVFQVAVQHGQQITSNKKLTRSKLVEFMTQQPPSVVVMEACYTAHYWARVCEAHGHTVRLIPAQHVKPFTRGNKTDANDAIAIIEAAQRPNIIDVPVKTQHQQDIQSLHRIRERLVGNRTGLMNQVRGLLAEYGLISAKGNKGFVVLMELALNSDELSSLIKDEVQRSLDELQLLRDRTEAIEATLREYLKSDRHCQIISTIPGIGVINATALVCKFGNGSQFRQGRSLAVNLGLTPKLSASGLRSQMQGISKRGDPYLRKQLIHGARALLGVCDKRPDDALCRWANRIKQRRGGQIATVAIANRLARLVWVLLHKQEVYRPMPA

SEQ ID NO: 232583 - protein, 427 aa, unidentified
MKEQSRTIVGIDWSADSHTCYDLQTDKSFKITDSVEGYEKLLKNYPEAVFVIEEANNRIGDYLLINNREVYVLPPCRSKEARKYHFSSGTKSDGLDAKAIALTFKEHPSYCLKARYSKVGVKITKLVTAYNIVSKMHSQQCNRLYSLLLRYFPEYLHIMDKQYRSDTSLRILSVCPTITELKKVSNEELRKILNKENHRMTSSLRNKLDRIRSEGISWEDTSCEGKLILLLVNTLLSLRKGLEVLKKEMEKTLKNSPYRIILSIPGVKAVIGSYIVKAYLTHDFKSYQEIQKYAGTVPLLFQSGRKSIMLMRKKCDNDLKGMIHMAAFASLKTCGWARNYYRRKRKEGKTYGHALRALGNILLKIAFSMLSKMKEYDETLFLNAKGIKTTQLNDTSFSETFPYPEYSQDAQLSLAATKDVVDNLIVT

SEQ ID NO: 232584 - protein, 404 aa, unidentified
MWYAGIDWADQHHDALVIDEKGHQVGSIRVNHSPEGVAKLNAFLEQIVGSGGREQIACIIETTHGLLIAALPEAGWPVYPVNPRTVDRRRSASGAKTDIIDAYLLAKTGRADFADLRRLTPESEQVAELKALTRDQDALIQMQTRLVNQLTACLKAYYPVALQFFSKLQQRVSLIFLQTYPTPQAAMAASLEQVTSVLKQASHPHPTQVAHKIFETLRQPVLQADEVSTRTKSRLMLALVKQLLPLLEEIASYDEEIARLFLIHEDNDVFSSLPRAGRRLAPGLLAEIGDDRSRYADAASVQALAGTSPVLFQSGMYSKAHRRLGCIKPLRNALHQFAWQSTQSEPWARDYYQRKRAEGKSHTVAVRALANVWARIIFALWFNRTCYQTAIFEQAQRQHAPRAA

SEQ ID NO: 232585 - protein, 408 aa, unidentified
MEVLYPRCAGLDLAKDTLVACVRIHGRPVQQETRTFGMTTRELLTLATWLAEHGVTHVAMEATGSYWKAVWYLLEETFTLTLANAAHIRNVPGRKSDVKDAAWIADLLAHGLIRGSFVPPAPIQEVRDLTRTRKQLVREIAQHTQRIQKTLDTANLKITGLVSNIIGVSGRAILRALIAGQTDPVQLADLARGTLKNKRAALVDALTGQIRPHHLRLLKLHLDLIEQLERAVADIDTQLGEALAPFREAIARIDAVPGIDTVVAQAILGEIGLDMTRFPTHQHLIAWACLCRRLDESAGKRKSTRTRKGACWLKTVLVQAAWAAVRTKNSYYRAQFLRLRARRGPKKAIVAVAASMLTAIYYILRDSAEYRELGGQYFERLDRTKATQRLVKRLRDLGYRVQLEEVAA

SEQ ID NO: 232586 - protein, 354 aa, unidentified
MSHVPLHVPAITIGLDLGDRTSRVYELSAEGRCLRDTTVASTHAALTAYFGGRVPCRVVLEVGTHSPWIAPLLAALGHEVLVANPSEVFGGRRRKKKTDAVDAAFLARQGRADPQLLAPVRHRRPETREHLALLKARDQVVKLRTDTINHVRGTVKAAGARVPACSAEAFATRAPAHVPAALEPAITPLLTLITQFTTQIRAYDRQLQQLIATRYPVAARLQQPAGVGPLTALAFVLLVEDPARFRRSRAVGAYFGLVPRVDQSSGADPQCRIAKAGDAFGRRLLVHAAHYILGPFGPACDLRRYGEQLAVRGGKNAKKRAVVAVARKLAVLLHHLWVTDTPYDPDYHQRAAAA

SEQ ID NO: 232587 - protein, 388 aa, unidentified
MYRILKIGMDVHSKNYTLCAMEPTIGSEDRIFGEIQVAPDYKEVICFIESLKMKLGLNDEYSIECGYEAGCLGYTLYHQLSNAGIKCVILAPTTMLTPQGQRVKTDKRDARLIAQCLCYGGYHSVYIPTGEDDAVKEYLRMRDDHKLAQKKLKQQINAFVLRHGHRYVGTKWTIKHVTWLNRLELDPMYRETLNEYMASYEEQEVKIERYDKRIEEIAAEARYQENAKKLGCFLGIRTHTALSLIVETGDFKRFAKGNTYAAFLGLAPGEDSSSTNVNRLGISKAGNIHLRCLLIEAAKGICKGAIGHKSKALRSRQNGQAAGVIAYADKANTRLRSKYYKMIRHGKKKNVAVAAVARELACFVWGMMTGNISVASSTCTSALAVSQG

SEQ ID NO: 232588 - protein, 408 aa, unidentified
METIHPICCGLDVHQASVSACLRRVDAQGAVSVESREFGTTVKDLVALADWLVAEGCPIAAMESTGVYWKPVWNILASLLDVWVINARDVKQRRGKKSDRADAKWIAELVAHDLVQPSFVPPARIGVLRDLVRMRTVLVQGRTQVKNRVLAVLEDTNVKLASVVSDPFGVSGRKMMEALVKGERDCKVLSEMAMGVLRRKIPQLEVALQGGFTEHHAFLIRLGLESLDQSNRQIAELDAQIERLMQPLQEEASRLTSIPGVGQNAARVVLSEIGTDMTRFGSAERLASWAGLCPGNHESAGKRYSGKTRKGNRYLRRVIAECAWAASKTNTFLGRTFRRFQVRIGGKKAAVAVGHKILVIIFHLLNEGQLYDDGRYDSISQREQIRQRNRALTTLQRLGYQVTLTPAS

SEQ ID NO: 232589 - protein, 318 aa, unidentified
MLIHYIDIAKRNFVIAVSSLSKTKTETNNPKGIAHTIEYLKKHKVALVVTESTGGLEIPAAKAIRRAGIAVIIANPRQTHQFAQSQPLTKTDAKDAKMPAFFAQMTAQKEDSQTMPYQPPTEAEEVLEALVNRRNQSADMRTAEKNRLHQFHETQVGSVKQLIAHFDRLIDELDKQIDDHTHTHFDGKAQVAEQIKGIGSITTATLMAMLPELGRLSHKRIASLAGIAPHPRESGETKFKSRCFGGKSAVRKALYMATVAATRFEPLIRDFYQRLLSEGKPYKVAVTACMRKLLETFAKFLSLPTAETQTQVFVYFRS

SEQ ID NO: 232590 - protein, 342 aa, unidentified
MQPRFKPTVYFRQCVGIDIAKSTFMACLSMLDAEGCSTSPIEFTNDRHGFNQFVRWTRKESLKGYPLCFVMEPTGVYYEALAMHLTKLGMTVHVVPANRVRDFAKYEGYKTKTDKIDAYILSMLGCENRKLKNWAAPDEQFASIRSLCRLRTSLVKHSTMLKNRLGALTVSSFSDKKTVRICSAALDDIDKNIYKAETEIRNLIDKSEQFKEAVRLSTTIPGIGQTTASAILAEVGCFANFNNHRQVVSFAGLDVVARQSGPQDPKRHISKKGNSTIRSMLYICAMSAIRFNPKMREFYDRIKKSNPSGKVALVAVMRKLLILMYSVCKSKKPYDPEHSTKN

SEQ ID NO: 232591 - protein, 387 aa, unidentified
MKKFIRTAIDLGKTYFQVHGLENEGGQSISRKMKRSKMREFYEQIEPCRVGMEACGSGHYWARELVAMGHEVVLIPPACIKPYIKRGKNDAVDAAAICEAMSRPGMRFVPIKGADQQAVLMLHKTREMFVKQRTMSVNALRGHLAEFGIIVAKGIGRVDELLALAQSDTELPQIAKSAVAGLAQHLEGLDQSIEAVGDEIAGAHKQNPTSRLLDEVPGIGVLIASVIASSVPDPSVFKTGRDFAAWLGLTPRQNSSGGKEKLGSITKQGNRYIRKMLVVGATSVMRVAGKRKGALADWINALQAKKPQRVAAVGGTDNPVQDELQWPGFQQPQADLGKECEERASDERPLSADGRPHVPHNPPEARQRLVQCVWPTHKFVSSSRCWR

SEQ ID NO: 232592 - protein, 336 aa, unidentified
MSELATVGIDLAKSVFQIHAIDENGRVLVRRQLRRSQLLAFFEKQSRCLIGMEACGGAHDWARKLQELGHDVRLMPPSYVKPYVKRGKTDAADAAAICEAVTRPSMRFVAVKSEACSSVLVIHRTRDLLVRQRTQICNAIRAHMTEFGVITAKGAQNVDRLRTQMHQLPEAARLPVSLLFEQLVDTDTRIERLTREIEAAHAQSETSQRLVTIPGVGKLSATIIAATTPDVGNFDCARDYAAWLGLPPKPHSTGGKQRIGRISKMGNRYIRRLLYLGAMSQIMVRHRCGPRQDWLSDMLARKKTKVAAIALAHRMARTIFAVLRDGSRYQPQATAA

SEQ ID NO: 232593 - protein, 345 aa, unidentified
MELHTIGIDLGKTVFHLVGLNLGGEVVVRKKFSRTQLLRFTANVHVGLIGMEACGGSHFLGRALREQRHEVRLIPAQYVKPYVKTNKSDYIDAEAIAEAVARPTMRFVPIKTDDQLDLQSLHRVRERWVMRRTAVINQIRGLLLERGITLRKGRHHVHAALPLILEDADAKLSGAVRMLLAQLKLDLDQLAARIDEADAVIRKTAHENEACRRLVAIPGIGPVTATALIAAIGNGGAFHKGREFAAWIGLVPREHSTGGQQKLLGISKRGNSYLRRLFVQGARAVLQQRTKQSSGLSAWLAQLTSRTHRNVVAVALANKLARIAWAVLAKNEPYRHPVLADAAAA

SEQ ID NO: 232594 - protein, 453 aa, unidentified
MEMEVINPDAGGIDIGSRSHFVAVGQALEDVKEFGVYAEDLVQLCEWLLSYGITSVAMESTGDYWQNLYTELIKHDIEVVLCNGKFTKHAKGKKTDVKDCRWIQKLHALGLLTSSFLPDETTEILRTYCRQRSNWIDLASSASHKMQKYLKFLNFRLDVVVKDVCGLTGLKIIEDICKGNLDPESLAKHRHYNCRKSIEEIAKALHGNNRKDFLFGLKQEYESYKFFRKKIKSCDKEIEKLVKMELEKDPEKKQLMTTDKPYKRINKNALEIKNFNQIAFQYFGGIDLMAIEGVSHATVLSIMSEIGIKGFKKFSNSKEFGSWLRLAPNNKISGGRVLSNRIPKGSNRLKIALRQAANAIGNLKDTHLSDFFNRIAYRKGRQAAVSATARKLATIIWTMVTKKVPYKPPTEYLFLDQKRKLKVMQRIKKNIAKFDIKPEDVGFCNSLNMSYDI

SEQ ID NO: 232595 - protein, 356 aa, unidentified
MISSTKYIGMDVHTQSISSAVMNSVGKVVMESVIETKASTILEFIDGLRGDLRVTFEEGTWAAWLYDLLKPHVTEVVVCNPRKAALLKDGSKGDRIDARKLAELLYMNRIKSVYHGENGLRTLKELARSYLTITKDLTRVMNRLKALYRSWGIPCAGKDVYAPRHRAEWLSKISEAGVRRRAEHYYQQLDVLRLLRQEVRRDLLAEAKKHKPWKLLRQIPGIGPIRAALLVALMQTPHRFRTKRQLWKYSGLGLETHDSAQYHAVKGELQRSKRPATVRGLNKDHNHDLKDIFKGAAMQTSTAAGPLHDFYENLLAKGRKPTMARLTLARKIAAITLIVWKKEVRFDAKHLKQQAA

SEQ ID NO: 232596 - protein, 325 aa, unidentified
MMYLGIDLSKAYFDVTLRNEQGEKTTAHFDNTPAGFVGLEKWLKGQGGSEVHVCMEATNVYWEPVAHFLHAKGMTVSVVNPARIKGFAMSQLRRNKTDKQDSDVIVDFCQAMHPKAWTPPSAAVSKLRSLVRLRATLVKTLTQHKNRLTDAQDDEVKACWQRLIDTLEAEIAQVESQIEHHIAQHPALQATATLIRSVKGLGKIATWTILAEMPDLAEYEDAHAAAADAGVNPAHHESGDTVRHKPKLSKVGKAAIRGVLYLPAITAIQHNPIVRALAERLAQRGKPKKVIIVAAMRKLLHLAYGVVKNKIPFDPLYPASPLPAT

SEQ ID NO: 232597 - protein, 387 aa, unidentified
MIYYIGIDISKYKHDFCIISNTGEIIVRNSSFENNKKGFQSLLDQLKPYNKSDVHIAFEATGHYSMNLELFLIDQGYSFIKMNPLVIHQFLKAQSLRRTKTDKADSLTIANYLMSVPYKPNSDILYNIFTLKSLCRSREQLIKERSKYQVLLTNQLDLTFPELKSFLDNRISTTLLFILEKYTNTEHISLMRDYDSIRCISRGKFSYSKFAKLKELAKNSVGHHDENTDLLISTYVSIIKTFNDKIDPIEKQISTIIKELNPRMLTIPGLGEISAATILSEYGDISNFSSPNKMLAFAGLEPSIIQSGTIENNGKMFKHGSGHLRYSIMNTAMIILRYSPTFYDYYLKKRSEGKCHRVALSHVCKKLIRVIYTLEKNNIDFDPSLLR

SEQ ID NO: 232598 - protein, 355 aa, unidentified
MATVPHDEIRVTVGVDTHEDVHVAVALDQLGRCLGELAIPTNTGGFARLVDWASELGVIDKIGVEGTGSWGAGLARWLRAEGLVVVEVDRPDRKTRRHGKSDTIDAEAAARAVLSGKATAVPKSGDGPVEMIRILRLSRRSAVKNRTMTANQISALITTAPHELRDQMRGLTTRRRVAVAAKFRPGEQPDTVADATRYALRELARRHQHLSEQIDRLDTQLDRLVAATAPDLVAKKGVGTHTAAALLVTAGDNPQRLAREGSFAHLTGSAPLDASSGKQQRHRLNRGGDRDANAALYQIALTRLACDEDTKLYVKRRIAEGKTKKEAFRCLKRYIAREVHKALVVNPALQLRLDT

SEQ ID NO: 232599 - protein, 344 aa, unidentified
MNQYAALDVSMEQTAICVVDETGRKLTEAKVVTCPDAITTWLRDKTATLTKVGMETGPLAVWLWNELSKRGLPIVCLDARHASAALSMMPNKTDRHDAAGLAQIVRTGWYREVRVKSHEAYVVRALLAARHTLVGIRGRIENEIRGLLKTFGVMFGKKVGGFARRADEIIAEELSVSPELRTVIETLVAARRAILDRIRVLDRRVYAVAKENRTARLFMTAPGVGAITALSVASAYDDPARFARSASTGAYFGLTPRRYESGEVSRNGHVSKRGNRMTRTHLFEAANVILTRGEKFSRLKAWGLRLAKTSGFKRAKVAVARKLAVILHAMWKANAPFRYGGEAM

SEQ ID NO: 232600 - protein, 341 aa, unidentified
MKKFIRIGVDLAKNYFQIHALVSEGGPAVTRKVRRSKMHEFFSQIEPCLIGMEACGSAHYWARELKAMGHEVLLMPPAYTKPYVKRGKNDAVDADACCEAMSRPGMRFVPIKSAEQQATLMLHKTRELLVKQRTMSVNALRSHLSEFGIIAAKGIGRVDELLELAESDATLPNAARAGVKVLSQALEGLDKAIDDLEDEITSAHAQNGMTRLLYKVPGIGKIISSVIAASVPDPSVFKSGRDFAAWLGLTPRQNSSGGKQTLGAITKQGNRYIRKLLVLGATSLLNVMGKRKGALRDWIVGLLAKKPARLVTVALANKLARILWAMMKTGESFRTEMFAKA

SEQ ID NO: 232601 - protein, 412 aa, unidentified
MEVVYERCAGLDVHKKSITACVLWALPKGKKKQEKRRFATFTQDLLAMADWLRESGVTHVAMESTGVYWKPVWNILEGHFEILLVNAQHIKAVPGRKTDQKDSEWIADLLQHGLLKGSFVPPTAVRELRDLTRYRVSLVQECNRIANRVQKVLEDANIKLASVATDALGASGRAMLDAMIEGQSDSGELAEMSKGLLRNKRAELRLALEGRMTDHHRFLLKQLLRHLRFTEARMDDVEAEIDRRMKPYQDDVHRLCSIPGVERVTAWGLLAEIGFNMDQFPSAAHLASWAGLCPGNFESAGKRLSGKTRKGSAALRRCLSQAGWAVSTKKNNYLTAFYRRVAARRGAKRAIIAVAHQLLVIAYYLLKRKEEYRELGPNHFDNINADRVRHSLVKRLERLGHVVTLQPAVQSA

SEQ ID NO: 232602 - protein, 319 aa, unidentified
MRRTPVGVDIAKLKFDVAVLLDNQKYKTKKFANTPSGCREFAAWLSRFGDCHVCMEATGSYSTELATYLADNNYHVSLMNPACIHSFSNTELTRNKTDKSDAAMIARYCALHQPDPWFPAPLSERQLTALVRHLKNLEEMRQMEENRLEVAEAVIVPSLNEHIATLDDLIRETKKKISQHIDDNPDLKRDSDLLKSIPGVGEMLSSSLLAFAGNLRRFTSSKALVAYAGLNPQRCESGMFKGKSRLSKVGHGELRSALYMPAVVAGQYNVVVKDLIERLKLRGKTGKERVCAAMRKLLQLAYGVVKSGKTFNAEIPLAG

SEQ ID NO: 232603 - protein, 340 aa, unidentified
MTITTVGIDLAKNVFAVHGVDQNGKTALIKPKVSRAALPELIASLPPCVIGMEACSGAHYWARLFRQYGHEPRLMAAKFVSPYRMAGKSGKNDAADAQAICEAVRRPHMRFVPVKDESQQAMQCLHRTRQGFIEEKTATYNRLRGLVSEFGIIAPQSTDALRHVVSEQKYSLPLQVQQCVIDLLEHIDRIEENIAEYDRILSKAAKTDHRSQRLMTLKGIGPTTACALVASIGNAHDFKNGRQLAAWLGLTPSQYSSGGKSKLGRITKAGDSYLRTLLVQGARSVLIGADKRTDSFSRWVCMLVERRGYWRAVVAIAAKNARLCWASLHYGDDFRLYSAN

SEQ ID NO: 232604 - protein, 430 aa, unidentified
MEQLDGIRLQRFRQLKNEIRGSDEYLIVGIDVAKERHNAFFGTAAGRTLHKGLFFDNTIEGFRKLLTITEVLTVQHDLTKVVFGLEPTANYHKPLGEHLIKCGHMVVLVAGAAVKHNRPLLDGRWDKHDTKDSANVSDLICQGKFLYYEYPDPKMQDLRNLLALKRRLKKEEHGLQVRIRNQLLAQYFPEMDRHFGTAVSLAVVGRCLDPSMIAGMEFDEFRRSIAPGRMNIAQQKLLQAIWRAAPESIGCHVGDEVLFEGKVMVSKLNQVRETIKEVKDKIEDLCIEFPEYPCLLSIPGFGPDVSSKVLGAIGNPFRFISGKQVLKMAGFDLCAQRSGKTSNSVTPVISKQGKADLRYALYQAAFTASFNNKGFITYYTNKLRGRQREKGIGTKMRVKIAAKLLVIAWTLMKKKETFDPKYLNKGDTSV

SEQ ID NO: 232605 - protein, 412 aa, unidentified
MKKHTYRSKNVNKINFAQVKERLANEPVVFAIDIAKEKQYGLLSNTSGTVSELIWWTHPEQTVELLSALKALECTIDIVVESTGTYGDALRFQFRDCGFEIYQMNAKRVKDASEIYDGVPSMHDAKSATIITRLHRDGLSKLWVELSNDERTMNALRREYDMHQSQYQRNQGRLEAYLSRHWPEVGYLLSLDSVTLEKLLIEYGSPASIASDAENAANNMRLWGKHLLSDAKIEAIIKSACDSLGQPCIESELRYLQALAKELQHSRLQQKQAKQALEESIKSNDDLRELGTLIGMVTTAVLFSCHLDPRKYDCARSYQKALGLNLKEKSSGRHVGQLKITKRGSSVARSYLYFAALRLIKNNAVVKAWYLNKIDPRAKNKTVIAVMRKLSKALWYVGRGDKFDATKLFTVA

SEQ ID NO: 232606 - protein, 408 aa, unidentified
MINDAINTSRVIGFDAHPDSFTAAILSGPTPAAAVVEKMFNKVPMNRLLQWAKKNTLDSDIIVLEASGNSFHIARSLRSAGREASVLESRHIGKLKEAHANNDKISAIRIGKAYLAGTAKIVWIPDETTQERRDTFHTYSKAVKRSTQVTNLIKSYLSDHGVRWKSKTHILNQKESIMQACQWSPRERLIIEGMLMDLQNAQSQRAHWNHFMAQEVLHDPLLLSLTRLTGVREIVAYSIGAIIGDINRFASPKKLVAYIGLNPAFDKSGEGEWNGGIKGHGRRDLRSHLIEAAQSILQSNHDLGRWGKKLMARKGSRNLAVAAVARKLAVAIWYLMKGLWSTVEEVEAGMKLKIGKMIGKMGKEGLSLIGKTRKEFKEEIEQNLKKGREYILDRARSSPLKSSLKEAS

SEQ ID NO: 232607 - protein, 417 aa, unidentified
MQYVPSVLPAEPINGLTCGIDWARDDHAIAIVDEHGRQVHRSTVEHSSAGLHELVGLLARTGATEVAIERPDGPVVDALLDAGITVVVISPNQMKNLRGRYGSAGNKDDRFDAFVLADTLRTDRARLRPLVPNSSATVALRAVVRARRELVIHRVAVANQLREHLKRVFPGALGLFEDLDSAISLKFLTRFDCQDRADWLTPKRLGAWLKSVGYTGRTDPATLHTRLTAAPRGATGTEGAAHVCITRALVASLTSLVEQIKTLEKRIGEQLATHADAHTFTSLPRSGTLRAARLLAEIGDCRARFPTPEALMCLAGVAPSTRQSGKMRSVGFRWSCDKQLRDAVCDFANDSRHANPWAADIYNRAIDRGKDHPHAVRILARAWLYVIWHCWHKRIPYDPARHKALQALLEQRENPAA

SEQ ID NO: 232608 - protein, 402 aa, unidentified
MRAMARRKVVRECRTFATTTDGLASLLAWLSAAGCSHVAMEATGVYWTPVWKILSDGQFDLLVANAAHIKNVPGRKSDLNDAMWIADLMACGLIKASFVPEEPFQELRSLMRTRKQLGREQTRHVQRIQKTLEEANVKLDSVITDILGVSGRRMIEAMIAGVRDPYALAALAHRSLKASPQQLVDALRGRLTDHHRFLLKLHLGQWDALDAALRAIDREVDGRIERIDQNLKDGEIPLRALILLLSAIPGVSTLSTITILSEIGRDMSRFPTAGHLIAWAGLCPGQNESAGKQKSSRLRKGAPWLKTMLIQCAWAAKRQKNSYYMAQFYRLQARRGPHKAICAVAASLLTAIYHMVKNGTGHHDLGADYFDRRSPQAKAKRLVAQLSKLGFEVTLQPTATAA

SEQ ID NO: 232609 - protein, 318 aa, unidentified
MSNETCVGIDVSKEKLDVAIGSSGEVWPVTNDEAGHAELRARLAAASARLVVLEASGGYEAIVAGTLWDAGFQVAVVNPRQVRDFARGMGKLAKTDQIDARVLALFGEKVPLEVRAPIDAEAKELQGMVLRRRQLVEMLTMERNRRGLVAAGRARKSLDKHIAWLEEAVRRASDDIDQTVRKSPLWREQEDLLRSFKGIGPVSARTILVELPELGKLNRRKIAALVGVAPFNRDSGKFRGKRMIAGGRSQVRTVLYMAAVTAARSNPVIRSMYQRLLAAGKAKKVALIACLRKLLSILSAMVRDNARFAPRPAARTLA

SEQ ID NO: 232610 - protein, 369 aa, unidentified
MEDRITYVGLDVHKEGIVVAVAEGGLRGEVREYGRIANTAAALDRLVRKLGGEGVRLRFCYEAGPCGYGIQRHLSARGHECVVVAPSLIPKRAGDRVKTDRRDAAGLARLHRAGELTAVWVPDAQHEAMRDLVRARLDAVHALRRARQQLSGFLLRQGCHYGRPAWTKLHRRWLAGLKFEQAVHHIVLEDYIAAIEAAEARRDRLTAQIEAMLPDWTLASVVAALQTMRGMALVNAATLIAELGDLSRFANARQLMAYLGLVPSEHSSGASVKRGGLTKAGNKAARRLLIEAAWCYRFPARVSRELRLRQEEQPRPIREIAWNAQLRLCARYRRLARSGKPANVVTGAIARELAGFIWAIARRVPPAAG

SEQ ID NO: 232611 - protein, 414 aa, unidentified
MRALVERCCGLDVHQDTVVACLLIGEPGKPLRQEVRTWATTTRALEALRDWLQAEKVTHVGMESTGVYWRPIYAVLEGPFVLIVGNARHIKTVPGRKTDVKDAAWIADLVRHGLIAPSYVPPQPLRELRDLLRYRRKLVEGRASERNRLLKLLETANIKLASVMSDVFGVSGLAILKALVAGETSPERLADLGKGPLRKKRADLVRALEGKVEEHHRFLMGVQLRRLDAADHDIAALNERISERLKPYTAEHALLMQIPGVDGLAAAAIIAESGVDMAVFLSAHHLAAWAGVCPGNHESAGRSKSGRTRKGNVHLRTILVGAAISAGRCKGTYLRDKYHRLKARRGALRAALAIAHKILIAAYHMLARGVSYRELGEAYLDQLSQTRTAAHLKRRLERLGYHVTLEPKTVAMVT

SEQ ID NO: 232612 - protein, 391 aa, unidentified
MIYVGIDVAKDKHDCFITNSDGEVLFKPFTITNNLDGFNELYQKIESVTEDATKVKVGLEATGHYSYNLLGYLIDKGLAAYVINPLHTNLYRKSLSLRQTKTDKVDARTIASMLMSDVNLKSYSDISYHNEELKSLTRYRFDKVKERAKLKSSVSRLVCILFPELEKLVPTLHMASVYSMLSEFPGAKHVASAHLTRLTNLLSEASKGRYSKDTAITFREAARASIGSNMPAKSLELKHTIKLIQELDSEIDEIENEIKVIMDEINSPILSIPGINYRMGAMIIAEIGDFSRFDSPDKILAYAGFSPSTYQSGQLDGAYAHMEKRGSRYLRYALYNAAKYVCHWDPTFAGYLAKKRAEGKHYNVAISHAVKKLVRVIYLLEKTKQQYIKVA

SEQ ID NO: 232613 - protein, 428 aa, unidentified
MTSVGIDVSKGKSIVCILRPYGEVVASPYEVLHTETDISALTTRIQSIDGEVRIVMEATGAYHLPLLSSFKDAGIFVSVINPLVMKKYASTAIRKTDKLDSVRIANYGIDHWFKLADYTLPDELYAQLRLLGRQYAHYITIRIECKLSLTDILDRTMPGIKALLSGKRSEEPTKDKLSDFVAEYWHFDNITKKSEVQFIRSYCTWAKKKRYHASESKAKEIYTLACNGIPSLPSSAASTKMLTLEAVRVLKEVNKTLETILTQMQELAITLPEYTVVRSMNGVGDVLAPRLIAEIGDVRRFHNGSALIAFAGIDSPPFQSGSFTGTRRKISKRGSSLLRKTGYEVMKCLKTVKPIEDDAVYRYMLKKEAEGKAKKVAKIAALNKFLRIYYARVKEIFVNGIFLDSEPEASIATAAGGLPFTAVQKAVN

SEQ ID NO: 232614 - protein, 387 aa, unidentified
MTKVNDLSRSLAALDQDTTLIAVVELSSKSWLVAAAVPGIERHPLKKLDPDASALLKLIERWRGEAERRGRTIKRVVLAYEAGRDGFWLARWLKERDIEAYVIHPASVAVSRERKRAKTDRLDAAMLLRVLLGWLRGERGHCSMVAIPSMDEEDARRPSRERETLVGERARITNRIKGALVRFGIRSFNPLLRKAPQSLEKLQTAEGGPLPVNTLEEIKRDLARMAVVREQIAAIEKARVHRLKQAPKTGSNAMVQLLARVIGIGIETADMLVREVLSRTLRDRRAVGRYAGLTGSPDESGSRRREKGLTRAGNARVRRGLIQLAWRFLMFQKQSALTQWYRARTAGATPTQRKSLIVALARKLLIALWRLVTTGEVPHGVVLRPAI

SEQ ID NO: 232615 - protein, 375 aa, unidentified
MLVTKLSDGWLFPDRMEVRAHDWTPGPSIERRTTMDDYIGLDVSLKETAISVRRDGERVWRGKCPSDPRLLAEVIRKRAPKAKRVVFETGPLSVWFYHALSAEGLPAICIDARHAKAALDMSPNKTDANDADGLAQLAEVGFYREVRVKGYDSMLTRTLVAARTRLVQITVDLSNQIRGLMKTFGLVVPASKGGRFEANVRRLLADHDGLEAIILPVLEAWRGVRIRAADLGRQLLAAARRSRSCQLLMTIPGVGAVTATAFTAAIEDPANFKTSRCVGAWLGLTTRRYQSGEVDYDGHISRRGDAHLRGLLYEAATVILTRTQAESSLRVWGLKLREKIGFKRAAVAVARKLAVVMHAMLKSDAAFDRAAGAMA

SEQ ID NO: 232616 - protein, 316 aa, unidentified
MVLSPLFVGIDVAKATLDIAVRPTAETWSASNDATGIDALVLRLGALAPTLIVLEATGGSQGPLVAALVAAALPVVVVNPRHIRAFAQAVGILAKTDRIDARVIAHFAEAVKPAPRPLPDAETQELRALLVRRRQLVEMVSAERARLDTAPPSIQDAIQAHIAWLTTQVAGLDDALTRASQTHPVWQAKDDVLQSIPGVGPVLARTMLGQVPELGTLGPKPLAALIGVAPFNRDSGTLRGRRTVYGGRAEVRAVLYMGALVATRHNPVIKTFYERLLAAGKAKKVALTACMHKLLTIMNAMVRDLKPWQPQEVPSA

SEQ ID NO: 232617 - protein, 321 aa, unidentified
MMYVGVDISKDFFDCAFSRDNGQGYQTRQFENNRSGYKQAVVWAPVDSHWVMEATGPYHQRFAWYLDEQQEAVSVVNPLIIKRYGQMQLKTAKTDVQDAILIADYGTYHPPERWHMPDGRKNELQQLQGWLEDLMGDQTRLKNRIEATSQLVLPSPVVRRGQKAHLRQLGKKIKAMKKTIDDLLKKEFTALYQRLQTIPGIAETTAAQMIIVTNGFTLFETAKQLVAYTGLAPRVDQSGKRRSGVTSIAKRGNGRLRQLLYLCSWTAQRCNPACRSLADRLRAKGKPERKVKIAIAAKLLRQAFGVAMSGKDFDEKIALGT

SEQ ID NO: 232618 - protein, 377 aa, unidentified
MKTLHKRCAGLDVHKVEVVACLRLVMRSKVDRQVRRFATTTQGLLELAEWLEIAGCTQVAMEATGVYWKPVWHILEERFELTLANAAQVKNVPGRKSDVNDATWLADLLAHGLIRSSFVPPPPIQELRDLTRTRKQLTREIVQRGQRIQAVLEEANVKLTSVITDILGASGRRILKAMIAGETDGESLAALGHERLGCTRVVLVEALTGRVREHHRFLLAQHLRTIEQLEESIAAFDARIDATLLPLCDIVERLREVPGLGPIAVETVIAEIGIDMSRFPTAGHLLSWAGLVPRLDESAGKRRSTRIKKGAPWLKPVLVQSAWGVSRTKSGYLKAQYLRLKARRGPKKAAIAIAASILTIIYHMLRDGTCYQDLGPE

SEQ ID NO: 232619 - protein, 358 aa, unidentified
MLADVVDAVVGIDTHRDTHEVEIASPNGVPIARCSIRNDSTGYAQLLAWIVDHAPGPRLVTSIEGSRSYGVGLSRALTAAGLPVLESEQPPRSARHGKGKSDAIDAHLAVLAALRLDATHLPAPRVDGDREALRILLGARHDLTAAATAQTNRLRALLLGSDTDADRDLARGVLSDAVLTELADRPPRAGATREQAVRHGEIRRLALAVRDGGRALKQNRAQLQAVVEDMAPGLTERRGIGPVTAAQVIVGFSHVGRCRNDAAFAALSGTSPLQASSGRTVRHRLNRGGDRALNSALHTIAMVRMRCCPRTKAYVTRRTAEGKTTREIRRCLKRYIARELHRALTATMTATTASDSPA

SEQ ID NO: 232620 - protein, 445 aa, unidentified
MYHEGLKPMRTDCAGVDVGSREMWVDVGIENSPEPVRKFDAFTEDLNAMARWLKSCGIVSVAMESTGVYWIALFQILEAHGIEAILVNAAHVKNVAGRKADWLDCQWIRILHCYGLLRGSFYPAPQIAVLRSYFRHRQSLVELAASHIQHMQKALTLMNLQLHHVISDITGVTGMNIIRAIVAGQRDARQLATMRDRRIKASEQTIVKALEGNYRSEHVFQLKQSLELFDFYQDKIAACHQEIEAHLQSMDSKADVSNLPEARAKKKTIRNRPPFDVRQQAFRISGVDLTQIDGIQESAALSLIAEIGIDMSRWNTEKHFVSWLALCPNNKITGGQVIGRHTKKSAQRAREILCLCAQSLLDSRSALGAYCRRLCGRLGKPQGITATAHKLALLVYRMIKLGKSYLDIGQERYEEQFKERTLKHLARKAKDMGFQLVPVTQNQVP

SEQ ID NO: 232621 - protein, 438 aa, unidentified
MSNKVIFNLDELFISVGIDVGADFSWMSIALPNQQFVGKPYKILHNSIDSLTTAVSKIKEAEELYSLESRIFLESTGIYHYPLFCYLRDKGFNCSVINPIITKNSTNINIRKVHNDRFDSKKAALVGLKPDLKVSLMPSDLALNCRNLCREYYDLMDNRSAYVNKLQGELRIAFPQYLGIFSKVTINTSLTLLETYTSPSAFLKADKQEIIDIIRSTARFGLTYAQNKYNAIVQAATDANQFGYIIDSNIKRIRLYISFIRKYDEEINSILESLHELVDANEDSDFVKQIHLIETFKGAGFLSAVSIMGEIGDFSAFSKPKQLFAYFGLDPAVKQSGKFEGTKVQMSKRGSAIARRVIHTLTLQSISISRNREAKNPVLREYYLKKCDSKPKLVAMGAVSHKVCNMIFAILRDNKPFKIIAPQEHIKQYNSAKCDIAA

SEQ ID NO: 232622 - protein, 314 aa, unidentified
MAETAGIFVGIDVSKTWLDSAVHETEIAWRIGNDDKGITNLIKRLKQIGPTLIVLEATGGYEMQLVTALVHAQLPVVITNPRKVRAFARSTGRLAKTDKLDAKLLAHFAAAIRPAVRPMPSEEEEQLTGLLVRRRQLVDMLTVEKNRLHTVRPALRDDIREHIAWLQTKVAKLDEEIDQFLKKSSLWIEKDVILRSAPGVGRVTSCTLLAMLPELGTLNRQEIAALVGVAPVNKDSGRKQGKRRVYGGRATVRSVLYMAALAAKRYNPRIKKFYDDLLLRGKEKKVALTACMRKLLVILNAMIRTNQIWHSESI

SEQ ID NO: 232623 - protein, 322 aa, unidentified
MSGFIGIDIAQSDFVVAREGMAGSRSYPNTERGHRDLIKDLSRDGEKVELIVLESTGGYERRLSAELGGAGLPVAVVNPRQVRDFARSTGQLAKTDQIDAHILADFAARIRPEARPLATDEQDELKELLTRHEQVMQMLTAEKSRLIQAEGQGRRQSLRRKIKTHIRFLERELNILDSDLDGTLRKSAIWREKDDLLQSVPGIGKGTARILLGFVPDLGTVSSAEIAKLVGLAPFNRDSGKFRGVRHIGGGRARVRSILYMATLVATRFNPTVKAAYQRLLASGKPKKVALVACMRKLLVVLNQMIKTRTRWRESLTLAHTS

SEQ ID NO: 232624 - protein, 423 aa, unidentified
MEVMHERVAGLDVHKDNVVACVRTMSDGKPTREIQTFAATTDGLLGLLEWLTSCRCELVAMEATGVYWMPVWKILSDGAFKLIVVNAAHIKAVPGRKTDTNDATWLADLAAFGLVKASFVPDEVQHELRALTRTRKQLVREQTRHVQRIQKTLTEANIRLDSVISDIMGRNGRRMIEAMIAGVRDPRKLAALADNRLKAKPKQLYDALHGRLTEHHRFLLQLHMGQWDTLDATIRNIDREMEARVSRMDAEVTADKANFSDLIEQLATIPGVSRLSAVTILSEIGTDMSRFETAGHLVAWAGMCPGQNESAGKRKRTRLRKGSPWLKTMLVQCAWAAKRKKDSYYKALFFRLQSRRGPQKAICAVAASILTAIYHMLKDGTDHQDLGAGYFDQRAPHIKVKRLVNQIAKLGFEVTLQPIANVA

SEQ ID NO: 232625 - protein, 458 aa, unidentified
MQSFYMGGDVSKGYSDFVILSAQKQTVMKNFQLDDTFDGHCKLYGILDEFIKDHQEATLYAAVESTGGYEDNWYNELNKFQSTLNIQVARLNPVGVSHNNQADLKRNITDKISARGIAEYLIAHPEKVTYQQHQDPMASLRKQWKFIKMLTKQSTQLLNQLESLLYTANPEILAYCKDDTPKWVLKILLKYPTAINLARAKVTAMAKIPYVQKDRAKELVAAAKTSVASATDPTTQHLIISTVNQILHLKKNIDEQNAYMARMCSVPEVELLKTFPGIGDASAIGLMLEIQNIKRFSKAKNLTSFFGIHPAYKSSGDGTGSFKMSKKGRKEPRTILFMVVRSAITCNPVIRDLYNDHVQRGKSKMSAMGVCMHKTLRIVYGMLKHGKAFDPQIDMANRQRTGKPSEQVIKDKSRRYQNYDSKAPISRRQKKKRLEREKSHSERITKRGIITPVPLTTT

SEQ ID NO: 232626 - protein, 381 aa, unidentified
MPDVSSTAPQQVRLWIALDVHKHSIVAATLPPTGGTPEVQRVENTERAIRRFIDRVGGPDGLAVSYEAGPCGFDLLRLLGRLGAACDVIAPSLVPVRAGDRVKTDKRDAKKLVRLYRAGELSFVQAPTPQQEGLRDLVRCRDDLMCARRAARHRIAKALLRHGHIFREGKKSWTLQHYAWVRRQRLADELAQRAVDHMLCHLDSLDAQIAVIDHELEQIAAREPWSDAVAWLCCFRGISTRTALGLLAEIGDFRRFGTARELMSYLGLTPSEYSSGDQQHRGHISKCGNQHARRLLVEAAWHYRHAPRRGQRAARLADRVPADVSTRAWHAQIRLHHRHRALAEHGKRSTVTNVAIARELTGFVWAAMTHQPLRDQETAAA

SEQ ID NO: 232627 - protein, 415 aa, unidentified
MRNAGIHANSLLEVRRMYNAVGIDVSKGKSTVAVLQPGGTVIRKPFDVSHTSQNLNELADYLSSLDGTTKIVMECTGRYHEPMIKALSEAGLFISIVNPHLIKNFGNNSLRKVKSDPADARKIARYTLDNWTELRQYSGMDNTRTQLKTLNSQFSFFMKQKVAAKANLIALLDNTYPGVNKLFDSPTREDGSEKWVDYAYSFWHADCVRKIGLKAFTERYMSFCKKHHYIFQQDKPEKLFNASKELVAVFPKEKTYKLLIQQSIQQLNLASEHVERLRREMNELASTLPEYSTVMGIYGVGKTYGPQLIAEIGDVSRFTHREALTAFAGVDPGVDESGQHKSKSNRASKVGSARLRKTLFQIMTTLLQNAPEADPVYRFLDKKRSQGKPYYVYMTAGANKFLRITMVKSKNVCGT

SEQ ID NO: 232628 - protein, 416 aa, unidentified
MKKHNNSGKKSEPTSKGTKSGGPVQRDTKEVLAELVGKLKAKLDPTKVAATSAGEKHQRGELRPNLDRLTVGVDLGDQWSHYCILGLEGERLAEGQLRTTQEDLATFFQGLNEARVVVEVGTHSAWVQEVIRGCGHEVLVANPRLMEGSKRRKRKNDRIDANKLARLGRVDPESLYPIQHRSREVRQDLVMLRARDALVAARTEIINTTRGLVKSMGTRLPKCSSRSFAPKGEEAVAVEMREALLPLVRLAATLSADIKEYDKKIEELGREKYGHTALLRQVKGVGPITALAYVLTLENPQRFAKSRDVGPYLGLVPKQEDSGESQPQLGISKAGDTMVRKLLVGSAQYILGPFGPDTDLRRYGLRLCERGGKNAKKRAAVAVARKLAVLLHRLWVSGEVYAPLHHAMSAPIVAAA

SEQ ID NO: 232629 - protein, 305 aa, unidentified
MDTHLDTHTAALCDARGRAVARLQVPATAAGYAQLLAWARSAAGGSRAVWAVEGTRHYGLGLARYLASQGQQVTEIDNTRHVGKRRAGKSDPIDAVRAARELLARPHAAQMRADGDREALRLLMVDRDNAVQSCKTARTVLAAVLVTAPAELRERLRQLPRTRRAQQCAALACPAQADRQTRVLHQTLIRLGQRITALASEAAELETQIAAIVEDMAPGLVAAEPGTGALSAAQILLSWSHAGRIRSEAAFAMLSGTAPVPVSSGRTDRHRLNRLGDRQLNRALHIVAVNRMRCHPPPRPTSGGA

SEQ ID NO: 232630 - protein, 415 aa, unidentified
MSGKMEKACGADIHRDFLVATILSTDGSKLQNRFDTSLESLLKFKSWLKNNGCHKLAVESTGTYWISIYNVLYDSVNFILANAYQIKHIPGRKTDTLDSEWIAEVCLKNLISPSRILPKESRDLRSLTRARERLVKIRTALKNQVHQELEAASIKLTSVLSDAFGKTGRHIVDGLLNGWNLDKILDSIPSSRLKAKKDEIRATIQANISQEQAFLIRSLLSSIDAVAGQIAEIDVKVSELFSRKDDLRIAMSMPGMGAISASSILAEIGDYNNFDSPNKLAAYFGIVPSVYQSAGKQINGHITKHGSPHIRRMLVEVAHAIARTKSNSKLKRFFLRIKARRGSKIALVALARKILCILYHLLIKKETYREDGPFKPKSVKAVKGATQPSMSLDEMIQVICKAGYEVRSLTNLERG

SEQ ID NO: 232631 - protein, 426 aa, unidentified
MLSGGSYLSFKIFKFNCCGLDVHKTWIYACIGITDSNNRTEYKQARFSSFSKGLHQLCVWLAKYNCNDVCMESTGKYWIPVFNILEQHKIRVTLSHPKYTKPMKGNKTDRKDAKWICDLYMCGMVKPSFIPPADIRELRDLVRYRFKLTCMITGEKNRAQNCLTVSNLKLDDVFSDVFGKSSRSITEQILQHPGEKFDVSPFVDSRCKTPIEEIQAAVDGNISKEQDVKLRQCLDHIDELQKHISEVEQEILRLSDKYEAALNLIRTVPGFDKNPMTAIQVLSEIGGDMSVFLTAKHLVSWAGCCPRNDKSDRKIKSTRISCAGSYFKPVLVQIANALIKSKKHFEFTTRYKRIKTRRGHKKAIIARCRMILTAIWHILTDLKPYTSDGFLESRPVKKEKVLTTSQALNLLRQRGYLIKDEPSPVS

SEQ ID NO: 232632 - protein, 414 aa, unidentified
MEKERIDIYHKRNTCFVGIDMHKDAHCAVVIDCWMNKLGEVNFENRPSRFPAFVEDVRKICGIKEIVFGLEDTRGFGRNLAAYLVGRKFEVKHVNPAYTSAVRLANPIIYKDDSYDAYCVARVLRDMVDTLQDAKHEDIFWTIRQMVKRRDLIVKSNVMNKNQLHSQLAYSYPSYRKFFGMIDSKSALCFWENYPSPEYIWNTTPEEIYQTIKPVHQALKIQRIHEIISMIERDGDTRKDYQPERDFIVRNIVKDIRHNKELIAEIDDELRKLIPLTGYKLHTMPGIDLVTEAQIISEIGDINRFPDSDKLARFMGLAPVQFSSAGKGKDQRCRNGNRALNAIFHFLAIQMVAVSASGKPRHPVFREYFEQKVKEGKNKPQALVCVARRLVRIIYGMMKTRIEYRPFEKADDKN

SEQ ID NO: 232633 - protein, 306 aa, unidentified
MYHSFIGIDISKDEFHVAIFGNEKVSQYKNNKHGFKKLCDEHNILSSLVVLEATGGYEDSLIKYLHECNIAVHKANPKVIKSFIRSLCKLGKSDKIDARGLARYAKERHEDLHQHISKSDVEQELLELTNRRIELKQMLTQEKNRLKGPANNFCKNSNNTIISAIETEIERLKIRLKDLLDQNEKIKAKVKLLADEIAGVGETTAISLISLFPELGELNRRQVASLGGVAPHPYESGKKIGYRQVRGGRQFIKPILFMSALTAARSKGNLGDFYRRLIANGKKPMVALVAVMRKILVIANAKLKVA

SEQ ID NO: 232634 - protein, 421 aa, unidentified
MKKRAYKTTDVKKVNVHRLQKMVEGHDIIFSVDVAKTDFVGCIMTLNKEVLITLKWKHPSESLLLLELILRDLRWHSLEVVMEPSGTYGDSLRALFLGHGIDVYRVSPKRSHDACEVYDGVPSMHDAKASAILGYLHLEGYSDPWPMADEDHRTLNAKIRTMNIYDESYFRNINRLEALTMRYWPELSNILSLQSATLLELLIKYGGPEQVALNPVEAGAFMRKIGGFQLKEKKIQAVLASASSTLGVKSIEAERCQIQELCSEIRRLQKHRRQAQLQVEAQTQTVASVNAMSPILGKVTAAVIYLALGDLNKHAGAGSVVKALGLNLKERSSGKHKGQLRITKRGSGLARMYLYMAVLRLIRHNNIVNAWYKAKIARDGCNKMKAIVAIMRKLAGALWHVGRGATFDASLLFDTQRLAIN

SEQ ID NO: 232635 - protein, 353 aa, unidentified
MTSTKYIGMDVHKESISIAVRNDAGKMVMECVIETKANIILDFIHGLRGELQVTFEEGTWATWLYDLLKPHVTKLVVCDPRKNSRQGNKNDRIDARELADRLYMNKLNSVYHGGAGVRTLKELARSDLTISKDLARVMTRVKAIYRSWGIPCAGKQVYAPRHRAEWLAKITEVGVLRRAEFYDQQLDALRSLRHEVRRALLAESKKHKATKLLCQIPSIGPIRAALRSALMQTPHRFRTKRPLWKYSGFAIETHSSADYRSVQGQLQKSKKQVSVRGLNRDCNHDLKNLFKSAATIASVKPGPFQEFYAALVAKGMRPEMARLTLARKIATIVWMVWKRGVSFDAQYLKPQTA

SEQ ID NO: 232636 - protein, 458 aa, unidentified
MKRKNKRTKGMEEARPFEGMSKVNQNAAGVDIGATEIIACVSGGEDVQLVKAFGNYTVDLLAICEWFRKHEVKTVAMESTGVYWIPLYEELERQGFECLLISSRSLRKVAGQKTDVEDAQWIQTLHSYGLLKGSFRPQGDLVALRTLLRHRSQLVEHRSPHIQHMQKALLQMNVQLSQAVTDVTGMTGQKIIRSIVNGERNARVLAGFRDPGCKHSEEEIEKALTGTWREEHLYVLKQSLELYDFYTEKVEACDEEISRRYGMTRPDWVSRELPVIPDKKRNSHSKNAPKDAKGIREHLYRINGVDLSLVDGMGVSLAQTVTMEVGSNVGEKFPSEKHFCAWLGLAPKHDITGGKVLSNRTLKTKNRAGQAFRLAANSVKKADCPFGVMYRRLRSRLGPAQATVATAHAIARVVYKMLKYKVEYDPLSVNEYQKQYEEQQVKYMRKRAAKFGYQLIPA

SEQ ID NO: 232637 - protein, 575 aa, unidentified
MLPQPSPSPQSPRCIGVGVDTSRYGHYAVFLRDDLQPADAELAFAESGTGYDSFRQRLQRIAERDGPCSFLVRVDAAGQYADNLLAFLHRLAQHGPWPLTVSCGDPQRNKNYRAALFGGQKSDPVEARAAARFALTEKPHGDMPLSPEMRTLRQTAGRLQAVVRQRTRLINQLHHLLALTFPELALLVADLSAGWVLELVHRFSTAARLAEARDADLAAIAYLPHDQIAPLLQQARSSVASQDGAIAEELVRDQVRQLRDAGARQKRLEKLLSDAYHALAESNHLETIPGVGAVTAAVLTAFILDIERFATPGKLVAYFGVLPIEASSGVDRSGQPRGPKRFVMSRRGNDLVRRYLWMAALSAVRCNPAVRALYARVVAKHPEQKAVAVGHAMRKLLHLVWAIWKTGKPFDKEYYPWQTPAHVEGSDKSLSAEEEVAGRKPVEPARSAVSATSPDIVVAEESVGEGTAVDFAHLKSQLSLERVLDHLGLLGRLRGTGRQRRCACPIHRGDQRGRTFSVNLEANVFQCFDKGCGAKGDVIDLWSSVNGMSLREAALDLVRTFHLEPTARGTEKRNG

SEQ ID NO: 232638 - protein, 414 aa, unidentified
MKKNYIQFEQVVERGCGMDVHKEIVVVTIRGKGIKTITKSYNTFTSSLIKLKEWLKKHGITHIAMESTGVYWKPVFNILGDDFQILLVNARHVKNVPGHKTDKKDSKWLAKLLLSGLLRGSFIPSREIRELRDLTRYRTKLTNQVSAEKNRFQKILEDANIKLSVVLSDVFGSTGNKIMAEVLKGDYQPTQLLYLVHGHVKASREDIEEALTGYVTEHHRFMLRTMQGNIAKIESTIAEIDEQIAKMTEPYKEIIGLLETIPGVGHDGAIGIIAEISLDMDKFPTHKHIASWAGVCPGSNECAGKNKSGRITYGNKNLRSLLVEQAWAASRTKNTYLSSKYRSLVGRRGKKRAIIAVGHKILIAAYFIIKNKVKFNELGEEYLNNFRKDKLISYYKKQIEKLDPSTDLYKEVAA

SEQ ID NO: 232639 - protein, 389 aa, unidentified
MLVCGIDIAKYKHVALILDEKGTIVKPAFTFTNDRQGFDTLLSVLADVGGPVMVGMEATGHYWLTLYDQLTSEKYPAVVLNPLQIAAYRRSGIRKVKSDTADAFWIADFVRIATPESTPQDIPTLLQMRELSRFRFGLTEQIGDCKRRILTVLDRVFPEYETLFSDVFLKSSRGVLKEAVTADELANFDLSELSEILHTASRGRFGKAKATAIQAAAQRSVGVSFLADAVRIKMRCLLELIDLLEQQRAQVDAELATLMAKIPQHITSIPGIGPITGVAILAEIGDINRFERVEQLVAYAGIDPSVYQSGQFKASQAHMSKRGSPYLRNALWLAATTAIRHEPQLRTYYETRRAAGKPHGILMGAICRKLLARIYIILKEDRPYEIRED

SEQ ID NO: 232640 - protein, 343 aa, unidentified
MSQIKRIGIDTSKAVFTLHGVDQTGQPVLRTNLRRAQMIPFFKNLPPTEIAMEACASSHHWARLLAALGHTVRLLPPQYVKPFVKRGKNDRNDAEAICEAAGRPGMRFVPVKSTAQQAEGMVLKVRETLVCQRTQLVNALRGHAAEFGVIAAKGIRQIPPLLEAIAAETAIPSDAREMLALFGQEIEHLDSRIKAIEVKLIAMHKANPISRLLATIPGIGPIIALTLAIEVDPAAFKSGRHLAAWLGLAPKEHSTAGKQRMGGISRAGNERLRQLLVTGATAVIKVATRPGNKLATDWLLKLLQRRPRKLAAVALANKMARTAWAMMTSGEAYRHPPVAAVSA

SEQ ID NO: 232641 - protein, 416 aa, unidentified
MRTLTSKLADIQPETLLVGVDLAEENVAVAITYEARQVGRIRFGHNRDGYDRFLDWLEGMKGRVGAREVLVGMEPTNHYWQLLAAELERRGIAYRLVNPYTVKKHREGDQLDRAKNDQRDGFTIADLLRTGKFTFTQRQVGRYAELRGYSSRYHQLKRQIARTKIQLRQAVAQTFPEVGEAFKELTGQTAVAMLQKQAAAHQIGQQSETAFLQAVRADYQGNRFQWKKLGQAYELAQNSVGLVETEALQLAIGGHLQLLKLLEAQMATVCAALLDTFLALPEAKALLSLGIGAVSAALLLAEIGDPAAFSNARQLVKLAGIQPSPNQSGKKTNSPTPISRKGRPRLRAILYFACLRLVQTDEAFAAYYHQLQGRPQNPLTKMQALLALMHKLLHIAWSLIRHHTTYDPARWRSAGS

SEQ ID NO: 232642 - protein, 343 aa, unidentified
MEYYVGLDVSLKQTSICVVDRTGSVVREGVVDSDPEAISVYVRSKAPDAVRIGLETGPTSTWLWTELKRLGLPVICIDARHAKAVLKMQINKSDRNDAIGIARIMQTGWFKQVHVKDIDSHSVRALLASRALLVKIKRDLENHVRGLLKNLGLVIGRAKFNVFAVRAEELIENRPELIAAVGPLLAARKAIEQQVGDLDRKVHKLARHDLQVRRFMTVPGVGPITALCFKATIDDPTRFKRSRSVGAYIGLTTRRHASGEVDWSGRISKCGDRMLRMYLFEAAGVLLTRVPKWSALKAWGTRLVKRNGLRKAKVAVARKLAVILHRMWIDGTEFNWSTKKAVA

SEQ ID NO: 232643 - protein, 339 aa, unidentified
MTEIKRIAIDTSKAVFTIHAVDQAGRPVIRRDIRRAGLLEFFAKQPPTEVVMEACGGSHHWARELSALGHTVKLIPPQYVKPFVKRGKNDRNDAEAICEAAGRPNMSFVPVKSAQRQAELMVLRTRALLIGLRTQLVNALRGNAAECGIVAGKGIEKVDKLLEMVAADTTIPPAARRTLAMLGEEIARLDERLDAIGVDLIAQHKANPVSVLLAKIPGVGPITALTLVSEIDPRHFKSGRHLAAWIGLTPKERSTGGRQIMGGISRAGNERLRSLLVVGATAVIQHAKPGSKTASAWLLKLLERRPRKLAAVALANKMARIAWAMMSTGEAYRGVPRAA

SEQ ID NO: 232644 - protein, 420 aa, unidentified
MAPLSNQQFKAFVGIDWADTKHDICLQQAGDDRREFDCIPHQVTRIDEWAKALHQRFGGPIAIALELARGPIVSVLQKHAFFTLFPINPLMLAKYREAFKPSRAKDDPTDAELALDLLLRHPERFSPLRPQSAGMRSLLSLIEQRRELVGDKTRFTNRLTNALKQYYPQALEWFDDIDTVLFCDFLTRWPTLPAVRRASRKTIETFFHAHNCRRAKLIEGRLESIRCAASLTDDPGIVAPHRLLALMLVTQLRTALAAIDVFDKEIATVARTLPDFDLFDSLPGAGPHLTPRLLAAFGEQRDRFKGADELQKYSGIAPVTERSGKKCWVHWRWQCPTFLRQTFVEWAGQTINKSFWAGAYYRQQRAKGNSYQAAVRALAFKWIRILYRCWQTGTRYDESVYLNALRKRGSSLLRNLALPG

SEQ ID NO: 232645 - protein, 340 aa, unidentified
MQVTTIGVDLAKNVFQVHGIAENDVVLFNKPLRRAQFLPFFAKLDPCLIGMESCSSAHHWARELTALGHEVRLIPPMYVKPYVKRGKSDAIDAEAICEAVTRPTMRFVAIKTVEQQALLSLHRARDLLVRQRTQLINGLRGLVAEFGIYIPRGLARVIGFAEDITLGEVLDLPDIANEVIRNLSEQLMALHKRIRWYEERLKQVAKEDARVRLLRTIPGVGAVTASAIIASIGDGHQFRNGREFAAWLGLTPANKSSGGKEKLGRITKMGDQYLRSLLVVGMTSLVRQTRSHPERASKWLTSLLERKPARVATVAMANKTARIVWAVLTRDEPYSPRAAV

SEQ ID NO: 232646 - protein, 413 aa, unidentified
MSSHVIEWFTGIDWGSERHQVCVLDSTGEIVGEREFLHTGAGLAELGTWLATIAREPCAMAVAIEVPHGPVVDVLLDRGFAVYAINPKQLDRLRDRFSVAGSKDDRRDARVAASGLHTDRHLFRAVQASDPAIVELREWSRLAEELQQDRVRLGNRLRQQLWRYYPQFLELVDDMAAEWLLELWAMAPTPARVMRLRPAAIVRLLKRHRIRRFDAATLLTILRKSTIPVAAGVTEAAVLHIRSLIARMQLINQEVRTAEKKLDELLQTQIEDAGGGQDREPSDAAILTSLPGIGRITLAILLAEASDPLKRRNYAALRTLSGVAPVTKRSGKSYIVSMRYAAHPRLRNAVFYWMRAAVQNDPEIRHRYEALRMRGHSYGRALRGVADRLLELACVLLRRRELFDPTRCMSTTA

SEQ ID NO: 232647 - protein, 365 aa, unidentified
MQKAELSCEADSENYLGGSSETMYYIGLDVHKRTISYCVKDAAGRVHMEGKVGATRRELDAWIKTLPQPRTIAMEATIFTGWIYDHLLPHAEKVKVAHPLMLRAIAAAKRKNDRIDASKIADCLRCDFLPECHMASAEIRDRRRTLRYRGLLVKQMVQMKNRVSGLLLEKGVTHTKKRLHKVGYFAELMAGSEEIDASIRPLLKLSREQIVRSQKLDYALISSLERDPMLVERLRRLRTVPGVGPITALTWALEIGDVTRFRSIKQAISYCGLCGAEKSSADKVMRTPISKQRNKHIQHVLVEAAKLAPRLNHDLALLHEREMQKGNRNRATLAVARKLVCWMLAVERRKQDFVPADKFPGTAAA

SEQ ID NO: 232648 - protein, 429 aa, unidentified
MNYNTQNAKIESITEKTLIIGIDVGSETHYARAFSWRNYEYSKKPFAFSNDEIGFAAFKEWVNDIAEKHGMEVIIPGMEPTGHYWLNLGAYLQEQGMKPVHVNPHHVKKSKELDDNNPSKNDRKDPKTIASLVNEGRFSYPYIPTGIYAEIRNLSNFRIQTQEEITRIKNRMARWFSIYFPEIKDVYRNPDAVSGLMVIKQAPLPCDIRELGVEGVNKIWRDARLKGAGIKRATTLVTAAEHSIGNTEAPRSARKEIRNLLNDYEIYKNRMDELMEEIEKTLSEIPYIDKLMEINGIGIKTVSCFIAEVGDIGRFDNPKQVQKLAGYAIVANSSGKHNGESRISHRGRKRLRYALYEAAISVIGKNKEFKEIHSYYRTREKNPLKKMQSVIAVACKLIRIFYTILTKGVDYDGQKMLNDIVRPEIQPAA

SEQ ID NO: 232649 - protein, 360 aa, unidentified
MQTQRTELNFEGQNFYVGIDVHLKSWTVSILTETLPLKTFTQPANAETLYNYLDRNFPGGTYHSVYEAGFSGFKAHYSLKGMGIDNIIVNPADVPTSQKEQLQKDDPVDSRKLARSLRSGELCPIYVPDPSTMEDRSLVRMRSTLVKDLCRNKNRIKSFLYFYGIAYPPEFEKSGTHWSKRFMKWLNEAVVTEYESGTHAFKILIQEAEQHRAHLLEVTRKVRLMAKSEKYSKEVALLRSIPGIGIITAMTVMTEIETIERFNDTDHFAGFVGLVPTRHSSGEKKNDGEMTFRGQDALKSALIECSWMAARFDPTLLKSYLGYIKRMEPNQAITRIARRVLNRMYYVLKNKREYDSRVIK

SEQ ID NO: 232650 - protein, 357 aa, unidentified
MGKSIIDTSSVTCVGLDLAKRVFRIHAVDATGSVVIARPVNRRTLLKFFDALPRCVVAMEACASAHYWGRQLLELGFAVRLIAPAHVKPYVRRNKNDAADAAAICEAAGRPGQRFVPVRSVENQAALMRHRARELMVGQRTAALNALRGHLSEIGVVAAQGVQNAYALKRLACDGVDDDGEIVVPDCVRLALLPLVRQIDALDEAIETIDKELQASAKADETARRLMTIPGVGPVTASALLATVQNFGAFSSGREFAAFLGLTPREHSSGGKPRLGRITKMGDRYLRKLLVVGACSALAARKGHNDALRRWASGLLERKTVQYKFKLTAVALANKLARIVYALATKGGHYDDRPVAA

SEQ ID NO: 232651 - protein, 304 aa, unidentified
MFGIGIDVSKATLDVAVHGEQFRQFSNDKRGFVRLIRWLKTWPIKQVVLEASGGYERAALDVLPAAGLPMVRINPARARRFAQGTGRAAKTDRLDATVLAQMAHLLPLTRYVPPAPWQQRLAEFAQCRRQLVQMRVSEMQRLRRLVDPDLIAMKQRHIAQLSDDLKQLDKAIAEQLEGQPGWKNIGALKGVGPILISTLACELPELGSLGSKAIASLVGLAPMNRESGTWQGQRRISGGRAVVREALYMAALTAIRYEPRLRAFYAGLKAKGKASKVALVAVMRKMLVILNARKRDAEVALGCP

SEQ ID NO: 232652 - protein, 400 aa, unidentified
MFCGWDWGSMHHGVCVIDEAGTIVKQWLVQHTRAELDKLFAELAELAHPNDLPIAIERSEGLVVGLITAAGHPVLMAEPAGFNAARPRWGSAGTKSDAGDAFMLADYARTDGHRLRRVSAVAEATRELGALVRARTGLVEARTAASNQLWAVLAEHWPGAAGLFQKLTSKIALAFLTDYPTPQSVAHLGEGRMRQFCRRHAYRGGKPAAELVRRLRAAPAAANPIDAETLAAIVTGFVAQIRVLNTEIARLENTIENALDEHPKAILLQSLPRAATVSLAHLIAEIGPLLDRCDNPEQVAAICGAAPVTRASGKTRTVGFRYAANKPARVAITGFADNSRHSSPWAAQRYSQARARGARHPHAVRIVARGWLRVIWACWHTDTPYNPSRHRGEQLAAQPT

SEQ ID NO: 232653 - protein, 331 aa, unidentified
MKIKQTIGIDISKLTFDVRIHSNQFYQAFDNNLKGFKELIKWVEKNNPISKEQTLFILEHTGIYSEQISLFFDENKVSFALIPGLEIKKSLGISRGKDDKVDATKIALYGYRLRDEIKPYKLPSKYIHQLKRLLTLRERLVKQRAGHKSTFKEQKRIYIRKDNKLLLETQEKMIKFLTKQIRNIELEMNEIIKSNELLKQQYKLIVSIKGIGNQTALFMIVTTNGFTKFSSWRKFASYCGIAPFSNTSGTSIRGKTKVSNLANKKLKSLFDLCAKSAIQNNPEMKIYYKRRVEQGKNKMSTINIIRCKLLARIFATIKRQTPYVDILKYAA

SEQ ID NO: 232654 - protein, 349 aa, unidentified
MKFYNRQHQFYCGIDLHANSMHVCVVDHDGHKHVHRNFNTKRPDTFLASLRPFENRDLIIGCESTFNWYWLADLCTAQNLPFLLGHALYLKAIHGGKTKSDRIDSEKLAMLLRGGNFPTAYVYPAHMRDTRDLLRRRGTIVRRRSATIIHVQMVNHQQNLPPFQKSISYKANRIGIADRFDGDSLQRMVSLDVDLIDFYDRQIQKLDLYLEQHAKVDDADTFFRLQSIPGVGRILAMTMLYEIHDIRRFPGVGDFLSYSRLVKGTNSSAGKQYKPTGRKIGNPHLKWAFSEAITLLKRECPQAKAFAEKIEKKHNKARANTLLAIKLGRAVYWMWRRKTAFDPTVFEKG

SEQ ID NO: 232655 - protein, 414 aa, unidentified
MTKPLLVGADVHRKTNTICLMDGQSGTVGDKFTVDNNRPGTAALARELATAVVAGHYEALHIAAEATGWYWWHFFQALAQDPTLNHWPVELYVFNPRLTANFKKTYVDLDHTDPIDAFVVADRLRFGRDLPVPFHYDETYLPLRCLTRYRYHVVHDLAREKSYCLAMLYLKASEYTRTGKKPFSNVFGAASRAVLQEFASIEDIAALPFDELVEFIDVKGKRRFPDPTDNARKLQRVARDSYVLPQAMRQPINLILGWCLRHITFLERQQKRISTAIAELMEAIPHTLETIPGIGPVFAAGIIAEIGELARFNYQQAKVAKYAGFKWRRTQSSDFEADETRLTRTGNRFLRYYFCEAANSVRRCDPEYAAYYDRKHAEVRKHQHKRALVLTARKLVRLVVRLLTTNQAYRPRRR

SEQ ID NO: 232656 - protein, 319 aa, unidentified
MSKIILGIDVAKQKLDVALLTGGNTLTNQFDNSTAGFQLLQAWLKSLHLTQVHACLEATGNYSEAVAHFLHHAGHCVSLCNPFRIKGYAAAKMQRNKTDKADARLIADFCLTQEPDQWFPPTPEVAQLQALTRRIEVLQDMLQMEKNRLALAPALTRASIQRIMDTFEQEIKSLRESIKQHFDDHPDFKEQSRLLQSIPGIGEKTANLLLAEIEFGRYASARQVAAYAGVTPRRSASGTSLNGTNLSKMGNGRIRKALYFPAIVAGGHNPIIKEFAARLEKNGKTPMQRVCAAMRKLLHIAFGVLKHKIPFDSNLAFSS

SEQ ID NO: 232657 - protein, 337 aa, unidentified
MEYFAGLDVSMAETHLCVVTRDGAVVHEVKVPSTPADIAAALAQVQGCRRVLFETGRMAPMLYHGLSRLGLPVVCVESRQAYQALKSLATHKTDRNDARGLAHLARTGFFKPVHVKSLPAHAVRSLIIARKKLVGQRVTLENQIRGLAVVFGIRLPRALSPAFIRQALQASEGIPGLSAAMRGLVAARAAVLAAVVAIDADIRRMVRTSDACRRLMSIPGVGQLTALAFTAAVDDPGRFRRSRDIGAYLGLVPRRYQSGEVDYTGSISKCGDRRVRTLLYEAANVMLTRYKQPLKLKDWALAIARRSTMRKARIALARRLAIIMHAMLRHGTQFRPA

SEQ ID NO: 232658 - protein, 352 aa, unidentified
MEYIAFDCHKRYTYAVVEDEKGRVHWEGKIVHERGALAAFLKEECRPGSPVAVETVGNWYWIVEEIEQAGCVPRLVHAGKAKLMLGMTNKTDKLDARGLNKLQRAGTLPTVWIPLGDLRDKRELTRARITLVRQRTQLKQRIHATLAKYNLAIPEVGDPFGVKGRKLLKEKIAELPPETGAVTRMLLEQVEILDQRIAELEKRMEEVLAPSREVELLMTLPGVGFILATVIALEVGDVQRFPGPEHLASYAGMVPRVQQSGGKVRYGKTREDVNRYLKWAYSEAANVIARYHQKYAFRHVGQLYARIRERKGHQKAVGAVGRHLAEATWWVLHTGQPYQDPAICRLGRVMGA

SEQ ID NO: 232659 - protein, 358 aa, unidentified
MRICVAIDAAKVTHRAVAVDEPDAVDRLVGGIRALGQELAIGLVVVGAFAHFLEAVLQAEGIALVHTPGIAVNCAGPRFSAGERKSDPRDARTIADLMSTRDLRRILPRDDMRVALRLEVGWQRELIRNQTRRISLLRGLLCGIHPGFERTLGLSRKGALALLARDVTAAEIRRAGQSSLLAHLRKTPQLRGPGGLVERAPETGRAQEIVVTDEAPRAGLIRDVAAPPRSLGSLAQHWRPLEAWQKIVCIDHDLEALLADPPDGARIRSLPCMGAGLVTEFVACVGDIRRFGSTDALASAAGLAPVQRPSGKRSGWRRAYGGDKALKRFCYQNSFGAVTTADPLSPGFHDRKRRKGKH

SEQ ID NO: 232660 - protein, 387 aa, unidentified
MPQPNDLSRSLVALDQNSTIIAVVELSQSSWLVGGVVPGIERQPCKKLEPSPERLLALLHRWRDEAVRAGRTITRIALAFEAGRDGFWLARWLEARGVEAHVIHASSVAVSREHRRAKTDRLDTELLKRGFLGWLRGERGHCSMARVPTIAEEDAKRPNRERESLVGERTRIVNRIKSTLARLGIRNFKPTLRKAAERLATVHTPEGMPLPPNTLAELQRDMARLGFVVSQIREIEEARQKRLERQAETGPPAMVRLLARIVGVGVETADMLVHELLSRPMRDRKAVARYAGLTGAPDESGAQRREQGLARAGNARVRRGMIQLAWRFLLFQKESALALWYRARTADSRSGTRKTMIVALARKLVIALWRFVTTGEPLEGVVLRPAS

SEQ ID NO: 232661 - protein, 316 aa, unidentified
MAEELYVGIDVSKAELVVAVRPSGERMTLANDRAGIKRLVGRLGELKPQLVVVEATGGLQRQVVAGLWLAGIAVAAVNPSWVRNFAKGRGVRAKTDRKDAELLALFAERERPEPRPPADAETQALQELVTRREQLLAMLVAEKQRLTRASGTMRKELRHHIAYLEGRIKEVEEEIDQTVRRSDGWRRKNEIVRSMPGLGEHFSAMVLAKVPELGTLNRKQIGALVGVAPMPDDSGSRHGRRAIAGGRFEVRNKLYMCAMVAARFNPVLKQFYQQLVARGKPKKLALAAVMRKLIVTLNAMFKTNSLWRPPCPDPSV

SEQ ID NO: 232662 - protein, 329 aa, unidentified
MKIHWFIGVDISKKTFDGAILSQNKSSKAVHARFDNTPSGYKDFKKWLTQQCAKLSEVFVCMEHTGIYGLGLASFLEGTIAYCMENPLQVKRSLGIVRGKSDKVDAFMLARYCYLHREELKPTQLPTKTLQDLRILFSERERIVKALQVEKAVLSELNPVLNEKTKGRLRERMAGLKKDLGSVEKDLLEVVQSDPEIARNYKLATSVIGVGMVNALLFIMYSGNFEGITQPRSFACYSGVAPFEHTSGTSIRGKTRVSHLANKQVKTQLTNAARSAVMNDPELRRYYKRKRDEGKEHGVVMNAVKFKIILRVYATVRRGTPFVRLRQAG

SEQ ID NO: 232663 - protein, 341 aa, unidentified
MVTTIGIDPHKATHTAVAIDGSETVLGELTVPADRYQTEQLIGWASQLNGDGRRWAVEAAGGLGYLLSQQLVASGEHVVDVPPVLASRVRVLGSGRSDKNDPNDARSVAIAALHQPGLAVVLREDHTQVLRMLAKRHLELTSLRTQAVCRLHAVLTQLRPGGMTRRLSAKQASGMLQGMRTLDAVGEQRRTMARTHLADIRRYDRDIKANKALISKAVAASDTTLTDVYGVGPIVAAFLIGYTSNVGRFASADHYAAYNGTAPVEYSSGGKTKHRLSMRGNRMLNHAIHMAAVTQIRHDTPGRVYYDKKQAEGKTKKEALRSLKRRISDVVYRKLVADQQS

SEQ ID NO: 232664 - protein, 353 aa, unidentified
MGHKYVGLDVHQSSTVAAVHDEQGKSVMESILGTEAEAIGDFLKGLRGTIHVTFEEGTQAAWLYEIVKPVVAEVIVCNPRRNKLLAVGNKADRVDAQKLAELLRCGQLKTVYHGTPGVRLLKELVHSYDSLVKDTTRVMNRVKAIYRGRAIRCAGRDVYYQRNREQWLEKLTEPGVRRRALFLYQQLDNLRGLRREAKQAMLKESRRHPAYQILKEIPVLGPIRIAQILAKVASPHRFRTKRQFWAYCGLAVVTRSSGDYEFREGKAKKRKRAPMTRGLNPNFNHRLKYVFKSAAVDGMHQAPFEGYYARLLVKGIRPEMARLTLARKIAAVTLMLWKRGERFDELKLSEQAA

SEQ ID NO: 232665 - protein, 342 aa, unidentified
MSGMIIGLDLAKSVFQVHAVDAEGKVVITRKVRRSQMLEFFTRLEPCLIGMEACPSAHHWARELSALGHEVRLMVASYVKPYVKRQKNDMVDAEAICEAVTRPTMRFVPIKSESQQAILMVHKTRALLVRQRTMLVNALRGHLTEMGVVAPKGIRRHADLVERVLAHGADEIDLPPLVRDIVFSSARQIGSLNAEIKELERKILEWHRTSDASQRLATIPGVGVITASAMAATVVDPAAFRSGRDLAAWLGLTPRSNSSGGKERLGRITKAGNRYLRTLLVIGATAVVGFSRRTTEGPLMNWVRKLLQAKSARLTTVALANKMARICWAVMAHKTVFGEAAA

SEQ ID NO: 232666 - protein, 355 aa, unidentified
MTSTKYIGMDVHKESISIAVMNVTGKIGMECVIETKASTILQFIDGLRGDLQVTFEEGTSAAWLYDLLKPHVTKLLVCDPRKNASMREGNQSDKIDARRLAELLRLNHLSPVYHGEHGLRSLKELVRSYLTISKDLVRVMTRVKAIYRSWAIPCTGKQVYAARHRAEWLGKITKPGVRRRAEFYYQQLDALRTVRQQVRRELFTESQKHQAWKRLCQIPSIGPIRAAVLLGILQTPQRFRTKRQLWTYSGFGIETQSSADHRRVNGRLERVKKQSSIRGLNRNCNHDLKNLFKGAAIVASSKPGPFQEFYTALLSKGLRPEMARLTLARKIATIVLIVWKRGACFDAQHLKPQTA

SEQ ID NO: 232667 - protein, 318 aa, unidentified
MNTNTLQNINVGVDTGKSQLDIYIRPLDIYFTVPNTDKGISDAIKTIKKHKPQRVVIEATGRLEMPFILACDKAKLPYVVANPLRIKRFAEAIGQRAKNDRLDAALIAHYAERVQPELTKLKSENMRLMSDLVTRRNQLLTMQTMERNRLQILPKNISSTITPILTALKNQLEKVEAKIAKLIESSPEYQAKSTILQSMPGVGKVLAASLISNVPELGFITNKQASSLIGVAPITRESGRFKGKRMIKGGRPQVRTVMYMAMMSAIQCNPVFKATYERLLAAGKPKKVAIVACMRKMVVILNSMIRDGVMWDKGSAKN

SEQ ID NO: 232668 - protein, 352 aa, unidentified
MDNINSAAIVIGVDTHKSTHVAVAINTQGARLASLSIPANAKGYQELESWSRALGKIEAFGIEGTGSYGAGLSRSLLLLGHKVIEVTRPNRQLRYRHGKTDSLDAEGAARSVLNGQAMAKPKTQTGPVEMIRHLKIARDTAVKCRTQAMVTLKTLIVNAPAELRGVLDSIKGKIALIRYVAAFRPGKITSTTASAKTAMRALARRWLILHEEIQMHDKELERLVIAKMPSLMASHGIGTMTVAEMLILVGDDPSRIKSEAALAKLCGVCPIPASSGKTNRFRLNRGGNRQANAALYRVAIVRMRNHEPTIAYVRKRTQDGKTKSEIIRCLKRYIVREIYRHICMPKTAPATA

SEQ ID NO: 232669 - protein, 343 aa, unidentified
MYYIGLDVHKKTISYCVKDAAGHVHQEGKVGSTRRELDAWVKTLPQPRMIAMEATIFTGWIYDHLLPHAEKVKVAHPLMLRAIAAAKKKNDKIDARKIADCLRCDFLPECHMASTEIRDRRRVLRYRGLVIRQMVQMKNRVSGLLMETGVDYNKRRLHKVGYFEDLLKTNKEVNQSIRPLLKLSREMIDRSQRLDYALVTSLERDPLLAERLRRLRTVPGVGPITALTWALEIGDFTRFPSVKEAISYCGLCGDESSSADKVLRMPLSKQRNKYIQRTLIEASKLAIRYNHELAEVYEKERERGNANRATLAVARKLVAYLLAVDRRKQDFVPAEQFRATTAA

SEQ ID NO: 232670 - protein, 406 aa, unidentified
MHYLGIDVSKSDSRFVILDEEGERFSKAFTLQNDKLSFQRLLERLKELNLDKDNLLIGIEATGIWWENLYSFLSEVSFKVVVLNPHQTNKFREALRKKAKTDDIDAYIIAGLLRSKEYASSYVPEELIQTLREFTKLRYELIKDRRNYERQAASLLSLVFPEYEKTAIKNPFAVASTAILKIYPTAKNLAEAKPKHIEKIVRAIKGNNFNIDEIQELIDTARDSIYSGRAKDARGLNLKILLSHVEHIDESIKELDVNIENLLSPTKADDINSFPGANLLTIPGIGPKTLAVILQAVGSNGQVFASGTKLIGHIGFFPQIYESGETRTDNRISQRGPKMLRWAFYIAAVACLRHNPEMRSLYHKKLSQGKTVKQALICVAKKLAHLCLSMLKSGQPYRPERVFVCT

SEQ ID NO: 232671 - protein, 350 aa, unidentified
MSLNSAPSTITTIGIDLGKNTFHLVGLDRRGAIISQSKLSRGQLERRLGNVPSCLIGMEACSGSHHIGRRLRALGHDVRLIPAQYVKPFLKGHKNDYRDAEAIAEAVQRPTMRFVAIKTPEQMDLLALHRVRSRLVGQRTGVINQIRGFLIERGITVRQGVLPLRKALPDILSSTTGTLSPRVVRLIVDLAQDWRRLDERIETVSGEIEALAQQDDNCQRLMTVPGVGPIISSAVVAAIGNGIGFKQGRDFGAWLGLVPKQASTGDRTILGKISKRGNKYLRTLFVQAAHVVLARRPATARRGLWPWIEQASRRLHRNMLAIALANKLARIAWAVLARGRAYEPRVPVHA

SEQ ID NO: 232672 - protein, 373 aa, unidentified
MKRILKIAMDVHSKNYTLCAMEPTIGAEDRVYGEIQVAPDYKEVLRFIDSLKMKLGPNDEYSIECGYEAGCLGYTLYHQLTEAGVKCVILAPTTMLTQQGKRVKTDKRDARLIAQCLCYGGYHPVYIPTGEDDAVKEYLRMRDDHKLALKKLKQQISAFVLRHGHQYTRTKWTIKHVAWLHKLELAPMYRETLDEYMASYEEQEAKIERYDKRIEEIAAEARYQENAKKLSCFLGIRTHTAMSLIVETGDFNRFSKGSTYAAFLGLAPGEHSSSTSVNRLGISKAGNTHLRCLLIEAAKGICKGAIGRKSKELRSRQNGQSAEIIAYADKANIRLRSKYYKMIRHGKKKNVAVAAVARELACFVWGMMTGNIS

SEQ ID NO: 232673 - protein, 324 aa, unidentified
MPDAILGIDIAKANFHAVLLHDGGEHSRSFPNNAKGFTQVVHWLHNRKVRHVHACLESTGAYGDALAIALHEAGHVVSIVNPARVKGFAQSELARNKTDALDAGVIARFCKALVPPSWTPPSPEIRALQALTRRLSSLIDARAQELTRAETPGMVGPVAASIRAHIEHLNGQIHALQTQISDHIDQHPSLREQRDLLASIPGLGDKTSARIIGELPDIRQFARAKQLSAFIGLSPRQLQSGTSIHAKTRLSKRGNARLRKALYFPAIVAMRFNPILRRFAERLRAAGKSKMLVIGAVMRKLIHLAYGVLKSRRPFNPNIDTARA

SEQ ID NO: 232674 - protein, 343 aa, unidentified
MTKDTMIGVDLAKNVFQLHGASMTGQMQFRKKLSRQGFFKFMAEQPPAVVVMEACGSAHYWAREMTRLGHEVKLIAPHYVKPFVKRQKNDAADAEAIVIAAQRPEMRFVDPKSAEQQSRAILFRARERLVHQRTELVNALRACLYEYGHVVPQGIHQIRRIAEILDAPNSDLPDLMREECRDLLEQIAEKTVRIDARTGKIKAQTAEADMARRLQTIPGVGPLTALAVEAFAPPMENFRCGRDFAAWLGLVPRQFSSGGKERLGRISKAGQPDIRRLLIIGAMSRLNWLGRKSIPEGSWLARIAARKPRMIVAIALANKMARTIWAMLTKNEDYRVPAQVPAA

SEQ ID NO: 232675 - protein, 413 aa, unidentified
MQSESPPEVWTSNTQTLLGGLSPCQPLNKVRGNYNKRIVMKGASLGGAFEWTLEGVKPNHKEAWKIMLHAGLDLSRRRLDVCLLGADGSRLQELQVPPDRDGLRWLALSIYDRHGQQPVQAAIESMTGARFVHDQLELAGWEVEIADAVKAKGLAPLACKTDRVDAWVLAELSRRDLVPAIWLPDPSQRAERERARWRLHLVKHRSALKNRIGSTLMTFGHPRAMSDLFGLRGRQLLEAIELPQPWRGDVAAAVELIDDLDRRIDECAAELQRLGADHPYVPLLLTLPGVAWVLAYTIAAEIGDIHRFGSATKLCGYTGLCPRVRQSGEHDERGPLAKNGPRYLRWALIEAARHAARTPYFRAKYERTCQRLGKRGTKIGAVEIARQLAQAIWHMLTRNQPFAPAGAPLPLVA

SEQ ID NO: 232676 - protein, 453 aa, unidentified
MASISNAPVRHRTVGIDLAISAVQVAQIFDDGHAIGKPIRFRLTSTDLRRFVSTIKNGVSAETPITAVMEPTGMAWFPVANWLQRAGIKVIRVKGQRVKALRKYLSEHAKTDAADAHVLGAIPGFGGRGLDPVHVPGPEQHSLQRLTKQRHRYQELVCSARRRVLDLIRWACPALEPVLPDTVTQLTLAILGELFDPRKVVAMRRDVLARFLSRHASGNHPKSGPFIDSLVEKLKSAAEETIELHGDSVDFVALQFEVAQEVEHLRLWDCHVRAIERQVEQIYQRVHPSDALRSIPGIGATLAPLLIGVLGYAKRFRNEDHIRGFCGMFPTRNSSGGIEKPGQRLTKSGSDRVKRALYIAADVARKIDPDLAAVYWRLMVNKGHHHKQAICAVATRLVNRIYRVLKTGEPYVLRDQEGNEITVQQGKRIVAERFTVPLEVRQSRRNQLMPEPA

SEQ ID NO: 232677 - protein, 346 aa, unidentified
MTMKCMAGIDLHSNNLFCAIVDLDGKRVFERKLPCDLEAVLRALQPFKRRLEKIAVESTYNWYWLVDGLQDHGYPVVLANPAAMQQYNGLKHADDKSDGFFLAEMARLNILPTGYICQRPWRGVRDLLRRRMGLVEQRTRLILSLKSLHARMTGRDLGTGLIKRLKPQDAEKLFEHPADQLITRLDLHLAEQLRQSIQQIERRILAEVKRMPDYQVLQTMPGVGKILGLTITLETVDPKRFAGPGNYASYCRCVDSRRLSNGKKKGENNSKCGNKYLAWAFVEAANFAQRHDPACRKFYNRKKAQVNGIVATKALACKLAKAAWHMMSGNKPYDPGRIFPPVERNP

SEQ ID NO: 232678 - protein, 343 aa, unidentified
MDHFAGLDVSVKETSICIVDDTGRIVREVKVASEPEALLQVLGNPIYRFKRIGLEAGPLSQWLFSALAEAGLPVICVETRHMRAVLQAQINKTDRNDARGMAQMMRAGLYRPVHVKTLRSQKLRMLLTHRKLLQSKAIAIDNDLRGTLRNFGLKVGVVGTVKFEARIKELVENLPDLAELVEPLLIVRRTLREQIGILHRRLLAIVRDDEVCRRLMTVPGVGPVVALTYRATVDVPARFRNSKAVGAVFGLTPSKYQSGEINRTGAISKCGDEMMRVMLYEAAQIMLVRSAKWSWLKAWAMKIVRHRGMKKAIVALARRLAVIMHRIWVDGTEFRWTREVAAA

SEQ ID NO: 232679 - protein, 412 aa, unidentified
MEVLHPRCAGLDVHKETVVACVRIVSGGEVSRAVRTFETTTARLIELAEWLEASGCTQAAMEATGVYWKPVWQVLAGGGFGLVLANASHVKNVPGRKTDVNDATWLAELLAHGLIRASFVPGPEIQELRGLLRTRKQLVREKASHVQRLQKTLEEANIKLESVLSDVMGRSGPAMIQALIAGETDPAKLAALAHPKVRAPQARLREALRGRVKPHHRFLLGLHLQQIAALDAGIAAIDREVDAGLASFRDAVKQLSTIPGVSELSAQVILSEIGTDMSRFATPAHLRSWAGLCPRNDESAGKRRSTRLRTGAPWLKATLVQCGWAAARTKATYLNAQFVRLRTRRGPKKAVCAVAASILTAAYHMLKDGTFYADLGAAHFDRRRPDAQARRLVKRLADLGFSVELKSPIAAS

SEQ ID NO: 232680 - protein, 312 aa, unidentified
MDELYLGIDVSKAHLDYASHGSKETGQVENNGAGIAQLVAEFKECQPALVVVEATGSLEMAVVEALLTAGVPTPVVNPRQVRDFAKGMGKLAKTDKIDAHTLALFGFTVKPRVYLLPSAEAQVLEALLTRRNQIIDILTSERMRLYTVHDSQRARLEKHIDWLKAELEQIDEDLNQSVSASDIWKAKDTLLQSVPGVGRILSTSLLAWLPELGLLSGKQIAALVGDRDSGLMRGKRMILGGREQIRSVLYMSALSASRFNPVISSFYNRLIKAGKPAKVALTACMRKLLTILNAMLKHGTPWLAPSFGASYA

SEQ ID NO: 232681 - protein, 364 aa, unidentified
MHKETLAVAIAAPERLGEVRYYGTINNEAQAVRRLFQKLQGLYGNILSCYEAGPCGFGLYHQLTAMNIKCQVIAPSRIPKSPTDRIKNDHRDAISLARLLRAGELTPVWIPDLTHEAMRDLIRARAAAKRDSRVARQRILSMLLRTDKHYTGKHWTGKHRTWLANQSFSQPSQQIAFQHYCQSLEQIEDRILQLDQEISRLLPEWSLCNLVCQLQALKGVGQLIAITLVAELGDFSRFSNPKQLMAFLGLVPGEYSSGNSIRPRGITKVGNSELRRLLYEAAWSYRTPAKVGAWLIYYRPDSVTQYSKDIAWKAQQRLCSRYRSLTAKGKKSQVAITAVARELTGFMWDIALAAQSSFSQQKQN

SEQ ID NO: 232682 - protein, 323 aa, unidentified
MEGTLLFAGVDVSKARLDVALSDADSVWSVPNAEAGIHELVERLRELAPALVVMEATGGFETPVAAALVAVAIPVVIANPRQVRDFAKAIGQLAKTDAIDARILAMFAARVRPQVRALPDEAARSLDALLGRRRQIIDMITAEKNRLGFSLKPIHKGIEKHIRWLERQLAGVDEDLDDSIRRSPVWKAKSDLLQEVPGVGPNLARTLIAELPELGHLTNKKIAALVGVAPLARDSGAFRGKRMICGGRAPVRSALYMSVWSAAKWNPVIRLFYERLRDKGKPPKVAQTACMRKLLTILNAMMRDSATWDPTIPLNQLKTQHSC

SEQ ID NO: 232683 - protein, 306 aa, unidentified
MCIRTRSAWQSRKRVGRRRLIGNIADDVAKLLKVLARYGEARGVEVVYEAGPTGYGLQRALARRGYQAQVIAPSLIPKRAGDRVKTDRRDSLRLAELARAGELRAVWIPDPADEAIRDLARAREDAVNTRTQMRQQLKGFLLRHDVRYSGRSSWSKTYYRWLATLSFGASGAQTAFTEYWQAVSAADERVARLTTALVQSIAGWRFEPVVLALQALRGIDQVSAIGLVAEIGDIARFAHPRQLMSYLGLVPSEASTGERVVRGSITKTGNAHARRGGDQSTGMSLIHRRCIARVASPDRSETWASG

SEQ ID NO: 232684 - protein, 343 aa, unidentified
MEVYVGLDVSLKETSICVVDGSGKIVSEGTVLSEPSALAEFLRAKAGSAKRIGLETGPTTTWLWHELRALGLPVICIDARHAKAALSMQINKSDRNDAAGLARIMQCGWYKEVQVKSLPCHEVRAVLNSRAQLVKTKRDLENQIRGLLKNHGLVIGKAGGTIFRRRAEELVGEHRLLQDAVRPLLAVLEIVRREIADLTRKLLALARNNDESRRFMTVPGIGPINALAFCAAIDEPSRFRRSRSVGAYFGLTPRRFASGEVDWTGRVSKCGDAMVRTYLFEAAGVLLTRVPQWCKLKAWGHRLWKRIGFKKAKIAVARKLAVILHRMWRDGTDFIWSTKEAVA

SEQ ID NO: 232685 - protein, 382 aa, unidentified
MHARQTTLEMLNDRGQTVKRQTIRGGLDKVVEEVEKLPGPLSIAYEASCGYGYLHDRLAPLAKRVVVGHPAQMRLIFKSKRKNDRIDGGKIAKLLYLDVMPQVHVPGVDVRQWRGLIEFRAATLNRRVALKNQVRALLRGLGLAASVPRGLWSKKGIVWLKDLSGLGETEALRRDMLIDELSEVNRRIKLLEQALAKIAAAHPAVRLLMTIPGVGIRTAEAVVAYVDDVNRFGKMTQLGTYFGLVPCQDSSAAVNRLGHITKEGPATVRKLLCEAAWQARRRSRRVSGWFERITGGDTDRRKIAAVAVARKLVVVMGHMLRSGEAWREGPASTSSSTNTSMRTGCARRLRGSPPEDTVTGNDRRSSVAGAVAGPTVNGERRR

SEQ ID NO: 232686 - protein, 342 aa, unidentified
MKEASIIGLDLSKRSFQAHGALADGSVAFRKKLTREKVLGFLAAQPRCTVAMEACGSAHHWGRAIHDAGHEVRLIPPAYVKPFVKRQKNDAADAEAIAEAASRPTMRFVAVKTAEQQARAMLFRTRDLLVRQRTQLINALRGQLSEHGVVAPQGPANVAILAQAIDDMTPSLPLLVVELARVYLDQIDGLSEKVAGLEKAIACEAKRGAMTRRLQTMPGVGPITAMAIETFAPPMEVFRRGRDFAAWLGLVPVQHSTGGKQVLGKTSKMGQRDIRRLLITGAMVIVRWACRKGAQEGTWLHRMLRRKPRMLVAIALANKMARSIWAMLTKGEDYRGPVAATL

SEQ ID NO: 232687 - protein, 361 aa, unidentified
MAKVRSWAGLDVHARSVLAVTLDAQSGELRSRRLPGETAKVVEFLATLPGPTRAAYEAGPTGYGLARALQAAGIGCLVAAPGKIERPAQDKVKTDQRDAERVLRLLMIDALHPVRVPTVEEEALRDLVRAREDVRGDLMRARQRLSKLLLRHDILYEDTSSTWTQRHRAWLRAQDLGGGAQATLLDYLGAIDTLELRRGALEKTIAELVPASPCAQTVARLRCLRGVDTLSAVGLCAEIGDFGRFQRPGKLMSYIGLVPSENSSGETRRQGAITKTGSRHARRLLVEASWHYRKTPARGITLQRRQDGQPAHIIAISWQAQQRLHRVWRRLAEDRGKRRTIVAVAVARELAGFCWALAHAD

SEQ ID NO: 232688 - protein, 315 aa, unidentified
MPSPSCYLGVDVSADTLVVAGAGRRWQFANTKDGHRKFITQIKKLPGAGHVVCESTGSYHLRLCLALQEAGLAVTIANAARIHYFGLSEGVIAKNDPIDAELIERFANAKRPPVDPPLCRAQLALSESVTHRQQLVEMIKVLRTYRQQVLQAALVTEIDRSIAVLEKRLEALDRQLRAQIDAHPLWKAKLALLTTTKGIGFITALRLLAKMPELGTLNRGQCAALGGLAPYDDDSGKHQGKRAIRGGRQEVRTALYMAALSAAHFNPILKTFYQRLLAQKKPAKVALTAVMRKLLIHLNTLLKTITPPTPTPTAS

SEQ ID NO: 232689 - protein, 401 aa, unidentified
MESPIVSIDVSNGNSHYMCFIKNNKRFGKVKKIDHDIEGFKRLLEDIQKLEAETNEKVCAVFEATGVYTKPLERFLSKNSIKTYIINPLESARKRKEEIHNKKTDKLDPISISKVYYDKEEMMELKKKDETYNWLRKKNRLYEDQLNHLRKYKVTFQNQLSICFPGYLDLFKDGYSDIPMTILKKYPHPDLLKNKKAETVARYLEKNTCHTHKVSLEYALKIIEFAKKTYPGCEKDDVEVEIFKILLDKVIETQRECEKTLNEMITVASTLEEYRYILSIDGIGTNLAARIIAEIGDIEEFKSREALVAYAGLDPHIYQSGDQDGKHLKISKKGNKYLRCLLFLAVGCSIRGAKDNPVNRFYQKKKQQSNPINSKAAKTACTAKLLKIIYGICKNKTTYER

SEQ ID NO: 232690 - protein, 443 aa, unidentified
MGRYAGVDWASEKHDVLVEDEAGEELFAASFVHDEAGLRSLCRTLVRFKVRLVAIERPDGLLVERLLDAGLRLLALHPNQVAAARARFRVSGGKSDRFDSFVLCELARTDHHRFRVLEPDSDQTKALRALTRAREDLVGQRVALANQLRAELERFWPGPIGLFSALDSRISLAFLKRYPTPKDAKSLAAKRMHAFLAGQHYSGGKQPAELVAKLRRAPEGRAGELECGARRAVVLSLVAALEPIVAAVGQLERQIAATVRAHPDGEIFTSLFKHPDSVLTAAIMVAEIGDCRARYPNRDALCGDAGQAAVAIESGKRKVACFRWACNKRLREAFCTLADSTRHWHPWAADHYARSIAKGHDHQRAIRTLGRAWCRIVWRCWQDRVPYDPDRHRGLQQHITVIIPSSAGPGVVDQAATVRMAAPLLVNNTKRPHRSPQRSIAAG

SEQ ID NO: 232691 - protein, 326 aa, unidentified
MEHELHYIGIDTAKEKLDVDVLRPDGRHRTKKFANTTKGHDELVRWLKGHKIDHAHICIEATGTYMEPVAECLYDAGYIVSVINPALGKAFAQSEGLRNKTDTVDARMLAEFCRQKRPAAWEAPHPLERALRALVVRHQALTDMHTQELNRTETAREVQRPSIDAHLLWLEAELKRLEKQIKDLTDDDPDMKHRRKLLESIPGIGEKTSAVLLAYIGLKDRFAHARQFAAFAGLTPRRYESGSSVRGASRLSKAGHVSLRRALYMPAMVATSKTEWGRMFRDRLAANGKKGKVILGAMMRKLAQVAYGVLKSGVPFDASRHNPVAA

SEQ ID NO: 232692 - protein, 350 aa, unidentified
MAVYIGVDFHARQQTISYLTTEDGEIKRQQLDHGEAQEVRKFYQQFRGQQVLVGYEASGYAAWFEELLEELGYELWVGHATAIRTFARRRQKNDRRDAELILDLLVHDEFPRIHRPSVKSRELLRMLRYRHKLVQMRTIIKNSLHALSIQSGLSLRARLFTGAGLDQLRSLTMSPVMQYQRDQWLVGLESLNQQIVAATNWLGEQAAGDERVERVRTHPGIGLLTGLALVHTLEPVTRFRNQRKVAAYVGFDPQERSSGEKKRYLGISKAGSRVLRYLLVEAAHTAVKGDPELQRFYLRLQHRHGKAKAKVAAARKLLIRSYILLRDQIDYAEFGRRAVAARLARVASKA

SEQ ID NO: 232693 - protein, 343 aa, unidentified
MQTITTIGLDIAKSVFQVHGVDAPGQVVIRRQLKRRHVLSFFAKLPPCLVGIEACASSHYWSRELQALGHTVRLMPPAYVKPYVKRQKNDMADAEAICEAVTRANMRFVPTKTPEQQSCLMLHRTRHLFIRQQTAVINSIRAHLAEFGIVAPVGRKGVTELLHVVADPNDGRVPEVARACLAALGTQLLRLKEQILEFDRMIIAWHRSNQTSKRLHCIPGVGPMLATALVASVADPKTFRSGRNFSAWIGLVPKQHSSGGKERLGSISKQGDRYLRSLFVAGALAVIRYAKIHGTGHRPWLTALLGRRPTKVAAIALANKIARMAWAMMAKGERYKQPVALAR

SEQ ID NO: 232694 - protein, 355 aa, unidentified
MTVTIVEEARPVTCRTAITGGVDTHADTHVAAALDPVGGLLGVREFPATAAGYARLLSWLAGFGAVCLVGIEGTGSYGAGLARYVTAAGIRVVEVDRSDRQDRRRQGKSDPLDAVSAARAAQSGRASGAPKGRDGAVEAIRTLMVARRSAAGERTRTINQARALVLTGPDDLRARFAKHKPADLVTGLAALRPRPGDVAGHATRIALRELGRRAQFPAGQLVRLDELIIPLVTARAPGLLAIYGAGPRTAALLLIAAGDHPERLRSEAAWAHLCGAAPIPASSGKVTRHRLNPGGDRQANHALWRIVFTRLGSDPATRAYAERRTAEGKSKAEIIRCLKRYVAREVYRQLRPAAG

SEQ ID NO: 232695 - protein, 393 aa, unidentified
MEVLHTHCAGLDVHKDSVVACVRRMVEGKVTTHVRTFKTTTQELMALSEWLSTKAATHIAMEATGVYWKPVWHILSDGEFELILANAAHVKNVPGRKTDVNDAAWLADLMAHGLIKASFVPDEPTQQMRDLLRTRKQIVRERSSHIQRIQKTLEDANIKLDSVVTNILGLSGRRIIEALIAGQTVPQALATLAHRSIKATTDELEASLRGRVTRHHRFLLKLHLDQIDAFDATIARIDEEVNANVEPFRVAIEMLSAIPGVGFETAGHLISWAGLCPKNDQSAGKRRSTRMKKGAPWLKSTLIQCAWCASRTKGSYLQAQYLRIRSRRGAKKAVCAVAASILTAAYHMLKNGALYQDLGASYFDNRAKDKQALRLVNRLKNLGFEVQITPLAA

SEQ ID NO: 232696 - protein, 338 aa, unidentified
MSLYAGVDLHSNNSYIGIIDEENTVRFKKKCPNDLPVILGCLEPFKDDLEAVAVESTYNWYWLVDGLMDAGYPVHLANPAAMKEYSGLKHKDDRKSALWIADLLRLRILPQGYIYPKEDRPVRDLLRKRLHLVRHRTSHILSIKNIMSRNLGRTIRGDEIKTLDVKEIGVLFPEPCINRAVTASLSIVHHLTEQIEDMEKAILEKTRLRDSFKNILTVPGIGTILGLTIMLEVGDINRFAKVGDYASYCRCVESIRKSNGKKTGKGNRKNGNRHLAWAYTEAANFAKRYYPAIARYFTKKAAQRNTTVAIKAVGHKLARASYYVMRDNAPFDERRLFG

SEQ ID NO: 232697 - protein, 342 aa, unidentified
MEEVVTIGLDIAKSVFQVHGVSSSGEVVLRRQLKRARMLPFFAKLPPCLIGIEACNNSHYWARELTELGHDVKLMPAQYVKPYVKRGKNDAADAEAICEAVTRPTMRFVAVKSPEQQSLMMLHRVRLMLNRQRTQISNAIRAHISEFGVAAPVGRLGVERLLEVVEDEDDDRIPEDARVCLKMLAAQLAVVKQQVLENDRRVLASARRTELGRRLMEIPGVGPLLASVFVASVADPKVFKTGRDLAAWIGLVPKQNSSGGKDRLGSITRAGNRYLRQMLVIGAMAVIRYAERHGTNRPWLVQLLARRLAKVAAVALANKNARMVWALMTSRERYREPQVKAA

SEQ ID NO: 232698 - protein, 427 aa, unidentified
MNVQNDSRLTEFRQLKKEIRGSEKHLIIGIDVAKEKHHAFFGTATGKTLYKRLIFDNNIAGFEKLLLQAEAIKTQHGLNYLVFGVEPTANYHKPLGEFLIRHGHTVVLVGSGAVKNNRELLDGRWDKHDTKDAANVADLISQGKFLFYDYPSQKVRDLRNLLSFKKRLKKQDHSLRMRIRNQLVAQYFPEMDRHMHQSMAENLAIIKWCLSPAEIATKEYRDFFLTVTNRDRGMAQQRRLKTIWESAGNSIGCEVGEAVQFEAALLVESLQYIRQLIKETDAKIKEICLNFPEYEYLLSIPGFGPAVSAVTLGALGDPFRFKTAKQVLKMAGLDLSASRSGKNSDNMTAKLSKKGKSDLRYALYQAGLIASTRDKHFIAYFTDKLQGRERERGIKTKMRVKLAAKMLTIAWTLMKKKERFDPGYLRS

SEQ ID NO: 232699 - protein, 313 aa, unidentified
MILGCDVGRDWVDMALVRRDLKPVFERRVANTVEALTEAFAGLHHQHPHLQVVVESTGSYQWPTIQAARQLSLPVRLLNPIVTKQLTRSSVRPTKTDKKDARRIAQAGLQGAGYLVHDGQLTMLACKAALRTADRLICQETRLKLMQQYLERLPAAIPTDALQQCQRALRTSARQYRSWATTQCDPAPIALLQSIPGVGPVIATAVAAELGDIRRFPDGKAVVAYAGLDPRIRQSGTVLGYGKLSKRGSPTLRRHLFLAASVARRFDPDLKRKYGALRARGKAYTPSVVHIARLLTYRIYAVLKRGEPYQVRG

SEQ ID NO: 232700 - protein, 493 aa, unidentified
MDLEREKVAKARTPLERLQEFLQTGPDLAINSSKESYMPKPRDKANRVRTVSKQELENLPLLNPDAAAIDIGSAQHLVAVPPGRDTESVRSFGAFTADLHALARWLKQCRIRSVVMESTGVYWIPAFQILEQYGLEVLLVDARAAKNLPGRKSDVLDCQWLQRLHSFGLLSGCFHPAAEIVPLRAYLRLREELVRAGSQSVQHMQKALFEMNIQLANVISDITGETGLAIIEAILAGERDGKKLAQLKHRRIQASKETIAKSLEGNWRVELLFALQMALDTYQFYQQQIAACDQRIAQALAKLPTRQPAAQSEPAGQTDQLLKAQKLTPLQAELIRIAGVDLMRIDGIGEQIAQVILSELGTDLQSNFKSEKHFSSYLGLCPGTKISGGKVLKRKSRKVAHRVATALRLAARSLHSSDSALGANFRRLKARLGAPKAITAMANKLAKLVYRLMVYGKDYFDTGAQRYEQKFRLQQIRRLQKQAKMLNLKLVPV

SEQ ID NO: 232701 - protein, 347 aa, unidentified
MNFYNNTHPYYCGIDLHARSLYVCILDLNGEKLVHKEIPAKPDKLHSLLKPYIGNIVVGVECMHCWYWVADFCESLNVDFILGHALYMKAIHGGKAKNDKIDSFKIANLIRGGNFPLAYTYPKEMRATRDLLRRRTKIVRHGAHLKAHVVNTTSQYNLPPNAVNLKNADAREQLRSTFPDPVVQRNIDLDMAILDAYAKELSKVEWFIEKQAKQHKPVHLKLLKSIHGIGPILALTIIYEIGDISRFDTVQKFASYSRLVKCKAESAGKSYGTQGNKIGNANLKWAFSEAAVLHLRGNDQAKNYLLKLQKRMSKAKALSVLAHKLGRCVFHMLKKETEFDAKRFLAG

SEQ ID NO: 232702 - protein, 410 aa, unidentified
MERMLERCAGLDVAKDELVACVRTPDSDGGRRQEVRTYPTFTSGLEGLADWLEAEGVTEVVMEATGQYWKPVWYVLEERGFELKLVNARHVKILPGRKTDVADAAWLAELLEHGLLRGSFIPPPAIRELRDLTRYRKRLVQAHSSECQRVQKTLEDAGIKLDSVASDVLGMSGRAMLKALVAGEREPKVLAEMAKGRLRPKIPQLREAMRGRFRDHHALLIRLALEHVEHLEAAIAALDDQVESVMAPFAEARDRLDTITGVGKRAAECIIAEIGTDMSVFPTAGHLASWAGLCPGNNVTGGKRRAGTTNKGNRWLGEILNQCAWAAAHSRNTYLSAQFWRLARRIGKKKAAVAVSHSILIIAWHLLTEGCDYDDLGGDYFVKRDADRARQRALAQLEALGYRVTLQSAA

SEQ ID NO: 232703 - protein, 340 aa, unidentified
MHTTIIGIDLAKNVFQLHAEDASGKVLWRKRLRREALGAFLRKQPAALIGMEACGSAHYWGRELGALGHEVRLMHAKYVKAYVKRGKSDLRDAEAICEAVQRPSMRFVPIKSVEQQVARSLERARDLLVKQRTQLANAVRGLLAEQGIIARVGQAGFETLAAKIDAGDSAIPRLLLTALKPLVEQWRALHANIDALEAGIVTRAKSDERMRRLMKIPGVGPLTAHALVTAIGDPRRFSTGRDFAAWVGLTPLTDSSAENTRIGHISRQGDHSLRRLMVLGAANMARHAKAKPDQARAWLLGVMARRPVKVAMVAQAAKNARIAWALLRSGDDYRETMAAA

SEQ ID NO: 232704 - protein, 390 aa, unidentified
MANDSTGFRVPVFVGMDVHKETITLAVAQWDGGPAVVRGTIPNTPAALRKQLDRIGPADQLRCCYEAGPTGYSTWRLLADWGIDCTVVAPSLIPKKPGDRVKTDRRDAEQLARLHRMGDLTAVWMPTPEHEALRDLCRAREAAKRDQERARHRLLKFLARHAEHPPLGMNRWTQAYRDWLAARTLADPNRQFVLDDLRQQFADMEARVARLTARVKAEVQDGPFTALLGALQCLKGVGPITAVTLVAELGDLTRFRRPRMLMSYSGLTPSEYSSGGRVQRGRITKCGNGHVRFVTIESSWHARWGTRPDSTALKRRRAGQPEAIVHIAEKAQRRLCQRYYQLLKRGKTSGQATTAVARELLGFVWAIGQAVAHAGTEGADAGAVEALAAA

SEQ ID NO: 232705 - protein, 367 aa, unidentified
MKKVTTTSMGRRPGKLRDGKLTVGLDLGDRSSFYCVLNGAGEVIVEEKVATRPEAMKETFGRMPRSRIALETGTHSPWVSRLLTELGHEAIVAHARNVRLIGESRRKDDRLDAQALARLARIDPQLLSPIQHRSAQAQADLSVIRARYALVRARTALVCAARGLTKSFGERIRGRNPKGFSLATSETLSPPLQVALAPLLSALAAITARIREYDAQIEKLAEESYPETALLKQVKGVGTLIALTYILTLEDPRRFRKSRDAGCYVGLQPGRRNSGQSEPQLHITREGDSYLRMVLVQGAQHIIGPFGEDSDLRRWGLKLAERGGKRGKRRAIIAVARKLAVLLHHLWISCEAYEPLHNTRKRRLAAA

SEQ ID NO: 232706 - protein, 453 aa, unidentified
MEQEEKISMEIVNPKAAGIDVGSRSHWVAVGQQESDIKEFGVFNQDLFEMADWLHQNNIKTIAMESTGTYWQNLYAVLIAKGFHVILCNGKFTKNIKGKKTDVKDCQWIQKLHSLGLLSSSFLPDGKTEQLRTYCRHRTNLIHNAASTSKKMQKYLRLLNLRLDVVVKDICGLTGLLIIRAVCKGETNPQTLAALRHGNCHKSEEDIAKALQSNGRKDYLFALQQELDTYDHLQNKIAQCDKMIEELLNEIIDDDENKKQHHIDSKPYKRINKNTPKNIDMNLKSYQMFEGTDLLAIEGMSYSTVLALMSEVGIEGIKKFPSAKHFCSWLRLAPNNKISGGKVLSSKVPKGSNRLKIALRNAANAIGNLKDSTPLRDFFQRINFRKGRVSAVSATARKLAVVIWNMVVKGVQYINPEGYLFLDQKRKLGIVKRIQKQITKFGLTNDDLSFATS

SEQ ID NO: 232707 - protein, 346 aa, unidentified
MSELKEFIIGVDVSKKTLEIAILEKATQKVVGTKSFSNAPKGFSEMILYVASKTKRCISTVVLESTGVYHENFVDYCHEVGWAVSVVLPTKIKNFTKVENIKTKNDKVDAKIIARYGCMFPLKLWSPMTGNYHELRSLSRHILALKKERSRAMTRLSAYKSTKRTPKSIIESEQEHILCLGDMIEHEEAELKKLAYADHDFKRKIQKLATIKGISELVAIQIVCEVNGFEMFANTRQVTSFAGFDVVERQSGDYAGRTHISKKGNRYIRRLLYMPAMTAATHGTGKFVNLYQRIAERNTGTSKLKGLVAVERKLLIIIYTIWKKNENYDPDYVHASAKITSGIAET

SEQ ID NO: 232708 - protein, 486 aa, unidentified
MAKRKMSTFERIRRGERLGRRERKALEHCLQAEDPELEIVHPNAAGIDVGNKSHFVGIKPGSCEQPVQEFGSWTADLKRMVAWLKLHGVKTVAMQSTGVYWIALYEVLEQAGLEVYLVNARGTKNLPGRKSDVQECQWLRKLHTYGLLRNSFRPPEEIRAVRTLWRLRERHVREAGRAIEQMQKALTTMNVQLGNAISDLSGTTGLAIIRAILAGERDPRQLAKLRDRRVEASEEEIAHSLEGNWRDDVLFELQQALDGYDFLGRQIAACDVELQKYMAALPSREVGESAPVASTSALQAGPLPQKARAKRKSKNAPSFNLGAELRRITGVDFLSIDGINVMTAQVILSEMGTDLGAFPSESHFTAWLGLAPRRDISGGKVIGHKSRRVKNRVANALRMAAEALAHSDSYLGARYRHLRARLGGLKAVKAMARYLACLVYRLLTHGQPWVDRGSAEYERKRQGRELVALQRRASKLGLRLVPVQAS

SEQ ID NO: 232709 - protein, 315 aa, unidentified
MIVNEVAKNVEKIISIDTAKNSFQVLVVNQKTGKKKNTKVQRSKFVEYILKQGPCLIFMESCSASQHWARLFESFGFTVKLIAAQHVKAFLRNRRVKNDERDAEAIYKCGIQPDTKFVRIKTVEEQTVALLHTLRKAAVSQRVELSNRIRGILAEFGIVVARGRGSFNSEIEALFNECEKIHDVNLRVAISSLFEDYHRLEQREKELSEKIEALNKDNELVKIALTCPGVGSLTASAIVAEVGDASQFRNGREMAAWNGVVPSQHSTGGRSTLGGITKTGNRYLRTLLAQCACAVIQNASRHLEQGRIHTLTDLL

SEQ ID NO: 232710 - protein, 382 aa, unidentified
MDVLHACCAGLDVHKRTVVACVRRVEPAGKVHKTTKTFATMTRDLLDLADWLVAQGVAVVAMESTGTYWKPVFNLLEPRLSIVLVNAHHIKQVPGRKTDVKDSEWIAQLLQHGLLRASFIPPRSTRELRDLTRQRTRLIGEKTAVANRIQKTLEDANIKLGSVASNVLGVSGRDMIEAIIGGEHDPAQLAERARRRLRGKIPQLREALRGSVTEHHRFLLRGLMDHLGHLERLIGRHCDRIAEAMVGAEEAIRRIMTIPGIDLRVAEVVLAEIGLEMDRFPTAGHLSSWAGLASGNHESAGKRRSGRTTPGNRWLKTALVQAAWAARRAKGTRLAAKFNRIARRRGAKRAAVAVAHTILVIIYHLLKEGTDYQEIAGEITAA

SEQ ID NO: 232711 - protein, 386 aa, unidentified
MQATNASTPIANHSGTIFIAIELSQKTWLVTLHSPDKERMSRYKLDGGDHVGLLVLIERLRERAGRALGAVPAVVSCYEAGYDGFWLHRLLTRAGISNHVFDPASIAVDQRARRAKTDRIDGEQLLRTLMAYCRGEPRVVRIVRVPSPDQEDARRDSRERQRLIQEQTAHSNRIKALLRLWGMAVGNPRRRDWLSWLAAQRDWQGQAVPPRAMAELEREHRRLMLVREQLAALDEPPVRAQPTAAAAQMAERRERLLRLKGPGPVFAATLTNEVLYKDFRNRREVAGYCGLAPSPWRSGRIDREQGISKAGNRRARHAAVELAWLWLRHQPDSALTQWFRQRTAGAGGRIKRIAIVALARKLIVALWRYLTTGLLPDHAVLKAAKA

SEQ ID NO: 232712 - protein, 314 aa, unidentified
MSSTKYIGMDVHTESISTAVRNSVGKLVMECVIETKASTILQFIDGLRGDLRVTFEEGTWATWLYDLMKPHVTEVVVCNTRKNTSNNGSKSDRIDARKLSEQLYMNNIKSVYHGEHGLRMLKELARSYLTITKDLTRVMNRLKALYRSWGIPCAGKEVYAPRHRAEWLAKISEAGVRRRAEHYYQQLDLLRPLHQEARRDLLLEAKKHKPWKLLRLIPGIGPIRAAIVIAVMQTPHRFRTKRHLWTYSGLALETHDSAQYRVAEGQLQRSKKPAMVRGLNKDYNHDLKDIFKGAAMRASTAAGPMHDFYEALSA

SEQ ID NO: 232713 - protein, 362 aa, unidentified
MFRPHTLYIRIRIVRKVSEPAFAMKDQDVTDVIRRKQQTAMRYIGIDVSKATFVVAYSSDKGGEIRTFNNTTTGIKQFIGALPKDSSIHCVMEATGNYSALLLYMLNVAGITVSMENPLKVKNFARAMLSTVKTDKIDARLIALYGEKMNPQPFKIQGEAILRLRQKRTVIRQLTKQITAMSNLRGSLACLPVPDKGATHTVDETIEFLEKRRDRLQSELTDLVEVEFSRQLALLTTIKGIGITLATALIITTGGFTYFQNAKQVSRYLGICPTYEQSGTSVNIRGHINRNGDAYTRGLLYVAAWTASRFNTKCGETYTRLRQNGKPGKLAMIAVANKLVRQAFAVVTHDKEYVDGFVSNRP

SEQ ID NO: 232714 - protein, 402 aa, unidentified
MSSVFVGIDIGKKKHQSALMGEKGETLARTLSFTNSLAGFQSLLKQLDPWSKEDTLIGLEATGHYWLDLYTRLVDTGYSVVVINPLQTDGIRNMYVRKTKNDRCDAVIIADVLRFGRFRESSVPEEDIAQMKALSRLRTGMVQSMSNVKRQIVAILDRLFPEFEACFNDIFSKSSMAVLDEFADPEELARCPLEELADLLFEKSNGRLGAAKAEHLKETASRSFGTGYAKRSMKFELKLLLEQVRFTQEQILEIEVKLKELMKDHQLITTIPGISDILGSAILGEIGDISRFDNPKQLVAFAGLDPSVHQSGNFNATSMHLSKRGSPHLRRALYIAAHVARIHDPVLKEHYEKLINRGKHHRQAQNAVAAKLARIVFSVLYSKEPYDIEKLRSKPKLEEMSA

SEQ ID NO: 232715 - protein, 342 aa, unidentified
MREYVGLDVSQKETSVCVIDEQGRLVFEGKAKSTPGALTELIRRRAPRAERIGFETGAMASWLWHELRRVGLPVVCIDARHAHAALSVRINKSDKNDARGLAELIRIGWHREVAVKSEESQRVRAVLVARARLVSIRRDIENQVRSMLKEYGLLFSRAIGAPFRQQVVELMGASHPLRAVVEPLLSIHEEVAREQAKLDEDVRRRARADETVRRLMSVPGVGVVTALTFRHTIDDPSRFSSASKVGAYLGLTPRRKQSGETDITGKISRWGDRLLRTYLFEAASVLVHRTKKWSTLKAWGVRLIKRIGMKKAKVAIARKIAIILHCIWVDGTSFEWGQPKAA

SEQ ID NO: 232716 - protein, 323 aa, unidentified
MNKDIKYFGIDISHLVFDVTDSDGKYYQFKNTISGFKKFEKLLDLSSHCVMEATGYYHYQLAYYLLESGIKVSVENPLAVKRFIQMKLSKIKTDKSDSKLICEYASQVDLKLWKGSSKHQIECLQMTRLLSVYTKQSTMLKNKLHGEAVLGNPSKTVLGSLNRSLKQLEKEINNLEVKLLLLVKEAHQDVLTRLKTIPGIGAKTALMLVVLTDGFERFNSGGELCSYAGLTPLIRKSGTSVNGRSRISKIGNQKLRNLLFMCSFNACKYNKACRDIYERIVAKGKSKKLALIAVCNKLLKQAFAIAKSGLIYDDSYRSTLAKN

SEQ ID NO: 232717 - protein, 337 aa, unidentified
MTLYCGIDLHANNSVVAVLDEHDRTVYERRLANDLATILDVLRGYQGELAGCVVESTYNWYWLVDGLMDAGFAVHLAHPGAMPQYAGLKYTNDFSDARQLAHLLRLGLLPTGYIYPRHERGLRDLLRRRLLLVRQKTVHHLSLQSLIGRYSGQRLSANAIKGLAPHQLAEYVSGAALRGAEVTYQVRGWLEEAIRQLEAEIYRQLKPRPDYRLLQSIAGVGPVLSATIALETGTIERFPSPGHYASYARCVKSEKISNGKRKGQGNGKNGNKYLAWAFMEAAHYAAIWQPQIKRYYQRKRAKSHILVAKKAVANKLARACYHMLSRGETFNVQRAFG

SEQ ID NO: 232718 - protein, 411 aa, unidentified
MNANPVFLRYLALDAHKHYVVIGGVNATCETVVPPRRLEMAELEDWLRTHLQPTDKVVIEATPNTWTLYDQVGRYAGAVVVAHPPHIKLIGAALVKTDKRDVFVLAKLLGLNLIPEVWVPPQPVRELRELVAHRLRLTRARTQTTNCLHSMWQRHNLAALDGDPFAAQHRPWWTSLDLSPTEKLHVRQDLATLDLLNAQIAEVEQELERLSTVAPWAAQTPFLMQLPGIGLITAMIILAAVGDITRFAHAKHLVGYAGLGTYVHDSGKTQRHGGITKHGRADLRYAMVEAAWVAVRTHPRWQAEFARLAKRMPDNQAIVAIARKLLVVVWHVLHDHAADHHALPDKVAAKFFVWSARLGQTYRGRFTPRQFVRWQLMQLGLGDDLTHVRFGGQLRSLPSAEELAALTATVT

SEQ ID NO: 232719 - protein, 427 aa, unidentified
MSETVIDLYSRAAGIDIHQALAVVSAIVPIGSDPFRCKFVRAEFDTFFEQGLKSLVEFLRPLGVEQVLMESTGVYWMAPYDALLDAGINVAIGNAHEIRGMRGRKTDRNDADWLARIAKQGSFHPSYIPGREYRGIRSLARYATRLRGTLSSEKNRLGKLFNAAGYRLNSVFSDMFGTAGMICVRGVLNGEKPEKLLDRVPTLGRYRHTREEMLLALGGKFEEGDLFAARSVLATIDHLDAQLSECVGELERIIREKGERKFELLQTIPGIDALAACLLLAELGGGGLEAFDSAESLCAWAGLCPSQNESAGKSRPAKARKGNKYLRRDVCECAGAAVKTKGTTMRSKFQNFLQRGKGYKKSIMAMGRKLLTYVYYVLKKDQPYVDPKIDYQKQHAEKNFQRFVAQLRRCTTKYDIQIINRETGESV

SEQ ID NO: 232720 - protein, 367 aa, unidentified
MKKNNKTQIASRTELRNCPEGSTVGLDIGDRWTHAAVIGPDGELVLEDRVASRDPEVRRWLSQLPAQTVVALEVGTHSRWMAKAGRECGHRMLVANPRQLRLIYGGDDKHDRLDAKKLARLARVDWRLLKPIEHRGDEEQADLARIAVRESFVEMRTKAVNLVRGMVKAAAGRVPTCSTEAFPGKAQEEIPEGLRSTLAPMLEQIEELNERIRESDEMIEHVARTRYPEVELLVGVDGVGWHTALLFRLTLGDVRRFERSRDVGCYLGLRPKRNQSGEFDPQLGITKAGNVRLRTALVNCAHYILGPFGKESDLRRWGWKLAEQSRARGAKQRAVVAVARKLAVLLHRILVTGEAYEPLHQAGKRAA

SEQ ID NO: 232721 - protein, 320 aa, unidentified
MRNAVGLDISKLTFNASAMVGNAEYSAKFDNDSKGLNQFSDRLKSLGYQNLHICMEATGSYYEEVADYFAQYYSVYVVNPLKISKYAESRFKRTKTGKQDAKLIAQYCRSAKESELVKRQKPTDEQYRLSRMTAAYAQIKSECAAMKNRHHAAKDEEAAKAYAEIIKAMNEQLEVLKEKIKEQTEKPNCKEGVKRLETIPAIGRMTAAVLFHHLTSSKFETSNKFAAFAGLSPQQKESGTSVRGKGKLTKFGNRKLRAVLFMPAMVAYRIRAFPDFIKRLEEKKKPKKVIIAALMRKLAVIAYHVHKKGGDYDPSRYKSA

SEQ ID NO: 232722 - protein, 346 aa, unidentified
MNKHDDCGVEVSAEQLLAGLEREGAPRLRREFPNTPEGHNALVRWLEAPGRTVRVVMEATGLYGLDLALRLDSAPSVELMVANPRAVRHFAHALMKRSKNDPIDTGVLVEFAQRMPFHRWVRPSPAALALHALAHRIESLTAMHAAEKNRRHAAQLSPALPAAVVNDLKRSLRGLERALARLTRQAVQVIAQDPDLNLRYPLLLSACGIGPTSAVQVLAELAMLPPDLDVRQWVAQAGLDPRQYSSGSSVHKKTRISKTGNRHLRRALYMPALVAIRHEPHLRAFYLHLLARGKAKMQALVAVMRKLLHAIFGMFKHGQTFDGSRLFALPEKPSLLPPTSSTAEAA

SEQ ID NO: 232723 - protein, 438 aa, unidentified
MSNKVIFNLDDLFISVGIDVGADFSWMSIALPNQQFVGKPYKILHSSIDSLTTAVSKIKEAEELYSLESRIFLESTGIYHYPLFCYLRDKGFNCSVINPIITKNSTNINIRKVHNDRFDSKKAALVGLKPDLKVSLMPSDLALNCRNLCREYYDLMDNRSAYVNKLQGELRMVFPQYLGIFSKVTINTSLTLLETYTSPSAFLKADKQEIIDIIKSTARFGLTYAQNKYNAIIQTATDANQFGYIIDSNIKRIRLYISFIRKYDEEINNILESLHELVDANEDADFVKQIHLIETFKGAGFLSAVSIMGEIGDFSAFSKPKQLFAYFGLDPAVKQSGKFEGSKVQMSKRGSAIARRVIHTLTLQSISISRNGEAKNPVLREYYLKKCDSKPKLVAMGAVSHKVCNMIFAILRDNKSFEIITPQEHIKQYNASKCDMAA

SEQ ID NO: 232724 - protein, 310 aa, unidentified
MKQTIVYIGIDVAKAHLDVAWQKRLRRFDNDKAGRATLVKWIKQKQSDPVQVICEASGGYEQELLDALAEADLAFSLVQATRVRQYARAAGILAKTDKVDARVLARFGAAMRPEPTSPRSAAQKLLRELEAQRRHLSDLLVAEQNRIEQLNDEKLRRLTRALMGTLKKQIALIDSRIATLIMQDQELCQKAQKLTSVKGVGERTAALLLAQMPELGTLNRREAAALAGLAPFNRDSGTMRGKRLIFGGRRAVRHGLYMAALVASRRNPILSSFYRRLRIKDKPHKVALTAVMRKLLLALNQALTPNQSFT

SEQ ID NO: 232725 - protein, 417 aa, unidentified
MTAYCGIDWAEAHHDVALVDQNGHRLGRCRIPDTAEGLAVLLALLAEHGDSPENPIPVAIETGRGLLVACLVATGRDVVVINPMAAARYRERTAVTRTKSDAADALMLANVLRTDRHAHRSLPNDSELVRAVAVLARAGQDATWQRQQAANQLRSLLREFFPAALTAFQIKHVGLASPEARAILAAAPTPAAAAQLTKTRLRTLLTKAGRRRNLDRWVDRLHATFHAGAMRHPVEVENAYGQAALAILKRLDAAVSAAQDLQHATTAVFEQHPHATIITSFPGLGPLTGARVLAELGDDPDRFDDARALKAYAGAAPVTRASGKSHLVMHRRVKNHRLASAGYNWTFAALSHSPGARQHYDRRRATGEGHAAALRNLYNRFLGQLYYCLSTGQHYDEQRAFSAPASDPSKATMPHVT

SEQ ID NO: 232726 - protein, 355 aa, unidentified
MSQEKYIGMDVHQATISVAVMDGNGKLLMECLLETKAATILEFVQGLRGTLSLTFEEGTSAAWLHDLLKPHVSRLVVCDPRKAALLKEGNKSDRIDARKLAELLRTNQLKAVYHGEHGIRTLKELGRSYLTVSKDVTRTMNRIKSLYRSWAIPCPGTTVYAPSHRLEWLAKIVQPGVRVRAQHLYEQLDNLQPIRQQARRELLLESHKHPAVKLLRQIPSIGPIRAALLVALLQTPHRFRSKRQLWAYSGFAVETHDSGEYRYVRGKVQRNRERITVRGLNDNHNRDLKNLFKGAAISASTRPGPLHDFYVARVAKGMRPTMARLTLARKVAAITLTMWKKGVSFDPQQLSRQSV

SEQ ID NO: 232727 - protein, 408 aa, unidentified
MQVLNRRCAGLDVHKDEVVGCIRLAGRGEADREVRRFATTTRGLLELADWLEGCEVTQVAMEATGVYWKPVWHVLEDRFQLVLANAAHVRNVPGRKSDVNDATWIADLLAHGLIRASFVPPAPIQELRDLTRTRKQLSREIVQHTQRIQKVLEDANIKLSSLISDVLGASGRRILKALIDGESDAEALAALGGSRLKCSRQDLKDGLEGRITAHHRFLLGQHLRMIEELEAAQAAFDARIEVALEPFRHAAERLTSLPGISAVAAQVIIAEIGADMTQFPTAGHLLSWAGLAPRLDESAGKRRSTRVKKGAPWLKPVLVQCAFAAARAKNSYFQAQFLRLKARRGPKKAAIAVAASILTAAYHMLRDGTFYTDLGPDHFARHDKTRVAMRLVRRIKDLGYDVEIKAAA

SEQ ID NO: 232728 - protein, 343 aa, unidentified
MQVVTTIGLDIAKSVFQVHGVDAAGQVLIRRQLKRRAVLAFFQKLPVCLVGIEACASSHYWSRELQALGHSVRLMPPAYVKPYVKRQKNDMADAEAICEAVARANMRFVPTKTPEQQSCLMLHRTRHLFIRQQTAVINSIRAHLAEFGIVAPVGRKGVTELLHIVADPSDKRVPEVARACLAALGNQLLSLKEQIVEFDRMIMVWHRSNETSKRLHYIPGVGPMLATALVASVADPRTFRSGRNFSAWIGLVPKLHSSGGKDRLGSISKQGDRYLRSLFVAGALAVIRYAKIHGTKHRPWLTALLARRPTKVAAIALANKLARMAWAMMAKGERYRQPVALAA

SEQ ID NO: 232729 - protein, 365 aa, unidentified
MQTVKRSQTLFIGVDVHKDTHTAVGLTPFGEKVFEMTIGNGAEDFISLVEKTKVESEKAGLVPSFGLEDVHSWGERLSSFLVEEGLPVRAVAPILVDHRRSKTTHPEKNDSLDAQGVAEVMIQRIDSLPLYKLTEEAQKAKQIRELSLEREWLVKERSRLKNQLHILLHRIHNTGYRSKFKDPFSKKALCYWMRSAPKDTDTILEQRMKRAVRRLLDLRDEIQEIEEELETMMEENGQTVATASGCGTVIAAELIGEIGDMNRFHSPGALAKYAGCAPREHSSGKTIRWRKTRSGNRRLNRAFHRMALSQISRSGNDAARTYFKRKVSEGKTKAQALVCLRRQLVNVVWMMMKHKTEYVYPQEIV

SEQ ID NO: 232730 - protein, 377 aa, unidentified
MSNVRFIGLDVHAETIAVAAAEPAGELRSLGVIPNRVESIRKLVKKLGPVTRLRVCYEAGPTGYVVYWQLTALGVKCEVVAPTLVPVKAGDRVKTDRRDALKLARSYRAGDLTAVWVPDAAHEALRDLVRAREAAKKDQLRARHRLGKFLLRHGRRPPTAMKAWTQAHFAWVKSAVRFDQAAQEATLLDYIHEVDHVAARIGRLEAAIDAAVQTAPARMRAVIEALQALRGIALVTAVTIAAEVGELSRFAKPRQLMGYSGAVASEDSSGQRTRRGGITKAGNAHLRRVIVEAAWAYRYRPAVGAALRKRQATVSAEVKEIAWKAQHRLHGRYRALTARGKCKQQVVTAIGRELLGFIWAIGVHVESQTADKKPIAA

SEQ ID NO: 232731 - protein, 361 aa, unidentified
MAQATTWVAFDVHVSGVVAAVLARDSGELWFRRLPGRSEEVAAFASELAGPVRATYEAGPTGFVLARRLAAIGVDCLVCAPGLIPRAASDQVKTDRRDAERLVRLLAAGELHRVAVPGVEAEALRDLVRAREDLRGDLMRARHRLAKLLLRHEIRFDGPQGNWTQAHLAWLAGVRLAQPSSQRAFEDYRGAVGALMIRREQLETEIARALPESPWALTARRLMCLRGIDTLTAAGLCAEIGDFDRFRHPAQVMSSLGVVPSEHSSGERRRRGPITKSGSQHARRLLVEAAWHYRRAPRVAGSLARRQANGEPEIIALSWKAQRRLHHVWTRMEQRHKRRTIIAVAAARELAGFCWAVATSD

SEQ ID NO: 232732 - protein, 304 aa, unidentified
MFGIGIDVSKATLDVAVHGEQFRQFSNDKRGFVRLIRWLKTWPIKQVVLEASGGYERAALDVLHAAGLPMVRINPARARRFAQGTGRAAKTDRLDATVLAQMAHLLPLTRYVPPAPWQQRLAEFAQCRRHLVQMRVSEMQRLRRLVDPDLIAMKQRYIAQLSDDLKQLDKAIAEQLEGQPGWKNIGALKGVGPILISTLASELPELGSLGSKAIASLVGLAPMNRESGTWQGQRRISGGRAVVREALYMAALTAIRYEPRLRTFYAGLKAKGKASKVALVAVMRKMLVILNARKRDAEVALGCS

SEQ ID NO: 232733 - protein, 385 aa, unidentified
MTTTRQVSTFIPRDYDVFAGLDVDKRSIAITFTDHGTMRKSLKLPYSARQLLNYTGKHFPGQRVAFVYEAGPTGFGLHDELTAASHYCLVVSPSMVPSAPRNKVKTNRLDSKKLSEGLRGGQLRGIHVPPPSYRELRHLVQLRDTQVAQLTATKLRIKSLLLYEGIAFPAVDGKWSGRVLRQLEILPCNATVRFKLDQLIDTLQFHFQSAAKVQKQIRYFCQNDPELSQCISFLISLPGVGTITATHALARLGDWRQIKDVRQIAGFLGLVSSEHSTGDKENRGEITHIGDKRLRSKLIQCAWTAIRKDPELGAFYRRIYERHPKKVAARKAIVAVARKLTTRMYAVLKEQRPFVIRADRSIAPLTAEETTGLGERLDGAQNDQP

SEQ ID NO: 232734 - protein, 353 aa, unidentified
MRRPKDKLIAGLDLHSNNVMIGVMNQDGERVMHRKLDCDLGKVVEFLKPLKPQLQSMAVESTFNWYWLVDGLRARGYGIELANPAKMEQYNGLKHADDKDDAYYLAELQRLKILPQAYVYDPQLRPVRDLLRRRSGLVHQRTALLLSFKSLYARTTGERLDLSEAKKLEPKEAAHLYEHPANQLIAQVQAEHIQALDRSIRRIEKAVLGCARELPLYEKLITLPGIGRILAMTITMEVGDVKRFKTDGDFASYCRMVDARRWSNGKCKADNNQKCGNKYLAWTFVEAANFSRRYDEHCRRWYDRKAAKTSKVIATKALGCKLSKAAWHVMTQQCDYDPKRMFPELAARAQGPR

SEQ ID NO: 232735 - protein, 323 aa, unidentified
MQGKVKFEPDTMVAVYVGIDVCKERLDIHLHPIGESFSVANDAGGWRRLKSTLSRYRVERVVMEATSKYHRAAHRSLAAAGLAVAVVNPLRARLFAEAIGALAKTDALDARILALMAEQLDPAATPPPREIVEAVQELARARNAAIAERVAIGHRRSTATQGFLKSELARRTRTLDTHIERIDAELDRLISSDTILARRYIILCSIPGIGPVVATGVIANLDEIGNLTDKQAAALAGLAPFAHDSGPRQGQRRIRGGRASLRSLLYLAALSAARWNPDLKAFHQRLIANGKAKKAALIAVARKLIVLANALISQNRSWTSIPA

SEQ ID NO: 232736 - protein, 389 aa, unidentified
MTPTMGPPLVCEGQMINVRPHGRSTIRPLEANSVGEQEIAVRPLRSRARTVARAKSSHLARSGRRSDHRTRGTMADIYVGIDVSKARLDVAVLPSGEVRSSSNDEVGFDELITWFRALGPKLVVMEATGGYEAPLASALAVAGIEVAVINPRLVRDFGKALGKLAKTDRIDAQVIALFAEKVSPEPRPLPDSDTQELAGLVSRRKQISDMLVAEQNRLAATAIAPVRADIQEHITWLRRRLKDADKDLYDRMRKSPLWRVKEQLLRSAPGIGPGNALSLIAMLPELGSLTGKQVAALVGVAPFNRDSGTLRGKRTIWGGRADVRSMLYMGTLSTIRYSPTIGATYARLVAAGKPKKVAIVACMRKLLVRLNAMMRDGKPWIEDSAAIAA

SEQ ID NO: 232737 - protein, 340 aa, unidentified
MQIAVLGIDLGKNSCSIVGLDAGGAVVLRRRMRREGVIKLAVKLKSCVIAMEACCGAHHLGRVLRAQGHEVRLMSPEYVRPYVKSQKNDDRDAEAIAEAATRPTMRFVELKSEQQLDMQTLHRARDRLVGERTALINQLRAVLLERGITVAQGRRELERHLVGLDAQGGLSQRMRVLVEDMRTQWAELDRRIAELDKEFVKWTRKEEAARRLMTIPGIGVLNATALIAAIGQGESFARGRDLAAWLGLVPRQVTTGGKPRLVGISKRGNKYLRKLLIHGARAALPTLLVSPTPLGAWLRGLTARMHKNAVVVALANKLARMAWAVLRHDETFRINVSVVA

SEQ ID NO: 232738 - protein, 440 aa, unidentified
MNDERAEVVELETTEYVARVAAIDIAKASAMVCTRLPGARSRRVQRTWPVQANTGSIIELADQLAADRVELVVMEATGVFWKPFFFLLEAHGLRCWLVNPREVKNVPGRPKTDKLDAIWLAKLAERGMLRPSFVPPKAQRQLRDLTRLRKTLTEERSRYRTRIQDVLEDACIKISDRQQGASDLFGVSGRAMLDALVAGQRDPHVLAELARGTMRRKIPALRQALTGCFENHHAGLIGRMLHLHDELTRQIAELTAEIEAAIADLDPTPPPDDDHPGRMPLLDRLDEIPGLGREAAATILGEIGFDMSVFPTAGHLASWAKLTPRTLQSGAKTGHGPAGKGNRWLKATLGNAAVGTSRTKTFLGARYRRIIKHAPKKKAVVAVARNIIEICWILIDDPDTRFHDLGPDWHDRHIDTARKTRQHIHELERLGYTVTLTTAA

SEQ ID NO: 232739 - protein, 409 aa, unidentified
MVERCAGLDVAKDEVVACVRVPDGKGGRRQEIRTFLTFTADLEALADWMASEGVTQIVMEATGQYWKSPWYVLEERGFDLMLVNARHVKIVPGRKTDVKDAEWLAELLEHGLLRGSFVPPAAIRELRDLTRYRKRLIQAHTAECQRIQKALEDAGIKLDSVASDVLGVSGRAMLKALVAGERDPKVLAELARGRLRSKLPELRRALRGRFSDHHALLVRLALDHVEHLEAAVATLDEEVDRVMAPFAEARDRLDTITGVGKRAAECIVAEIGVDMSVFPTAAHLASWAGRCPGNNVTGGKRRSGKTNKGNRWLGEILTECAWAAARSRDTYLSAQFWRLGRRIGKKKAAVAVGHSILVVAWNLLTNNCDYNDLGGDYFVQRDADRQRQRAVAQLQALGYYVTLEPVAAA

SEQ ID NO: 232740 - protein, 360 aa, unidentified
MERNRTFVGLDVHAWSVTGHGLDALTGEVWQRKLTPDPADILGWVSGMPGPVKVVYEAGPTGFGLYRHLEGHGISCVVAAPSKLQRPAGDRVKTDARDAELLARLLKLGEIVEVTVPTVTQEAARDLVRAREDVRGDLMRARHRVSKLLLRHGIVWTGGQAWTGRHDVWLQSQRFELPGRQLAFDAAYETMLLTAQRRDRLDQAITEMAQHSDYTDLVHRLGCLRGISTLTGFGLAVEIGDWHRFTGSTIGAFLGLVPTEHSSGQSRSQGSITKTGNGHARRLLVEAAWHHRKTYRHPGLTMRTRWEQAPAAARARGHEGNRRLHHRWESFTARRKRPVVANVAIARELAGWAWSLAVME

SEQ ID NO: 232741 - protein, 357 aa, unidentified
MAVAVDTVAPTVIGGVDTHKDVHVAAALDHLGRLLGTAEFPTTAVGYRALLAWLAGFGEVERIGVEGTGAWGAGLSRFLRASGIVVIEVDRPNRQRRRRRGKSDATDAESAGRAVLAGDVSGIPKAQDGLVESIRMLRVAQRSAERARTQAANQLHSLLDTAPASLREQLRILSLRDLADRASRFRPGANLRDPAIAFKAALRSLARRWLTLSDEIKMLERQLAQLVRAVAPPPLLAEFGVGPDVAGALLVAAGDNPERLHSEASFAALCGASPLDASSGRQHRHRLNRGGNREANAALWRIVMVRLRWNHPETRAYVDRRVAAGKTRRETIRCLKRYLARRIWRLLTQATRPAAAP

SEQ ID NO: 232742 - protein, 338 aa, unidentified
MKLYGAIDLHSTNSVTVVINERDQVVYQKRLPNDLSQIAQQLSSYRRSLQGIVVESTYNWYWLVDGLMEKGYRVHLANTAAIQQYNGLKYTDDDSDARWLAHLLRLGILPEGYIYPKQERAVRDLLRKRGQLVHQRTANLLSIQSLISRTTGNSISAQYIKALNIQRVDGVLPNPDHVLALKANLAVMNSADAQIEILEKAVQDRVKLRPQFRFLKTVPGIGPILALTIMLETGEIERFASVGNYASYCRCVGSKKISNGKRKGSGNTKNGNKYLAWAFVEAANFAIRFNAKIKSFYQKKKSKSHAIVAIKAVAHKLCRACYYIIKDQVAFDITKAFA

SEQ ID NO: 232743 - protein, 360 aa, unidentified
MGNERTFVGLDVHARSVTGHALDAVTGEVWQRKLCPDPGEVLRWVSVLPGPVKVGYEAGPTGYGLYRCLNDHGVLCVVAAPSKLHRPHGDRVKTDARDAELLAHLLKLGGIVEVNVPSVEQEAARDLVRAREDARADLMRARHRVSKMLLRQGIVYSAGDTWTKVHDSWLRGQRFDQQSRQLAYDSAYEAMVLTVDRRNRLDRAIDEMAANSSYTPVVRRLGCLRGISTLTGFALAVEIGDWQRFTGATIGAFVGLVPTESSSGQSRSQGSITKTGNTHARRLLVEAAWHHAKPYRVPGKTMRDRWELAPPAARVRGHEGNRRLHQRWQRFNARKKRPAVADVAIARELAGWAWSLALLE

SEQ ID NO: 232744 - protein, 391 aa, unidentified
MINIGIDVGKFKHCASVMDDKTGEILIKPFFFNNDQKGFDLFYSRTKQYIHRKHAVGMEDTGHYMINLTNFLLDKKFTVRFINPRSTCLRRKALGMSAKNDRKDSILIAEMLSEKKFWRSVTRTTQETDKLREITRLYHQLQEQQNEDMNRLQRALDIVFPEVNKLSWTRYSKTYMQFLAKYPTAASIASEDIRNLRNALKTDGRGRQCKITAEDIKEAAKCSVGEDNIAVALEVQSIIAIINTRKQQIENLENKIEEFSLKLNSPIISIPGISHITGMTIIAEIGDIHDFSDAAHLISYAGMEPLVHQSGKYDAAHMPISKHGSRYLRKALYQAVFTVCKYCPIFNAYYTKKRNQGKTHRCAQGHCVRKLLRVIYKLLANNTSFDENLVK

SEQ ID NO: 232745 - protein, 415 aa, unidentified
MALKIVYPICCGIDVHKTFVVACIASTNSQGVTTYKRHRFSTFTKGLNELSQWLCEHDCRDVCMESTGKYWIPVFNILEPSCNITLAHPKYVKAIRGKKTDKKDARWIADLFKHDLVAASFMPPLPIRQLRDLMRYRFKLTNFSSSEKNRFQNSLTVSNIQLGNVVSDTFGKSSMNIIDKLLDNPTDTSFDIEALIHGSLKGKIPELELAIDGLITSEQAGKIKVIKQHYEDLESRKADLETIILSLAESYSKEINLILTVPSFKNLFSAIAVVSEIGVNMDVFPTAKHLCSWAGLTPTNNESAGKKKSVRISRAGCYIKPLLVQCATAVVKSEKHPEIRNRYLQLKRRRGHKRAIIAIARMLLTAIYHILKNQEPYDPVLYKTSDVRPVNREITVEQAILLAQAQGYRIMTVAT

SEQ ID NO: 232746 - protein, 430 aa, unidentified
MQQNFYLGIDVSKGYADFIILDENKKSVEDNFQLDDTFEGHHQFYRVISGFLAKHPDSKIFAAVESTGGYENNWLKFLNKTQSTISLSVARVNPFGVSYNSKASLNRIITDKQSSKNVAEYIISHPEKVKYNDEDYYSSVRRQWTFIKMLTKQKVQLLNQLESLLYIANPELLSYCSNKVNLWTHKMLKQYPTAKQLSKARVSTLSKIPYITESLAKQLVENANKSVASSVDDTTAEIIKALVDQILQLRKLIYLQRKQLEKNCNLAEVELLKSFKGIGTYSAVGLMIEILSVERFSSVKKLASFFGVHPVFKQSGDGLSGFKMSKQGMPKMAALGAVMYKILRIVYGMLKNNKPFDPEIDRAKHNRVDNQNKPNYSRRYQPMDIKAPISRRQIKKRKEQEKSQILKPLNAESTKEIFTGSDSHSFPEEN

SEQ ID NO: 232747 - protein, 402 aa, unidentified
MDRASMHYDVYCGIDVGKTAHYLVALSNDGSRRLASKPLPQNEAEIRSVLEGLLSLGSVLVTVDQTGGFGRPVVSVARSLKMDVAHLSPKAYHDAAKLYGEDTSDAKAAYVIADVSRAHPNRIVRAANRSEAQEELRLLLAWRGDLILESTALYNRIHDLLHQICPPLEALFAKKALHTQLALKLFERYGGPFGFKEAGKSKAIRWAGRLKRQKVRGPAKVAEVFAAIGQTSLPVAASSVAEERIRQMAGKILAIKTEVATLEERIDTYAGVLPEIGILMSIPGIGRVYGPTIATEIGDIDRFRGSNELAYYGGVTPTKKTSGTSVNKKAKAKGGNRNLKNAFVGSAEKAINFDASSRAYYEKKRAEGKSYHSAILALARRRVDLIYALLTNGSFFEPSNTA

SEQ ID NO: 232748 - protein, 352 aa, unidentified
MYYVGVDLHKQTSWFYTLDSSGNRVDSINLTNNHDILKNYFKKIPKPFTLAVEATYNWYFFVDLAREYTNSVFLANSFELKAFAKKHKKTDKIDARLIATVLYKGYLPTVAIADKHTRQIRELLRYRMKLVIDRSRNISRLKALLDKLGYMSSGNFTTFKALENIEIENLPDIYKSLIKRYRELIIYLSKKVYEIEKEINKLPNEDIDVYNLLSAPGIGPFSAALIKSEIIDIKRFNSFNRLCAYSGLAPRVSASANKIYHGSLNVNRRKNLQWILLENVKHFVEADPERAKKFCEIKCRKGYNTAKVILARDFLKVIYHILKEQRPYYSQKKLVKHKIKIQSVAATALIGV

SEQ ID NO: 232749 - protein, 335 aa, unidentified
MYYLGIDLHKDDSRVAVLDDDGEVVEEARVQNASLEQIAEEYAGSKAAIEATGNYYTIYDTLDEYLDVVVADPTQTKAIGYAEVKNDRLDAKLLAQLRRAGMIAESYVPPEELRERRALVRGRKRLVEKRTDFKNEVHAVLDKEGISYDWDPFSVKGREILAGEDLALGTVAEQLLESFLSVIDELTAQIEELEEMIEETAASLEATQLLMTIPGVSFYSSLLITSEIGEIERFDRAEEVVSYAGLNPVVRESGDSRTEGSISKRGSGDLRWILVQCVQTAVHRCDDPYLGRFYARLKERKNHQIAIVATARKLLVSIFHMLQRKEVYDPPGVNS

SEQ ID NO: 232750 - protein, 512 aa, unidentified
MEPKESKAPAAKIKAKRRAPKTTGKGKTQKQPVEGLRPIHQHAAGIDVGAQEHYVAAPPQSVAEGQSTVRSFSAFTSGLDALVEWLKQCGVTTVAMESTGVYWIALAQKLGEAGIEYVLANARHVRNVPGRKTDVKDCQWLQELHSYGLVSGSFRPDEEICKLRSLQRHRGNMVSSASAEIQHMQKALQQMNVHLHHVVSDINGVTGLRILDAILAGERDPKTLVKLRDPRVTRSTVAEMEEALQGDYRPEHVFVLRQSLETFRFHQAQIEKCDHQIDTVLQDLAQKAQASEAVGEQKEPPSQTPGTRIYHLAPGSDAGTPSAPSGALRRQKRPQKPTSQTTINFRAHLQTICGVDLTAVIGLNILSALILISEIGVDMSRWRNAKAFCSWLGLCPGNKISGGKVLSSRSRRVVNRAATILRVAASTLGRSDCCLGHFYRRKKAHLGPAKAITATARKLACIVYYMLKYKQEYREPDPATYQAKIRNGRLANLKRQAASLGFDIVANTSASA

SEQ ID NO: 232751 - protein, 357 aa, unidentified
MKTIGVDLHKCSLTATVLDPSGTVIERKEISTKCRNQIAAYFASHGPEVQVAVESVGFYHWFWDTVKPRVRKLHLADPAGVRAMAGRRTKTDRNDSLLLAQLLRDDRLPMAYVPDEPVRALRELCRHRHRLARQLALARRHLRWLALKNNLPGPNTFTSDRAQKWLLTQEPKLSVVHRLSARQFLDQIISLERQLADVELLLKDTTTAHLELAPTLALIQSVPGIGFITAITILCECADITRFDNIDELSAYAGLCPRVTQSGQSAHHGHISKQGPPQLRWVLQQAAWVAVRTDPNARKIFTRIAKRAGSKKAATALARKLLSYAWSVCRRGQPFVWPQNGAASHDRPVVPVWSYDI

SEQ ID NO: 232752 - protein, 377 aa, unidentified
MENTAAKKRMQVPKGYLIIGVDPHKKRHAAVAITQDFTTRDKFKFDNTREGLEIMLRRARTEIVKSDCLGVMFAIETGGHYWRNVVYFLDEQGIPCRFINQFTLKRRREGKDLNRRKNDYRDSEVAAQLLCNGEFTESKLPQGIYAELRTAHNAYRRLVKERVRITNLIKGLLDALFPEFTQVFKDPCGLTALSVLSTCAIPRVIAKMTEEKFVTTIEAKHQGRLMRRKLRALHCSARISIGIDAGAWSVSSEISFLVEKLELIIDGIGRIIERTLVRLVDETEEGKYLLSIRGLNYIAVAGLLAELGCFKAYRRAKQMIKMVGSNPAESESAGKRSSHTPMSKKGRPVLRYCAWTAVIPMLRLNSDFRAWAKLRRE

SEQ ID NO: 232753 - protein, 339 aa, unidentified
MIYVGLDVSLNSVAVCAVDETGKLIREGTTLADAPSIVQYLEPWAGQVERVGLEAGPTSEWLTANLIELGLPAVSMEARQVKAALSAMPVKTDRNDARGIAQVVRTGWFKPVHVKSIGSQRARTLAAARKHIIRSIAATEQVIRGLLRPLGLKVGIVSRTLFAARVRELVGDDALLEAIMNPLLAGREALMREYARLHRLVLKAVRSDPACRLLMTMPGIGPVSALTFRSTVDDPRRFLHSQSVGAYLGLTPRRYQSGEVDRVGRITKVGDGETRTALFEAANVVLRPSTRWSPMKAWAVRVAHRQGSKRAKVALARKMAVVLHRMWVDGTEFRWTAVA

SEQ ID NO: 232754 - protein, 366 aa, unidentified
MMGWMAPLRHLSAKLLDRISSNGEPSMGEVTTIGLDLAKHVFQVHGVDAEGATVLRKRLRRAQVLAFFSRLSRCVVGMEACGTAHYWARELRALGHEVRLMPAQYVKAYLKRNKHDAADAEAICEAVARPTMRFVAVKTAEQQAAVLLHRGRERLVRQRTGLVNALRAHLAEFGIIAPQGLRNVGRLIAIVRDEREARLPDLAHQVLQVLAAQIEQLEAAVAAIEKQLMAWHKSNPVSQRLATIPGIGPIIATAIAATVTEPSGFRSGREFAAWLGLVPRQNSTGGKVRLGGISKRGNRYLRRLLINGASANLLRSKATNADPWVIGLRRRRPSLVVAVALANKTARIAWAVMQRKENYQRVAAAA

SEQ ID NO: 232755 - protein, 443 aa, unidentified
MSRKRRTHLRGKRGQAFADKIRGVPLDRILCVSLDVHKYFHTVMIHSALGEIVIPTFEIDIFQSGFDQLCQAIDEATSRTQAQVVLIGMEPSGHYFENLARQLNRQSRAVTLINSYAVKKNRDQQMMHHEKSDEIDTAAIGDLLRRGEGTPFRPAKGVYLQLQHLDRVRFSKVKIRTALQNQVIGHLDRIFPGLVIIADEAKERYKPLFATTFWSCKTMQHLIRVCPDPRQLVAMSSQDLVDAFHAQQYAMGRITAAKIITYARKTLLPDPEVIAIRCELLSHDLALLDEVERHIAQLEDRLRALLAQTPYLIWTKLKGLSDVQVAALAAAIGDPANYAYAAQVFRRSGLVCGRDDSGIRQRKGKGKRIVKVGDVHLRRALMNALYTLRLHQPVLRRYYHQLSQSKPAGVASVATARRATAILWATMRDQQARTLILKRGASM

SEQ ID NO: 232756 - protein, 384 aa, unidentified
MKKVNSNVACAGMDVHYKFSNVTFRDASGKVVSRQRLDHPDRKQLAERLSRWPTGIPVVMEASFGWGWLSDLLEQADQDVHLSNCYKVEQMRKARGWVKTNKKDADLVSLLVFEQSDWWKVWRAPPDVRNRREQMRFRGDLVGSQTRVKSRVHAIFHRHGIFHEFSDLFGGKGRKFLVELCLYNSANLPPGALLALRGQIKLLDHLRRQLADVARILHKQLLKTPLTMRLKTVPGFGLILAHVLAAEIGKIERFKNQKSLASYSLLAPRADDTGEDDPSHSPKGRHLGLRGNRTLKWAFIEAAHGAVRSGGKWRAIFDRATDGGKKNRNRGYIKVARELVKVVYAVWAKGVDYQVIPPGRPGRKNNNKKSRSETGQLLHPMVHA

SEQ ID NO: 232757 - protein, 309 aa, unidentified
MAKKSIQAELRIAGKNVRFGFANNPKGFAQLARILNQHNAPKIWAGLEATAPYSHALALWLHARAHRVSVLNPRRVKQYARSAGNRNKTDRLDAAVVADFLCAHHPAAWRPPLQEVVELRALVRRREELSLMLQAEKNRLEGVASQVRCSLKRTIVTLSGEKARVEKLIGQQIRSHKRLCRDHQLLCTIKGIGSLTAAILLAEMAAPGQVQRARQAAAHAGLVPRHEQSGTSVRRNRGIGKEGNRYLRKALYMPALVAIKYNAPLRYFASRLRAAGKPKMKIVCAVMRKLIHIAFGILKHQQPFNPSLA

SEQ ID NO: 232758 - protein, 454 aa, unidentified
MSYFLVPQKKQGVHIMNTKIIEEKRHFVYNKVIIGIDPAKRNHQAMMINELGIPYCKSFTFNNNYKGFNEELWLKIGRVLKDIDPQKVVFAVEISINLWQKLCHYLHNKGFTVLMVSPLYTKHERPKMDNTYSKSDPKDSLAVANCARQGYFNFYKEYSNSADAMHRLSITYEKLKKHMAQTKQRIRSQVELIFPELPNVVDIDTDTVRELLRRYLSPNEFLEMNVYTEARIIEKVSQRQHGLKTLNLIQDVALKSIGVTISDDILFAERLTMQTWLNQYQLLKEQIKLLLDKLIELAEESPLFSILTSLKGISHITASRFIAELREPNLFTNYKQIETFAGISLKLSQSGKYTGYRRITHIGNHRLRAIIYKMSEETKNHIPEIRIRYLKRQMKQARYKKNVVASSSNMLKLIMSMFKDNHTYQYREESVEELKQLEEKYKEFKKKKKLKKSA

SEQ ID NO: 232759 - protein, 343 aa, unidentified
MDAIAANVVGVDLAKNVFQAYWVEPETGEIKNVAIRRAKFLQHFVDRAPCVVGMEACGGAQHWARELVKLGHEVVMLPAKSVKAFVSGNKSDAIDARAIWMAVRQGGTKRVAVKTEAQQAVLALHRMRQQLVKVRTMQINELRGLLTEYGEVFGQGRAPLARGIADALERLGTRLPQVVIDSLREQWARVGKVDEQVAELETRLKSLLKSDRNAQRILAIPGVGLLTATAASAAMGQADAFKSGREFAAWLGLVPAHTGTGGKTRMLGISKRGDTYLRTLLIHGARSVLTHGKHSSAWQQRISQRRPMNVVIVAMANKMARTIWALLKYDRPYQASWVSKAPA

SEQ ID NO: 232760 - protein, 327 aa, unidentified
MMFIGIDISKEKIDLSWLRDQLTNKIKTKVFKNKRQDFVTIEKWLLNTTKSAANELVITLEPTGVYHEALMYFLHERGFNIILANPGKAKKYADALNIIHKTDKSDATMLAHYGSAKHAVVSYWQPEALEVRELKALIRRLDALESNRQREANRLEASEFSNVSARVCQSIKVTIAFLDDEIKQLKSDIDNHIDNEPDLKRNRKLLESIPGIGPVLSRELTYLFAAKKFNKAKEAAAYCGLIPRHNESGKLKGRTSISKLGPARIRCKLYMAAIVAGQWNKTIKRHKLTLINNGKTPMQAVCANMRKLIHICFGVIKNQEAFKLQES

SEQ ID NO: 232761 - protein, 367 aa, unidentified
MANQTVRVIGGVDTHKRTHYAAVIDEQGRRLADREFAANSGGYGALLAWMRSHGQIVAIGVESTGSFGATLTRFLLDAGEAVVEVNKPNRQARHMEGKSDRLDAEQIARSVLASTGVATPKSKSGPIEVIRTLRVARASAIRARTQAFNNLFGTMIAAPSPIRDELVDLTKRTFVNQCLQQAPETENLLELIEEPERLVLASVKLTLRDLARRWKILDAEVKALGRQIKALVSHVAPDLVELFGVSSELAGQFLVTVGDNTNRIRNEAAFAKLCGVSPKPASSGRTSGRHRLNRGGDRAANSALYIVAIVRLRHHQPTRDYVERRTAEGLSKREIIRCLKRYIAREVFAALPKPHDPRSLHKPLDTT

SEQ ID NO: 232762 - protein, 334 aa, unidentified
MEKVTTAGIDLAKRVFALHGVDGAGRVGLRKTVRREQLMQTVAALPPCLIGMEACSGAHEWARRFQELGHTVRLMAPVFVAPYRKSGKNDGNDAEAICEAVSRPNMRFVPVKSAEQQAILALHRVRQGWIEERTATINRIRALLTEFGVVLPNRAQHVRRGAMAAAEGLPALARRALEDLRSHLGTLDERIAAYDRELQAQARQSEAAQRLMQIRGIGPITAVAIVATVGNARDFESGRQFAAWLGLTPRQHSSGGKRRLGHISRRGDAYLRCLLVQGARSVLYTAMRHRDRLSRWVCTLRARRGDHKTLVAIAAKNARIAWALLAKNQTLQTV

SEQ ID NO: 232763 - protein, 341 aa, unidentified
MRPKKNITQADDGMRMYAALDVHKVYSQIAVEDEDGVLLREERLENDPDMIEKFSDSLPPDTSMVLESSSSWYWMYSILSKRHKVILSNPIKTKAIASAKVKTDRVDALTLVNLLRGGYIPECYVPPKRIMELRELVRYRANLVRMRSNVKNYIHAYLLMNNVRISAKPFTKEFIDEVRKIEEPRVKGYLRLIDSLNDEMHEASRIICERASNDEDAKLLMTIPGISFFSALLIGSEIGDVSRFPDAYHLISYAGLAPSTHSSGGTTYHGRITKAGSPELRWILNQCVRVYIREEPDSEIAAFYNRLRKKKGDSKAIIAASAKLLKIVYWVLKEKREYYHG

SEQ ID NO: 232764 - protein, 387 aa, unidentified
MNVKARRTKKQVNVENWAINLLPKEELSKKIEVVEKELRSYTWRDLETNGKFAKNDKLSFITDDMLIVGCDIGSENHYIRAIDVRGRELSRGAFEFSNTSEGFENAKAWVLALAAKHDKKQIVLGLEPTGHYWFALAAWMISNGISVVQVNPYAVKQSKEIENNSQLKDDRKDPKLIANLVKDGNYGMPYLPEKVYADMRRLSMFRDQFTEDRIRNINRLHRELKIYFPEYMDAFGKIDGAFTLEILKVSAIPSDITALGAEGMKNIWHNAKLRGRGYSRANEIVSYAEKSVGLTDGTDAGREAVKWYAEQILRLDEQLAEIESALHEKCREIPYAENILAINGVGENILAGILAEMGDISRFDDVKEIQKLSGMGLVACSSGKHKG

SEQ ID NO: 232765 - protein, 417 aa, unidentified
MQVIHARCCGLDVHHKTVVACVLITAPDGAVQRRVQTFGTMTADLLALSDWLDGHGVTEIALESTGVYWRPVYNILEGEARAITLVNPQHMKAVPGRKTDVKDSEWLADLLRHGLVKPSFIPPAPIRDLRELTRYRKTLVQGRTQEVNRLHKLLEGANLKLGAVAADILGKSGRAMLDALLGGEQEPAVLAELARGRMRAKLPLLRQALAGRLRPVHLVLLAAILGHVDYLDGMIAHLHDAIAAHLAPFAEAVDLLQTIPGVSAVAAATIVAEIGVEMARFPSHKHLASWAGVCPGNKQSGGKRLSGKTTKGSVWLRAALTEAAWANARSTTGYLGAQFRRLARRRGRLKALVAVAHSLIVIIYHVLREHRPYADLGPDYFATLEAERVERHHVRRLNALGYSVTLTPLPAPEPVPA

SEQ ID NO: 232766 - protein, 346 aa, unidentified
MLHAGLDLSRKRLDVCLLSDQGELVEELTAFPDSGGLKKLVERVEAEREPVRAVIESMTGARFVHDTLERHGWEVLIADAQKVKGLAPLAVKTDRVDARVLAILSQRDLVPAIWLPDPRVRRERELARFRLHLVKHRSQLKNRIHSALISFGRPCPVTDLFGVAGREHLAGLELPEPWRGNIDASLSLIDQLEGQIDEIDGKLRASGADHPYVPLLLTVPGVGWVLAFTIAAEIGEIERFPAPPKLTGYTGLCPRVRQSGESDRRGPLSKHGPRYLRWALLEATMHALRHPAYAERYQRNKRRLGKQRGAKVAQVDIARRLAVAIWHMLTRNEEFAPRGAAFRLAA

SEQ ID NO: 232767 - protein, 353 aa, unidentified
MRIVVALDVHRRQITYKTLDRESGEVRRGRIVPATRGAVREWLEQFAACEAEFALEGTTGWRFVVEEIERAGHRAHLADPAETAGKRGRKRRAKTDSADCDLQLKLLLAGELPESWIPPAHLLELRTRVRMRKVLIDQRTAWQQRLQAQLFHQGAPAGLRPRTRAGREALVRAELSPAGRELVSLALRMIDSIDRELAPLDRALRAFARRQRGCRALIANLYGVGAISATAILAELGDCRRFASSDDAVRHSGLDVTVHQSDNKRAAGHLSHEGPELLRWALFEAAHQSARRSSPDHDYYLQVAGRIDHNRACLSVARKLCRRAHHILRELGDQALAPLESEPQDEEAMQAAA

SEQ ID NO: 232768 - protein, 367 aa, unidentified
MMGWMAPLRHLSAKLLCDRISTEWEPSMGEVTTIGLDLAKQVFQVHGVDAKGATVLRKQLRRAQVLAFFSRLPPCLVGLEACATAHYWARELRALSHEVRLMPAQYVKAYIRRNKNDAADAEAICEAVQRPRMRFVPVKTAEQQASQLLHRGREQLVRQRTMLVNALRAHLAEFGLVAAQGLRNVGELIAIVRKQDDTRVPDMARQVLQVLANQIEQIEAAIAALEKQLLAWHKTNAVSQRLASIPGIGPIIATAIATTVADPNVFRSGREFAAWLGLVPRQNSTGGKPRLGGITKRGNRYLRRLLINGASANLLRSKATKADPWVIRLRQRRPPLVVAVALANKTARIAWAVMLREREYQPRAVAA

SEQ ID NO: 232769 - protein, 323 aa, unidentified
MTIVVGVDIAKHTFDIATLQPNGKHRTKGKLTNNANGFAVFADWLERYAESGAWIVMEATGIYHELLAEHFHGLGYRVAVLNPAQIKSYAKSQLQRSKTDKLDAKLIATYGHLHQDRFKPWQPEPLNIRQLRALSRRLEDLQELRQMELNRLEVSRDNVHASINAVLQRLDEQLPETLGRIKNLIDDDPDRRGKRDLLVSIDGISDKTASLLLAELGDPQRFNNARAVVAFAGLDPQLHESGKYQGCVRISHTGSARLRAGLYMPAVSSLKHNPAIRALAERMKSRAKKGKQIVCAAMRKLLTIAYGVLKSCRPFDANLAVAR

SEQ ID NO: 232770 - protein, 422 aa, unidentified
MARRKKEAYAALIGIDWADQQHDYCLGVVGSDAVEFGVIASPPEDVAAWINQLRKRFKGQQIALCLEQSKGALIHQLMSVEFIDLYPINPQALAHFRKAFAVSGAKDDPIDAQLMWEYLLKHRDRLRVWKPEDVDTRMLALLVEDRRKTLDLRTKLSNKLTATLKGYFPQALTLMGTKVASPMACDFLQRWTSLGAIKKCRDHTLETFYTQHQVRNRTKIEARIALIRESVPLVEDAAIVETSVLKVRSLSRQIACLNEDIDEYEQYIAALFETHPERDLFDALPGAGDALAPRLLVAMGTDRERFDAADEVATFSGIAPVTERSGQHTWIHWRLACSKFLRQTFHEFANMSRHQSPWANAYYEMQRARGKSHHAALRALAFKWIRIIYHCWKQQEVYDEAQYLTSLEKRNSPLIKWLPEAA

SEQ ID NO: 232771 - protein, 352 aa, unidentified
MRVGVDLAKRVIQVHAVDAAGHVLASRALARDKFIAWCAQLPAGCIVAMETSSSAHHWARKLGALGLDARIIAAQLVSPYRKQGASGKNDANDAAAVCEAAGRPQMHFVPVKTIEQQSMLCVHRLREGFKAERTACINRIRGLLAEFGLVFAQSPAVLHAVLADVLEDASNEMNTLARLMLQRAQSQWRELDEHIAWCDERIAVHARDNPAVKKAATLMGIGPVGASASVATVGDFKQFRCAAQFGAWIGLVPRQHSSGGKNNLGGITKRGDTYLRSLLIQGAKSAVMTAHKRSAPISQWAAALRDRVGWQKAAVALANKNARILWAVMTMGEAFDARHVSRKPNLPTTKPL

SEQ ID NO: 232772 - protein, 344 aa, unidentified
MHIASIGIDLGKTTFHLVALGERNKVLIRKKFSRAQVLAYTANLSSSLIGLEACAGAHFMGARLREQGHQVRLIPAQFVKPYRKSNKNDFIDAEAIAEAVTKQNMRFAQLKTEEQLDVQAMHRVRDRLVQRRTALINEIRGFLLERGITFAANPIHLRKSLPGVMEDAEQNLSPRLRWLLERLWQEWKQVEIDIQTITDEIERISKENALCRRLRQIPGFGPLVSTATVAAIGNGAAFRRGRDFAAWVGIVPRQYSTGGKQKLFGISKRGNIYLRRMLIHGARAVLLRVKYDTGGFGRWVHRLAQRAPPNKVVVAIANKLARIAWAVLSSGKDYQHQPLQITAA

SEQ ID NO: 232773 - protein, 403 aa, unidentified
MEGPLISLDVSKGKSNYRFFENGTDRKGKKGVIRHDIQGFDSIRDEAEKMEERLRIKPSVIFESTGVYSDVVEKYFTDKGFDVYVISPLLSASMRKEGVRPAKNDSLDTLSIAKVFYSKDDLRKCSGNDKKAERLREMSYELDMMNRRIRPMKCQFLRLLDKVWPCLDEVSDYSSRFMLDFIIAFGHPENIKTVKGVLSVIRKSEMGTAGRKDKIAQDLFDYCHTHLSAVSKDSSYVELLKRMAIELKAMAKKKSELIDRMAEEARNKDEFARLLTIPAVAKTTALKIMARVGDISRFRNAEALVAYCGLDPRVYQSGKMTGEHRTIAKKGDCILRSTLFLAVKLMVMLYPDTRVARFVAAKAKNGLSYKQAVVAGSAKLARIIYSMLTHHENYVEFNADIVA

SEQ ID NO: 232774 - protein, 439 aa, unidentified
MRIASSVPMPSEVPIENEIVAYVGLDWADQQHVICWQAAGSAQVQTAVVQQRPEELQAWVAELRQRFPQGLVAIALEQSRGAVIAALMHFDFLRLYPINPKSLARYREAFASSGAKDDPDDAGLLLELLVKHRDRLTPWVPDDPLSRELALRVEHRRQLVNLQTKLIQQLRSHLKVYFPQALDWVGELDSLQACDFLQRWPTLAAVQKARPSQLEKFYHQHHCRRPQLIQQRLEQIRQAQPLTQDPAIVQAYSQMVLALVAQLRVLIPTLQQWQQQISQLFAQHPDAALFASFPTAGPVFAPRLQAAFGSRRDRFGSAAEVLQFSGVAPVTKRSGKSRQVQRRWARPKFLHQSFVEFTGLSIPHCCWARALYQQLRARGHRHWAAIRVVAYKWIRILFRCWQDRVPYDEQKYLKSLERRNPTLWAAIQQLPAQPSRKEV

SEQ ID NO: 232775 - protein, 305 aa, unidentified
MENVFLCCAGLDLHKKSVEACVRRMETSGHVHQQTHHWGTMTRDILMLADWMAAQWVTHVAMESTGVYWKPIYNILESRFTVLLVNARHLKQVPGRKSHTRDCLWIAQLLQHGLLKGSFVRPRPQRELRDLTRHRTRLVEEKTRTSNRIEKVLEDANIKLGSVASEVLGVSGRAMIQALLQGEKGPTQIADLAQRQLRGKIPEFEKALEGNLTEHHRFMLRLLWKGLTRQEALIAELEAKIEGVARPFASGIERIDAVPGVDRCVAEVVLAEVGAKVDPFPTHQQVTAWPGMCPDNEESAGKRRK

SEQ ID NO: 232776 - protein, 341 aa, unidentified
MQVTTIGLDLAKNVFQVHGIDATEKVVVRKQLRRGQVMAFFEALAPCLIGMEACATAHHWARELTKLGHEVCLMPAKDVKAYVKRNKNDAADAEAICEAVRRPTMRFVAVKSAEQQGRLMQHRVRDLLMRQRTQLINALRAHLAELGMVAAQGREGIKELLAIVAQDGDTRLPVDAHASLIVLAAQLQAVQTMIGAIEKRIVLQHRSNEASKRLETIPGIGVIGATTIAAVVPDPKVFRSGRDFAAWIGLVPRQDSTGGKQKLGPISKQGDQYLRRILVVGAHAVLKRARQQPEKYPWLVQLLARRPFKVVAVALANKMARIAWALLAKGGTYRAPQLAAA

SEQ ID NO: 232777 - protein, 378 aa, unidentified
MKKDIRFLGLDVHADTIAVAVAEANGQVHSIGVIPNRIDNLRRLVRRMGRVESLRACYEAGPCGYVLYWQLTKMGVHCDVVAPTLIPVKPGDRVKTDRRDATKLARSYRSGDLTAVWVPDAAHEALRDLLRAREAAKKDQLRARHRLQKFLLRRGQLPPDGIKAWTSRHLAWVKTLRLGQQALDATLLDYLTEVDHARERIERLERAIDHAIAAAPAEIRAVVDGLQALRGVARISAATIVAEVGQISRFAKPRQLMGYTGAVPSEHSSGESIRRGTITKTGNAHLRRILIEAAWAYRYRPNIGRNLHLRQEGTSEDVKAIAWKAQHRLHHRYVTLAARGKTKQHIITAIARELAGFVWAVGVTVEKQQLSTKRAKAA

SEQ ID NO: 232778 - protein, 349 aa, unidentified
MLADELDYVVGVDTHRDQHVLAVVAAPTGALIAQRSVATTARGYAEAVGFTDEYAPGARVWAIEGAGHYGAGFVRFLAARGEVVHESGRSSRAERRLRGKDDPLDATRAARAALASEQRARPRSGQRQEALRVLLLARRSAVDVRRVALVQLRSVIVTAPEQLRADLRRLPLGELLRRCSRFRRSTSRTPDELATVLVLRSLAQRVQAATEEAAELEREIIAHVRALAPQLLDEPGVGPIVGAQLIVSWSHRGRVRSEAAFARLAGVAPLPASSGLTTRHRLSRGGDRQLNRALHTVVLHRRQSDAATKDYIARRVAEGKSTRDAVRLLKRYLARHLYRVMQNSTPLTT

SEQ ID NO: 232779 - protein, 388 aa, unidentified
MTDQTIPSHPAAAFDHDSTLVIALELSGKSWEVGAIVPGLPRRPCKRLEPRDMAGLMKAIERWKAEATAAGRCVRRVVLTYEAGRDGFWIARFLRHRDIEVHIMHPASIPVERRGRRAKTDRLDLDMLLRTLLAWLRGEPRACSMVNVPSQAEEDLRRPERERERLVSERVALENRIGNLLCLHGVSGFKPRLKKAAEKLAMLRDFAGEPLPEKLMEELRRLLERHQLLSEQMSAIEAAREQAVAGAKPDPAAQQIEALTLLYGLGLATATVLTREVFCRTFRNRQAIASFVGLTGTPFNSGGSEREQGISKNGNPRIRRVLIQLTWRWLRFQPRSALSLWFMQRTGGAKGRIRKVMAVAVARKLLVALWRYVATGELPAGAITAATA

SEQ ID NO: 232780 - protein, 328 aa, unidentified
MEREYIGIDLHKAFFQVCAITSTGERQWEQRWPTSDAGIAGLLTRCGRQSRIAVEASSPTWAFVDRIVEHVDAVHVVDSRKTRLKAGYAAKTDRLDARRLADALRRDSVVGIYYPPPAIRDLRELCRYRCHLARLQAGLKQRIHALLLRHGVAVPVKRLFGTRGSVWLEALRVPGWGGASLTGLRHVLRDVRAQLVPVLTAIRAIAASDAIACALDARPGFGPVFSVTLRAEIGVITRFPDGPHLASYAGLVPRVERSGGRQWSGRITKAGSPWMRWVLIEAAIHQLRRQDDFGRWARQLAVRKGILKARVAVARALCDELVDAWPRG

SEQ ID NO: 232781 - protein, 409 aa, unidentified
MEILYPRCAGLDVHKESVSACVLTSGEQAEPDQQIEQFGTTTCELRRLREWLGANGVTHAAMESTGVYWKPVFNILESGCQLILVNARHIKQVPGRKTDKADCAWIASLLRHGLLEASFVPDPEVRQLRDLCRMRTTLVRECVQVGNRLRKVLEDANIKLDSVASDALGVSGREMILALADGRDDPAELAELARGRLRAKLPELEKALEGQVTAHHRFLLRELMRQLSFLEGQVARFEKEIQRQMPPFEWAAELLMTMPGVDRTAACALIAEIGADMSRFASSRHLASWAGLCPGNNESAGKRRSGKSHRGSRWIKGVMTEIAWAATRTKNSYSQTQYRKLAGHRGKKRVLVAVANSLLQAAWYMLSQRQPYKDLGAEYLQRLNQKHLERSLIRRLEELGHKVTLDAVA

SEQ ID NO: 232782 - protein, 393 aa, unidentified
MPRKRILVKSIDTSISYQVIGIDLAKHLVSACLITGAGEIFGIDRLTYDDLLKSAERMSPTLFCMEPCAEVHYLAEKLQGYGHHTKVIDGAAVKEYIKTHFGGQKTDLNDAQAIAFLSLDTNLPEITPKNTSNSVLSSIQAVREQFRKEYIQSFVSLKGICQRWGLPISKGVMNKNKVEELVSESKKIPQEVKDWLLELLQSCRELQKRLNKISKYLKEYADNDEICQKIMSVPGIGPITATRLKATIGDIQRFEKPKSIVAYYGLVPKSKATGHNEKKGGITRRGDRVARSLLIEGAGVVLNLAAKGFLRSKPLNKWIEKKRKLKMPWGKLCCALAAKMLRIVRAILIQGTSFNAKIAGVARCSLPKESRNNVMGNNKLSEIPSPNGSVYIH

SEQ ID NO: 232783 - protein, 410 aa, unidentified
MERVIERCCGLDVHKKTVAACIRVPGSHGERVQEVRTFGTTAAELLVLRDWLEAHGVTHVAMESTGVYWKPIFYVLEEAFICVLANAAQIAQVPGRKTDVKDCAWIAQLLEHGLIRGSFVPPAPIRDLRDLTRYRKGIIQERTRQANRLHKVLEDAGIKLASVASDVLGVSGRAMLQALVTGTRDPEMLADLARGNLRKKLPALRQALAGRFRPHHGFLVAQILAHLDYLDEAIDAVSQQLDVVMAPFADEVARLDTIHGVNKRTAEVIIAEIGVDMRVFPTAGHLASWAGLCPGNNESAGKHRSGKTRKGDPWLRAALVEAALAASTRSNRSAFGARYRRIMPHRGHKKAVVAVARAILETAYHLLARQTTYQEPGRDYYERRHAEHVRRRAIQALERQGYRVTLEPAA

SEQ ID NO: 232784 - protein, 335 aa, unidentified
MKHYAGLDLSMESTQVCIVDERGGKIASMKVESTPATIAQALHEVRGVERAVIETGRMSPAICHGLRALGIPIVCIDARQAHQSLKALKANKTDPHDAAGLAQLARTGFYKEVHVKSPAAHGVRSVITARNHLVEARVRLDNMIRGLCATFGFRLGSGQGKAFIDRVMEAAHIPGLGQSIAALLAVRTELMKQIKEMDLVLREFAHRSQTCRQLMSIPGVGVQTSAAFAAAVDEAGRFRQSRTAGAYFGLVPRRHQSGEIDWTGRITKQGDSMVRKLLYEAANSILTRSRGSFALKSWAMKVAKRRGLRKARVALARRLAVIMHAMLRDGTLFEA

SEQ ID NO: 232785 - protein, 369 aa, unidentified
MAEITRAPMARVGVDLAKNVIQVHGVDAGGRKLVSKAIRRDAFLAWCAQLPSGCVVAMEACSGAHHWARQLRAMGLDARLIPAHFVSPYRLEGRSGKNDMTDAAAVCEAASRPNMRFVPIKTAEQQGVMTLHRVREGLKEERTACINRIRGLLAEFDLVFAKSPKVLRAVLVDVLEDAGNELTGLARLVLQRAFEHWRELDEHLRWCDQQIGAHVRASAPARRAAKITGIGEIGASALTASVADFSQFKSGAQFGAWVGLVPRQNSSGGKTRLGRITKRGDDYLRTLLIQGAKSAVMSAAKRDDPTSRWLQALVERVGWQKACVAMANKNARILWAVMTREAGFDPSHVSEKPLAKCAKPPAVPEPCQA

SEQ ID NO: 232786 - protein, 341 aa, unidentified
MQHFVGLDVSVKETAICVVDEQGSVVARTTIESEPAAITAWLQGLGLQFGRIGLEAGPMSPWLYAGLVEADLPAVCVETRHMHAALSARINKTDRNDAHGIAQMMRVGLFKAVHVKTPASQRRRLLLTSRKLLQRKVQDLENDLRGSLRNFGLKVGVVGTAGFERRIRALVADEPFVAAVVGPLLEARAMLRLQLAKLHKMLLDLVRDDPVCRRLMTAPGVGPVVALTFRACVDNPSRFGRSKCIGAHYGLTPRLYQSGETARVGRVSRCGDAMMRAALFEAGLVLLTSPRLRWSALKAWGMGVAKRRGMQKAVVAVARKLGIILHRMWRDGTDFHWTKAA

SEQ ID NO: 232787 - protein, 405 aa, unidentified
MSNNTSQNRLLPIGIDPGHDTCGVAFLHPDQDIVLEEFLLSNRCLPEAEKLLAKAARLAQEFSTQPVFVLEATNVFWRPLASWLRSQGALVHVVSSKQTHANRSTGMRKTKTDLIDAALIARLYKQHKSSPPYLPQEPYMSLRELSRLNAFLVDIKSRLQNRIHTVLYQINPIWTEVFAHPFTKGSLALMQREWVHPRKLADADPADIGEVLKTVTYGKQGPVFAQNLQAATAKLFTIQEGEEGFSFALKCLAEVVQALDGVLDQLDTRLARLLTDVSADVLQTIPGMSSKTTASFVGELGDPRRFASPDKAVAWFGMDPSLEQSGFDPGTGRKWSKAGSKYGRRTMYLVALSFMKAVPQARRKFQQLVRAGRSKKEALCILAADLVKVGLAMLKSQQKFDPKKV

SEQ ID NO: 232788 - protein, 411 aa, unidentified
MKLFCGIDWAETHHDIAIVDGGGNLVAKKRITDDADGFAQLVELLAEAGDSAEHRIPVAIETPRGLLVASLRATGRSVYAINPLAVARYRERHSVARSKSDHADAMTLANILRVDAHVHRKMPADTELCQAIAVRARGQQDAIWRRTKASNELRSLLREFYPSFLAAFKGRFQIGIASLEARAVLAIAPTPAVANKLSASRLAAALRRAGRTRNIDQVAAEIKTALRAPQLRQLPLVESAMGRQTLALLAALDAACVSVDELGQAAAELFHTHPDYAVITSFPGLADSTGARVLAEIGDDRTRFADAKALKAYAGTAPITRASGRSISITRRRIKNDRLAAAGWVWGFAAMANHPAAQDHYRRRRDQGDHHAAAIRHLVNKFLGQLHYCLQNQQMFDTVKAFPPPNEGLAA

SEQ ID NO: 232789 - protein, 382 aa, unidentified
MLSENTLRIAIELSVSSWLIAVRVPGADKSRLRRIDGGDARALLALIGEFRSFASAKCGQAVDVACCFEAGRDGFWLHRLLTAHDITTYVLEPTSILVNRRARRAKTDRLDAEGMLRVLAAWLAGDRQVCSMVRVPTPEEEDAKRPHREREHLVREKLRIENRIEGLLFTQGIRGRPSLRSWERDLAELRTGDGRALPRLLQAELNRLRRRLVLTLQLIREMEVERAETQATTIDDAVTKKITALQRIRGIGENFSNVLVHEVLYRSFANRRQLASYVGIAPMPYQSGGMDLDRSISRAGNQRARTTLIQLAWLWLRYQPGSALATWFRDRVGTLQGRTRRIAIVALARKLLIALWRYVETGVLPEGVELGVELGAAMVGPA

SEQ ID NO: 232790 - protein, 351 aa, unidentified
MKYYTSTSEFNCGIDLHSKQMYVCIMDREGQVRVHQNIRGNDFEYFLKLAKPYLHDLTVVCECTFNWYWLADACFAAGIEFVLAHALYLRHISGGKNKNDRIDSGKLAHLLRANLIPPAYVYPSERRPIRSLLRQRMSYVWRRSEIMAQLTMKQMVQGLAPVAKGGHNREVWEERILEQVKHPLHRFSTTCDMEVVRVYDRQIQRLDQEVTRQAKKHEARDHQLLLTVPGVGRVLSLTILFEMDTVERFPSVKDFVSYCRLVKGSVASAGKVKGLCGGKMGNAYLRWAFGEAAIIAKRNHPLLKPYAERLVSKHGKYKGNSILASKLARAVYHMLQAGTVFDAEQVVSRSI

SEQ ID NO: 232791 - protein, 332 aa, unidentified
MENNCFIGIDVSKNKLDICVLQGKEVLQEDVIDNNPSAIQRFLVDMAEKRGLDLCSCLVCAEHTGNYTYPLTLACRDLGCRLWLGNPAQLKYSSGVHRGKNDRVDARRIALYASRFNDKAMLYHELTPEQERVKQLRQERSLYRSDLSKYKGQLSDQKNFMESTVYKAKANRLKHVIKELEKMIDVVEREITGIIDSCDVLKRQMKIITSVEGIGRETALCFIVETAAFTRFTDSRKFACHAGIAPFQYTSGSSVRSRNRVSRRANKQVKTLLHMAALSITRKKKSELKVYYKRKVEEGKNKMTVINAIRAKLVARVFAVIRKNDIYSINFT

SEQ ID NO: 232792 - protein, 383 aa, unidentified
MMIIGCDYHPGFQQIAFVDTESGELQERRLEHREEAEKFYRDLGAQGVKVRVGMEASGHARWFERLLAELQLELWTGDAAAINAKRVRKQKTDRQDAQLILRLMLKDDFPQIWLPSWENRDLRQLLWHRHRVVQARTRIMNQLQAVALNEGLRCKKRLWRDAGREQLESFKLAPWASRRRRDLLALLDRLTPTIAELTAAIEQEVERCPAAQRLQTHPGVGALTALAFVLIIGRAERFQCGKQIACYLGLVPLEDSSGQRRRLGHITKQGNSLLRFLLVEAAQVTVRSDPEWRSKYCHMALRRGRKIAKVAMARKLAVRLYWMMRKEWDYAQLSKFGSYAGKPGHRDGVNKTSQMSGHPAPLHGEFEVVIMIERVTEEMHGSD

SEQ ID NO: 232793 - protein, 314 aa, unidentified
MTQISTTAGIDICKAKLDVAVYGRSERWQVDNTPTGWRRLAGELCNAGITRVGVEASGGYERGVVAELRRKGLVVLVLQPVQVRAYARVRLRRAKNDALDAVLIAACAATVEAPTVEPDERLARLADHLTYVEQVEADIVRLKGRLEHVAETRLRRIILADVVRLEARCSAEQLRIVTQLRRYADLACRLALVLSIPGIGERTALALIIRMPELGQISREQAAALAGLAPYDDDSGTHKGQRHVAGGRSRLRRSLFAAALPAAFRWNAALIALYNRLTSRGKTHKVALLACARKLLIYANTVVARGTPWVATTR

SEQ ID NO: 232794 - protein, 338 aa, unidentified
MDIVTLGIDLAKNVFALHGVDATGKAVFVRPDVSRKKLIETVANIKPCLIGMEACSGAHHWSREFQKFGHTVRIIAPKFVSPYRMEGKHGKNDAADAKAICEAVARPNMKFVPAKTVEQQSLLTVHRAREGYVSSRVELINRMRGILSEFGHVFPHSEKVFRAGVNSVLEDLPGHTNFVIGDLLNELDHVEEKISTYSRQIAEIAKTNEQVKNLMKLPGIGVVTATAMVTTIGNAYEFKSGRQLSAWLGLTPRQNSSGGKARLGKITKTGDGYIRKMLVMGAKSILLQAEKREDSVSQWAKELRARRGYGKALVAIAAKNARMCWAMMQLGEGFKMPA

SEQ ID NO: 232795 - protein, 411 aa, unidentified
MDRIYDNCCGIDVHKKLIVACFRCGKKQDVREFGATTRELLSLADWLKEGGCEMGAMESTASYWKPLYNILESSDLNAMVVNARHMKAVPGRKTDVKDAEWIADLLQHGLLQPSYIPDKDQRELRELVRYRKSLVGERTRELNRLQKMLEGANIKLSGTVSDINGKSARSILEYLLTGEPIDEAKYDEMYNQKVIAHNLKATREQIIDDLNGVMSSLQRRMMKELLIHLDELNIHIRNLDDEIDNFMKPEEKQASQAIQDVTGIGNTSAQAIISVIGTDMERFPTDKHISSWAGLCPGDNESAKKRKSGKTRKGNSLLRTTLITCAHAAVKNKKSYFHAQFMRISAHRGTRRAYVAVAHSMLIAIYHILKDGVVFKDLGADYYNQFNKERKINAYLKKLKALGWEAPVVAA

SEQ ID NO: 232796 - protein, 355 aa, unidentified
MRFYTQQHQFYCGIDLHARQMYVCILDAAGEIQVHRNMPATAEALERTLARFAGFDLALAVECVFTWYWIADFCAERNISFVLGHALYMKAIHGSKSKNDKIDSRKIAMLLRSGMLPQAYVYPAEMRATRDLLRRREYFMHQQSELLEHIQNTNTQYNYAPFPKRIRNRANRIDITERFEDPLVAKSIEVDVRVLDLYHQILLELEAQIQRQARHHDPVSLQLLRSIPGVGKVLALVILYEIQDISRFPTVGQFISYSRLVKCPHESAGKRSGGTHNKIGNAHLKWAFSEAAVLFLRGNEPAQRYHQKLVSKYGKAKALSVIAQKLGRIVYFILSRQMPFDSHRFFRDRVHESVA

SEQ ID NO: 232797 - protein, 355 aa, unidentified
MKYYSSTTEFNCGIDLHAHQMYVCLMDRQGKKLVHTNIRHNDFNYFLKLVAPYRHDLTVVCECMFGWYWLADACHAAGLPFVLAHALYLKAIHGGKNKNDRIDSEKLAHLLRTNLIPPAYVYPAALRPLRALLRQRLYYVWSRAQLLTRIQSHQLAHNRPTLRQTRPNRAPWEQQLLAAEPDPVRQLALQNDLALIRHYDAQIAALEEELHRLTKQAAPRDYALLQTVPGIGEHLGLTILYEIGDIERFPTVKDFVSYCRLVKGTVASAGKIKGLRGAKLGNPYLRWAFGEAAIIAKRDHVVLGPLAQRLEARFNGNKFKANTVLAIKLARAVYYMLRQHTVFDPDRLVAALARK

SEQ ID NO: 232798 - protein, 407 aa, unidentified
MFVGIDVAKDSLVACAMDDQGEDVFHSYSVKNNRPGCLKLINLIADNANLLQPDIIKVGMEATNVFWEHCYRLIKNHEKLNSNFKLQLYTVNPKVVSNFKKAYTDLPKNDSVDAWVIADRIRFGRVENSSSPEALYRALRQITRHKFKLAQHIKAEKARALNLVFLKFSDLTQKSPFGTFTKASMALLENYTLREIVNTDVLELAEFLYQNSNNRLGGSTPIEKIITALKKAARNSYRLKPEIDQAITQTLSMTFDNIRFYQSQSKRLKRVLKRQLKAIPQTLITVDGIGPVLTAGIISEIGDINRFDKETNLASYAGLTWSQYQSGSFTAEETHLTKKGNKYLRYYLVEAANSLRVHNDSYKSYYYKKYNEVPKHKHKRALVLTARKFVRLVFALLSKGEIYQPRR

SEQ ID NO: 232799 - protein, 327 aa, unidentified
MDYFAGLDVSVKDTSVCVVDDTGKITREVRVASEPDALLAVLRDPTYRFKRIGLEAGPLSQWLFSALATDLPVICVETRHIRAVLKAQINKTDRNDARGIAQMMRVGLYRPVHVKTLRSQKLRMLLIHRKLLQSKAIAVDNDLRATLRNFGLKVGMVGATKFEARIKELVENFPDLFLLVEPLLVVRRVLREQIGVLHRRLLAVVRDDEVCRRLMTVPGVGPVVALTYRATVDVPARFRRSKSVGAVFGLTPSRDQSGETDRPGAISRCGDAMMRTALYEAAQSMLVHSTRWSWLKAWAMKIARHRGMKRAIVALARRLAVNASHLG

SEQ ID NO: 232800 - protein, 337 aa, unidentified
MKRIPVYVGLDYHQASVQVCVMDAGGQTLINRRCANDWLAIVEAVAGYGRVVGAALESCCGAADLGEELIEHAGWSVDLAHPGFVSRMKQNPDKSDFSDVQLLADLERVGYLPKVWLAPQEVRELRRLVRYRQQLVADRRNTKLRVGALLRDQRVRDAPAEPWTQPWRQWVAQTPQLSEQSRWVVERQLHHLTEVVEQIEEVEKHLEEVTQEDSVVCMLRTHQGIGPVTAWMLRAEIGRFDRFRTGKQLARFCGLSPRNASSGTRQADAGLIKAGNRHLRATLMQAAHRLIRYDPYWKKFGQERMDRGKPKCLVVAAVANRWVRWLFHQMQPEKLVA

SEQ ID NO: 232801 - protein, 354 aa, unidentified
MKEQAIQYLAFDVHQATVVANQRDESGKVVLQATVPTEAQAILRLVKGAGPRVHVAFEEGTQAQWLHDLVAPHAEKVIVCNMRGQNALGNKNDRIDVVRMSEDLRRGTLKPVFHGTANVLTLKELVRSYNNLVEDATRVMQRIKALFRARAIPTKGTAVYRDTERKEWLDKIDGGARVRAATLFKHLDVLLELRPPAKAAMLTEARRQPGWKVLRSIPYLGPVRVAEIMAIMRTPFRFRTKRNLWPYVGLAVVTRSSADQEVVAGQIRKRQRPPITRGLNRNHNPTLKSVFKGAANAATARPGPLYDFYQASLGRGVKEELAKVTLARKIVSITLRLWKKGELFDPKKVTMQAT

SEQ ID NO: 232802 - protein, 360 aa, unidentified
MSDGSKEHPLMTAGLDLGDNYSYLCLIDTESGEVVEEGRLITTPEAFRRRFASERPMRIAIEAGTHSPWASRVLEECGHEVLVANARKLRLIYANKRKTDEIDAENLARLARLDPKLLYPLKHRGEESQAHMALIRSREALVGTRTQLVNHVRGTVKSFGARLPKCPARSFHKRAPEHIPEALLPALGPILEQIGSLTERIREYDRKLQTISKQHYPETELLRQVEGVGPLTALTFVLTLEDPYRFERSRSVGAYLGLVPATDQSGERDPQKHISKEGDEMLRKLLVGNAHYILGPFGPDSDLRRHGEKIASRGGKNAKKRAAVAVARKLSVLLHRLWISGELYDPLYNAHRRELREEAA

SEQ ID NO: 232803 - protein, 340 aa, unidentified
MRMFAGLDVGFKRTAVCVVDEAGRIVWRGMVDTHPEALSRALQHWGEKLAKIGLESGSMTPWLARELAKVGFPVVCMDARAAADAVRSRRVKSDKADAHALAEMLRTGWYRTVYVKSEDSHRLKAMLGARDQLVRAKRALGNQVRGVLRPFGIRLPSRQGTKKFAEAAHQAVRRDNMLHASVTALLEALAAIEGQIARLDEQLKELARRSPVCWRLMSVPGVGPIVALAFMAAIEDINRFRRMRSVGAYLGLTTRRYQSGETDVVLGISRQGDAMARHYLYEAANVLLTTVRRPSALKSWGLKLMKRRGPKRARVAVARRLAILLRRIWKDRTHFDAVPA

SEQ ID NO: 232804 - protein, 342 aa, unidentified
MSTPVRIGMDTSKSVFQLHGVDESEAVVLRRQMRRSEMIRYFERSSPALVAIEACASSHHWARVLASFGHKVRLIPPQYVKPYVKRGKNDAADAEALCEAVTRPSMRFVPIKSRERQAACMLMTVRERLVGVKSQLSNAFRSYAAEFGIIGPAGRQNVNALIKRVLEDDTLPELARDLFSLQAQEYAAVEARLEEIDAKLMKWHRADELSRRIATIPGVGPIGSTMLSMRAPPAEMFRSGRQFAAWLGLTPKDHSTGGRTRLGGITKAGDPAIRTTLIVGATALLRHVRKGRTRPSPWLAAMLERKPPKLVAVALANKFARIAWRLMMSGGVYMRPPAMISA

SEQ ID NO: 232805 - protein, 314 aa, unidentified
MEQQAEETFFGIDVSKTHLDLARWGQQEVRRYENNATGIAALVETLLAETPVTLIVAEASGGFEQAMVTELAAASLPIVVVNPTRVRNFARAKGQLAKSDQIDARGMADFAQAIRPEVRPVGADDQQLIKALVTRRRQLVDMQTAEKNRRSSINPELLPRLEKHLAWLEAELAEIEQELNDWIDKNARWRDTRNRLESVPGVGSVTSFTLLAELPELGSLSRQKIAALVGLAPFNRDSGHFRGRRHIFGGRADVRSVLYMAALSGIRYNPVLKAFYDRLVAKGKLFKVAITACMRKLLTILNAIVRDGSTWQVT

SEQ ID NO: 232806 - protein, 449 aa, unidentified
MSRPQVIDDEEHERVHDRVAAIDVAKDTGMVCTRTPHPSRPGAQRASVWTVRARMNAIRVLGRQLRKDGIEIVTLESTSDYWRIWFFVLEACGLAVQLVTAAQAKNLPGRPKTDKLDAMWLARLTEMGLLRASFVPPKAIRDLRDYTRARTRLIHERSRCWQRLEKLLEGALVKLSSVASKLTTLSAQDMIKAMIAGQRDPEILAGLARRTMKAKHDALVEALDGMFDDHHGELAALLLDQIAALDAKVAQLGARAAELAAAIPGGWGIDPDGTTGPGAGTGPDAPVLNAVARLAEIPGLSPDLARTIIAETGLDMTRFPDAAHLVSWAGLCPSARQSGPRTRSGRKGRGDTWLRGALGQAAVNASRTATFLGERYGRIARRRGKAKAQVAIARSILVIIWHLLANPEARFTDLGPGYYQTRLDTDRKLRNHLRQIQALGFTVTLTKAG

SEQ ID NO: 232807 - protein, 313 aa, unidentified
MNDTIGIDISKATLDAFRRSTGEHRQFPNDANGCKALIRWIRLAHPETTRVLFEPTGPYHRMLELALLAAGLHLVKVNPRSARRFAEATGILAKTDRIDASVLAGMGAILDLQGRAARTEIQYDLKELSVARQALIKDRVAAKSRQATAVNTLLKRQLAARIKQITSQLADIDAAILARIQEDPMLARRFDILCSIPGIGKITAAALLIDMPELGAVDNKQIASLAGLAPIVRQSGGWNGRARIRGGRKQIRITLYMPAVASLRCNPHLKKTFDALSGAGKHAKLALTAVMRQLLIFANSLLRDDRKWNEIRA

SEQ ID NO: 232808 - protein, 532 aa, unidentified
MWGATTSSAGQNNEAPQRPLHVLCAGWTCRNRGFALMRVQEPNAPGQRGGDEATATPALVTTSDRATPARHERIYVGLDIGYREHVAAASPLAVFNVGRNPDAWKRVKPIHFASDAIGLGRFQRYLDRHSPHPGDFLILLEPTGSYGLTALLYLLGKGYRVLQVDNRAVKDYREKIFGSETKTDDTDARLMARMGFLHELVGEEFSIQPVLLMNSDASALRGMVHDLAKLQKEITRRRNQLQQLAAVWFPELKTFFKGSTAAPAARALLEHFASPQHLAAAPTEHVADVLRSAHAYSHAARAAELQAMARTTSGVPTLTHHQWRQGWLIKQLELLENARQDLVDQVAHATATHPYARIIESLPVKSPIWTATLIGAIGDIGRFTTASQFKAYLGWYPQLSRSGSSTDSSELAKRGVRPARNVLGQMTVIMLSSTIRSNPFRDVYQRLTTRGMRPAAALGHVAGKLSVVLYGMLKTMTPYDERKHREQLGLLTAAEQPSSTPVEVALELVDLVDQQTDLAEEPTNTDDLRRVL

SEQ ID NO: 232809 - protein, 396 aa, unidentified
MPEPDGVIGFVPHLRRPERKEGAALQADDKTWSERNGHKHQKGKRNMKHYAGLDVSVKETSVCIVDESGNVCRERKVISHPDDLVAVLSDPAFNFERGGLEAGPLSQWLFEGLAKAGFAVLCIETRHTKAFLKAQQPNKSDRNDARGIAHMMRVGLFKDVHVKTFTSQKRRALLTARKLLQEKAIAIENDMRGLLRNFGLKVGTIGAFKFDERIRELVEAAPDLADIVEPLLTARQRLREEFAKLDRKVRGEARVDPVCRQLMTVPGVGPIVALAYTSTIDIPSRFRHSRAVGAVLGLTPVLNQSGESRRIGHVSLCGDAMLRGLLYEAAQVLLIRVKKWSWLKAWAMNVAKRHGAKKAIVALARRLAVVLHRMWVDGSEFRWTRETRPTTTDATA

SEQ ID NO: 232810 - protein, 336 aa, unidentified
MYSGIDLHSNNSVIAIIDDGDRVVAQRRLPNDVTRIVGFLVRWQEQLAGVVVESTYNWYWLVDGLQDAGFHVHLANTAAIKQYEGLKHSGDETDAQHLAHLLRLGILPTGTILPREQRAVRDLARKRMQLVQSCTAHVLAVENIMARQLGGRMTSNQIKRLTNDAVDNLSLAADVGLAIKANVAVIATLQSQIEVLEKRLQERVKPRPQYGLLTSVPGIGQTLATVILLETGPIERFADVGNFASYARCVDSVLTSNRKKKGEGNVKNGNKYLAWAFVEAANFARRFCPEAKRFHERKKARTNNIVATKALAHKLARACYHILKEGKPFDATRCFA

SEQ ID NO: 232811 - protein, 425 aa, unidentified
MKNTQNQKISQIKFETLVVGIDIGKETHYARAFDYRGMELARLLKFSNTDQGFERLGQWMRDICKQQEKTGIIVGFEPTGHYWFTLGDHLKRQGHKLAIVNPFHVKRTKELDDNSPTKNDRKDPKTIAMLVKDGRYREVYIPDDIYQELREAVSERERLQEQLTSIYNRVVRWLDIRFPEFTTVFKDWRRNASLITLRSFPTPEKVMEMGVDKIVETWRKQMKRASLKRAERLVKVASRSVGRTSGKVASEVSLQNLLAEYDLYCQQYDKLEQLMQELLMQVPNADKLLDIKGVGLITAATFVGEVGDISRFQDPRQIQKLAGLNLVENSSGKHKGKTTISRRGRRRLRHSLFFSMIAMLGKNQEFRLLHQRNLMRENNPLNKMQSIIALCGKLIRVFYAILTKGVDYSPEKMLGDMEQSIRVAA

SEQ ID NO: 232812 - protein, 411 aa, unidentified
MENVFSCCAGLDVHKESVEACVRRIEPNGRLHQQTHHWGTMTCDLLAMADWMTAQGVTHVAMESTGVFWKPIYNILEGHFTMLLVNARHLKQVPGRKSDVRDCQWIAQLLQYGLLKGSFIPPRSQRELRDLTRHRTQLVEEKARAANRIHKVLQDTNIKLSSVATDVLGASGRAMLEALITGEEDPVKLADLAQRKLRGKIPQLEKALEGHLTEHHRFMLKLLWKQLAQQEELIAELDRKIEEQTRPFEAEIDRLDAVPGVDRRVAEVVLAEVGPDMKAFPTHENLVSWAGMCPGNEESAGKRVRKRITPGNRWLKRTLAQATWAASHSKNSYLAAQYRRLAGRRGKKRALIAVGHSILVIFYHMLKTGTTYTDLGGDFFDRLEPQRLTRYYVKRLESLGHKVTLESCAAA

SEQ ID NO: 232813 - protein, 354 aa, unidentified
MIVIGVDPHKQSHSAAAVDKRTGELRGERMVRARRLGHEQLLAWARGLDGERCFALEDCRHVSVALERFLLASGERVVRVPPKLMAGTRKSGRARGKSDAIDALAVARAALRERELPVARLAGVEREIRLIVDHRDDLVAEPTRIQQRLRWHLHELEPGLELPAGCLDRRVWLERIVRRLARQQASVQVRICRELVERCRELSRQANELERELGQMLRAQAAPLLALPGCGVLTAAKLIGETAGASRFADDARLAMHAGAAPLPASSGSRQRHRLNRSGNRQLNCALHRIAVSQGQHHPPARAYLAGKEAEGKSRKEALRCLKRHLARTVYRLLCSLEEEKVTPIRRELTSALT

SEQ ID NO: 232814 - protein, 339 aa, unidentified
MELYAGLDLHSRNTYIGIMDNAFNRVFKKRVPNHLEQILQTLNPFRDQIKGFVVESTYNWYWLVDGLMDAGYSSAHLANPSAIKQYEGLKHSDDQHDAFFLAQLLILGILPQGYIYPKNERPVRDLARKRMFLVQHKTAHILSLQSLLQRCCARKVSANDMRHLTVEELEMWLEEEYLVLSAQANLDSINFLKQKIQGLEKAIRKKVKLKKAFHNLKTVPGIGDILALTIMLEVGDINRFSKVGNFTSYCRCVPSRRLSDGKSKGSGNRKNGNRYLSWAFTEAVHLGRRYNERFRRYYNRKVAQANTSLATKALGNKLARICYYIIKDQVPFREELFCQ

SEQ ID NO: 232815 - protein, 309 aa, unidentified
MADIVRLAGIDVSKDKLDVHVLPSGESRMVPYDRRGLAGLRRWLVGLGVALVAVEASGGYEREVSEVLEEAGLIVHRLNPLRVRRFAQLKGRLAKTDRLDARTIAEFACAYPQERQPRRDPRRERLAEHLLVRRHTQEAILDCINQLEHLRDKQLRRLIIARKTSMERTLAILDRDLARLIAEHDDLAELSERLRTVPAVGPVLATTLIALLPELGSLTRRQVASLVGVAPFDRSSGRHKGIQAGRGFVRKALYMAAMVASRHNPVFVAFNERLAGKPGKVRLVACMRKLIVILNALVRDSAQWQPRPL

SEQ ID NO: 232816 - protein, 401 aa, unidentified
MNAVGIDVSKGKSMVAIFRPFGEVVASPFEVAHTDSELSELVEKLRRLQGETKVIMECTGTYHHPFALHDAGLFVSTVHAKLIHDFGNNTIRKVKTDKADAIKIANYGLANWMHLPQYVPEDDVRRMLKTCNRQYARYSKMKSMLKNGFIALTDQTFPGVNTLFTSPVRKDGSQKWVDFAKTFWHCECVCGTSPKAFAERYRKWCKRHGYNFSQEKAEDIYVSACGHWFVLPKCETTKLLATQAVSQLDAISKTLAAIAVEMKRLAQLLPEYPIVSAFYGVGDLLGPQIMAEIGDVYRFPRKESLVCYAGLEAPPFQSGQFESANRNISKKGSPHLRRALFNVMDCLIKKSPIDDPVYQFLDHKRAEGKHYYSYMTAGCAKFLRIYYARVKEYLDSLDSEA

SEQ ID NO: 232817 - protein, 456 aa, unidentified
MQHYYLGIDVSKGYADFVILNDKKKPIEENFQLDDTFEGHCCLYERLLRFFEDHPDSTIYAAVESTGGYENNWFNALIKFQGTLNLKTARLNPLGVNANSKADLKRNVTDKISAQNVAEYMIAHPEKISYQQQDHLASLRKQWGFIKMLTKQSTQLLNQLEVLIYNANPELLVYCKDGTPGWFLRLLIHYPTASSLSKAKIVKVARIPYISPDRAKELVGNAKKSVASATDKITGKLIIATVKQILHLKQVIKAQTKLMAQECSVPEVDLLKSFIGIKDFSAIGLMLEIQTVERFLSVKKLASFFGVHPVYKVSGDGIGGFRMSKRGRKEPRQILFMVTLTAIQSNPLIRGTYQEHIQKGMEKMAAIGLCMHKTLRIIYGMLKNNSAFDPEIDRRNREKMVIHNSKVNKDKNRRYQAFDSNAPISRRQHGKREERKQSHSDNNTNNGIIAPAPLST

SEQ ID NO: 232818 - protein, 442 aa, unidentified
MPPQFVSSESMGRGFSEDSITAEVRPLYLGLDMSLQTGTACLLDHLGRQVVPRWMFRNNRPGAEELAQKVAELLNCHRATILLVGMEATGIYGWHLACFLSETPLLQPWDARVYVFNPHRTLNFKKAMGELGKTDRVDALAVAQWLRVGHLPAPFAIDAVYGPLQRLTRFRYHLTQTITREKLYTLGLLFLAFSEFGTAAPFKDPFGTTSQAVLEEFSPDELAIKPLEELTAYVARNGRGGFAEPKEVARTLQQAAKDSYRLDKVHDGALRLVLSVSLANISTLTRHLKGVDATIAKELKAIPLATCLLSVPGLGPVYTAGLLAEIQDIHRFQDQAALAKFAGLTWRSHQSGNFTAEETPLTKTGNTYLRYYLVEGANSVRVREPEYRAYYQVKYNEATKHRHKRALTLTARKLVRLVDALLRDAQLYLPPGQRHGGRVAVA

SEQ ID NO: 232819 - protein, 357 aa, unidentified
MGKSIRNLTAVTRVGLDLAKNAFQVHAVDATGAIVVARKLTRGRLVPFFAELAPCVVAMEACASAHHWGRALIELGHEVRLIPPAHVKPYVRRNKSDQVDAAAIYEAMSRPGQRFVPVRSIDNQAELMRHRARELLAGQRTAALNALRGHLAEIGLIAPQGAQHAYGLKRMAADGFNENGEIVVPDCVRGALRSLVGQIDALDEAIGAIDRELAASVKADETAKRLMTIPGVGPVTASAIMATIQDASAFASGREFAAFLGLTPRQNSTGGKTRLGRITKMGDRYLRKLLVVGACATLRHRRGNNDAMRLWASGMLERKTVKYKFNLTAVALANKVARIVFVLMTRGGQYDDRPVAA

SEQ ID NO: 232820 - protein, 357 aa, unidentified
MEQRNKISFKGQNIYIGLDVHLKSWSVTILSETSVLKKYSQNASPEALHKTLTMRYPDAEYYSVYEAGFCGFWIHDRLTELGIHNIVVNPADVPTMSSEKLRKTDAVDSKKLAVCLRAKQLRGIYTPDAEALEIRSLIRLKNSITKDTTRQKNRIKSQLRYLGIDIPKEYLEPNSNWSKRFIAWLKDVQMKTTSGRQTLDLQIRQLEDLRRQKLEITRALRKLSHSEKFEDTLRLLMTVPGIGQTTGLALLAEIVDVTRFANAEQLAAYVGMIPMCHSSGEHEGVGDITLRKHAILRSNIIEAAWVAIRKDEAMQLCYLNNCKRMVPSKAIVKVARKLVNRIYFVLKRRQPYVNAVA

SEQ ID NO: 232821 - protein, 347 aa, unidentified
MKQFSRIGMDTSKQIFQLHGVDGSEQVVLRKKLRRRQVLEFFAGLEPTVVGLEACGGSHYWARELERLGHEVRMMAPQFVKPYVKRGKNDAADAEAICEAMSRPTMRFVPVKSEENQAALMLATVRERLVRNRTQLTNTIRGHAAEFGLVASKGRAKIEPLLARIEADESLPALARELFAELAREYAELQGRIAEVDGKLRAWHRNNEMSRRLTGIPGVGPIVASLLVMKAPDPHAFRSGRQYAAWLGLTPKDHSTAGKQRLGVITRAGDEMLRSLLVVGATAVVWRARQGASGYDWPWLVELLKRKEPKLVAVALANKIARIAWKLMTTGETYNAGRAPAVLQRAS

SEQ ID NO: 232822 - protein, 348 aa, unidentified
MTKLARIGIDTSKSVFQLHGVDEKEQAVLRKQLRRRQFVVFFAKLEPTLVGLEACGASHHWARELQQLGHQVMLIPPQYVKPYVGRNKNDKTDAEAVCEAMSRPKVQERLVAIKSVEQSAAQMLLGVRESLVKRRTQLTNTIRGHAAEFGLVAAKGLDKIEPLLARIAADTGLPALTKEMFAVLGREYAELGPRIAQIDNKMLAFHRSNEVARRLMEVPAIGPIGACLLVTKIVDPHAFRSARRCAAWIGLTPKDHSTAGKQRLGGITRAGDERLRAVLVSGATTCIQHARNRRGRPSPWLVELLKRKPPKVAAVALANKTARIAWKIMTSGERYDPNRCVARRGLAA

SEQ ID NO: 232823 - protein, 328 aa, unidentified
MIYVGIDIAKLNHFASAISSEGEILIEPFKFTNDADGFHLLASKLDSFDKTSTNIGLESTARYGDNLVRYLVAELYKVCVLNPIKTSQLRKNNIRKTKTDKVDTYVIAKTLMMQDDLSFVSFYDLDMMDLKALGRFRQKTIKQRTRLNIRLTTYVDQVFPEIQYFFKSSLHQNSVYALLKKAPSPNEIASMHMTHLANLLKVNSHGHFTKEQAKELRVLAQKSVGANDSAISIQITQTIQQIELPDSQLDKIEAEMTNIMKFNDSVIMTIPGIGYINGGMIFGEIGDIHRFSNPNKLLAFAGLDPSVYQSCNFQDKTTRMSKCDSRVL

SEQ ID NO: 232824 - protein, 368 aa, unidentified
MEKIGGSEGIGQARLQAPKRPPDGTAVWMAIDISRSKAVYCLRWEGSEQRRLSTPLGIEHVRAVVEHYRGCPMHVAYEACGFGYELAWWLQAHGVRAMVIAPSRVERAPGLQVKTDRVDVGKLARKLEKGDLKAIYIPSRSLHEQRQLGRTYAQCLKERKRAQVRIRSLMQEQGRLGPLPAAGWTAYSAWLGRQQLPEPVRLCVQVHEQLRELADRHAKRLTAELHQLARSEQYRPLVKALTAQSGVGWQSAIRVVLELGTMARFSTTDALPHYLGLTPSQYSSGELDHRGHTLKCGPGFLRALLLQCAWSAVRQGDDHELQARFATLAPRIGRKRAIIAVARKLVIKLRRRWCAYQVSSAPAPAVAV

SEQ ID NO: 232825 - protein, 367 aa, unidentified
MHATPDNTVAATVAVDLAKDVFELAFADADHRILERKQLSRRAFAHVLDNRVPLRVVMEACGSAHYWARRFAGQGHTVCLLPARDVRPYVRRNKTDRTDVAGILEADRCAQIDPVPIKSPEQQGVQALHRIRERLKSQRTSTINLLRGVLREFGLIIPLGAAKVRPAVLAALEDGDNDLPMALRHTLGELLDRLAGLQADMTAIEQRLEAFAESDLPSQRYQSVPGIGVLTATALRASVGSLDRFRSGRHFAAWLGLTPREHSSGAQRHLGAMSKRGDGYLRLLLIHGARAALRAAQVRQRKDQPLDRLQAWALALQARQGHNKAAVALANKVARRVWAMEHHHAVFDGNHRSVRPAVATGVVCVIE

SEQ ID NO: 232826 - protein, 338 aa, unidentified
MALYCGIDLHSRDCWLAILDDGLKVVREAKVGNDLEAILEVLEPYREEMEGVAVESTFNWYWLVDGLSEAGYQMHLVNTWAVKQWEGLKYSDDRHDARWLAHLLALGILPEGYIYPKQERSMRDLLRRRAFLVRKRTSFLLAMRGAFECRTGLRRTSGEVKQWTAEEIESYLDDPTAALGIICLLEPMKALDGQIRIIEKEALTRAKLRDEFAPLLTVWGIGKILALTIMYEVGEISRFRKVGNFASYCRLVKSARLSAGKRKGSGNARNGNPYLSWAFSEAAHFAVRYHPPAKKYFQRKRSKTNGIIAIRALAHKLARASYYVMKDQVDFDSERVFG

SEQ ID NO: 232827 - protein, 409 aa, unidentified
MELLISRCAGMDVHQATVVVTVRIPDEAGGRRSITETFGTMTPDLLALRDWLHAYGVTHVALESTGVYWKPVYYVLEAGYTLLLINMHDLKRVPGRKTDVKDSEWLAQLLECGLLKASFVPPPPIRELRDLTRYRVQQVRDQAQETNRLCKVLEDAGVKLTSVVSDVMGVSGRAMLAAMMEGTTDPAVLAELARGRLRTKLPALRRALEGRFRRHHAFLLQQILTKIDFLGETIERLTQEIDARVAPFEPMLAALDTIPGVDRIAAISIVAETGGDMHRFPTAGHLCSWGAMCPGQNESAGKRRSGKTRKGNRYLRRTLIQSALAATRKRDSALQAKYHRVKRQRGHKKAVVAVGHQILEIAYFVMRDGVTYHELGADYFDRRHADRAARRHVKHLEALGFRVTIEKAA

SEQ ID NO: 232828 - protein, 314 aa, unidentified
MVEDAPCCVGIDVAKDQLDVHIRPSGEAFAVARDGPGLEQLLKRLAPLQPSLVVLEATGGFETLVAAAIATAGLPLAVVNPRQIRDFARATGRLAKTDRLDAQIIAFFAERIRPEPRPIASLDAQHLGELVARRRQIIDMITMEGNRRRQAASRAVQTSLDAIIDALKAQLRDIDTDIGTAIRASPAWRETDELMQSVPGVGPATARVLIADLPELGTTTRQRIAALVGVAPVNRDSGTMRRRRAIAGGRTSVRNALYMATLVGVRRNPVLKAVYDGLVLKGRPKKLALIACARRLLTILNAILHTRTPWRSPL

SEQ ID NO: 232829 - protein, 312 aa, unidentified
MANQVFAGIDIGKDKVFVNIYMDSQVRDFPNTHSGLERVSRYLMKNAVDLVVMEASGGYERQPASDLRACGLSVAVVNPTYVRRFAQGMGTLAKTDTIDARLIAHFAYVKQPKPQAAKTAEEEELAALVERREQLVSLLSMEKNRLSKASDFSKASIQSSVQFLTGQIDTIETEIEGLVAKSPERQAKMGCMTSFIGVGDVTAVTLLTEMPELGKESREHIAALAGVAPINRDSGRMKGKRRTYGGRARVRRTLYLAALSASKHNPIIREFYERLLAGGKEKKVALVACMHKILTILNAMLKKGELFNPVRS

SEQ ID NO: 232830 - protein, 419 aa, unidentified
MKKIKPKTIKEVNQKILIAAIDGGKDKHYGYFRCHDGTEGKSLPFWNDGRGFQEFWERISSAAKAYGLEEIVVGFESTGPYMEPLAQFLRNKKAVRLVQVNPMHTKRLKELPGNSPLKTDRKDPKVIADIIELGHALTVVIPEGPAAELRRLTQGRERTIESRTRLFNQLQCLLAIIFPEFLQVMRDVTTASAQHLLRNHPTPQGIVSLGESALASLLRKVSRGKLREDRARALFEAANESVGVRDGRDSMLLEIGLMLDMIATSDHFIEGLEAEMVRYLEQIPYSRIMLSIKGIGAVTAAGLIGEVGDFTKFGTIGEIMKLAGLDLYEVSSGKQRGKLHISKRGRPLVRKLLYLAALSAVRKGGVMHEWYQRALGRGMIKTKALVAVSRKLLGIIFALVRDHSIYVENYRKPILQEAA

SEQ ID NO: 232831 - protein, 413 aa, unidentified
MEQIHDRVAGLDVHRDQVAACVRTPGPRGGVQTQKARFDATTGGLAALAEWLAGHAVTLAAMEATGVYWKPVYYALEDRFVVWLCNAHHVRNVPGRKTDMSDAEWLADVAAHGMVRPSFVPPPPIRELRELTRYRKTQIDVRAAEIARLEKVLQDAGIKLTSVASKVLTQSGQAMVEALIAGERDPAALAGLAKGKLRPKIPQLTAALRGHFGAHHAIVAARILAHLDFLDETVAALDEQIAARVAERYQSAARLLADVPGLERRSIEVIIAETGADMSRFPSPAQFASWAGLCPGNHESAGKRRRVATTPGDQWLRRTMIESARAAARTRGSYFAAQYRQIARRRGPNKAAVAVAHSLLDAIWHMLSTGEVFADLGEDYFTSRHDKEHQTLRLVSQLEKLGYTVQLAAAAAT

SEQ ID NO: 232832 - protein, 385 aa, unidentified
MDKSITLYVGLDVHKDSIDIAVADAPRDGDVRHVGATGGDLASLDKALRRLISRGQPLHVVYEAGPCGFVIWRHLTRQGLHCEVVAPSSIPRAPGMRIKTDRRDALLLARMARAGELAVVRVPDEVDEAVRDLVRAREDAVREQRNGRHRLKALLLRNGTPYTGKSSWTAAHLRWLAGIKLPHSAQQIAFQEYLHMITEATARIGRLEQALREALPDWHLAPLVQALQSLRGVQLIAAMSLVAELQDFLRFDSPRQLMAYVGLVPGEHSSGPKRRQGSITKAGNSAVRRMLVEVAWHYREGPRVSPIIAKRHDGLPTAITDIAWKAQTRLNSKFKRLLARKVMKTKAVVAVARELAGFVWAIGREVQTSGWRGTAELTTTKQASH

SEQ ID NO: 232833 - protein, 346 aa, unidentified
MEHYAGIDVSLELSSVCVVDGQGKIMKEAKVASEPEALVCFFEELGFPVKRIGLEAGPLSQWLHAGLAQAGFETVLLETRHVKAALSAMTVKTDRKDARGLAQLLRMGWFQHVHAKSIGSQEIRALLVARKQLLGRLLDVELSLRGILRGFGLKVGQVTRKTFEARIRELVTGQATLERIAEAMLSARATLKAEYEKLHKAVLAIVREDAVCRRLMTVPGVGPVVAVTFKSAVDDPSRIAKSKAVGALFGLTPKKYQSGEKDVTGGITRTGDEMVRTALYEAANVLLSRITRFSKLKRWGMDVAKRRGSKRAKVALARKIGVILHRMWIDGTTYRWAEAKPIAAQG

SEQ ID NO: 232834 - protein, 368 aa, unidentified
MPNGTQCVGLDVDAARAACAVLESSGVEGPRTIVMGLDQHRAQITAEWIDTATGEIGRARVTPAHRESVRRFLGRFVGHRLEVALEATTGWRFVVEELHAIGARAHLAEQAETSARRGNKKRAKTDRADARHLRELLMIGRLPESWIPPAHLLDLRARVRLRHTLSAQRGEWQQRIQAVLYHHGCPQRRSLITADGRAWLAQQPLPQTAREQVAVAIAMVDALEVQIAPLDRQLRAYARRQPGCRALMGHYGIGELTAVTILAELGDARRFSNSRDAVRYAGLDITVKQSDQRRAPGHLSRQGPPALRWALYEAAQVARHPRSPDRDYYLNAAERIGGNRACLAIARKLLKRSYHTLRELGEEALTAA

SEQ ID NO: 232835 - protein, 414 aa, unidentified
MQQIYERVAGLDVHRDNVVGCVRRLGPRGGLVFEKDRFTTTTAGLRELEAWLADRQVELVAMEATGVYWKPVLYALESRFAVWLCNARNVRRVPGRKTDLSDAEWLADVAAHGMIRPSFVPPPPIRELRELTRYRRTQIDARAAEIQRLEKVLQDAGIKLTSVASRVLTQSGRAMIEALIAGERDGTRLAELAKGKLRPKIPALTEALTGRFGSHHAVACRRILGHLDFLNESVAALTEQVDARTAAFAPIYALLSPVPGLDRLTIDVIIAETGADMSRFPTPGDLASWVGLCPGSHESAGKHRRVGTTNGNPWLRRALIESARAAARTKGSYFGAQYRQIARRRGPNKAAVAVAHSLIELVWHLLSTGELFKDLGDDYFTRRQDPQRRARRLVAQLEALGFKVTLEAAAALPA

SEQ ID NO: 232836 - protein, 320 aa, unidentified
MSATSVVVGIDVAKAHVDVAVLGAKFDAQRFDNNAEGHSALATALQPLGVALVAMEATGGYEAALACALQAAGLAVAVVNPRQARDFAKSMGRLAKTDTIDARMLAEFAAVLVRREDLASFIRPLADAQQQALAAMVTRRRQLLTMLLSERQRLQLAIPVVRPSIEAMIEAIRKQLDEVEVQMVTHVHEHYAALDKLLRSASGIGPVASATLIAELPELGRLNRRQIAALVGVAPIANDSGTSRGRRRIQGGRFEIRRVLYMAALTAARRNPAIKPFYERLIAIGKQPKVALVACMRKLLTTLNAMVRTNTPWDYSLHLA

SEQ ID NO: 232837 - protein, 356 aa, unidentified
MTVTIVEEARSVTEVARPITGGVDTHADTHVAAALDPVGGLLGVREFPATAAGYAGLLDWLGGFGTVCLVGIEGTGSYGAGLARYVTAAGVRVVEVDRSDRQDRRRQGKSDPLDAVSAARAAQSGRARGAPKGRDGAVEAIRTLMVARRSAAGERTRTINQARALVLTGPDDLRTRFARHTPAALITGLAALRPRTGDVTGHATRIALRELGRRAQFLDGQLERLDELIVPLVTARAPGLLAVYGVGPRTAALLLIAAGDHPGRLRSEAAWAHLCGAAPIPASSGKVTRHRLNPGGDRQANHALWRIVFTRLGSDPATRAYAERRTAEGKSKAEVIRCLKRYVAREVYPHLRPVGG

SEQ ID NO: 232838 - protein, 288 aa, unidentified
MMIIGTDYHPGFQQIAFLIEETGEYDEQRLNHEGGEAERFYRDLKRKGIRVRVGMEATGYSRWFERLLAELDFELWIGDPAEIEAKRVKKRKTDREDARLLLRLMREDRFPQIWVPSPENRDLRQLLWHRHRMVQMRTRIMNQLQALAMNEGKRWKSKLFSQQGRVAFEKLALGPWASRRRSELLELLDRLNPSIEELTTAVQQEVNKRPEALRLMTHPGVGPITALAYVLIIGTPERFTRGKQIGTYVGMIPIDCATCWWRLRRRPHATTRTGGVGTYAWRSAGTGA

SEQ ID NO: 232839 - protein, 406 aa, unidentified
MEVVYERCCGLDVHKKSITAHLITPEGRETRTFGTMTDDLLELGDWLIAAGCTHVAMESTGVYWKPIYNLLEETGIEPMVVNAQHIKAVPGRKTDVKDAEWIAQLLRHGLLRGSYIPNRFQRELRELVRYRKSLVQERAREANRIQKVLEGANIKLGSVASDVLGKSGRAMLEAIVAGQTDPKALASLAKGQLKSKTDELQKALKGLLGSHQKTLLSLQLEHIAFLDRQIERASEEIKERMRPFEESVQALDAIPGLGVRAAEQILAELGTDMSRFPTAAHCASWAGICPGNNESAGKRKTGRTRKGNPALRSALVEAAHSAVRTRGTYLSVQYHRIAARRGGKRAIVAVAHTILVIIYHMLKNGTAYRDLGANHFDKVNEQAVVKRTVKRLEKLGYKVTLELDVA

SEQ ID NO: 232840 - protein, 412 aa, unidentified
MEVVYPCCCGLDVHKKSITACVLWAEAKGKSRKEKRRFGTFTHDLLQLADWLGESGVTHVAMESTGVYWKPVWNILAEQFKVLLVNAQHIKAVPGRKTDQKDSEWIADLLQHGLLRGSFVPPQPTRELRDLTRYRVSLAQEINRIANRIQKVLEDANIKLASVATDALGASGRAILEAMLAGEQDAARLAELSKGLLRNKIPELKLALEGRMTEHHRFLLRQLFDHLRFTESKLSQIEQEIDRRMRPFQDEVIRLCTIPGVDQVTAWGILSEIGLDMNQFPSAEHLSSWASLCPGNFESAGKRLSGKMRKGNVSLRRCLSQAAWAISMTKNNYLSALYRRIAARRGAKRAIMAVAHALLVIAYHMLKRKEDYRELGADHFDRIDMNRTRRSLVRRLERLGHKVTLEPLAQTA

SEQ ID NO: 232841 - protein, 354 aa, unidentified
MNKVKELNFQGETIFCGLDVHKTNWKVNIRTRDMELTSFSQDPDPELLDRYLKKNFPQADVALAYEAGFSGFEAQRSLKKSGLKCIVVNAADVPATDKERKRKDDRRDARKLSRELAEGNLEGIYIPDKEMEHARSLVRQRHRVVQDQTRCKNRIKHLLLFSGIQTKSIEERWSKKYIKQLQEIVCKADPLNTALNLAIEQYMQLRSILKQATLAVRTLAQQPSFVPVQKWLQSISGIGLINGMVFQTEIQDIYRFKTLDKLCDYAGFVPDIRSTNDKQRVTGITKRCNEFLREAIIESSWMMIRKDPAMLMKYNQYRKRMSQNKVIIRIGKHLLSRIRYVWSKQKEYERGIVQ

SEQ ID NO: 232842 - protein, 347 aa, unidentified
MSICMIGLDTAKTVFQIHGVDEAGKAEIRRKLRRNDLIAFFEKQATCTVVMEACGAAHHWTRMLTGLGHSVKLIAPEAVKPFVKKGKKNDAADAAAICEAASRPDVKFVPAKSVEQQGILALHAARSLLVKQQTMLANAMRGLATEFGLTVPKGIHKLDELMAVVDADEIIPKRAKQAIAGLHDCCNNLSDGVETFETEIVAHARRDETARRLATIPGIGPITASLIAATVGDISLFKTARQFAAWLGLVPRQSSTGGKTRLGRITKTGNREIRKLLVLGATSMVYRADGWNSAVGAWLRSVLERRPVRLVTVALANKMARIAWAVMTRKEVYRPKGGVAAVAQAAA

SEQ ID NO: 232843 - protein, 325 aa, unidentified
MGTSPHQQGWDTKMEKLSYGGIDVSKDRLDVVVLPEERFFSVSNDAAGWAELVARIRPLAVSAIGIEPSGGYERGIIRALLAAGLSVRRINPNKLRQFARARGVLAKNDRLDARLIAEYVAIMPTRVVQRDEAVEKLAEVVTMRRQLRDEHVTVENQAAHIEDAMLRRLNKRRLTRLEADTRLLDKRLAEMVATNAALAQRYELLTSMPGVGPVLAFTLIALLPELGQMSRKQIAALVGLAPYDFDSGKLRGHRSIYGGRMPVRNVLYMAALSGCRYNPALKAFHKRLAAADKKSKVVIVAVMRKMITTLNAMLRDNVEWQPKSA

SEQ ID NO: 232844 - protein, 391 aa, unidentified
MFYIGVDIAKKNHEASIIDSDGNLVSESFSFSNSIRGLEKFQKFISSFSIDSNNCIIGMEATGHYWLSLYSFLIDLGFSCVVINPIQSDAFRKMYIRQTKNDSVDSFVIAQILRFGEFSVSHFSDEDTFALRNLSRFRFALVDEASDWKRKLVCILDQVFPEYSSLFSNIYGVASKELLSKYPLPEDMISIPADELAKMLSKCSKGRFGIDKAKEIQEKASNSFGVKFALKSFSFQIKQIIAQISFLEDQIADIEDEISSMINSLCPVITSITGIGDVLGAAIFSEIGDISRFERANQLVAYAGLDVAVKQSGNFNATDTKISKRGSPYLRRAIWLAASVAAFKDPALSVYYQKLRQRGKAHGTAIGAVARKLTNIIFAVLRDNKTYIPNI

SEQ ID NO: 232845 - protein, 400 aa, unidentified
MLFVGIDVSKDNSTAQGLDREGRKLFYLEFPMKGEGFSRLLSLVNTHGPDVSRVTVGMESTGCYHLNLFAFLSSKGITPVVINPLLIANFARLSLRKTKTDKKDALTIAQFLLAHGEGLSKIGYSQNGRDLKDLARERESLAVMIAGLKNDTQRFLQLTFPELEHHCKLFTETMLHFLSKFPSARVIRTAKPREISRTLIHGEGKRKRVFISSEEIIKLAQTSVASDSVAKELILSEKIETLLFLEEKKKKITEALVEACQSMRVEDLEIITSIDGINQITGSTFLAELGDIRTFSSHRHVIAFAGLDPSIHQSGQYEGISKISKRGNRHLRRVIFLMTLCVVRSRNVFREYFLRRKREGLPPKKAILATAHKLLRAIFAMLSNKSYFRKEVAELHFAEV

SEQ ID NO: 232846 - protein, 317 aa, unidentified
MNNYKNQTEINVGVDVGKSQLDIVLHPLDLHLSIPNDPEHIQKVIQVLKQHPVKRIVTEATGRYEHAFVFACDKANLPVVIVNPIKVRRFAQAIGVMAKTDKIDASVIAQFSAVIKPEIKQLPDEQSQIIKDLLIRRTQLLEMATMEKNRLQIMPKELHKSINTLLKSLNQQIDKLTEKLDKLVAQVKEWRVKSEILTSVPGVGKVLSYTLLSEMPELGKLNRKEIAALVGVAPMNRESGSYKGKRRIRGGRHRIRTVMFMAMMSAIQCNPVFKRYYQRLKAAGKMPKVALIACMRKLIVILNTMLKSEELWCAKNG

SEQ ID NO: 232847 - protein, 390 aa, unidentified
MIAPRAVGCNDGMDSSRFFRGMIAVNSWVAPRHQEEAKMDATTVAVDLAKDVFEVAVANRAGRITERKRLTRRQFERFIDTLPPGTEVIMEGCGTAHFWGRRCRARGLDVRLLPVQYVRPYVRRNKTDRTDTEALLEANRCSGIDPIPVKTVDQQALQALHRVRTQWQATRTARINAMRGVLREHGLPIGVGAQTALTRIPALLEDADVELPGLVRHVVSLLLEEVRWLETRITTIDRELAAIARDHPIAQRLQQIPGVGVLTATALVGAVGHIHAFRRARHFASWLGLTPRESSTGGRRYLGGISKRGDVYLRCLLSHGARAVLLTAQRTVQSAPHRATPFQQWAVTLAARRGHNKAAIAVANKLARQVWAVWHHGVDFTALPRGSAAA

SEQ ID NO: 232848 - protein, 353 aa, unidentified
MHTHQNSSHPVATIGIDIGKNTFHLVGLDKRGAIALRTKVSRSQLERRLANVPCCLVGMEAGCGSHHIARQIRALGHDVRLIPAQYVKAFLKGHKNDYRDAEAIAEAVQRPTMNFVAIKTPEQSDLLSLHRVRSRLVGQRTAVMNQIRGFLIERGLTVRQGPAPLRKALPEILSSPPEVLSPRLVRLISDLSQDWRRLDERIETVSAEIETLAENDGSCQRLMTVPGIGPIISSAVVAAIGNGSGFRQGRDFGAWLGLVPKQESTGDRTKLGKISKRGNKYLRTLFVQAAHVVLVRRPAAALRGLWPWIERAAKRLAHRNLLAIALANKLARIAWAVLARGRDYEPRITTNAA

SEQ ID NO: 232849 - protein, 313 aa, unidentified
MELFVGIDVSKAVLDIGVVPSGDAFSVPNTVDGVQVLVTRLKELAPRLVVLEATGGLERRAIAALAGASLPVVAVNPRQVRDFAKATGQLAKTDAIDAAVLALFAERIRPEVRPLRDEQAQELEALVIRRRQVVDMITAEKNRLAAAPPSKRVRTAIGKTIKWLQKQLEETDNDLDGAVRGSPAWREKDNLLQSVKGVGKVLSRTLLSSVPELGTLGKKQIAALVGVAPLNQDSGKTRGRRVIWGGRAQVRSVLYMAALTAARCNPTIRAFHDRLIAAGKLRKVALVACMRKLLIILNTMVRNGTHWKQEIAS

SEQ ID NO: 232850 - protein, 410 aa, unidentified
MESVVERPAALDVHKEQVTACVRAPAGRGRREQHLAEFKTTVQGLLALRDWLKAHAVTQVAMEASGVYWKPPWAILEDEFECLLVNARHVKQVPGRKTDVSDAAWLCQLLEAGLLRASFVPPKPIRTLRNLTRYRKAQIGERQREANRLHKILEDTGIKLDCVATDILGASGRAMLDALVAGTTDPAVLAELAKGKLRAKLPALREALEGRFDAEHGIVVGAILAHIDFLDEQITLLSDAIEEQIRPFAPAVELLCTIPGVQRRTAQVVIAEIGADMSVFPTAAHLASWAGLCPGNDEWAGKRRSGRSRKGSRWLGIALTEAAQANTRSRDGYLSAQYRRLKPRRGHKKAIGAVRHSIIVAAWHMLSTGEIYRDAGGDYFTRLDPDKQTRRLLAQLERLGHVVTVQNAAA

SEQ ID NO: 232851 - protein, 317 aa, unidentified
MSSAAKSTSVAARSIIYLGMDVHKESITIAVLPEGAKSPTRLDRLPNDLPKLKKWLERAARDGEIRACYEASGAGYVLHRAMKEWGYECEVIAPSLIPKRPGVQRKHDKRDAADLARFYRAGELTAVRIPSESDERVRDVVRCRETFQKEILKSRHYILKFLARRGFVFREGTNWCSPHLKWLLYLTTENSPLEQHDRLIFREYHALLLYKLERRDELDRQIEQLALLPNIAPMVERLQCFRGISLHTAMVLATEIVDWRRFERPSQLACYLGLVSREDSSGDRTRLGSITKAGNSHCRHVLVQAAWSYRHRPQTGV

SEQ ID NO: 232852 - protein, 420 aa, unidentified
MTKKIIGIDWASNFHVCYDLEEKKSFKIGDDHKSFQKLLDDHPDYVFVIEEANNRIGEYITNVGRELFVLPPYRSKKAREYHEGSGGKNDKIDAKIIALTFNEHPEYCIKITYDDFTVLLGRLITSYDALCITHQQLCNRLNATLKKYFPEFLKEIKKYKNKSSLFLLSKYPTPGHLKRATNKEIRENAKLNGIRIKSSMIKRINKLREAPSVWIKTPYESEMIAFLSKALLNIRIQKDKIISDIKRNINKSKYKIITTMPGIGPVTGAYILRAYLSHHFTNYRQLQSYCGTSPVIDQSGKRSFCKMRRRCDHDIRDKLHNAANAATICCSWAKKYYARKKKEGKRRGHALRALANTMLKIVFSMLKNLKAYDELLFLSRRGKNPSYENYTPESYQFQSSDYSQYPQNISSVVIEFGGLT

SEQ ID NO: 232853 - protein, 418 aa, unidentified
MAIQVMVQRSAGLDIAKASLVACAQVPTETGGGYRMVKARFGTTCQQLAGLAAWLTGLGVTRVGMESTGDYWKPVFYWLEPQLECWLLNARHIKAVPGRKTDATDAEWICDIVAYGLAHPSFVPPPPIRRLRDLTRRRTVLLAERTREKQRCEKTLEDAGVKLSVVATDIFGVSGRDMLAALIAGERDGQKLAALARGRMRRKKTALAEALVGHFTDHHGFCCGQILRNVDHLDALIGELDTRINTEIEPYQHKIDLLRTIPGVDRRTAELIIAETGGDMSCFPSAAHLSSWAGVCPGNNKTGGKSRPGRLTPGDRWLKKALGTAALANARSKDTYLGAQFRRIARRGGDHARKRATAAVGHSILVAVWHMLTTNTTYHDLGADYFLDRTNPDHQVRTMLTRLNKLGFRVTLDPIEAA

SEQ ID NO: 232854 - protein, 346 aa, unidentified
MLYAGLDLSRKRLDFHLLDVEGATVEVGAAAPDADGLRGLSERLAVHGEPVRAAIESMNGARFVHDRLELHGWQVEIADAQKVKGLAPLACKTDRIDAWVLAELSRRELVPAIWLPDPAVRAERERARWRLYLVRHRSSLKQRVHAVLLTHGKPCPVSDLFGVRGRQLLASFALPEPWQGTIEASLRLIDELDHEIGGCERELRRLGADHRYVPLLCTVPGISWVLAYTIAAELGDIDRFPTPRKLAGYTGLCPRVYQSGERDLRGPLAKQGPRYLRWALVEAATHACTHPAYRDRYQHTKARIGKQRGAKVAQVDLARRLTEAIWHMLTRNQPFAPASATDPLAA

SEQ ID NO: 232855 - protein, 456 aa, unidentified
MSPRRKSNPPKTKPSAPLLPTFHPHAAGIDIGARAIYVAVPPGAASRTVRSFPTFTEDLHALRDWLKACGVTTVAMESTGVYWIPLFQILEAAGMEVCLVNARHCKNLPGRKTDVQDCQWLQHLHSVGLLRGSFRPVDQVCAVRAILRHRDGLVRGASRCVGHLHKALTQMNVQLQHVISDLTGVTGLAILEAILAGERDPQTLAALKDRRIKASRDVLAKSLQGDWRAEHLFTLRQTYELWQKHQALITQCDEEIAALLKTFDSRAAPADLPVPAKASHNKAQKNEPLFGVRQECYRVLGVDLTAVPGLAGPTVLVLLGELGPGFAEKFPTAKHFGSWLGLCPDNRITGGKIYSVRTREVKSRVAEALRLAARSLWRAQNYFGDLYRRWKARLGGPKAITAMAHKLARILWHLLKYKEPFNPEVFKKEEQKMQRKKLARLQNLAASLNYQLIPNQ

SEQ ID NO: 232856 - protein, 414 aa, unidentified
MRLFVGIDVSSEQLEACFMNMDGDKLDTLLVNNNLAGAQYLCDRIVSHADKLPASEIHIGLEATSVYSWHPAMYLHEDEALKARKAKVFTINPKLINKFREAYADLDKTDRLDAWIIADRLRFGRLTTTIVMQERYLALQRITRMRFHLVHNLTREKQYFLQNLFYKCNAFRSEVESSVFGNAIMELLSEKYSLDEIASMEVSVLADYLKDKGKNRFPDPENVAACIQKAARASYRLSKVMEDSIDLVLGTSIQSIRSIQAQLKELDKAIEKMLDGLPGAKCLRSIPGIDLVYAAGILSEIGDIERFDDQAAVAKYAGLVWRKHQSGPFEAEDTKRIRSGNRFLRYYLVEAANSVKNRDPEFGEFYRKKYKEVPKHQHKRALVLTARKLVRLVDVLLRNDQLYTPRRKVNNAKD

SEQ ID NO: 232857 - protein, 343 aa, unidentified
MEHFAGLDVSVKETSICIVDDTGRIVREVKAASEPQALLKVLGNPTYRFKRIGLEAGPLSQWLFSGLAEAGLPVVCVETRHMQAVLKAQINKTDRNDARGIAQMMRAGLYRPVHVKTLRSQKLRMLLTHRKLLQSKAIAIENDLRGTLRNFGLKVGMVGKMRFEARIKELVESLPDLAELVEPLLIVRRTLRGQIVILHRRLLAIVRDDEVCQRLMTTPGVGPVVALTYRATVDVPARFRKSKAVGAVFGLTCARYQSGEIDWSGRISRCGDEMMRVMLYEAAQSMMRSKKWSWLKAWAMQIARRRGMKKAIVALARRLAVIMHRIWVDGTEFRWTREHAAAA

SEQ ID NO: 232858 - protein, 320 aa, unidentified
MSVLSVTVGIDVAKAHVDVCVLGVASGVQRFANDADGHSALAAALLPLGAGLVVMEATGGYEAALACALQASGLPVAVLNPRQARDFARSMGRLAKTDAVDARMLAEMAAVLVHREDLARFVRPVADECQQWLAALVTRRRQLLAMLGSERQRLQITPRKLHPSIEAIIAAIKAQLDDLEAQMMDHVREHFSGLDGLLQSTSGIGPVASATLIAQLPELGRLNRREIAALVGVAPMSNDSGNRKGRRRVQGGRFEIRRVLYMATLTAARYNPVIRAFYERLKAAGKLPKVALVACMRKLLTMLNAMVRTGKPWDASLHRA

SEQ ID NO: 232859 - protein, 319 aa, unidentified
MAQNEVIVVGIDVAKDKVDACIRSLSLRQTCPSTAQGHRKLMAWLRKHKVTKAVMEASGGYERAWAKVLREAGIEVRIVDPRRVRSFAQSAGRLAKNDAIDAEMIAWFAETFSEAPSQVHDAAREELQTLVKARLGLIDYRMRLVSQSEHAAPGLVQKAHAHILKSLASEIAKLEAAICAKVRSTPDFAERAEIIESVPGFAQTSSANLVAGMPELGQVSDEIAAALIGVAPYDDDSGKRRGERHIKGGRRWVRNAIYMPCVGAATQNNPVLKAYYQRLLAKGKEPKVAIIACMRKLIVILNTMIARRQKWDPSRYVLS

SEQ ID NO: 232860 - protein, 476 aa, unidentified
MVKSVGIDLAGTGEHKVRCLDERAQLCDGFGFQTTPDGLAKLEERVFSDGSNPVIIFEPTGLAWVLIAVYLRARHPDCCLVRVQSHKVAALRKYLRRSSKSDRIDALTLAKMPFIDSERLEELYLPPAKIYAIQRLARQRKRLESEIATRKKRIGSILSGYLPGLREAFASPWSPQARVFLSTHLNPMATIREGESALNTFLAEAKPRGKRDKVECHRVYLSCRNAAALCESSISAGVVNDDFFAYLQEEIAREIRLMEFAETESEAIAQHIERLYEELHTSDNLRTIPGVGQHTAPIFLAIVGDPSRFRSQSAFANYTGVVPAARQSSNTEAKGLRMTKAGPAIMKWALYQASQIGRRCDPQLAWVYYQQMVHHGKNHKQAMGAVMSHMGARILTVLREDRPYELRDTNGKPISRAEAWKLIQSNYKVPEEIKRERRRKATATMLKPRIKNREMAAHRTNEAATAPQPVSLSAIS

SEQ ID NO: 232861 - protein, 339 aa, unidentified
MKTITIGLDIAKNIFHAVHMTSHGKILKKKKLNRTAVLSYFAQIELSCIVMESCGSSNYWARELVNLGHTVKLIAPQHVVAYRRKNKNDYNDAEAIAEASQRDSMTFVPIKTREQQDAQIVLRIRERLIRQRTQLSNQARGMLLEQGISINRGWSAFRKVLPEVLEDANNNLTAISRELFNDLYEEFKALCERIERVEQRIKSFTETNDVCQQAQTVVGIGPITAIALYAAIGQGKHFQNGRHFAAWCGLVPRQHSTGGNQTMLGITKKGNIQLRTLLVAGARSALSRMDKKEDKLSQWAIKLKATKSFNIACVALANKLARIVWSVIFNDKAYELKGA

SEQ ID NO: 232862 - protein, 317 aa, unidentified
MTYIGIDISKSWFDCFNSTTDTHHQYDNTVQGWNEFAGSLTDEAWAVMEASGPYYLGLAGFLADRKIPVSVLNPLVIRRYSQMRLSRTKTDAKDARLIAEYAAQQPLTRWNPPSSVNQTMRQMISVCQGLIRQRAMLLGQKEAFTNSPATDPLVIDVIDEQIHRITSALSTLEGRLRQLIVTHYQHCFDAVTSIPGIGPKTAVLLICLTDGFSKFDDARKLASYVGICPRIFNSGSSIKGRGSICKLGSSQLRKLLYMCTWTAKKCNPGCKQMYDRMKQAGKPERVIKIALAHKLLRQAYAVGTSGEHFTKEKALAA

SEQ ID NO: 232863 - protein, 362 aa, unidentified
MVQVRIRGLKHQKEKRSMDYFAGLDVSVKETSVCIVDDTGKIIREVKVTSEPEALLAVLKGPADCFKRIGLEAGPLSQWLFSALAEAGLPVICVETRRMQAVLKAQINKTDRNDARGIAQMMRVGLYRPVHVKTLRSQKLRMLLTHRKLLQSKAIAIENDVRATLRNFGLKVGMAGKVKFEMRIKELVQNQPDLGVLVEPLLIVRRVLREQTVILHRRLLAIVRGDDVCQLLMTIPGVGPVVALTYRATVDVPARFRKSKAVGAVFGLTCSKYQSGEIDRTGRISRCGDEMMRTMLYEAAQSMLLRSTKWSWLKAWAMQIARRRGMKKAIVALARRLAVIMHRIWVDGTEFRWTREQAAAAA

SEQ ID NO: 232864 - protein, 332 aa, unidentified
MNQESTFIGIDISKARLDVAIRPTGQQQKVAYTEKGIQGLVSQFADLHPTLVLLEASGGLELRIVTALVTANLPVVVVNPRQVRDFARATGELAKTDVLDAQILAYFAEAVRPTPRALPDTETQALTALVSRRTQVIRMMVAERNRVYASQPPVRQRIQTHIAWLKQELDEMNRVLNEALHKSPIWCEKENLLRTVPGVGPHLAIALLAYLPELGTLNRKSIAALAGVAPFNRDSGTLRGKRAVWGGRSCIRATLYMGALVASRRNPDIATFYQRLLAAGKPKKVALTACMRKLLTILNAMLKHNTSWQCLTPPLLEPVFLTIDNEANLAVA

SEQ ID NO: 232865 - protein, 334 aa, unidentified
MKNIKAIGIDVSKDTLDVCITKGIGKDDICKTYKIDNNARGISELGNKLKRLGVDSSIPIALESTGIYHILACMLLSEKGYKVGVINPLNTKYFTSANIRKQKTDKVDAKALADMAILKPEILKTFIPDQAQVMLKKKISTLNKMLKGYQSIKASIKTYQDLERQLQVKESVAIYNLKKSSEAMKKMINEVEQEILEEGRKCTGFEKVSSIKGISDKTTAKILVQIEGKKFDKKESLVAFAGMDISVKESGTSVRGKGRITKRGNPNLRNSLYQAAWGLMMHNEEFKRIYEYHRKNGKHYYTCLTILARKLLHIIYGMLKTNTGYKPELVHIPN

SEQ ID NO: 232866 - protein, 309 aa, unidentified
MLTAEADKCKTKVVVNTAAGVQALLAWCAKHGAQPAQLHAILEPTGLYHEQAATALPQVRVSLVNPAQARDFAKALALRSKNDALDSYVLARYGQTLSPALWHPAPLHARQLRALLTRREALSKDLLRELNRKEKSQFSPSAPLVDGSIDKAIAFLREQIKQIERAIDQHIDNHPDLKQDCELLNSIPAIGPQAGNAILAVMHNRHIDSAQSLAAYLGVVPVQRQSGSSLNSCARLSKAGPSQVRATLYMAALVGTRHNPHIRALYQRLLKAGKSKKAALGAAMRKLVHLCFGVLKNRIPYQLLYAIDA

SEQ ID NO: 232867 - protein, 348 aa, unidentified
MSKHSVAAGEVSGLLCRFAELRRKAAARTGRDFPIIVIQEAGLDGFWLHRVLQSEGIESHVVDAASILTSRRRRRAKTDRIDGETLVRTLMAYKRGEPRVCSMARAPTPQEEDRRRVCRERRTLVGERVRHVNRIKGLICAQGVFGYEPLRKGRRERLEDLRTGDGRPLPVRLKAQIIRELGRLEVLLEQLKTVEAERDTLLKPASDEVVSPAAMLARLKGIGPETAAVLWTEGLFRQFDNRRQVAAYAGLAPTPWQSGSIDHEQGVSKAGNPRLRTTMVELAWLWLQNQPTSALSLWFHERVQRLGGRMRKTIIVAVARKLLIALWRYTTAGVVIEGAVMKTASATI

SEQ ID NO: 232868 - protein, 337 aa, unidentified
MNTASKSVVGIDVSKSKLDVTLLADGKQKNKVVLNTKQGYKELAKWVERQGVQIADVHACMESTGVYSEPVAFGLLDLGFKVSIVNPASVKGFGQSLNVRNKNDAVDACVIARFCVAIDPALWVPPTPQLRQLRAWHERLGALKEMRQQEFNRIEALEFAEHSDVAKNVKTHMAWLDEQIAKVKKDIDDLIDDDPDLKRDADLIESIPGIARTTAAKVLARVGNLRRFGSAKELAAYIGVTPRQRQSGTSVRGRTTMSRMGSGELRTALYMPALTAIKRNALLADFAVRLRSTGMAHMAVIGAVMRKLVHQMYGVIRTGKPFDPNYLAKRLAIQDGI

SEQ ID NO: 232869 - protein, 431 aa, unidentified
MPHHLQVGVDFSQKRADFCLLFPDGRPLELHAAFANALPGYTSAKQLLLNALDTYAFDGVDLSGEATGYYWLPFFLQLAADPDLAPHNLNLFLLNPRWVKWFKKSLPEDHKSDQQDPFYIAERTRTWHPPNTWSPPDYLPLRFYTRLRFHLVQNLAREKCYFSAFLFLKASSYRYLKPFSDIFGATSSFVLTELPALDDLAALPVDDLAAQLYELSGHHLKDPTHNACALQRVARESFSLPENLTLPVQRILDLTLAHIRFLETQIAQVEAWIAAELTAYPTIAQLATIPGIGPVFSAGLGAEIGTVTHFLQAAKWDRHRKRFRPRNLRDAEDAIAKTAGLWWPRSDSGDFEAQDRRMAKTGNRYLRYYFIQAANLIRQYTPEYATFYARKYREAAKHHHKRALVLTARKSVGLVVGLLHRNEPYRSHQEP

SEQ ID NO: 232870 - protein, 342 aa, unidentified
MQIATIGLDIAKNVFQVHGIDAAETVVVRKQLRRGQVIAFFKDLAPCLVGMEACATAHYWARELTKLGHQVRLMPAKDVKAYVKRNKNDAADAAAICEAVRRPTMRFVPIKSAKQQARLMQHRARDLLMRQRTQLINALRAHLAELGIAAAQGREGVKELLAIVTQDGDTRFPVDAHASLMVLATQLQAVQTMIGSIEKRIVAQHRSSEESKRLQTIPGIGVLGASTIAAVVPDPKVFRSGRDFAAWIGIVPREDSTGGKQKLGPISKQGDRYLRRILVVGACSVLRRARQQPEKYPWLTQLLARRPFKVVAVALANKMARIAWALLARGGTYRAPALAAAA

SEQ ID NO: 232871 - protein, 341 aa, unidentified
MQITTIGLDIAKNVFQVHGIDATEKVVVRKQLRRGQLIKFFEALAPCLIGMEACATAHYWARELTKLGHDVRLMPAKDVKAYVKRNKNDAADAEAICEAVRRPTMRFVMVKSAEQQGRLMQHRVRDLLMRQRTQLINALRAHLAELGIAAAQGREGIKELLAIVAQDGGSRLPVDAHASLIVLAAQLQAVQTMIGSIEKRVVGQHRSNEESKRLETIPGIGVIGATAIAATVPDPKVFRSGRDFAAWIGLVPREDSTGGKQKLGPISKQGDRYLRRILVVGACAVLKQARQQPGKYPWLTQLLARRPFKVVAVALANKMARVAWALLAKGGTYRAPRLKAA

SEQ ID NO: 232872 - protein, 336 aa, unidentified
MNIKRIGLDLAKQVFQLHAVDHHERVVLRKTLHRSQMLSFFIRLEPCLIGIEACGSSHYWARELTRLGHRVLIIPPQFVKPYLKGNKNDANDAEAICEAVSRPGMRYVAIKSEAQQSMQAEHRVRARLLRDRTALSNEIRGMLAEFGLALPVGLAALRRALPEILCQQEQWDDRFIRLLCELAEELQVLDARLERYDRRLRQQGQEDDRIRRLQTIGGIGPVTASALVAAVGDAGQFKSGREMAAWLGLVPRQHSSGGKTRLGHISKRGDSYLRTLLIHGARAVLNASGHKEDRRSKWLQSVAERRNRNVATVALANKNVRIAWAVLSRGEEYRVV

SEQ ID NO: 232873 - protein, 319 aa, unidentified
MMAQNDLVVVGIDVAKDKVDAHIRSLSCGRTLPSTAEGRRQLTSWLRRHKVGKAVMEASGGYERDWARALRAADIEVRVVDPKRVRSFARSAGRLAKNDAIDAEMIAWFAETFSEAPGQVCDAAREKLVQMVNARQGLLDLQTRLQNRDEHAEVGAVQKMHERLLKKIAHEIARLEAAIAALIKATPHFAELAGIIESVPGLAATTSAGLIAMMPELGQVNDKIIAALLGGAPYDDDSGKRRGERHIKGGRRRIRNVFYMACLGASTQHNPVLKAFYRRLIAKGKEPKVALVACMRKLIVILNIMIERRQKWDASLHNV

SEQ ID NO: 232874 - protein, 412 aa, unidentified
MKDLLEISCGLDVHKEKIVTCILTGPLGKPTRSEIRKFTTLLPDMIALRNWIVSKNCHHVAMESTGIYWMPIYEILEDAFSGDITLLVVNARHMKNVPGKKTDMRASEWISTLLRAGLLNGSFIAEKRIREFRDLNRYRKSVIRDITSQKNRIEKFLQSSGFRLSSFISDIFGASGRNIILHLIEHGQIDKTALDSCLKTKTRNRIDEILMSVNGTLSEHQKAFLRILMTHYDSLKKHLAEIETSLEEDMPPFALQVEQLNSIYGISTTASCAIIAEIGIDMKPFKTAEHICSWAGLCPGNNESAGKRKSTSVTKGNPYIKSMLCEIAWVIAGKRNTYLSAWYWRIKQKKGAKKAIVALARKLLVIIYTMLKQGTLFDESCFETRRKHCEQKQLSRYIRELEKHGYHVEAQS

SEQ ID NO: 232875 - protein, 351 aa, unidentified
MNICHYIGFDVHKKSISYCVKAADGTILEEGKLRATRHALREWAQKRTQAWHGGMEATLFSGWIYDALQPFAAKLEMGNPSRMKAIGAAKKKSDKLDARTIADLVRCNLLPVCYVAPVEMRDLRRMLRYRNLVVGQAVQMKNRVSGMLMEVGAEYNKRRLHGKQYFSELLDQLEEVPESVKELLVTSRGALEAFEATQRQLLNRLQKEPLLVKRVKLLKSIKGVGEVTALTWALEVCDPRRFSSIGNAVSYCGLTSALKSSADKAKRGPLSKQRNAHLQTVLIEAAKLAPRWNKQLAAVYEQEVKHGDRNRATLEVARKLVAYLLAVDKAGKPFEIRNPAGKVREEVGQVA

SEQ ID NO: 232876 - protein, 400 aa, unidentified
MLYLAIDQHRKQLTVNLRDEGGDVILKRQVSTQWQRVREFLEDVRNRSIADGGFMAIVEVCGFNDWFLKLLAEYGCREIVLVQPEKRSKVKTDRRDAAGLGELLWTNRQRIQEGKKVQNVRRIVPPSQRDAEDRQLTAARQRLGRQRIRTINRIQHLLLKHNLQQECPTKKLQTKSARKWLTTLVLGMMDRLELDHLLSQWELYDKQLAELDTKIGERQAQSQAAMTIATIPGAAAYGSLALASRIGSIERFPSARSLAHYWGLTPGCRNSGDATRRLGSITKEGSAMARFVLGQIVVHILRRDARMKEWYQRIKKRRGAKIARVAVMRRLATIIWHMLKHQQPYRLSGKPGEGNDPSCGCVPPDRNAFFKARQGRSKDVEKSCRGSEATATGVLDAPLT

SEQ ID NO: 232877 - protein, 376 aa, unidentified
MSKLRFVGLDVHAETIVPAVAEESLTGEVRSLGTIPNRVESIRKLMGKLGPASSLRVCYEAGPTGYVLYWQLTQMGIACEVIAPSLIPTKAGDRVKTDRRDAEKLARNYRAGELTAVWVPDAGHEALRDLVRAREAAKKDQLKARHRLGKFLLRHGRRPQGLKAWTKQYLDWIKSHVKFEQKALEATLADYLEEVDHVAGRLMKLEKAIDEAVAAAPEEIRAVIEALQALRGVAQVTAATIVSEIGSFSRFQSPRQLMGYSGLVASEDSSGGRVRRGSITKTGNGHLRRVLVEAAWAYQHRPNVSGYLLRRQKNLTISDEAKKIAWKAQQRLHKRYQAFSLRGKNKNQIVTALGRELLGFLWAIAVKTEQNYTRTA

SEQ ID NO: 232878 - protein, 333 aa, unidentified
MKIFVGIDIAKLNHFAAAISSDGEILLEPFKFTNDADGFQLLVSKLESFDKNSIIIGLESTAHYGDNLVRYLVAEFYQVCVLNPIKTCQMRKNNVRKTKTDKVDTFVIAKTLMMQDDLRFITFFDLDMMDLKALGRFRQKTIKQRTRLKIQLTTYVDQVFPEIQYFFKSGLHQNAVYALLKEAPSPKEIASMHMTHLANLLKVNSHGHFTKEQAKELRVLAQKSVGANDSAISIQITQTIQQIELLDSQLQKIEAEITDIMKFNDSVIMTIPGIGYINGGMILGEIGDIHRFSNPNKLLAFAGLDPSVYQSGNFQAKTTRMSKRGSRVYDMPL

SEQ ID NO: 232879 - protein, 343 aa, unidentified
MQVIIGVDPHKASHTAVAIGDNEGELGAVKVRATRRQVAQLLSWAAPFEKRTWAIESAGGLGYLLSQQLVAAGETVVDVPATLASRVRVLGTGRSDKNDPNDARSVAIAALRAPALRSVEAADHAEVLRLLAKRNLDIGSHRTRVVCRLHAALAELAPGGISKELNASDAVALLARVQPASPVEQIRYDLAVELLDDVRRLDAQLKASHKRIRDAVRASGTSVTDLFGVGPTIACSLIGYTGDVTRFRNRDQFAAYNGTAPIEHSSAGRTVHRLSRRGNRRLNHAIHMAAICQIRQTNSEGRAYFERRVAEGKTKKEALRVLKRHVSNAVYRQLLADAQRTRS

SEQ ID NO: 232880 - protein, 333 aa, unidentified
MKDITAVGIDTAKTTFYVVGFSSTGNVMGKKKFTRPSLKKWLVKQEPLKIYMEACGGSHEWGRYLTKMGHAVKLIAPHFVSPFRQGDKNDWNDALAIGIAGAQPTMRYVAIKSVDQQTIQSLHRVRTRLQRDRVAVANQLRGLLAEFDVVLPRSIATLRKRVPEVLDSGQFVGVQAELFQGLLEELRQRDEQVKQYTKRIEQLAMADPVAVKLMALNGVGVLTASALSAEVADARVFRNGRQLSAYLGLVPRQFSTGGKNRLGSITKRGDRYLRQLLVHGARSVIRHLGDKQDRVSCWIRQLIARRGMNKAVVALANKQARWAWAVMAQAQAV

SEQ ID NO: 232881 - protein, 403 aa, unidentified
MFNLIYKDMKTVCGLDVHKDTIFLCILKGNDQVILREFSTLTSDIKLMLNVMQQEQVSEVAMESTGVYWIPVWRILQGRVSLKLVNPYYIKQLPGRKTDLKDAQWIATVLQKGLVRGSYIPGKHIQELRQYERRYVHLCEQLTRIEQEIDRQLSRCNIRITSYASTVGSRSVMKVVKAIIDGESTADQLIRHVHGRIVNKNKQQVFSSLEGVISGADKFIFSQCYQEHELISKQQQECTEQMQQVCESYFKDELILLCTIPGIQKLSAMTIIAELGVDLRTFPTSALLVGWAGLRPRNDESAKKIKSRKITNGNKYLKRILVQCAWAITRTKKCWLSGKYNELARRKSHKKALIAIARKLLVIIWNILTKHEVYKEYIPYISMEKKQKRIAFLQNQLRELQII

SEQ ID NO: 232882 - protein, 379 aa, unidentified
MGWLPPSPDGIAMCQDVVLKEPQNGEDGDMNDTMIGVDLAKSVFQLHGASMTGQLKYRKKLTRPQFRKFMADQPPSVVVMEACGSAHYWTREMVRFGHDVKLIAPQYVLPFVKRQKNDAADAEAIVIAAQRPEMRFVEPKSQEQQARAVLFRARERLVHQRTELVNALRAVLYEFGHAVPKGIGNIKQFDVILEDPNCDLPALVRDECGDLVKQIAEQTIRIDAKTKTAKEMATTANTARRLQTMPGVGPLTALAIEAFAPAMQSFKRGRDFAAWLGLVPRQHSSGGKERLGRVSKAGQTDIRRLLIIGAMSRLNWMGRKTITEGSWLARMLARKPRMLVAIALANKMARGIWAMLTKNEDYRDPVPAVAARSTCAATT

SEQ ID NO: 232883 - protein, 364 aa, unidentified
MKKPITFVGLDVHSTSIALAVLPPGTDTPVEREVPHDPKLIRRTFTRLKADASLRCCYEAGPCGFELYRLLTSMGIPCEVVAPALVPQKPGERIKTDRRDARKLVRLYRAGELTPIRVPTPDEEAVRDLVRAREDVRKDLTAARHRLAKFLLRHGRLYSQGKKWTERFWRWLRPQTFEHPAARVTCDHYVLQVLHLEERRAALEREIAAVAATAPYQPAVARLACLRGISTLSAMTLLAEIQDFRRFEHPRRLMAFLGLVPREHSSGARERRGGITKTGNSHARRILVEAAWAYRHRPALGPRTRRLLGDQPPEVVVQVRKAQQRLHKRYARLVGRGKRAQVAVTAVARELCGFVWALMTHAAA

SEQ ID NO: 232884 - protein, 296 aa, unidentified
MVSPAAFSFEGCAGLAGTEPQEWGKDQLQNIMFIGLDVHKATISVALAQGERGGEVRHWGTIPNRADHIRKLSDKLGGDGRQLHFCYEAGPCGYGLHRQLTELGHDCVVIAPSLIPVRAGDRVKTDRRDALMLAKLHRAGELTAVWVPDTAHEAMRGIASIVAVTVVAEVGDFNRFDNPRQLMAYLGLTPSEHSSGASVRRGGITKAGSSLARRALVEGAWSYRMQARVSRKLLDRIEGLPQAVRDIAWKGQLRMCQRYRHLMAAGKPKVVATTAIAREMAGFIWAIARTVTPAST

SEQ ID NO: 232885 - protein, 386 aa, unidentified
MPEHPITEVEAAVRHQATTLFVSLELSSSKWLVTASAPGSEKLSKHIVVGGDGKALLQLLHRLQTLATKLTGTPVSIAVIQEAGLDGFWIHRLLVENRIESHIVDPTSIAVNRRHRRAKTDRIDGEMLVRTQMAWARGERRVCSMVRPPAPEEEDRRRLTRERTILLKERIQHTNRIRGLLFGQGINNYDPVRRDRRSRLTQLRTGDGRPLPDRLKAEILREIDRLELTLVQLSTVERERDALVAEATESDSGIAPAALLQLRGIGPELASLLWLEGLFRHFGNRRQVAAYAGLAPSPWQSGGTDREQGITKAGNPRVRRAMIELAWLWLRHQPGSDLSRWFVARVGDGRGRIRRIAIVALARKLLVALWRYVTQGVVPQGAVFKA

SEQ ID NO: 232886 - protein, 426 aa, unidentified
MNRITDFAATIGLDWADQKHDLWICPADGAKAEHRPLEQTPEALHEWVAKLRERFGNHPVALGIETSRGPVISALLAYDFIVLFPVNPKALKDYRAAFAVSGAKDDRTDAQLLEELIRLHRDKFHPLAPDTELTRRLAGLVQNRRHLVDERTRLVNQLHSTLKTYYPLAETLLAKQMNTPLAAAFLARWPDLATLQKATLPTFRAFFYKHHSRSAQKMEQRWTALQAAKALTTDPAIITPARLLVVALASVLKPLHQAIARLDQAIEQAMAQHPDAPIFQSFPGAGPALAPRLLVAFGTHRDRFQSAAEVAQFYGLAPVVSQSGNTKTVHMRHRCPKFGRQTFHENANGAAKEDSWTRCYYEQQKDRHEDKHHQACRALAFKLIRIYFACWKHRQTYDPNRYLHALQKHGSPLHKKLPTPTHSAGE

SEQ ID NO: 232887 - protein, 349 aa, unidentified
MQHYVGLDVSVKETSVCITDKAGKLILEVKVATNPAAILAVLTEETLAIERIGLEAGPLSQWLYSALAEAGLPVICVETRHMKAALSAQINKSDRNDARGIAHMMRVGLYRPVHVKTLASQKRRMLLTSRQLLQAKALDIENDLRGTLRNFGLKVGMVGTVKFEARIRELVADHPDLATIVEPLLIARRVLREQLGVLHRQLLEIVRHDEVCRRLMTTPGVGPVVALTFRATVDVPSRFTSSKAVGAAFGLTPRRQQSGEIDRMGGISKCGDALMRETLFEAALVLMTHSRKWSWLKAWGMKIARHRGMKRAIVAVARRLAVIMHRMWVDGTEFRWSRKEASGGVTVSV

SEQ ID NO: 232888 - protein, 379 aa, unidentified
MRRVCGLDVHKDSIYMCILYENGSKIESVFGVLTPELDKLRDLLVSHHVCEVALESTSIYWIPIWNILSVDFSLKLVNPYFIKQLPGRKSDVKDAEWIAIVLQKGLIRGSYVPDRMIQCLRQYERRNHELSKNIVHAEQRMDMILQRCNIRISNYVSCISCKGYQKVVNAIISGESNPKVLVTLIHKRTLTKHGRQVVEDSLNGFVSDTDRDILRQYRDERMQMEQHKSENKAKMQAICEAHYCEELELLQTLPGIKEESAANIIAEIGVDMKMFLTASAIVGWAGLKPRNDQSAGKIKSRKITHGNKYLRKILVEAAWSAARTEDSRFMKMYQRLLARGKSKQKALIAVARKLLVLIWNMLSKKEAFNPEYKRRMQAA

SEQ ID NO: 232889 - protein, 424 aa, unidentified
MKVTYQTCCGVDVHKSFLVATIVKTTGGIEPSYQKKRFSTFNNSILEFKQWLLDNHCHDVCMESTGKYWVPVFNLLEDKINVVIANPKWVKAVKGNKDDTKDSKWIGDLFRLGLVKGSYIPCKKVRILREYTRYRYKLVSCRSSEKNRYQNALTVCNVALDSIVSDIFGKSSTSIIDYLLEQSGTSINHEEIASKLLRSLKSKEDAVIESVEGYQMTDAQKYRMRLVRAHMDYITAEINDVDKMIENMISSNPDFENAVQFLCTIPGVKRDSAITIISETGTDMSQFSSSKRLCCWAGLTPGSNESAGKKKSVRITRAGVYLKPALVQCAHAAVKSDKSPYYKKKYESLVKRRGKKRAIIAIARMILTAIYQMLSTGEQWNPSDLYKIDMPVALVEKQKAKAIKQAKKLLQQEGLLPPDEPLAS

SEQ ID NO: 232890 - protein, 330 aa, unidentified
MEKHKHIFGVDVSKKTVDITYAKGEQMLYRQFANDPTGMEELMQWLNELGLDFAGTLFCMEATGLYCFPLTQFLAGNNIDIWIEHAAQIKRATALSRGKNDKVDSMRIALYATKNLDRLRIWKPVSTTIEKVKHLASLRERLVETKKRLATPVKEFEAVGNLAMAKLLSKSIKASLCAIDKDLKNLENKIIDIVNGDENLRQLYKLVTSVVGIGFVTATNLIIYTNGFTILKETRKLACYCGVAPFEYTSGSSVRGKTKVHYMANKKLKCNLHMASLSAVKLDADLKAYYERKVAEGKNKMSVLNAVKNKLLARVVAVVNKQEEYVKKLA

SEQ ID NO: 232891 - protein, 421 aa, unidentified
MKFKAQEKQNQLIENISSLHLVVGVDIAQESHVARAVSFRGIALGSPLEFGSYDEGFQLFGRWIQDLLKSYKLSKIIVGMEPTGHYWLSLARWLSSRGIEAVLVNPHLVKKNKENRDNTPSKSDRKDALVIADMVKNGYYSPVRFNPEAYEELRILMANRDTVTKRLNSAVNQIHRWVDIVFPELRHVFKILTCTSAIATLRLFPLPKEISRLTTEQVIAGWKQYVKRHAGLQRAEQLITFAKRSVGATKALHAYKIHLDQLLEEYDLAQRQLEQIAHEAHLVLERIPYAQKLLTIRGVNVTSLAGVLVEAGDLSGYAHGNALLRHAGLNLAEASSGKWRGKMVLSKRGRPRLRRFIYLMTMCMVMTNPDVRALHHYNVDVKKLKKMKSIMKLCGKVARMLVGLAKSSEAYSSAKVFPQSA

SEQ ID NO: 232892 - protein, 343 aa, unidentified
MQIRSVGIDLGKTTFHVVALSAAGKVLLRKKFTQKQLITFTANLQTSLIGMEACSGAHFLGRVLRQQGHNVKLIPAQFVKPFVKSNKNDFLDAEAIAEAVDRQNMRFVPIKTEDQLDLQAMHRVRDRLIARRTSVINQLRAFLLERGMTFAKTPARLKDAMPEILEDADANLTPRMRNLIGLLWSEWKDLEQQIAAMNAEVGQIASSDPACQRLRQIPGIGPLVATAIVAAIGNGAAFQKGREFASWIGLVPRQHSTGGKARLFGISKRGNSYLRKILVHGARSAVLRVKRERSPFGGWLDALEQRAPINVVITAAANKLARIAWAVLSSGQDYRTATSMPSV

SEQ ID NO: 232893 - protein, 387 aa, unidentified
MPSAISPPKAVLGIDVGKSSHWACLVTREGEVALNRRVRNSEGDLDGLFSQVACDTIVVVDQCRNIGLLAISRARLAGLGVAYLPGLAAHQAARLFAGDAKTDERDALAIAKTALGIPDALLPVPEPDEALEAARSLAAQRSHMVTCATRDKNRLRSILLESCPAFEALADLGDRHWLNMLEKLGGPWGCIDAGKPAFGAVTKGANRARMDAAWNAAMASTRPSKRRVDAENPQVRMLARRIREALEEADRIDREITALLAGDGTYECLVTIPGIGPRTASELVIGINIEDFPDHDHLASYCGIAPRNRRSGTSISSVSASRQGNRRLKNLLIFSCNSLVRSENRFGEYYRACRGRGMRHGEALKAVARKRLKVIYAIMRDKVPYSA

SEQ ID NO: 232894 - protein, 312 aa, unidentified
MDAMVVGIDVSKDWLDVALRPTGESFVFKRTPAGIEDLVERLKDLSPALVAIEATGGFEAVVAAALAGAGLPVVVVNPAQVRAFAVALGKRAKTDPIDAAVIAHFGEATKPQLRQLPDEMTRLLADLIARRRQIVEMLAAEGQRARRISEHRLTRSIARLRKALESELAELERLIGDHMRGSTVLVEKEKLLASVPGVGKTIARTLIAELPELGSLDRRQIAALVGLAPWTRQSGRWRGKSFIGGGRKTVRSSLFVGAMVAARYNPQLKQFRDKLVAAGKPKLLALVAVARKLITILNAILRDRRPWQPNPA

SEQ ID NO: 232895 - protein, 411 aa, unidentified
MHYKLKHIYVGVDLHKDHHTAVIIDCWHSKLGEIKFENKPSEFPTLIKEVKKYTKKGITPIFGLEDVGGYGRSLAVYLLENNYLVKEVNSALSYAERKSYPTTQKSDSWDAKCVAEVLLNKLEILPDANPQDIYWTLGQMVTRRNALVKSLSALKNQLHTQLNYNYPSYKKFFCDIDGVTALAFWEKYPAPHHLKGIKAEEFTGFLLEKSRNSCSTKKAETILELTKSDGETEREYQEYRDFLIQSLVRDIQFKKEEISKVEKEISNLMKRLDFKLETMPGINTVTASALVAEIGDINRFSNANKLARFAGIAPVNFSSGGKGKDQKSKQGNRTLHGIFYFLAVQQVQISKGSKIPRNPVFYEYYQGKITEGKTKGQALVCVMRRLVNIIYGMMKNKTSYLAPPLPQKEAV

SEQ ID NO: 232896 - protein, 336 aa, unidentified
MNGSTGRWVGIDVAKSKLDVALLDERGKVKSHVFANDAKGHAALIAWLHQRGGSPELVRVCMEATGCYSEAVAIALVDAGWRVSVVNPARIKGFAQGELLRNKTDQADAALLARFGLALQPEPWVAPPLELRQLRALVDRLQSLKEMHQQEANRLEAAMNQAGMRDSIESHMQWLQESIRQLERQIDDHIDGHPGLREDARLITSIPGVGNTTAAKVMAYLGDVRRFRNAKALAAFIGVTPRLKLSGSSVRGRSMISRSGHAAIRHSLYMPALVALKHNPIIKTFGARLKATGLAPKAVVAASMHKLVHLIYGILKSGTPFNPNFMAARLDIQDGI

SEQ ID NO: 232897 - protein, 391 aa, unidentified
MVCVGIDVAKDKHDCCILDSDGTVRADCFTIPNNMDGFKQLLQTIRDCTKKSDKIKVGLEATGHYSYNILGFLLDNGLPTYVINPLHTNLYRKSLSLRKTKTDRVDARTIATMLLSDVDLKSYTDIAYHNEELKSLTRYRFDKVQERAKLKQSVSRLATILFPELEQLVSSIHGTSIYALLGEYPGAKQISEVHLTKLTNLLTTASKGRYGKEKAIRIREAARTSIGSVMPAKSLELKHTIKLIQELASEINEIEDSIQKIIDELNPPILSIPGMGVNSAAVILAEIGDFSNFSSPDKILAYAGCSPSTYQSGKLTNCYAHMEKRGSRYLRHALYNATKYVCYWNPVFAEYLAKKRAEGKHYNVALSHAMKKLVRLIYALQKSGKAYLAAA

SEQ ID NO: 232898 - protein, 393 aa, unidentified
MSLDHLFEEPTAIRTNLGAIFVSLELSRSTWLITSISPGGGEKMSKHGVSAGNITALLARLSELMQKAFARTGQSFQVIVIQEAGLDGFWIHRVLQSEGVESHVVDPASIATSRRRRRAKTDRIDGEALVRALLAYKRGEPRVCAMVRAPTPEDEDRRRLCRERKTLTNERVQHVNRIKGLLFCQGISGYEPLRRNRRQRLDELKTGDARPLPPHLKAQIARELDRLELLLEQIKAVETERDALISAIKPDGMNADARRSPPAILINLNGIGPEFAAVLWSEGFYRSFANRRQVAAYAGLAPTPWQSGSVAHEQGVSKAGNPRLRTTMLQLAWLWLRHQPQSALARWFHERVTRNGGRLRKSTIVALARKLLVALWKYVTGGVVIDGAVVRAA

SEQ ID NO: 232899 - protein, 379 aa, unidentified
MPDVSSTAPAVVDQWIVFDVHKNSLVAGVLPAQGGTPEVSRIENTERAIRRFFERAGDPGSLTVAYEAGPCGYDLYRLLSGMGIACDVIAPSLVPVRAGDRVKTDRRDAKKLVRLYRAGELSFVSPPSPEQEGLRDLVRCRDDLRCARTAARHRVAKTLLRYGRIYREGSAWTMRHRAWVNRQRLDDPLAQLALDQLRTHLDSLDAQLAAIDGELAQIAAREPWSDPVAWLCSFRGIATHTALGLLAEIGDFRRFSHPRELMSYLGLVPSEYSSGDQQHRGHITKTGNRHARRLLIEAAWHYQHPARLSKRLAARREHVPAPVFARAWQAQVRLHHRHRTLLAGGKRSTVANVAVARELCGFIWAAMTRQPLREEAAAA

SEQ ID NO: 232900 - protein, 323 aa, unidentified
MSIILSLIVVGVDIAKAHFDVARLAEGKYRHKKFDNTPEGFALFAEWLAGFGDEAPHVCMEATGAYSVPLAEYLVGQGFLVSVVNPAKVAAFAKSELSKAKTDKADAKLIARYALAMRPAPWAPPPREIRELQALLRRVEHLLEMERMEKNRLDTADSAVAGSIQAVLATLEQELQATRDKIRQHIDNHPNLRDRQDLLESIPGVAAATSAWLLVVLSEHYGFTDAKQAVAQVGLAPVIRQSGKWAGKTRLSKTGDPMVRKALYMPILSALQFNPAIRAFCQRLKAKGKHGMAINCAAMRKLIHIAFAILKSGRPFDPNFALA

SEQ ID NO: 232901 - protein, 418 aa, unidentified
MIDDVQWFVGIDWATQSHRACLLDVEGRHVSERDFAHDGAGLTELRDWLLEKTKAAPGQIAVAIETPHGPVVEMLLDHAFLVFAINPKQLDRFRDRFTVAGAKDDSRDARVLGSALRTDRQAFRRLVVDDPVVIELREWSRMADELQQERTRLANRVRQQLWRYYPQATKLTDDVADDWFLALWQQVPTPATAAKVSERTITRILKDHRIRRLDAATVLLTLRKTPLFVAPGTTEAACAHIRNLAARLHLVNQQIREAHRALDGLCARLEAATENPSGQIREQHDVTILRSWPGIGRIVLATLLTEATEPLRRRDYHALRALAGTAPVTRRSGKQCFVIRRLACNKRLQNAVHHWSRVAIQHDTAARRRYDALRRRGHGHARALRTVGDRLLYALCTTLKRQTLYNPDCQAAQMTASL

SEQ ID NO: 232902 - protein, 404 aa, unidentified
MIFVGDDWSEEHHDIEIHDETGRRLVRKRLPEGIAGIAELHAMVAGHASDPAEVVVGIETDRGLWVAALVAVGYQVYAVNPKAVARYRERYGGGSGAKSDGADAKVLADLVRTDRHNHRLVAGDSEAGQGIKVLARAHQRLVWSCQRQVNSLRSLLREYYPAALAAFDDLDHPDALAVLGRAPTPAAGRRLSRSTIAATLRRGGQQRHVDTRAAEIHAALRAPQPQPPTVLADAYGAAVAAAVGVITEMTRQLASLEAELERAFDAHPDAEIIRSLPGLGTVLGARVLGEFGDDPNRYADARARKNYAGTSPITVASGKRRVVKARYIGNRHLADASYLWAFCALTHSAGARRYYDQLRAKAVEHDGALRALANRLVGILHHCLAKRMTYEEAKAWPTTEATAA

SEQ ID NO: 232903 - protein, 354 aa, unidentified
MNTVPHDERLVTLGIDTHADIHVAVALDHLGGRLGAIEIPTTRAGFGQLLEWASEFGVIDRVGIEGTGSYGAGLFRWLRARGITVIEVDRPDRKLRRQRGKDDITDAEGAARSVLSGQATGIPKSADGNVEMIRVLRVARRSAMRAKIATINQLHALVVSAPDELREAFAAMTTLAKVRKAAALRPGSTLGTVEAATKLALKKLARRYLALVAEIAELDAHLEPLVRATAPALVAQLGIGVQSAAQLLVTAGDNPERLRSEGSFAHLCGVAPLPASSGKRVDRHRLNKGGDRDANCALHMIAVNRLSRCERTRAYVQKRSPDGKADLDILRRLKRYIAREVYKILTEDTLTRAA

SEQ ID NO: 232904 - protein, 356 aa, unidentified
MSTVADTYKYVIGVDTHAKTHTYAVVAAATGEVIDTASFPTTDAGTARAIAWIERGSDGQQLAAVEGTGSYGATVTRALTTAGIRVCEVKPPKRQARDSHGKTDQIDAVAAARAALGTDATALILARADGLRSALRVLLVARHSIDSQRTSDRNALNALLRIINLGLDVRAPLTNTQVDIIAARRDRSSDDTAAAVARSEARRLASAIHQRTRELETNHAALSKHVDELAPGIQDIPGVGPFTAAIVLTAYSHQGRVRSEAAFAALAGVSPNPASSGNTTRHRLNRHGDRQLNRALHIIARCRMITDPTTKSYVDRRTAEGKTRREIHRCLKRFIARSIYRSLRPLLLDFNHRRVV

SEQ ID NO: 232905 - protein, 403 aa, unidentified
MNAVGIDVSKGKSMVTILRPFGEIVSSPFEIKHTSSDILSLIKLIHSIEGESRIVMEHTGHYYEVLAQQFSAAGLFVSAVNPKLVKNFNNDSLRKVKSDKADSIKIARYALDKWQNLKPYSIVDELRTQLKAMNRQFHFYVKQKTAMKNNLINLIDQTYPNANTYFNSPPRSDGSQKWVDFVYTYWHVDCVRKMSLNSFVKHYQNWCKQKKYIFNKSKAEEIYTKATELVPVFPKNEITKRIIRQAIAQLNSTSATVETIRILMNETASKLPEYQIVMQFKGIGPSLGPQLMAEIGDITRFTHKGALTAFAGVDPGVNESGSYAQKSVPTSKRGSSNLRKTLFQVMDVLIKTMPQDDPVYQFMDRKRAQGKPYYVYMTAGANKFLRIYYGRVKEYLCILSESS

SEQ ID NO: 232906 - protein, 388 aa, unidentified
MRAADHRPEDQAAIRTNLGAIFISLELSRSTWLITSLSPDGGEKMSKHSVRGSDVAGLLQRFSQLREKAARRTGRQVPIVVIQEAGLDGFWIHRMLEKEGIESHVVDAASIATSRRHRRAKTDRIDGEALVRALLAYKRGEPRVCAMVRVPTPEEEDRRRISRERKTLTAERVAHVNRIKGLLFSQGVEYEPLRRDRRARLEELRGRDGRPLPEHLKRQIDRELDRLELLLEQIKAIEADRDAMLAPANEAEVPTPAKMLMDLKGIGAEFAAVLWSEGLFRHFANRRQVAAYAGLAPTPWQSGTVDREQGVGKSGNPRLRTTMLQLAWLWLRHQPDSTLSRWFHERVSRSGGRFRKTMITALARKLLVALWQYVTAGVVIEGATIRTA

SEQ ID NO: 232907 - protein, 350 aa, unidentified
MTSHQRKEAYMRMQKVARSFDIGKSAIGYDHYIAIDWSVKSMAIARMSRRDDHPGVFERPADLKELKEYLTSLKGRTIITLEESGPAHWLYLELLEYVEKVLICDPFHNKLLNDGPKTDKIDAGKLCELLRAGLLKEVYHSDNALYELRTLVSAYQDVVRAGVRALNQRKALMLGHRDKGKSAPFIGGILQENIDLYRRSKQQYERRLADVARRNKQVRFQKEIDGIGTIGAVKIVACVVDARRFPHAGKYLCYCGLVKHEKLSGGRSYGRRRPRYSRTLKSVYKTAALVVLRGENPIREYYDHLLAQGVAEHNARHAVARHIARISYGMLKNGTRYEPYRWKGEAKKVI

SEQ ID NO: 232908 - protein, 368 aa, unidentified
MSEAITSFVGLDVHHDSIAVGLAPEGREEPRFLGTVVPQWAPLSKTLSRLGPPKALKIVYEAGPCGYTLARQLRAHGYACEVIAPAKIARAPGDRIKTDRRDALLLARAARAGELVNVTIPDERDEALRDLTRSREDAVRARLKARQQLKALLLRHGHRYSGKSSWTQAHERYLAQVSFNQPAQDIAFAEYRSAVRDAHERVQRLTDSLRSQLEAWRMRPVVEALMSLRGIDLIAAMTLVAEIGDFTRFARPRELMGFLGLIPSEHTSGTHRRQGRITKTGNSHARRVLVEAAWNYRFPARISPALEARQQGQLKVVREIAWRAQLRLAQRYRKLAARQLPFNKICIAIARELSGFAWDIACQVKPSA

SEQ ID NO: 232909 - protein, 337 aa, unidentified
MEQQRQYVGIDLHRRRSVIVRRNEAGQTLDTVRIDNDPRALAAELAKAGESPEVILEATYGWYWAADVLQECGANVHLAHPLGNNWGNRRVKNDQRDAEDLVDLLRLGRLAEAWIAPPPLRELRELIRYRAKLVHFRTSLKAQVHSVLAKEGVVVPISDLFGAGGERLLDTLTLGHAYRIRVASLRDLISVVGREITMVEGQIAPVLAGDLGCHAIQAIPGVGPVLATVFVGEIGEVARFKSARHMCSWAGLTPTHHESDEKVRRGHITKQGSRLVRSAAVEAVARQHGWTAVSKHHRAVAERRGNQIGRVAAARKLLILVYYGLRDGEIRCLAKAG

SEQ ID NO: 232910 - protein, 449 aa, unidentified
MEIVHRCCCGLDVHKKMIVACLIVLDAAGQRQKETRVFGSMTQDILALADWLTDAGCTHVAMESTGVYWKPIFNLLEGQFEVILANAQHLKAVPGHKTDIKDAEWIADLLQHGLLRPSFIPPAPQRHLRELTRYRSTLVAERARLVNRVHKLLEDTNLKLTAVVTDVTGVSARAMLAALLTGETDPETLALLARGKLRKKREQLAQALQGQLQSHHRFLLTTQLAHLDFLDEQVAQCDSEIQRHIAQSTPPAVAAETSATAPRDEPRPELISLQAPPPSSPVEEDKQAPAALTPLSFAEALTLLDTIPGVNQRLAEIFLAEIGTDMSRFPDAAHLASWVGICPGNHQSAGKHLSGKTRKGDRWLRQALIEAAHGAMRTKDTYLSAQGKRLGARRGKRRAVVAIGHSILVIVYHVLKRKQPYQDLGRNDFDEHDRTMGTRQSVRRLEQLG

SEQ ID NO: 232911 - protein, 344 aa, unidentified
MDISVLGIDLGKNVCSVVGLDASGAVVMRRKVRRETLIALAEKLPPCVVGMEACCGAHHLGRVFAAHGHDVRLMSPEYVRPYIKAQKNDDRDAEGIAEAATRPTMRFVELKSQDQLDMQTLHRSRDRLVGERTALINQLRAMGLERGMVAPEGKRKLEQFLAVLMDEQGGAGLSSRMIVLLADARTQWAEIDRRIAAFDAEFVRWVKENEEARRLMTIPGVGAIVASALVAAVGQAESFERGRDLAAWLGLVPRQFTTGGKPKLLGISKRGNKYLRRQLIHGARAALPYVAERDTPLGRWAKGLASRAHRNVAIVAFANKLARIAWAVLRRGERFAVTGMPVAA

SEQ ID NO: 232912 - protein, 423 aa, unidentified
MENTAARKRKQVPEGYLVVGVDPHKKRHAAVAITQDFTTRDKFKFDNTREGLETMLSRARMEMVKSGCRGVMFAIETGGHYWRNVAYFLDERGIPFRFINQFTLKRRREGKDLNRRKNDYRDSEVAAQLLCTGEFTESKIPQEVYAELRSAHNAYRRLVKERTRITNLVKGLLDGLFPEFTNVFKDPCGLTALSILSTCSIPSVIARMTEDEFVATIETQHQGRLMRRKLRALHYSARTSIGIDAGARSVSSEISFLVEKLELVRRHIRIMEGTLIKLVDETEEGKYLLSIRGLHYIAVGGLLAELGCFKSYRSAKQMIKMAGSNPTESESAGKKGAHTPMSKQGRPVLRYCAWTSVIPMLRLNSDFRAWAKQRRERPAHANPLNGREVVGAALNRLLRLAFAMVKNQTYYRVSKPELTLVAV

SEQ ID NO: 232913 - protein, 400 aa, unidentified
MLSIGIDVSKGKSTVCGMKPGGEIVYTPFEVQHTREGMLELVSLLRSSGEEVRAVLESTGSYHCPVVAALLENGIFVSVVNSLRMKRFCSQSIRKVKTDRIDAMQIALYGLAYWQELQPTRLPEDTYRELQLLARQYYQMTSMLIKAKVDFNALCDQVLPGMQELMNDHAGRHKLSDFVLRYHHTTHILEMGETRFRKDYCKWAEKKGYRNCERMAALIFATAQNGIPVLPNAPSTQIVITEAIRVLHTVEASRDAILTQMQALAKTLPEYSLVREMPCIGDTLAPRLIAEIGDVRRFHSKRALIAYAGIDAPPYQSGKFCANNRHISKRGNRYLRKTGYEVMQSYVMHKPANDPIFTFIEKKRGEGKSGKLAMVAGLNKFLRVYYGKVTELYRSLPAIE

SEQ ID NO: 232914 - protein, 427 aa, unidentified
MPYRIAGIDVHKKMLAVVVADVDVAGDWCFERRQCGTSPSQLQALAEWLTERDVEEVVMESTAQYWRPVWDVLERQWQPTRHGRTEAGPMCGALHLAQAQSNNGPRGRKQDFPDAERLVKRLVAHELTLSFVPDVTQRLWRTVTRRKYQLTCNRVQLRNRLECLLEEAHIKVSSLVSDLLGLSGRRMLRAVATGETDPTTVAALGSPRLHATPDELRDALGACTDLHPVYRRLLAMTLDELDVIDAHIRQLDEELAQLLREQQQAVERLAAVPGLGVDSAQQIIAEVGPTAATFPTAKRLASWVGACPGHDESAGVNHSHRSPNGNRQMRRLLNQAANAAVKTKGSIFELVYRRLVVRLGHAQAIGAIGHRLCRLVWKILHDGVAYEERGPAVTKARAQRRAAKMIRELRSLGYRVEPVSPPASALA

SEQ ID NO: 232915 - protein, 361 aa, unidentified
MKKLFIGIDFSKEKFDATVILACGIQEIGTREHGSFPNGPKGYRNFVKWVKTNSWQTRQDEWLFCGEDTGSCSIGLSKWLYGKGHDIWIANAYAIKHSSGIQRVKSDKADSAVIAEYAWRHQDKAVLFEPMSESLFQLREVFLYRHKLVQQKVAIEVRMEDKQAIGADKAMSFIKRKSKHIAAEINKAIAECDRMIDSIIESDKELQENYAIITSIKGVARQNAACIIIYTNNFKKFGYDARKIACYYGVAPFGKQSGTSVDVPARTSHFANKLIKSLLGQAAHIAKIFNPEIKEYYQRLIKRGKKPQVALNNVKNKLIRIIVTLVKKKTFYDPNTYKFYTEKTRTNKTANVNLTLNHAIC

SEQ ID NO: 232916 - protein, 412 aa, unidentified
MDVYCGIDWAEDHHDIALVDQDGKLLARRRISDDAVGLAQLLDLLAGYGDSPEELIPVAIETPRGLLVACLRATGRLVYPVNPMAVARYRDRHSVAGKKSDHGDSVVLAGVLRTDLHAHRPLPADTELAQAIAVLARAQQDAVWDRTTAHNKLRSHLREYYPGFLAAFASAKGGITRPEARIILAAAPTPADAAKLTLTQLRGLLKKAGRSRGIDTEAARLREAFGVPQMRQLPLVEQAMGRQATALLRQLDAACAAADDLEQAVTQSFNQHPDAGIITSFPGLGTLTGARVLAEIGDDRSRFQDAKGLKAYAGAAPITRASGKTRSVTRRKVKNNRLNAAGYCWAFSALTASPGARAHYDRRKDTGDRHAAAQRNLFGRLLGCLWHCLTTGCEYDEAIAFPAIAKKLPHAA

SEQ ID NO: 232917 - protein, 413 aa, unidentified
MTEESFAWFAGVDWGSEKHQACIVDAQGNVAGEREFPHSGAGLAELGDWLLSIAGAVSSVAIAIEVPHGPVVDTLIDRGFVVHAINPKQLDRLRDRFSVAGAKDDSRDAYVLADGVRTDRRLFRRLHVADPQLIALRAWSRLAEELQEERVRLSNRVYHQLWRYYPQMAKLTDDLAAPWFLELWTIAPAPAKARHVRQSTVEQLLKQHRIRRIDAETVLRTLREPAIRVADGVAEAAGIHMRSLVARLRVVNRELREAEGQLDKLCTAIGETEPTSGDCLRRQDVMILKSMPGIGRINLATLLCEGSGPLSRRDYPALRTLCGVAPVTKRSGKSHIVVMRHAAHVRLRNTVYHWARVATQHDPKSHSRYVELRRRGHSHGRALRGVADRLLGLACVLLQRQTPFDPQFGQPAT

SEQ ID NO: 232918 - protein, 370 aa, unidentified
MKQNTAKQPESIPTTSTVIAVDLAKRVFQLVAEDACGRVLYEQRITSREAFSAFLNRLPPGLSVLMETGPGAQAWARQLSEQGHPVRILPAQRVAEHRSGAKNDRNDAHAILRAGRDISIASVPIKSTQALAMQALHRIRQGYVRRKTAVSNQMRGLLLEHDIALAKGDMAVVQWVPKIIRDASRPVPELLRDLLADLLAEWEHLRVRIEAMDGKLHASARQDPKARQLMTVRGIGPVISTALLAKQTEPKRFADARQFAAYFGTVPDQHSSGQRVRLGKMSKRGDAYLRSMMIEGAHAVLKHVSPNSQERDDKRLLRWMQRHGRKGAAIRLANRNFRIAWVLLQNDQNYSRQPSRKVETDEIEEVNMHN

SEQ ID NO: 232919 - protein, 342 aa, unidentified
MAIVGAFDVHRRQVTFDVLDTVSGQVRRGQMRPACRATLRQFLGRFAGQDEVSFAVEGCTGWRFIVEELEGAGFGAHVADPAAVADARGSKRRAKTDRIDSRQLRQQLVEGRLPESWIPPGHVREVRAKLECYHDLREEHTAWVQRVHATLFHHGVPVIEGALSTIDGRARLAAGEGLSPAARQSVGVAVRVADVLQTELDELGKELGRFARRQPGCRALAAQYGVGPITAVAIWAFMGDTRRFSSSAQAVRHTGLDVTVYSSDGKRSPGHLARQGPPVLRWALYEAGCCAARRTSPDLDYYHDTKERIDHKRAAISVARKIARRSHHILRNLGDAAWQDAA

SEQ ID NO: 232920 - protein, 423 aa, unidentified
MFDSTAAWVPGDPGIESVKTVWGVTSAPRCRGVGTPRMRVRGLGRRNRPSADTPVMGGADAVNDMTMVGLDVHARMTLAASLELATGELRFRRLSGPPRSAVDYLQQLPGPVIATYEAGPVGYGLAREAAACGIEVRVCAPGLIARKPGDRIKTDRRDAERFVRLLAAGDLSFVRIPTVEEEQFRDLARCREAARADLMRARHRLSRFLLRREIEYDGPGGSWSERHWKWLRGIEFNDHASQAVFNDYLTAVGSLEQRRSGLDAQIAIAAPRSPWALTIAALRCLRGIDTVSAYGLCCEIGDFHRFKHPAVLTAFLGIVPCEHSSGESTKRGPITKAGSPHTRRLLVEAAHHYRHRPAIGVALARRQRGQDPRACEIGWRCQQRLHHQWQRLRVERRKPANVTVIALARELTCFVWEVGQLQP

SEQ ID NO: 232921 - protein, 317 aa, unidentified
MAKPSMLCAGIDTGKRQLDASLVGGSERLQVDNGPAGHLSLARWLHRHRVKRVGIEASGGYEGAAVARLRCEGFVVVVFQPAQVRAYARFVLQRAKNDRLDAALIAECTAAAKKIHVPADPRLAAFAAPLTMLDQLGEDIACLKNRRESCREARIERHWTAEIARLKAVQRVELRALAAAIRQHPDLAQRLDLLCSIDGIGLPTALAILVRLPEIGRVSREEAAALAGLAPWDDESGERQGQRHIAGGRERLRRALYTAAFAASFHWNDQLKRRYRQLIAAGKAHKLALVACARKLLIYANAVVARGTPWQPLPAAA

SEQ ID NO: 232922 - protein, 352 aa, unidentified
MKIVALDLGKFNSVACVYQTENGVHEFRTIKSDPSAIHDLLLASEARRVVIEVGATCGWVKDLAEALGMEVQVANVNAESWQWKKRKRKTDRDDALKLAVLSARGELPKVYVPCRQVRQWRSLIGYRQDLVVRRTAIKNRIRALLTQEARVQPGGKKGWTDQAVEKLKGEARGIAQCSTDELWRGILQMELVQFDAVEGLIGEVEKKLEALSKERAEVKLLETIPGVGPRLAEVVVAVIDDPRRFNNRKQVGCYAGLTPRQFESGTMIRQGRISCQGNRLLRALLVEVSWLMRRWNDQFWKIFQTVSKGSKQRRKAAIVAVARRLLVTCWAMLRDNKPWRPAAGLTGEALAA

SEQ ID NO: 232923 - protein, 390 aa, unidentified
MKKNSTTAKKSPKQALAKGQKKQIRQLAAEQRLTIGLDLGDRTTHYCILNEAGEVVSEDQLQTTKTGLESLFAKMPASRIALEVGTHSPWISRHLAAMGHEVIVANAHKVKLITQSVRKNDRIDARQLARLARVDPQLLSPIRHRGEEAQMDLAVIRGRAELMEARTKLINSARGLVKPMGERLKGCDADQVGVGLAEGLREEARRAIEPLLKAVEAISEQIGKCDEQIAEITKRYPEVKVLQQVYGVGPLIAATYVLTLEDAERFAHSRDVGPYLGLTRKQRDSGDSQPELGISKAGDGLLRSLLVEGAHCILRKGAPESDLRAWGMGKMGKGGKRAKKRALVAVARKLAVLLHHLWATGEVYDPQYNRKAAEAAAAKAKGKGKAEAAA

SEQ ID NO: 232924 - protein, 319 aa, unidentified
MNTIDKVETFAGIDVAKATLDVGLAEESRVVRYDYDAVGIEAIIADLQGCALSRIVVEATGDLEKQLVTALVMAGLPVAVVNPKRVRDFARAAGRLAKTDRLDALVLAQFGQAFRPPLYQAQSAEADQMSAWVSRRKQLVEMLAAEKNRLKMTGDALVRQQIEAHIRWLEGEIAALDSQISHLIDADPQWQATRDVLHSVPGVGPVVVATLLAELPELGTLNRQQVAALVGVAPLNRDSGQHRGKRHVVGGRATVRRVLYMAALTATRCNPVIKSFYQRLLAAGKEKKVALTACMRKLIVILNAMVRDQRPWEVSIITT

SEQ ID NO: 232925 - protein, 400 aa, unidentified
MPVPGNRGIEYSKKPFKFSNTEAGFVTFKEWILDLKERHEKDKVVLGMEPTGYYWFNLGKFLQDNEIKPVLVNPHHVKKSKELDDNNPTKNDRKDPKVIAGLVREGRYMIPYLPDGIDADLRTASNIRFQLQAELTRIQNRISRWFNIYFPEYKTVYGKPDAKSGMLILKAAPLPEDILTLGIDGVNQIWRDAKLRAVGKARAKTLIEAAEHSVGSKEGAVAARMEIRMLLEDYESRNTRLQEVMVLIEELVRKIPMAEKLLEIKGVGIRTVSGFLAEVGDISRFNNPKELQKLAGLALVENSSGKHKGETTISRRGRKRLRYLLFEVAMSLVAKNPEFRELHNYYTTRRLNPLKKMQSLMAIAAKLIRVFYVMLTKGVNYDPKKMVNDIKRPAVYLQTA

SEQ ID NO: 232926 - protein, 354 aa, unidentified
MIIIGADYHPGFQQIAFVDTETGDCGEQRLEHCEGAQKFYRELASQGKKVRVGMEASGHARWFERLLEELKIELWMGDAEVMRAKRGRKPKTDREDALHILNLLLTGDFPKIWVPNWENRDLRQLLWHRHRMVQARTRAMNQLQAVALNEGLRCKKKLWRAHGREQLEAFRLAPWASRRRKDLLELVDRLNPTIAELTQAIEQEAQKCPPAQRLMTHPGVGALTALAFVLIIGKAERFQCGKQVGCYLGFVPLEESSGDRRRLGHITKQGNSLLRFLLVEAAQVTSRTLPEWRSKYMHLTLRRGRKIAKVAMARKLAVRLFWMMRKEWDYQQVMKFGSHVEQPGNRHGVQSNIE

SEQ ID NO: 232927 - protein, 343 aa, unidentified
MKLMRIGVDLAKNVFQIHGVDCHEKPVWRQRLPRDRWLQTVLEKVEPGCEIGMESCGGAHHWARQLEALGFRVKLIAPQFVKPYVKSNKNDANDAEAICEAMSRPSMRFVAIKTIEQQDIQATHRIRAGLIEQRTAKANQIRGLVAEYGLVAPKELLMLRRAIPCWLEDADNGLTARFRRLLDGLWDDLRALDGRVCKLDGEITAIATNEPSAVRLQQLRGVGSMIATALVVALGDARQFANGRQFAASLGLTPRQHSSGGKDRLLGISKRGDTYLRTLMVHGARSALRTAKSKEDRLSQWAVRLAERSHPNVAAIALANKTARMAWAMLRHGTDYQPNQAAA

SEQ ID NO: 232928 - protein, 360 aa, unidentified
MVIAIGADVHKHSHTFVAVDAAGKQIGQLTVAATHTGHEKAYRWARTAFIDQDRLWGIEDCRHLSGMLERDLLTHGEPVVRVPTKLMARHRASARTRGKSDPIDALAVARAVAREEDLPTAVTDEPAREVALLVARRDDLVAERTRAINRLRWHLHELDPELDPAPRSLDRARVRTQIREFLAGQAGIVAEIAGQVLADVERLCEAITGLEARIRALVRLRAPQLLELPGCGEVSAATIYAEVAGVGRFRTEACFAMAAGVAPIPVWSGKTAGRVRLNRGGNRQLNCALHRIAITQIRLPGPGKDYYERLKASGKTTMEALRCMKRKIARVVYNLMARAHQEAPKTVQPLDHPARLATAA

SEQ ID NO: 232929 - protein, 311 aa, unidentified
MTEHTIGIDISKTHLDAFRLEDQAARQFENSARGFRALVKWLGQTPVARIVFEPTGPYHRAFETALSGKFPLVKINPLQARRFAEACGTRAKTDAVDARILARMGAALELEADAPVSEKLLVLRELQVARTALVKERTRLRNRSHVQINPVLKRQIKARLTLVERQLAELDAEIASHIATDEGLARKREILCSIPGIGPIAAALILTFLPEVGSLDRKQAGSLAGLVPHSRESGQWKGRSFISGGRKPLRDALYMPALVAMRFNLDLKGKYHALREAGKPAKLAIVVLMRKLLEMANALVKADRVWVEKRP

SEQ ID NO: 232930 - protein, 388 aa, unidentified
MLLDHPSDGPAAIRTQFGAIFVSLELSRSTWLVTSLSPGKGEKMSRHSVEAGDIAALLKLFAELKQKALARTGENYPIITIQEAGLDGFWLHRALQQEGIESHVVDPASIATPRRRRRAKTDRLDGETLLRSLLAYKRGEPRVCAMVVAPSPEDEDRRRLCRERRTLIAERIEHVNRIKGLLFAQGISGYVPLRRDRKARLEALRTGDGRPLPQHLKAQVGRELARLELLLEQIAAVEREQEALLTASKPTGEKAASDPVTMLLGLKSLGPNFAAVLWTEAFWRQFANRRQVASYAGLAATPWRSGGIEREQGVSKAGNPRLRTTMIQLAWLWIRHQPQSALTQWFKANSQRGRKRAIVALARKLLVALWKYVTQGVVIEGAVMKPAA

SEQ ID NO: 232931 - protein, 409 aa, unidentified
MEILHPRCAGLDVHKDTVVACVRLVQGRRAAQHEVASFGTTTRELLRLSDWLEAQGCTHVAMEATGVYWKPVWHVLEGSRELLLAHPQHVRAVPGRKTDVNDATWLADLLAHGLVPASFVPPTAVQELRTLTRTRKQLVRERSQHVQRLQKTLETANVKLASVLSDLTGASGRAILRALIASETDPERLAELARGSLRGRRGELAEALLGRVTRHHRFLLRLHLDHVETLERVVQEIERELEVAIEPFRAQIQRLRTVPGVQELLAQTILAEIGADMTRFPDAGHLLSWAGLCPRSDESAGKRRSTRVRTGNAWLKTALVQAAWAAVRVKDSYLRSQFLRIKSRRGPKKAILAVAASILTAAYHMLRDDADYRDLGTDHFDRRERLRRTRTLVRRLRELGYEVQLQTAA

SEQ ID NO: 232932 - protein, 410 aa, unidentified
MQTLVERGCGLDVHQATVVACLLIVLKNGRVHKQMRTFGTTTRELLTLRDWLLSEGCTHVAMESTGVYWKPVYAILEGALEIVVANAQHVKKVPGRKTDVKDAEWIADLLCHGLLRSSFVPPKPIRELRDLMRYRRKLTESQAAERNRLLKLLETTNIKLASVASDVFGVSGRLMLEALAQGKATPQEMAELAKGLLRKKIPELEPALEGRLEEHHRFLLELQLRRLEAAEEDLAALQQCIQEKLKPYAKQLALLDEIPGVDWTVAAVIIAELGVDMSVFGSASQLASWAGVCPGNNESAGKRRSSRVPKGNVYLKTALVEAANAATRAKGTYLRDKFFRLKARRGYKRALVAVAHKILVAIYHMLSQEVCYNDLGDLYLDRLNKHHLTRNLVHRLERLGYTVTLEQKAA

SEQ ID NO: 232933 - protein, 470 aa, unidentified
MAAVMIGVDPHKASHTAVAISVAEEPLGELRVRACAAQAERLLAWAAAWPQRIWAVEGAGGLGHLLAQQLLAAGERVLDVPPKLGARVRLLAAGDTNKNDPDDARSVAVAALRSAGVREVRPDDHAAVLKIWSKRYRDLGRTRTQVVCRLHAVLCDLVPGGVSRPIYAARAARILEQITPPDAVAAARCELAAAFLEDLRRIDAQIRETRKKLAAVVAATGTSLTGLFGVGPVIAAAVIGDVRDVSRFPGRNHFAAYDGTAPIEVSSGPRKIYRLSRRGNRRLNHAIHMAAVTQVSHRHSDGRAYYDKKLAEGKTRKEALRSLKRQVSNAIFACLQAGARRAAAHAKGPGGQQGNDSAACAAGSHPRHRLFGQATPGPGAHPTTPAASPAPGPASARGRAGHSSIAATLPPATPQVQVERPPRSEDERPGGAARQRPYSAARKALGQKFPLKAQRPKGTSHAAKRTDGTP

SEQ ID NO: 232934 - protein, 309 aa, unidentified
MSAAYVGLDVWKDGLAWLVLPSGQAFAVARDGNGLSELVTMLSGLECRAIGVEATGGFETVVAAGLGAAGLPVVVVNPAQVRAYAQALGRRAKTDPIDAAVIARFMEAVKPALRPLPDEATVRLADLVARRRQIIEMIVAERQREKRASVQSRKSILRLLKALEKELSAIDTDIDDMVRGSPAWQATQDLLQSVPGVGPIVARTLMAEVPELGTLNRRQIASLAGLAPWTRQSGKWRGKSLIGGGRAPVRTVLFTAAMTAARFNPPLRVFHQRLIQAGKPKMVAIIAVARKLLTILNAIIRDQKPWQNA

SEQ ID NO: 232935 - protein, 340 aa, unidentified
MEQVIGIDLAKRVFQLHIASPLGKMMKNTVVSRDKLTAFLAQQPPSKIVMEACGSANYWSRQFKRFGHEVKQISPQYVAPFRMGSKNDKNDAVAIVEADRRPGMRYVPEKTQEQPDIQCLHRVRQRLMKNRTALINQIRGLGLEYGIAIPESAHKVEQCLPDYLENAENDLTPLSRELFQELLRELKEQQQRLNVLDKRLDQLNAQQEDIRRLLTLPGIGPLGASALMVALGDSTDFKNGRHFASYLGRVPREHSSGGKVRLLGITKRGDGYLRGILIHGARSVAYRVQKLPDGRCNGLQRWLKGVITRSGLNKAAVALANKNARIAWALVNQQSSYEVR

SEQ ID NO: 232936 - protein, 492 aa, unidentified
MKILDRFLRALTLNIYYEERTGTGKDGRRSVTKLLKKRGMSLRSKIAIGVDIGAYNHSICVMDANARQVYDELFIEESRSGYSQLDNFLRGLLARFEGCEFHLGAEATGIYWRNLFHFLHKEFKQVKLSLINPLQTKRFFQMNLVKTKTDKVDSRLIANYVAINNPEESKLFEHEMEDLSEICRYRKIKLKEYSRYRNYLHKYLKESFPEILPRLKRFSGKKELAVLTKYPTAKDIRQAEASDIANITYTQRNWKVGTAFAEEIKKQAASSIGCYQGPGVRFSIQSLAANCLRLQAEIEAFSQKIEEIYSKNPSSALVSLPGIGALSAAVIESEIKSIHRFDSPKKLVGYVGCYPEIRQSGTSNLKTPKMTHKGNRYLNTTIFMCVLNSIAPNSGDNIIKSTYYRMISSGKDKMVAMGSCMRKLTHLIFVMLKTQKRYDPEFEFKRVAFDVALIDRRTGLNWDLSEELTGRSPVVPIRIKRLTLPQRLESPR

SEQ ID NO: 232937 - protein, 401 aa, unidentified
MPTMRDNAIRVKRFRALKATVRTDRARLLVGLDVAQAEHVVHLRHAHTRVVVPTLTIPNTTRGFTQLWARIQQAQRSTGCREGVGGLEPTGTYHQAVATFLEAQGADVVLLSSSVAYWTRRTQDGTWDKHDRKDAANCADLLEQGKVLFYSQPTGPLAELRHLVTCLRRARTELAACKARWRTTLRPALAPMGEALPQRLWAELPPALQAWERAAPGRPAVPKGRLPLGLAAACADLGAQVTAVQARIATLEATCTPLAERLPASPLLRSIPGVGPTVAAILLAEIGDIEWFTTFSQLRKLAGLDIVRVQSGQFAGQARISKCGRGAPPLGAVPRGDGAGPDGGGRTRFAALKAKRRGDRYAGFKAITELAAKQLRVVGGVWRSGTPYDPTRAGGLRRQAR

SEQ ID NO: 232938 - protein, 405 aa, unidentified
MEIIVERGAGLDVHKERVVACIMGTGIKKEIRTYSTMTNDLLRLKAWLKDRGITHVAMESTGVYWKPVFNILEDSFDVLLVNARHVKHVPGRKTDVLDSEWLCKLLRSGLVRGSFIPPKEVRELRDLTRYKRKLIQTITAEKQRVEKILEDANIKLSSIASDTFGASGARIIQELLKGELRPDEMAELSKGRLRKRKEELKEALVGNVEEHHKRMIRTSLQHINAMEEIFLSVEQKIQEKIELHFKEAFELLKTIPPIKDSASVIIAEIGINMDLFPTEGHLSSWAGMSPGNNESAGKKKSGTTTHGNLYLKTILTEFAWIASKMKGTYLWSKYQSLIGRKGKKKTLVAVGHKILIACYQVLKYKVPYKELGANYLTERKRDRIARSYVKRLSNLGYTVTLKEVA

SEQ ID NO: 232939 - protein, 385 aa, unidentified
MDQTSSSAISTNTLHCALELSRNSWLLAIQFPDREQPSLYPIEGGNTEKLMAKLTAALDCWAKVSGSPPAITLCYEVGYDAFWLARFLMGRGIECLVIDPGSLQINRRGRRVKTDRIDVKMLLRTLIAWCRGERHVWSLVRIPSIDEEDLRRSHRERGRLVRERTAHINRIKGLLFGQGIRGINVKSKYKTLAVDNLVTGDGHRLPPRLACEIARQIQRLAMVQEQIAKIERERDTAPTPCKATERKRHLLLQLKSIGPAISALLSREVYYRQFANRRQVGSFLGLTPSPYNSGAEERCQGISRAGSGHVRAIMIETAWLWIRHQPKSALTRWFVERTAGQTTRVRKIMIVAVARKLAIALWRYVEHGMVPQGAILNPPTTGNAR

SEQ ID NO: 232940 - protein, 442 aa, unidentified
MARRKREFELAYPNAAGIDIGSASHFVGVPPDRADDQVREFKSFTEDLEALADWLSACGVDTVAMESTGVYWIPLYELLESRGFDVYLVNARHVKNVSGRKSDVLDCQWLQQLMSYGLLSGAFRPRDEICALRSLTRQRDMLIKYQSQHTQHMQKALVQMNVQLTNVISDITGLTGQKIIRAIVAGERDPVKLAKLRHERIRASETDIAKSLKGNWREEHLFVLQQAIILYDAYSAAIAACDLQIQAQLERLYQHEASPAPERKRGRPRKEGFDLRTALMRTCGVDLTRINGVETATALKVIAEVGPDLSRFKSAKHFASWLGLCPGTKISGGKILSGATKRTANRLAQALRMAAFALSRSQSALGAYYRRLSARLDKPKAITATAHKLARLIYTMLTKGTEYVDRGQDYYEESYRQRVVHHLNRRAAALGFTLTPIQTVAP

SEQ ID NO: 232941 - protein, 368 aa, unidentified
MKQVTTYVGIDAHKKDLFIAMLIGQQKTPVTWQLANEPTAVRRLVRKLERDAPGPVSVFYEAGPCGYALQRQVTTSRVSCDVIAPALIPRKPGERVKTNRRDARKLVELGRAGLLTAVQPPTPEDEAVRDLARARDDAREDLQRCRHRLGKLLLRRGLHYSGRNWTRTHRQWIDSLEWVHAAERAVVDDYLLAIDHTETRLLELDARLAEIADRDPYREPVGWLRCFRGIDTLTAMLILAELHDFRRFASAPALMAYLGLVPGEDSSGEKHRRGRITRTGNALVRRLLVETAWHYQHRPSIGVALTRRRKGQPGRVIAIADKAQQRLCRRFRKLAAEHKPAPKIAVAIARELAGFLWAALQPAPVAVK

SEQ ID NO: 232942 - protein, 339 aa, unidentified
MREVSTIGLDLAKKVFQVHGVDAAGETVVRRVLRRARVLAYFAQLPPCLIGMEACATAHYWARELGKLGHRVKLIPPAYAKAYVRRNKNDAADAAAICEAVSRPSMRFVEIKSEAQQAAAGIHKVRDMLMKQRTMLINALRGLMAEFGIVVGAGTRHVGELTAILVDPEEHRIPALLKDGLRRMAEMLRGLERQLEGIDKQIVNWGRGNATCRHLITAPGYGPILSSAMAAIVVNPAVFRSGRDFSASLGLVPRQDGTGGKVKLGPISKRGNGYLRRLLVNGAMSVLNSKRAKQDPWLVKLLASKERKVAAVALANKMARIGWALMTRQEDFRATSAAA

SEQ ID NO: 232943 - protein, 323 aa, unidentified
MSTKATKKRRSFIGIDVSKKLLEVGVHQSDYHFRCPNDPKNFPALITELISLRPARILLEATGGLERALLQALHAAGLPVAVVNPRQVRDFAKALGRLAKTDRLDARVLAHFAAATQPAIRPVKAQQETELDALMGRRTQLSDMLAQEKNRRGSAATKGTRDDIEAHIDWLEERIQELDEKLKEQLKCSAVWQQKAKILQSVKGIGFVTSLSLLADCPELGELNRHQIAKLVGVAPLNRDSGQQRGARHIWGGRAQVRGKLYMATLAATRFNPVLKSFYQRLLAKNKLKKVAIVACMRKLLTIINVMVRENKLWNVKAQPVSA

SEQ ID NO: 232944 - protein, 340 aa, unidentified
MKKNKQFYLGIDISKPFFDVSVLAVTQTAKQEMQTAQFGNDASGLRLFAKWLTGLGVSYDENSLVVIENTGIYHRPVWNFCSSKNLPIHIGNAAHIKWSLGITRGKSDKIDSQRLCEYGYRHREELKCAAALNPVFLQLKDLMTNRTRLMHHLTSLKSYLKELKGVSDKSFISVQQRCNKAVIAGLKKSIGLIDAEIKKLISQDKQILTNYQLLKTVPGIGHWIAIYLICCTRNFSNGITGKQLACYAGVVPFEHSSGISIRGRNRVHKMANKDLKKLLHLGALATLKYYDEFKQYYSRKKEEGKHSMSILNAIRNKIILRAAAVVQNQQPYVNYSANNV

SEQ ID NO: 232945 - protein, 342 aa, unidentified
MKDTMIGVDLAKNVFQLHGATMTGHLKFRKKLTRFRFRQFMASHAPAVVVMEACGSASYWAREMVKLGHEARLIAPQYVRPFVKRQKNDAADAEAIVVAAQRPEMRFVQPKSEDQQACAVLFRARERLLHQRTELVNALRSVLYEYGHVIPKGIAHIKRIEDILADPNSDLPALVREECFDLIEQISEKTARIDAKTAKARAHSLATDTARRLQTMPGVGPQTALAISGFAPPMESFKRGRDFAAWLGLVPRQHTSGGKERLGRVSKAGQTDIRSLLIIGAMSRLTALARKSIVEGSWLARMLCRKPLMLVAIALANKMARAIWAMMTKNEDYRDPGRAVAA

SEQ ID NO: 232946 - protein, 315 aa, unidentified
MNFIGIDVSKSQLDIAVRPDNKRWSSANTDADIAKVVETIKEFSPQIIVVEATGGLEMPLVAALSQASLPVVVVNPRQVRDFAKAVGRMAKTDRIDSEVLAHFGEAVKPEIRLLKDEDTQILTALVTRRRQVIDMLTAEKNRLGISSKIVRKDIQKHINWLQARLEDIDRNLDSAIRNSPAWREKDDLLRSVPGVGQVLSVSLITGLPELGTLSRRQIASLVGVAPLNRDSGLFRGKRTVWGGRANLRAVLYMATLSASRFNPAISLFYSRLIAAGKKSKVALTACMRKLLGILNAIVKNQIPWQADYSTCLNTP

SEQ ID NO: 232947 - protein, 421 aa, unidentified
MKPAQAAQFAALIGIDWAHAKHDICLQPGTHAAREHSVLKHTPEAIDAWVRELRQRFGKQPIAIALELDKGPLVYALQKYDGFVLFPVNPNLLAKYREAFTPSKAKDDPTDAELALELLVRHREALTCLTPQSAPMRALIQLVHDRRRLVHDRVRVSNRLTNTLKNYFPQALDWFPDKATVVCCDFLSRWPTLKQARRARKTALQAFFREHNVRYPQVITQRIDAIRSAMPLTEDPAIIQPQALLVSALVAQLRTVLAAIEQFDSAIAETCSQLSDYALFRNLPGAGPVLAPRLLAAFGEDRERYHSASEIQQYAGIAPVTERSGQKSWVHWRYRAPSFLRQSFVEWAGETIPRSFWAKAYYQQQRDKGLAHQAAVRALAFKWIRIVFRCWQDRTPYDESVYLLALQKRGAPLLQRIADAA

SEQ ID NO: 232948 - protein, 368 aa, unidentified
MIKYTLKAAPTALSKEQNSQEQPKANRIDIGVDAHLKSYQAARKIDNGAVGVAQTFQSKEALLLYAQKQREQAKQVTVVYESGPLGFTLYRELKALGIECLVCAPRSAEQKRKRRKNNSIDARTLSSDLSNYLNGNEQALQLVRIPTEAQEQARVQSRQHDGLVQERKRLGAMGNALLLSQGYGSWSNWWRPKAFERLSQAVAPWIIKHLGRWVGILRELDQQIQQAKVELTQQYQGPRPKGMGAASLAQLKAEVLDWNRYSTERKMGCLAGMVPSEWSTGESQRLGAITKVGVPAIRRIITEMVWRMILFQPQYKAVQKWREVLEGSNRGLKKKAVVAIGRRLIVDIWRLQTGRVTAQELGLIMIEG

SEQ ID NO: 232949 - protein, 410 aa, unidentified
MEAIVRACCGLDVHQATVVACLLVGDPDKKPRREVRTFGTMTCDLIQMREWLTAEGCTHVGMESTGIYWMPVYAMLEGHFELVVGNATHIKNVPGRKTDVKDSEWIADLLRHGLIRRSFVPPKPLRELRDLLRYRRKLVEAQTAERNRLLKLLETANIKLASVASDVFGVSGRAMLRALLGGTATPDEMAQLARGSLRKKIASLSAALDGRVEEHHRFLLGVQLDRMEQVEASITKVDARIDEKLLPYATQHQRLTEIPGVDRIGAAVIIAELGVDMSVFPTPQHAAAWAGVCPGNNESAGKRKGQPGRKGNVHLTTALVQAAMGAGRKSGSYLKEKFWRLKARRGPKRAALAIAHKILIAAYHMLRNDCPYKDLGLAYLDTFSVTVVKATLVKRLERLGYRVSLETLTA

SEQ ID NO: 232950 - protein, 350 aa, unidentified
MIIIGCDYHPGFQQIAFVDTETGECGERRLEHREEAEKFYRDLGAQGAAVRLGMEASGHARWFERLLSELRFELWIGDAAEIRTKRVRKQKTDRQDAELILRLLLEDRFPRIWVPSGENRDLRQLLWHRHRMVQARTRIMNQLQAVALNEGLRCKKRLWRDAGREQLESFELAPWASRRRRDLLELLDRLTPTIAELTQAIEQEVEKCPEAQRLQTHPGVGALTALAFVLIIGRADRFQCGKQIASYLGLVPLEESSGQRRRLGHITKQGNSLLRFLLVEAAQVTVRSDQEWRSKYFHLAMRRGRKIAKVAIARRLAVRLYWMWRKGWNYEQMKKFGSHAGEPGHRDGVR

SEQ ID NO: 232951 - protein, 408 aa, unidentified
MQVEHPVCCGIDVHKDTLTACLRRVEDNGQVHKEGREFATTYTSLLALSDWLVEQHCPVVAMESTGVYWKPVYHVLAGTVEVFIGNAHELRSRPGKKTDKRDAAWIAELLAHGLIRPSFVPPPEICALRDVTRTRVALVQTRSQSKNRVHKLLEDTNLKLGSVVSDLFGVTGRRMLAALVAGERDPQVLASLALGSLKHKRPQLALALTGQCTAPHGTLLGLLLELIERLDRQIATLDQQIGALVAPLQAPIAQLDSIPGVDIIAARDILAEIGTDMSRFGDAARLASWAGVCPGNHESAGKRYRGKTRKGNRYLRRILVQCAWGARKTPTFLGRTFRRLEVRIGKKKAALAIAHKILVIVYHLLAAGTCYEEARYDQYNPRQEARERQRAIKALERLGYTVTVARAA

SEQ ID NO: 232952 - protein, 328 aa, unidentified
MLYFGIDVSRDKLDCAVVDGHGVRVKQRVRSFTNDAQGVVELIGWARTLAAEHPRRFVLEATAAYHELAATRLHCAGLVVSVVNPAQVRALARGLGMLSKTDLIDALLLAQYGRLAEPRQWQPTKPQLKEFSAMLMRLDCLEADLRREQNRREQAAVRGTSDCVLASIDACIEFLRGQCKTMRKNIDSHIVANESLGQSITRLRTIPAVGEKTAKRMAAILGANSFDSAKEAAAFLGLVPIKCESGSSVRGRSRLSKAGNPRVRASLYMAAVVAKKINPDIKDLYDRLCAQGKTKMSALGACMRKLVHLCYGVLKSEHDYVPPEARSS

SEQ ID NO: 232953 - protein, 392 aa, unidentified
MKKNTTAKKTPRARANMDRKQVRQMAAKQRLTIGLDLGDLNSRYCILGEAGEILSEGQLPTTKAGLDWLFAKMPCSRVALEVGTHSPWVSRHLARLGHEVIVANPHKLKLISQSVRKNDRIDARTLARLARVDPQLLGPIRHRGEQAQADLAVIRARAKLMEARTELINCARGLAKPMGERLKKCDAEQVNEGLADGLSEALQKVIRPLLKSIETISQQIGVYDQKIAEIAKRYPEIELLTPVYGVGTLIALTYVLTLEDAQRFRHSRDVGPFLGLQPRQRDSGKSQPELGISKAGDGLLRSLLVQGAHCILRKGAPESDLRDWGLRHLGQGGKNAKRRTLVAVARKLGVLLHVLWANGVAYDPLYQRKAGEAAKAKAMAQAGAGKKGKAAA

SEQ ID NO: 232954 - protein, 331 aa, unidentified
MQSGVLTRALSLPDGGFMSKAIVGVDVSKGWLDIARADGSEVVRIANTQAAIAAWVLEARVDGLQLVAFEPTGGYERDLRDVLRAHGVVFVRVHPNQVVAFRKSRRIKAKTDRIDARLIAQFAAEELLRRGLPIAIAGDEALRELAARRRQLVDTLQAEKCRLAIARSAVVRASLTASISGLQASLEAIQVALLSHITANPELAQQHALLQTLKGIGPVSAMTLIAELPELGRLSGKQIAALIGLAPQTHESGKSSHRAATGKGRGDIRRVLFNAARCAIRHNHIMRDFYRRLVEQNKRAGKVALVGVMRKMLVTLNAIARDQQPWKHHDA

SEQ ID NO: 232955 - protein, 352 aa, unidentified
MLIIGCDFHPGFQQVAIFDNQTGEYQEKRLSHRQEAEQFYRSLAGQKVRVGMEACGHYPWFERLLADLGMELWLGDAAKIRASVVRKQKTDRRDAEHLQVLLREDRFPRIWVPTLEERDARQLLVHRHKQVQARTRTKNQLHALALSQGVQKKRKLWTEAGRAELEKLELLPYAAIRRERLLETLDRLEAEIAALNRQVEAEVQQRPAAVRLMTHPGVGPVTALAMVLTLGPAERFASGRKVGSYFGLIPSEHSSGGRQQLGHISKQGSSFLRFLLVEAGQSAARYDAELGRFYRRLAVRKHRGLAKVAVARKLATRLYRMLRENWNYAQLCKAVVQVSPSHSVEGRQKPSA

SEQ ID NO: 232956 - protein, 393 aa, unidentified
MSIIDRPNALAATAVENGIVAVSLELSRSKWLVTSLLPGSEKMSKHMVAAGDTAMLLTLLERRRRQAEAQVGGPVRVIAIEEAGLDGFWLHRLLEANGIESHVVDAASVAVPRRRRRGKSDGIDGETLLRTLLAWRRGEPRVCSMVRPPNPQEEDRRRVVRERAVLIRERIAITNRIRGLLMSQGVTDYQPLRRDRRERLETLVTGDGRALPPQTKRELMRALDRLDLLLQQLKAVEAERDAMQEAATEAAASEAVATDDPARLLLRLRAIGPQTAAVLTLEAFHRHFDNRRQVAAFAGLAPSPWQSGAVVHDQGISKAGQPQLRKAMVELAWLWRRHQPGSALSRWYAQRARGQDARRRRALIVALARKLLVALWRYVSAGVVPEGAAFKAA

SEQ ID NO: 232957 - protein, 416 aa, unidentified
MKGNEKSRGQERYVALDIHKEYVLAGGMNAAQEWTMPPRRVTMGQFREWAKKNLCERDAVVLETTTNVWDLYDIVAPLASRTVVAHAGAVRQIAEARVKTDKEDVKRLIRLLIADIVPEVWVPPVGVRELRGMISYRNRLMKMGTMIRNRLQSLLHKHNLRLPKGGLTDQTWWDEQTAVSAMEKLQIRQELAMLEQIEKCKGEVDVELGRQSMGESWGKQAVRLMQLPGIGVVIAMTVLSAIGEISRFESSSKLVGYSGLGAGVHDSGKEHIEKRITKSGRKELRWAMVEAAWRAVRMSPYWKEQYETYLRRMRKPNQAIVVIARKLLVAVWHVMTKEETDVHASEEDLAYKMLVLSWDLDEQVRLGLTYKQFAKYALMKLGIETDITRIVRRNVPRCLAPRAEVLARMEELGLTG

SEQ ID NO: 232958 - protein, 342 aa, unidentified
MQIATIGLDIAKNVFQVHGIDINERVVVRKQLRRRQVLEFFKVLAPCLVGMEACATAHYWARELMKLGHLVRLMPAKDVKAYVKRNKNDAADAEAICEAVRRPTMRFVQIKSAEQQGRLMLHRARDLLMRQRTQVINALRAHMAEFGIVAPQGRQGVKELLLIIAGGEDERLPVDAHASLVVLSAEFTALQTMIGSIEKRILAHHRSNEASRRLETIPGIGIAGATAITATVPDPTVFRSGRDFAAWIGIVPREDSTGGKHRLGPISKRGDRYLRRILVVGAVAVLRYARQNPEKYPWLAQLLARKPFKVAAVALANRMARTAWALLAKGGTYRAPALVAAA

SEQ ID NO: 232959 - protein, 342 aa, unidentified
MHKDDSDKQITYGKGIKIMDATLGIDIGKASFHVELSLNKKERHRRFNNNPAGFAELDAWLAKHQAGVVHACMEATGIYGDALAHYLFAQGHTVSVVNPALIKAFGQSELSRNKDDQPDAALIRRFCEKQQPRAWAPPLDYVRELRALSRHLDDLKATRQQLLNRQEGTRNKTVLKSLHKVVKQLETEIERIQQQIEAHIDQHPDLKQMRDRLVTIPGIGEVSATAILSELEQIQQFTSARELAAYAGLTPRNQRSGTWRGRTQLSKMGNARLRKVLFMPALTAMRSNTIIRSFCLRLAKRGKAKMAIVGAAMRKLIHMIFGVIRNGADFDPNIETTRNAAA

SEQ ID NO: 232960 - protein, 326 aa, unidentified
MQGKEASEQETGVKSTAGIDVSKSWLDVHVLPAGTTLRVANTREGIRKLKRWLTQFDLALVVIEATGKWHRAVRRSLHAAGVPVAVVDPFRVRMFAKACGVLAKTDRLDARVLAQFAAVMAPTVRAPASEVMEEVAELVTARASAVAEETALKNQLSAAIGIFLRRQLGRRIERLAKDIAALEREILKCIQADQALARRYAILTSITGFGPVVATTLIACLAELGTCSRKQIGMLAGLAPVADESGERQGVRVVWGGRPNIRRVLYLAALTAARFDADMKAFFNRLIAAGKPAKLAIIAVARKLVVLANILISEDRIWQPHTAKHA

SEQ ID NO: 232961 - protein, 460 aa, unidentified
MRGKRRGRPRRKHLQMQVVNPNAAGIDIGSEVHYVAVPPDRDPEPVRSFKCFTADLNALADWLDECGIETVAMESTSVYWIPLYQVLETRGFEVVLVNARHVKNVPGRKSDVLDCQWLWQLHTYGLLRGSFRPEDRICVLRSYTRQRDNLIKSAGAHIQRMQKALEQMNIQLHKVITDITGVTGMRIIEAILDGERDPVKLAQLKHRNNRSSHETIAKSLEGDWREEHLFSLRQEFELYGIFRQKIAECDRKIEACLSSFESKVDPDHKPLPPYKHGNKKPHGNQPDLDLRNPLYRMIGVDLIAIDGFDVLTVQDIISEVGLDMSKWPTDNHFASWLGLCPNNKVTGGRVKDSRSKKVVNRASCAFRMAAQAAGKSHSALGGYHRRMKSRLGPAKANTALAHKLSRIFYRMVRYGTKYVDPGLHYYEQKYRQRVLNNLKRRARLLGYELIQNPELRPAVS

SEQ ID NO: 232962 - protein, 297 aa, unidentified
MTTKSHRSILVLSSIGLDIGKDVLHLVGFDPSGTVVLRRKIKRLTLVKEFEKLPCCIVGMEACLSAHFVSRTLRGLGFSPRITPAKYTKPFLKGQKNDYNDAEAIAEAALRPNLKLVQEKTKDQLDLQALHRVRSRLVSRRTATINQIRAFLIEQGITVRTGARALRNSLFAILQNREDEISPRMSDIIVGLHEDWLWLDERIESTTNEIELISKREGHCQRLMTIPGIGPMISTAMVAAIGTGEAFDRGRDFGAWLGLVPRQYSTGGKPILGRISTQCPQRGISGHPATRRRMAAN

SEQ ID NO: 232963 - protein, 433 aa, unidentified
MGRRAKAPRTPQPKETKMKAWSQITHYAALDWARDHHDIVMVDRSGAIVTEFRIPHSTEGWKDFRSRLAPFPDLAIAVETNQGPAVEQMAAAGLQIYPVNPRSAKHYRDRKRPSGVKNDRIDAWSLADALRVDGHGWRPLVPEDPLVAELRILCRDEVSLIELRTSLVAQLRYTLHRYYPAALEAFEDWTYPTCWDFLVQYPTPGILAAAGPRKWRAWLTSHKFHFPAANEKRYEVFARATELQGCAATVAAKSLTAVSLAKVLRTLEAQLRDFRRQIADRFEKHPDHALFGSLPGAGPKMAPRLLSELGADRTRFPSADVLQCYAGTAPISYQSGQTDRTLMRRACNLELRQAVHIWASLSMRKSAWAYAYYLKHRKDGQSHSCALRCLGQRWLNILWKMWQSHTCYDPDLHQKNQLKHGSWVLKLETENTR

SEQ ID NO: 232964 - protein, 391 aa, unidentified
MLPTRLREQNESDKVLIKGDSMSVRRILAKTINTDLEYEAIGIDLAKNCVSVALLTTDGEVVCIDRLDYSELEKSAQVLCPTTFAMEPCTEMNYLVQKLEAWGHRCLVIGGKNVQNYVENHFSGQKTDLNDAQALAFLAQDTQLRTIKAKDMEQRKYASLTTLREQYIKQYRQTIVSLKGICQAWGLNISKGISGKARLKDLIENHAAFPEELKESLVDMVTHAQTAQKALNKITKTLEELAKNDKLCQLIWTIPGLGLICSCRLRATIGDIKRFKNPKDFPAYYGLVPRSIATGHNEKKGRITHRGDKTMRSLMVQGAGSVINMATRGKLKSKQLTKWILKKQKEKMPWGKLVCAVAAKLLRIVRAVLISSKPYNPQIAGVAKCSLPKGT

SEQ ID NO: 232965 - protein, 343 aa, unidentified
MEKRYIGIDLHRDQFTCCIRLENGRSYHSQWRLKDLPSFAKKLRPEDQVAVEITGNTRLFLDAVAPQVARVVVVDTNQFRVISRSVKKTDSNDARLLALYLSKDLLPEVRMKDKQHGQLASLTQTRDTLVKLRTALKNKVNNLLSARGMNLPKEALSSEKKLNEILALPLEALVQLELRVIVEQIRSLNKSIGELERTIADEGSKLEGHKSLISIKGIGSITSAILLSVIGKVSDFPDESRLASYFGIVPRVSNSNDIERSGRIHKRGSKLGRTALIQSALIAVRYSPYLKTFYERVKARRGAGKAIIALARKFLGIIYRTLKNKWVFEDFPNFVLAEPAEAA

SEQ ID NO: 232966 - protein, 400 aa, unidentified
MISVGIDVSKEKSTICILKPYGEIMSRPFEVCHTEKELSELTSMLLRLNDDVRVVMEATGIYHLPVLCYLKEKGLFAAVVNPFEMKEYRCQGLRRVKTDKQDAVTIANYGIDHWYRLREYEAEESSYAELKLLGRQYRHYMRMRVESVLELTHLLDYTMPGIKTLLKGWNETNGKEKLGDFVEEYWHYDNITKKSEEQFIEGYLKWAKEKGYHQSQEKAVKIYALAKEGIPTVSSDTPSTKMLVQEAVRVLREVDNTLMTILTQMQTLAKSLPEYPVVRAMGGVGNVLAPKLIAEIGDVRRFHSGKALIAHAGIDAPPYQSGQFIGTERNISKRGSSSLRKIGYEVMRCLKTHKEPEDAAVYRFILKKEKEGKSKRAAKIAGLNKFLRIYYARVMEVYQK

SEQ ID NO: 232967 - protein, 356 aa, unidentified
MPQKLNSRIAVIGIDIGKNSFHVVGHDKRGAIVLRQKWSRSQVETRLANMQHCLIGMEACVGAHHLSRKLQVLGHDARLMPAKYVRPYSKGQKNDFRDAEAIAEAVQRPTMKFVTTKSVDQLDLQALHRVRERLVSQRTGVINQIRAFLLERGVAVRQGYRFLRTELPSILAKRTDVLSPRMSHLLEDLAGDWRRLDERIEHLSREIEGLARQDQGCTRLASVPGIGPIIASATVAAIGTGDAFSKGRDFGAWLGLVPKQISTGDRTILGSISKRGNRYLRALFVQAAWVVLVKVGPKQWERYGLKSWIEAAKKRLHHNVLAIALANKLARIAWAVLNKGREFECMKAYVVAPPAA

SEQ ID NO: 232968 - protein, 449 aa, unidentified
MHGAHIGGQRAAAFFKLVADLDPRRVLLVGIDVAKATWFVVVSDLTGVVVADGVRLVADRAGLAELERVIAELRCRLAAELVVVGIEAAGHQHQGLTAHLADRDGLHVRLLNPGAVAAIRKQQGNRRRKTDWLDAAAVCELLARGEGTLVHLDASMAASLRPLWSGRKDLVDTRSRLRQQAGALVDCLWPGFSAADKQAGVSPVLCDLFKTKAGRVIAGLLAEGWTPARFTAAPTTQLQAIFAARGCRLTRPLASRLRARAAGALPAHPAATAGKAAALAGMLGVLDGIDAEVERLEARMAPLLAATEGAKLTQIRGVGVVTASGFVAFVGRTDRWAEWSKVWRAAGLDPARSQSGAKDARLGISREGSAWGRRALLDLAAAVCRQPGRWGDGFRARTTQGRKPAKVALAATGNSIGRTCFALMRSGADFDPAWETKRTRSSKVGDQAA

SEQ ID NO: 232969 - protein, 402 aa, unidentified
MRYFVGLDWAKLTHAVCVIDEDGEIVMRLAVDHTAEGLTRLVTALRRFGDPADLGIAIERPSGLLVDTLVEAGFVVYPIHPNVVKASRPRYSAALGKTDPGDAYLLADLLRTDGHRFRALCSVSDETRALRALVRARSDLVGARVGLANQLRALLESFWAGAVAIFGEIDSPIALAFLLEYPTPASAAPLGPKRMAAFLSGQGYCGRRSPDALLQRLRAAPAINLGPAEMEAKGTLVSSYATLLDTTVKQIRQLTSAIERAVMAHSDATVFTSFPRIGKLNAAQILAELGARDRFLSEEQLAGEAGVAPVTRMSGKHRAVTFRWACNHRLRAALTWWADNSRRASPWAHAVYLSARKRGCDHPHAIRILTRAWLRVLWRCWNDARPYALTQHHAAAALKQPA

SEQ ID NO: 232970 - protein, 335 aa, unidentified
MDKSHFCVGIDVGKEELVVAVDRGRPRVFGTSTAEIKRLGFWVLKQAGERSESGSCGQVHIGMEATGVYSRSVAAVLSLYQQFTVSVINPAQIKAFSRAMLTRTKTDQVDARVIREFVRSQSPCAWTPPQPVREQLSALVAQADAIRQEIQQWKNRQHAQQHHGDTPKTVTKSTAAIIRSLEREAQRLDRAIDQLCQTDTALTEDMALLTTISGVAVRSAAQILAYGGDSLTTRTRRQLDAHAGLVPAQRQSGTSVRGKSHLAKQGNARLRRALYMPTLVAVQFNPMLKRFYQRLLEKGKPKKVALIACMRKLLNIIRAMLIKRMPFNPNYQPLT

SEQ ID NO: 232971 - protein, 419 aa, unidentified
MNDQIAWNAITHYAGFDWAKDHHDVVVVDARGKIVQDLTFEHSAAGWAQWQAMVAAYPRLAVAIETNQGAAIEQLLASGVAVYPVNPKSAERYRDRKAPSGTKTDYLDAWSLGDALRVDGHGWRALKPLDPLIQELRLLCRDEVELISKRTELVNQLQAALQEYYPAALAAFDDWTAPSAWSFVQQFSTPELLQKAGRRQWEKFLHAHRLYRPELNEKRRQIFERAQAFCGRPAVTRSKSRLALALIKLLQTLESQLQAYRQEIQRLFNEHPDHDLFGSLPGAGGKLAPRLLSELGSDRSLFANAQALQCYVGTAPVSFQSGQTHQVYVRFMCNKSFRHAVHLWADLSRRSCAWAQVYYQQLRDRGQSHAAALRCLGQRWLKILWKMWQTNTCYDAELHTANQLKHGSWVLAIKSAATK

SEQ ID NO: 232972 - protein, 401 aa, unidentified
MKKFNPEQHRIETASALESVRTAENEGVYAAYVGLDVHKETIAVAVAEPGRGEPIYRGEIANKPKAVEKLLAKLSEAYEGGLLLFCYEAGPCGYVLYRQILASGHDCQVVAPSRIPKAPGERIKNDRRDALKLARLLRGGDLTAVWVPDQEQERMRDLSRARDDMKGQERKARQQLNAFLLRHGYHWPRGKSRWTPAHENWLAGLKMEHPWQQVVLEEYIAAERAVGERVAQLNDHLMRALPEWSLAPVVDSLIALRGIDKLAAIVLLAELGDISRFESPRELMAFLGLVPSEHSSGPRRRQGGITLTGNAHARRMLVESAWSYRFPARQTKHLKGKARHASAAAKKIAWKAQTRLCGRYRTLTRAGKNTKVVCVAIARELAGFIWDIVRREMPRLAPQQG

SEQ ID NO: 232973 - protein, 494 aa, unidentified
MLVIPLRKSVCPFGGDLCFGWLGSPRLYLYKPLGCVSAFWKWMPAGKDKYMKYQKVLTMLESIPYLSVGLDVGADFTWMSIMLPNGSLTGKPFKILHSDPASRDLAVTKIKEAQEMYSLESRCFLESTGIYHIPLLYFLRDKGFDCSVINPIITKNSTNMNIRKLHNDKFDSKKAAKVGLDASLKTSIVPDDSVIDLRNLVRDYYYFKDLQSAVVLKLNAELKVSFPAYLKVFSKITTQCSLKLLEAYPLAADMLAAKDEIVETIKSTARFGEKYALSKYDAIYAAAEDAAVFGRALKSNAVRIRLYISIYKEYQKHLDDLLVALHESVDKLQGTSVYGRIDLLQSLRGVGFLSAVVLIAEMGNFDLFSSPKKLYAYFGLDPAVKQSGKFNGDKVHMSKRGSSLARRILHMVSLNNLKVDKGTKAPVNPVIYDYYTDKCKSKKKNVAVGAVMHKICNIIFAILRDNKPFEIITQQEHCKRYAAKHPDKAGMNAA

SEQ ID NO: 232974 - protein, 351 aa, unidentified
MMIIGVDYHPSFQTIAFLMEETGECGEQELNHSDGQAEKFYRDLKQRGICVRVGMEATGYSRWFERLLAELGFEVWMGDPAEIKAKRVKKQKFDREDARLLRRLMLENNFPQIWVPGPENRDLRQLLWHRHRLVQMRTRIMNQLQALAMNEGYRWKKKLFSEQGRAQLEKLALAPWASRRRQELLELLDRMNPTIEELTSAVEQEARKRPDVLRLMTHPGVGPLTALAFVLIIGTWERFPRGKQIGNYVGMIPSEDSSAGKQRLGHISKQGNSLLRFLLVEAAQAAARIHPDGRRRYMHLAMRRHQSIAKVAMGRRLAVRLYWMWRNGCEYSQSVEFGSYAGQLGTGHGVK

SEQ ID NO: 232975 - protein, 338 aa, unidentified
MAIVMGLDQHRAQITAEWLDTESGEIGRARVSPADRDHVRRFATRFAGRRVEAALEATTGWRFVVEELRAVGAEVHLAEPAETAARRGNKKRAKTDRADARHLRELLMIGRLPESWIPPDHLLELRAKVRLRHTLVDQRGEWQQRIQAALYHHGFPQRAGLLRASNRAWLETLELPASAREQIAVALQMIDALDAQSAPMTRELRLYARRQRGCRALMGHYGIGELTAVTILAELGDARRFSSSRHAVRYAGLDITVHQSDQRRAPGHLSRQGPPALRWALFEAAQAARRPGSPDRGYYDQAAERLGGNRACLALARKLLKRSFHTLRELGEDALAPA

SEQ ID NO: 232976 - protein, 342 aa, unidentified
MDYFAGLDVSVKHTSVCIVDDTGKIRREVRVASEPDALLAVLRDRSYRFKRIGLEAGPLSQWLFSTLAEADLPVICVETRHMRAVLKARINKTDRNDARGIAQMMRVGLYRPVHVKTLRSQKLRMLLTHRKLLQSKAIAIENDLRGTLRNFGLKVGTAARTRFEARIKELVEDMPDLAALVEPLLVVRRVLREQMAVLHRRLLTVVRDDEVCRRLMTIPGVGSVVALTYRATVDVPARFRKSKSVGAVFGLTCSREQSGERDRSGAISRCGDEMMRTMLYEAAQIMLVRSTQWSWLKAWAMQIAKRRGMKRAIVALARRLAVIMHRIWVDGTEFRWTREVTA

SEQ ID NO: 232977 - protein, 409 aa, unidentified
MYDKTKYIYVGLDLHKEQHTAVIMDCFNEKLGEITFENKPSEFTKLITKCKKHCTDSKGIVFALENSYGYGRGLAAWLIERDYIVKDVNPALSYAYRKSVPQYKKNDSYDAQCVARVAINELNKLPDAMSEDMYWTLSQLVNRRANLKTHHIRLKNQLHEQVCVAYPSYKQFFQDIGRPTALYFWEHYPSPRLLRGKTVEELAEELIPVSHNQFSTRKCQIILDAVKADGDTTRDYQPERDEITRGLVKDVRHYVEQLEAVDKSIADFLPRFECPLNTIPGVSDTTVAKLLSEIGDIRRFPNADKVANFADIAPVNFSSAGKGDDKHSKQGNRRLQGTIYFLAIQMIQLSSKGLPRNPAFYAYYQRQLARGKTKPQALILISRRLISIIYGMLKNKTEYVMPKVQDNLG

SEQ ID NO: 232978 - protein, 341 aa, unidentified
MDHVGIDVHKKDSQICIVAEGGELIERRVRTEVGRLAEMFEQRPHARILIEASTDSEWVARCLEGLGHEVVVADPNFAPMYAARRRTVKTDRRDARALADACGLGAYRPAHRLSDAQRHVRGRLGVREALVRTRTRYISLIRARLRQDGWRVPTGSAEGFGRRVLALRLPGRLLSEVAPLLAVIRHGDRQLAYADERIAAFTATDPRVRRLRSVPSVGPVTAAAFVAALDDAQRFRRAHEVEAYLGLVPQEWSSGETQRRGRITKAGSRRVRWLLIQAAVSLRRLRDPRTAGLREWAERIAARRGRKIAVVALARRLAGILFALLRDGTVYEARRQPAVPA

SEQ ID NO: 232979 - protein, 362 aa, unidentified
MSVYVGIDVHRKRSQVAVVDEHGEVLKNRNVTNGVETILKLIGEYPTHTPVAFEAAFGWGWLAELLDDYGYEAHLVHPTRCKAIAAARLKNDKVDAETLAQLLRADLLPEAWIAPPAVRQLRALLRHRVGLVRLRTLLRNRIHAVLADHGQDRPSGVWSGPGQDWLASLELPAISRLVVDDCLAVIDGLQPIIDSLDVRVHEHAKADPRVKVLTQLPGVGEFTALVMLAEIGDIHRFPTARKLASWSGLTPTVRGSDTHVRHGHISKQGSVWLRWILIEAAQTAKRNPAFAETYRAMSRRRGKKIATIAVARKLLTRAWHLLHDADRAAETSAGSTPRRPTATSRSTTNGRVTSPGRARKIA

SEQ ID NO: 232980 - protein, 335 aa, unidentified
MTKEDFIYVGIDLHKETHTAVMIDCYNNKLGEITFPNRPADFPKLVTKVKKCNTDAKEVVYGLENAYGYGRPLAVWLIDKRYFVKDVNTAISHRQAKHRGAMYRKSDSDDAEAIALATLNMLDKLPDACPNDAYWSLGQLVHRRDNIMKQRTRLVNQLHEQLCIAYPSYKQFFNDISRPTALYFWEHYPSRKYLKGKSVEDLRAELVPVSHNKCSTKTCEKILDAVASDKVKNNAYQDARDMVTLSIVSDLQHYDSQLTEVDKMLEQMYKMLGCTLTTIPGVNVITAVKILAEIGDIKRFSNANKLAQFAGIAPLHLSSSGKGKDVATKQGNRRL

SEQ ID NO: 232981 - protein, 341 aa, unidentified
MEEYVGLDVSMKETSVSIRRAGERIWRGKCASDPRIIAELIRKRAPAVRRVVFETGPLSIWFYHSLRTEGLPAICIDARHAKAALDMATNKTDANDADGLAQLAEVGFFREVRVKGFDSMLTRTLVAARTRLVRITTELSNQIRGVMKTFGLLVPAGKGSIFEKNVRSLLTDQDGLASIVLPMLEAWRGIRIRAAELGRQLVRDARQNQACRILMSIPGIGAITATAFTTAIERPDNFKKSRSVGAWIGLTTRRYQSGEVDYDGHISRRGDAHLRGLLYEAAAVILTRSSTDSTLRTWGLKLRERIGFKRAAVAVARKLAVIMHTMLKTGELFNPNAGAIA

SEQ ID NO: 232982 - protein, 410 aa, unidentified
MTMLEVALDPATVIVAVDPGKVSNRVWVSDGSGLLVDPLSLPVAREGISRLERLLVEHAAVDPVIAVEATGSLHRSWVVELEHRHPGSVRLFAPSETKAARIQLGSGRFKTDDRDCAALTYLARQGAGRLHADVSAVDALRAAVRHRRGLVADRRVAQQRMHDQLNALCPGLSAPAGHGRSLPLDSPTGLAVLACAAAFAGRPPRLQSLICRAPGRLTTSTAQYWVQRWRGCLPPPADAEQRARRLGRDLDRYRRLQSDIAAVDEEIVGLLAATDGQILTTLPGVGTIRAAAFAAHSLPIERFPDAEHLYSATGLAPALYQSATLHRRGRISRQGLAEHRDALMGIAWGLSQCSPSFIARDTELRARGMAPVQARVAVARHACRLVYRLLRTQQPFDEQRYRRGRLGRER

SEQ ID NO: 232983 - protein, 340 aa, unidentified
MEKRYIGIDLHRNRFTCCIRLENERTYVTEWALEALARFVKKLRATDEVAVEITSNTRLFFDAVAPQVKRVVVVDTNQFHVISRSVKKTDPNDARLLSLYLSKNLLPEVRMKDKDLAQLASLTQTRDTLVKQRSALKNKVNNILSARGLNLAKEALSSEKKLAEVLELPFDEIVRIELRVVVEQIRSLNKSIAELEKTIGEEGSKLEGHKGLSSIKGIGKITGAILLSVIGDVNDFADEGRLASYFGIVPRVSNSNDTERSGRIHKRGTKLGRTALVQAALIAANYSPYLKRFYEQVKARKGAGKAIIALAHKFLGIIYRTLKNKWVFEDFPNFVLAEAS

SEQ ID NO: 232984 - protein, 350 aa, unidentified
MTNITTIGIDIAKRIFQFHGVDKNGKAVLKKKLMRDQVLTFIANLPKCLVGMEACGGANYWAREISKLGHEVKLMAPQFVKPYVKTNKNDQADAEAICEAVSRPNMRFVPIKSIEQQDILSIHRVRARLVKNRTALANEIRGLLHEFGMIIPQGINKITSKLTEVLDGGKLSPISQQTFSDLKEEFIENDKKIKCLESRLKIMASELDKYQQIIAIPGIGLITSTALIASIGNGSCFENGRQLSVWLGLVPRQASSGGKEKLLGISKRGDIYLRTLLIQGARAVLNTKLRFTTESQKAKKDYSKFTQWMFNLHDRGGHNKTVVAVANKLARVVFAVLSSGNDYVENKVCS

SEQ ID NO: 232985 - protein, 331 aa, unidentified
MDEMRRFVGIDVAKAALDVFLGCAGTAFTVANDEVGIRDLVKQLMPADFVILEATGGLETPVASALAAAGIAVAIVNPRQVRDFARATGRLAKTDRLDAEVLAHFGEAVRPAARPLADEQAQALEALVTRRRQLVEMLTAEKNRRARAPKVLHRNIDEHIRWLEKRLSMFDDELGELIRNTPLWRERDELLRSVPGVGKVLSSTLLAQLPELGMLNRKQIAALAGLAPFNRDSGSMRGSRCIWGGRAQVRRVLYMATVAGVRSNPTIKTFYLRLRANGKHAKPALIACMRKFLVILNAMLHHKTHWQTPALASPTSSFSPLLGAVTEHGCC

SEQ ID NO: 232986 - protein, 477 aa, unidentified
MIRSVGIDLSRSSSHQVRCLDEQARPCDSFSFDSTLEGLEKFEERVFSDGAAPTIVFEPTGLAWIPMAVYLRSRHPECRLVKARLQKVAALRRYLRSHTKSDRVDGITLAKMPFIDAEQLDEAYLPPAEYHALQRLTRQRERLMKSITIRKNRIGSIINGYLPGLRKAFFNEWSERARSFYRQRLNPFAVVRDGKRELEALLLSIKAKGALAECHRVYQACQKLVELYERSKAAGMINEEFFDDLQDEIACELRLMETEEAEVERVSDRIEEIYRHLHPSDHLRTIPGIGVRTAQVFLALVGDPHRFRSQAAFANWTGVVPGASQSADTEGKGLRMTKAGPAMMKRALFQAGDIARRYDPQLAHLYYREMVHHGKTHLQAMGAVMSHLAARILAVLREDRPYELQDTEGRLITDRGARELIRSEHKVPEETRQARRRRKSNQGRLTDRRTREAAKLLSLGQSYLPGEQCTALRNCNQ

SEQ ID NO: 232987 - protein, 403 aa, unidentified
MNNVAGIDVSKGKSMVSVLRPFGEVVAKPFSIGHTGSELKELADYLKSLDGETRVVMEHTGRYYEPVARFLHDEGVFVSAVNPKLIKDYGNNTLRKVKTDKADSRKIARYGIDNWAELRQHTPMDTIRMQLKTLNRQQSLYTKTKTMMKNNLIALLDQTYPGVNALFDSPVREDGSQKWVDFATTFWHVDCVRNMSLTAFAERYRKWCKRHGYNFSQSKAVEVHAGAQDLIAMLPKDALTKTMVRQAIDALNAISASMERLKAEMQALAAQLPEYPVVMAMHGVGDSLGPQLMAELGDVTRFTHRNAITAFAGVDPGADQSGTHEAKSTRVSKSGAPELRRALFLVMDCLLKTQPQDDPVYRFMDKKRAEGKPYLVYMTAGANKFLRIYYGRVKEYLASLEGN

SEQ ID NO: 232988 - protein, 406 aa, unidentified
MKQIVSVGIDVSKGKSTVCAMIHPNTIIKESFEVLHTVEEMSMLADYIGSLDGEIRIVMESTGHYHLPVAQFLYQKGFFVCVENAYIIRQFSRIMLHGAKTDPLDAKKLAKYGLAYWSELKPYKFHPSCYTELSLLSKQYQTYIKLLIAAKQNVIHLMDEMLPGFKEALDTASSVQFSKVKYVDFAKEFYHVDMIKSMGKEIFRENYKQWCKEKGYRFQSEKADELFHLAEDGIPTLPTKFPSTRLCMEVATEQVSQLGYALEQILSQMQNLAKTLPEYQTIRQMGGMGEKLCVRFIADIGDVRRFHNGKALVAYAGIDAPPYQSGQYTGTKRRISKRGNSALRKTGYEVMKSLKSHPPKTDTRVYDFIIKKENEGKSKKQAKIAGLNKFLQIYYARVMEIYKNIV

SEQ ID NO: 232989 - protein, 389 aa, unidentified
MSQFFDASRSLTALEQDSTIIAAIEMSQSKWLVAAVVPGVERQPLKKLNADEEALLKLLHRWRHEAGLAGRQIKRIVVAYEAGRDGFWLARWLRARDVEAYVIHPTSVAVSREHRRAKTDRLDTELLKRSFLGWLRGEKRHCSMVAIPTIEEEDARRPNRERGNLVTEQTRIVNQIKAILTRFGIRAFRSTRRAVEEKLERVRTAEGTPLPENTRAELRRHLARLRVVREQIRAIEQERLRKLAATPAGEKGPHLMVRLIARLLGVGVETADMLVNEILSRHLRDRKAVARYAGLTGSPDESGRRRRERGLARAGNARVRCGMIQLAWRFLRFQKDSALAQWFHARTADGRGSTRKTMIVALARKLLIALWRLVTTGEMPQGVVLRPAS

SEQ ID NO: 232990 - protein, 368 aa, unidentified
MIMSSLWLLKPFPPYMEFTMIARSDAACFVGIDLHKDTLTACVVRRTDREVSYKKIACKCREQIRTFFSSLPRPSVVAIETVGFYRWLWTELEPLADQLVLCDARGARALAGRRIKTDREDALNVALLLADGRLPLAWAPPEQVQLLRNWTRHRNGLTRQHAKMLHHVKSILHRLNFAGPVRLDAAALQRYLLASVERFCADDLTMLWQHQRRLVEIEQDRAQSERRISELMRAAEFAGLRGILESVPGVGLVTSATVIAEIGDFSRFADSKAIGRYAGLAPTVYASGNSNRLGHISKTGSPDLRWVLQQAAWTAIRCDAAFKKTWLRIAKTAGKKAAAVAIARKLLVLMWTLQRKDEPYKSREPVAA

SEQ ID NO: 232991 - protein, 385 aa, unidentified
MSQFSESTQPALDYNSTIIGALELSEKKWVLAVQLPGVIRHSRHVMDAGGDELAAFIERLKARCAAAGRKIARVILTHEAGRDGFWLARFLGRRGIEVQVIQPSSLPVDRRARRAKTDIIDVEMLLRTLMAWLRGEPRVCSMVPIPPEADEEARRAHREREDLTGERRSIVNKIDGILATLGVKGYKALRRDRREQLTSLRQPDGDPVPPMARARIERLLDRLDLVLKLIEQVEAARDAVLTKEAPVDDAEKMIRSLTKLRSIGPDFATLLVREAFVRQFRNRRALGGYVGLGGTPFSSGGSEREQGIGKDGNRRLRAAMVELAWTWLRWQPDSALSTWFRARAGKIGGRVKKIMIVALARKLLIALWRYVKDGVIPDGATLKAA

SEQ ID NO: 232992 - protein, 371 aa, unidentified
MNSILYVGMDVHKESYTLCCYSFDRDTVEYRQTVPSDYRLILKYLEQVRRKYPEEVEFICGYEAGCLGYSLYHQLTDHGVKCILLAPTTMGITYTNRVKTDRKDAANIARCLAFHSYSAVYVPDGEDNAVKEYLRMRDDQKLALKKIKQQITAFVLRLGKQYTGGKSLWTENHLKWLRGLDLTLLEKETLQEYLITYDYLTDKLERLDARIEELARNERYGERVRRLGRFIGIKPHTALSLLVEVGDFRRFEKAPNFAGFLGLVPGEDSSGGGRNRLAITKAGNSHLRRLLVESSQSYSRGTIGFKSKELKKRQEGNPPEVVAYAGRANERLRRRYYRMTLKNGAKRNVAIAAVARELACFIWGMMADEIA

SEQ ID NO: 232993 - protein, 344 aa, unidentified
MEQIIRVGMDTSKSVFQLHGVNAAEQPILRKKLSRKEMVKFFEKAPPTIIALESCGGSHHWARLLSSFGHEVKLIAPQLAKPYVKRGKNDAADAEALCEAMSRPTMRFVPVKSADQQAALMLVGVRERLIRNRTQLANAIRGFAMEFGIVAAKGMCRVEPLLERIAADQSLPELARELFAMHGEEYRNLLAETRAIEEKLMALHRSDECSKRLADIPGVGPVGASLLMMKTPDPGMFKSGRDFAAWIGLTPKDHSTAGKVRLGVITRAGDEMLRSILVVGATALLQHVRAGRSRHASRWLIELLQRKKPKLVAVALANKIARIAWKLIVSGETYRRQEGQTLAA

SEQ ID NO: 232994 - protein, 438 aa, unidentified
MQVVYRRCGGLDVHKDTITATVLVFGEEGQRDVRKQEFGTHWKELQRLGKWLRACRVERVAMESTGVYWKPVWNVLEKSLALVLANPYQVKNIPSQKTDRRDSEWIADLLAHGLIRPSFVPAPEIRQVRELTRYRVQLTGERNRVHNRIHKVLEDANLKLDTVLSDLLGVSGRAMLRAIVNGHCDPGWLADYARGSLRGKREQLELALRGDIRDHHRYLLGELLADLEFIESKILRLDQELLARMQPHQDAVNRLCSIPGVDILTAWTLLAELGPDVTAFPDAAHAASWAGLCPGSRGSAGKRLSSRTRKGNRWLRRALCQSAWAVTRNKNCYLTAHFYRRAAQHGVKKAIVATAHQLLIIAYYLLRDRTFYRELGGDFFDRLHPLRTQNRLVRRLQRLGLQVVVRPQPPTPEPPPSTCRRGRPCKCSERGIDCKHKH

SEQ ID NO: 232995 - protein, 379 aa, unidentified
MDRAITDTPAETILHGALELSKNSWLLALQFPDRVQPSLYPIGGGDTVGLMAKLTAARDRWAKMSGKAPSIMLCYEAGYDAFWLARFLKARGIECVVVDAASMQVNRRARRAKTDRIDVGMLLRALIAWSQGDRHVWSVVRVPNVDEEDLRRSHRERDRLVRERTAHINRIKGLLFGQGIRGINVKSKYKTLQIDKLVTGDGRPLPPRLASEITREIARLALIQEQIATLERERDQAPTPCKATEKKRLQLVSLNGIGPAIAAVMTREVYYRQFENRRQVAGFLGLATSPHDSGDVERSQGISRAGRGHVRGTMIQAAWLWLKHQPKSAITRWFAQRTAGQSGRIRRIMIIAVARKLAIALWRFLEQGLVPQGAMLANR

SEQ ID NO: 232996 - protein, 403 aa, unidentified
MIFVGIDWAEEYHEACLLDEQGTALGKRRVADDLAGVRQLQELIAEHAEDPGQVVVGIETDRGLLVRFLLAAGYQLYAINPLAVDRYRDRHATSGAKSDTGDAKLLAELVRTDRHNHRPVAGDSEQAQGIQVLARGHQNLIWSRQRLMNQLRNALREFYPAALAAFRGNLGGADAIALLEQAPTPTRGRSLSQAKIVSALRRAGRQRNLERKAAEIQAQLRAPQLETSPALAEAYGHTVSALVLIIKQLNQQLAELEQQLNASFEMHPDAEIYLSLPGLSSILGARALGEFGDDRTRYSDAKARKNYAGNSPITKASGTKKVVLKRFACNHRLADACHLWAFCALSSSPGARRYYDQLKARGKTHHQALRALANRLVGHLHGCLEHHQLYREDIAWPPQAAAA

SEQ ID NO: 232997 - protein, 324 aa, unidentified
MYKSKQFIGIDISKDNFDVWFPEKGHLCFENTLKGFRSFSKSINPSNTWCVMEATGSYYQQLAVYLYSKNILVSVVNPMVIKRFIQMKLQRNKTDKSDSKMIYMYATEQQLQAWKPEPDYIVQCKLLNSSIEIYFKQSTALKNKLHSLQSQGFTTGSIVRSLKRQLKSITKEIALLEQEKEYLIKQNAGQMLTNISSIPGIGKKTAILLIANTNAFYSFENHKQVSSFFGIAPTERTSGSSIRGMSRISKTGNPAIRISLFLCSFSAFKTNAQCKTLYSRLVNKGKSKKLALIAVSNKLLKQSFAVAKSGIPYDPNYKSRLTIQ

SEQ ID NO: 232998 - protein, 429 aa, unidentified
MPYRIAGIDVHKKMLAVVVSDVEIDSEYEFERKKFSSNPEQLRSLAAWLLEQEVEEVVMESTAQYWKPVWEALERYWKPICEKREGARRKSGALHLAQALSNRGRRGRKRDFPDAERLVKRLVAQELTLSFVPDVEQRLWRTVTRKKYQLRCDRIRLQNQLESLLEEAHIKLSSLVSDLLGFSAQRMLKAIAEGETNPATLAALADKHLRATPEQLCDALGACTQLNPVYRRLLNLALEELRLIDDQIGRLDREMASLLGEHQDAVQRLAEVPGLGVDSAQQIIAEVGPSAATFPSQKCLSSWVGACPGDDETAGVNHSHRSPKGNRHMRRLLNQAANAAARTKGSIFEIVYRRSVPRLGHNQAIVAIAHRQCRLIWLILHQGVRYEERGPAVTKRSKQLRTWKMIRQLRSLGYRIEPPNPQSSQAQAQ

SEQ ID NO: 232999 - protein, 338 aa, unidentified
METYAGIDLHSSNNFIGVIDAKDKRLYSKRHDNRIEDVLKVLGQFKASLQGIVVESTYNWYWLVDGLMDQGYTVHLANPNAIQSYNGLKHTDDKWDSFWLAHLLRLGLLPEGYIYPKHQRPLRDLLRRRLMFVRQRTSQILSLQSMITRNRGLNFSGAQIKRFRDEFIEKLFSDRHLVFTAQRNMETIRFLDRIDGEIEQEVASQIKIKKEFIKLLTTPGIGNILGLTIMLEVGNIGRFAKAGNYSSYCRCVESKKTSNGKKKGENNKKNGNRYLAWAYVEAANHAIRCCPKAQKFFQRKLAKSERVLATKALANKLTKATYYIMRDQVAFDEDKLFG

SEQ ID NO: 233000 - protein, 348 aa, unidentified
MRIIGCDLHARQQTLAMLDTTSGEIANLTLLHEANQVREFYSSLPRPVLVGIEAGGSMPWFLNLMEELGIECRVGHPAQIRAAEPRKQKHDRRDAELILKLLAEERFPAIWLPSQELLDLRALLLHRHQWVRMRTRIQNALQAIALAHGLRRGPGLWSNDGQEKIALLPLMPHTAHRRSTLQTMYQTIESEIEQLTRQVAEQAESRSAARQLMTHPGVGPVTALATEVFLGDPKRFADSKALASYVGIIPREYSSGGQQRLGGVTKQGSPLLRFLWGEAGAHAARRDPELKRFYRRKLVQKGLGKARVAVARKLGIRLWIMLRDAIDYPEFCRRGQRQASGAACGGDA

SEQ ID NO: 233001 - protein, 381 aa, unidentified
MTAAVSSTFVPRDYDIFVGLDVDQRSMAITFTDHGTMQKSLKLPYSAEPLLNYSEKHFPGRRLAFVYEAGPTGFGLHDELRAANQFCLVVSPAMVPRAARKKVKTNRLDSKQLSEGLRGGQLQGIHVPAQSYRELRHLVQLRDTQVAQLKATKQRIKSLLLYESLPFPGAAGKWTVPALRALERLPCNATVRFKLDQLLDSLQFHYLAAAKVQKQIRRFCQNDAELRQCVGFLASLPGVGSITATHALARLGDWRQITDVRQIAGFLGLVSSEHSTGDKENRGEITRIGDKRLRSKLIQCAWIAIRKDPELRSFYRRVYERQPQKVAARKAIVAVARKLTTRMYAVLKQQRAFEIRADISVAPLTKEETTGLGERLDVNQN

SEQ ID NO: 233002 - protein, 343 aa, unidentified
MDHFAGLDVSVKETSICIVDDTGRIVREVKVASEPEALLAVLANPTYHFKRIGLEAGPLSQWLFSALAEAGLPVICVETRHMRAVLQAQINKTDRNDARGMAQMMRAGLYRPVHVKTLRSQKLRMLLTHRKLLQSKAVAIENDLRGTLRNFGLKVGVVGKVRFEARIRELVENLPDLAVLVEPLLIVRRVLREQIGILHRRLLAIVRDDDVCRRLMTIPGVGPVVALTYRATVDVPARFKNSKAVGAVLGLTPSKYQSGEINRSGAISKCGDEMMRVMLYEAAQVMLTRTNKWSWLKAWAMKIARHRGMKKAIVALARRLAVIMHRIWVDGTEFQWTREAAVA

SEQ ID NO: 233003 - protein, 424 aa, unidentified
MFERKCGHFGSQRGRQYVMTPKFVASWIYLYTMNWKHINGNRDYRIQIGGHYMNYNTVYVGMDVHKESFTLCSCKYEDEKASHYQRTQASYKNVLRYLEFLRTIYGDDTRFVCGYEAGCLGYSLYRQLESFNVECVILAPTTMLEQRSKRRIKTDKRDAEIIARSLAQHNYSPVHIPTETDNQTKEFIRMRDDHKAELKKIKQQILSFCLRQGYQYDGSGNWTAKHVKWLRSLKPAGLYKEILDEYLLTYTILTDKLNRLDHRIEELASKEEYKESVSKLTCFLGIRTHTALSVIVEVGDFQRFASARKFAGYLGLVPGQHSSGDDRNGLGITKAGNTHVRRLLTESAQSYTRGKIGYKSRVLRLRQAGNSPQVINYADRANERLRRRYYKMVLKDGKKYNIAKTAVARELACFIWGMMTDNIY

SEQ ID NO: 233004 - protein, 341 aa, unidentified
MKVVYQTCCGIDVHKSFLVATIIKTTSGVQPSYQKKRFSTFNNSILEFKQWLLDNSCRDVCMESTGKYWVPVFNLLEDEINVTIANPKWVKAVKGNKDDTKDSKWIGDLFRLGLVPGSYIPCKPIRILREFTRYRYKLTSCRSSEKNRFQNALTVCNVALDSVVSDIFGKSATSVIDYLLKQPDNSINHEEISSRLLRSLKKKSESVIESIEGYQMTDAQKYRMRLVHAHMDYITSTISDIDSMIDSLVEPYENAVQLLCTIPGVDRNSAITVISEIGTDMTPFSNSKRLYCWAGLTPCNNESSGKKRAIIAIARMILTAIYVLMKYGIRPIYTRLICLNL

SEQ ID NO: 233005 - protein, 408 aa, unidentified
MDRLIERCCGLDVHKTSIAACVRIPGPEGERVQHVRTFGTTTVQLLALRDWLEAHGVTHVAMESTGVYWKPVYYLLEDRFECLLVNAAHLKHVPGRKTDVQDCVWIAQVLEHGLLRGSFVPPPLIRDLRDLTRYRASLGEERSRQANRLHKFLQDAGLKLSSVASDILGVSGRAMLEALVHGTTDPAVLADLARGKLRRKLPALREALAGHFRAHHGFLVGQLLAHLDFLDESLETLNGRIDEMLAPFAETLDRLDGIPGFSRHTAEDVVAEIGLDMAVFPSDGHLASWAGLCPGQNESAGKRRSGRIRKGNRWLRRTLVHAAHAASRTKDCAFAARYRRLARRSEKKAIVAVAHALLVTVYHMLTRGTPYQELGANYYTRQNLDRLRRRAIQTLESQGYRVTLERVA

SEQ ID NO: 233006 - protein, 455 aa, unidentified
MKVKKVSALRNKRGLHRGNGAEPPVVGLTPQTTEIRKTDTMKTYILRQPKAVEPQKSVRSPRPNPAAPATTGVLLGRPDATAKGPFLFIGLDVHNDSIAVSLAPSDSAEVRRYGIIGGEHEDVLRLAKKLAAAHPGTTLKFCYEAGPRGFALCRCLQTHHWNCILVCPSKIPRKPGERVKTDRRDADDLARLYRAGELTGIYVPEPEDEAMRDLLRARFQVGRQQHRARQQLKMYLLRHNLRYTGATAWSPAHLRYLAKIKMPFPVQQIVFQEMLGVITEATARLERYDAEIERAVPGWRWAPAVRALMSLRGMALLHAATLVAELGDFNRFDHPGQLMGYLGLVPSEHTTGKDRQQGGITKMGNAPARRALVEAAWQYRMPARLSPHLQKRQEGLPKAITDMAWEAQRRLHHRYTHLTRVGKKKSQVAVTAVARELTGFVWAIARQVKPVPAQT

SEQ ID NO: 233007 - protein, 446 aa, unidentified
MSHRKQAPSRGVARRNAKLRELRRLVARSRAILAVDLASGRQAAVVLDHDSVVLARRMFTGSAWCISEILAWAEPIAAKAGFAGLVLACEPTGHRWKPLVVTARAAGIPAVCVQPLLVHRAREGEDFTRNRSDFDDAVIIGRLTAELRCYVPYLPEGPWARLRHLGARRAELLVRATAARQCLRDLLECAWPALLATAARPLDSATWRAALAISAHPETIAAMSEQEFLAALQAQVKAAGGRRICRRVARAIHAAAARPGGIAAERDAALERAGFACQDWMTALAATAEVEAKMVAVLDDLHLTHLVATIPGLSAVSAAAILAETGDPARYDSPRTWVKHAGLAPRANESGTFRGQTKTSGRGRPGLRTAAWRAIWGALPHNPVWHARRDALTSRSSNQLHDGQARAAAAAALLRQLFVVITKRVPWDPAIAAGTTAPGEVTASAA

SEQ ID NO: 233008 - protein, 311 aa, unidentified
MYYIGIDVSKKDLSVFDGKDLNFINKEGLKSFKKYLKKKYRLSEIAIIFEPTGIYSQYLKEFCAENSIKAYIINPKQSHNFARALGIRPKNDKIDARTLYKFHKLIDLKDIKVPKIDQQAKTLSGYLVSYEFALKQRVALSNHLESLRDKELIALMKKDLKRAKKLEDKLFHDILEYVRQNQNLKEDYQRLLTISGVGDKTAIALLTLFKTYQGTNRAQITALAGLDPVKRVSGTSVKHKVKISKNGKGIYRKIFYLPTICATVHNQKIRVFYQRLLANHKIKKLAIIASMRKMLLIAHAMYRDKTEYVSA

SEQ ID NO: 233009 - protein, 360 aa, unidentified
MGNERTFVGLDVHARSVTGHALDAVTGEVWQRKLCPDPGEVLRWVSGLPGPVKVGYEAGPTGYGLYRCLNDHGTRCVVAAPSKLHRPHGDRVKTDARDAELLAHLLKLGEIVEVNVPSVEQEAARDLVRAREDARGDLMRARHRVSKMLLRQGIVYSGGDAWTKVHDSWLRGQRFDQQSRQLAYDSAYEAMVLTVDRRDRLDRAIDEMAANSSYTPVVRRLGCLRGISTLTGFALAVEIGDWHRFTSVTIGAFVGLVPTESSSGQSRSQGSITKTGNTHARRLLVEAAWHHAKPYRVPGKTMRDRWELAPPAARVRGHEGNRRLHQRWQGFNARKKRPAVADVAIARELAGWAWSLAVLE

SEQ ID NO: 233010 - protein, 598 aa, unidentified
MQLRLGIDIACRAPHQASLADESGRFVFTGHRFRTIARELEELWSMLPTETEAGDVTVVMEPTRNAWVALAAWFRRRGARVVLVPPEQSADLRAYYSKHTKTDRVDSRLLARLPLLHPEGLHEEHGLGPGHPMRRATRLRQSLVKRRSKSLSRLDALLEILGPSWLAALGSDLANKTPLRFLAAGYACPLTVRRLGLGRLNRFIYRHSRGSWGQEKAIELWDAAEETLALWADELDFGELAEDIAVEARLALSLTEEIVALDERIAVQFHEADPQGILVSVPGVGAITGAQILGRLGDPARFRSLAGVRSFSGLVPSLDASGLMGKHGGPTKRGDACLREAIFIAADHARRIDPTLAARYHRLMVSSGKHHNSAVCHVASTLLTRIVACWREGQPYALRDVDGRQVSLAEAKRIVAERYTVPNELRRARLTNTAGRRGRTGRRSKESQSAPSASPSTGHATATARTSSPRAVRDGKASRRRSIATPGTSSTPSEIAPMHAFGDSTDARPTQPRTPVLGSRCGLTHSGIRSATPTRRAHWTSRSRAGFLVRPAAAVVPWPTSPETTRLPTGRGRTSDTQRSRPRPRRPRRWPRPVPSAR

SEQ ID NO: 233011 - protein, 449 aa, unidentified
MRKPQEIEDEEYEQVVERVAAVDVAKAAGMVCTRVPHPSRPGRRRTRVWEVDATTNAILELGEHLAGEGIEKVTLESTSDYWRIWFYLLEAAGLDVQLVNAGDIKNAPGRPKTDKLDSVWQAKLTERGMLRPSFVPPGEIRQLRDYTRLRADLTRERTRHYSRLEKLLEDALIKVSAVASKLDAKSVRDMLEALIGGERDPQVLASLARGRMRAKHDRLVQALTGRFDGHHAELARMLLDQIDALTGQIGKLTTRIEELIAGIPAAQGVDPDGTTGPAAGRGGGAPVLPVVDRLDEVTGIGREAAQAIIAEVGLHMSVFPTAGHLVSWAKVSPQTIQSGARSRAGRTGKGNPYLKGILGEAAAAAGKTDTFLGERYRRLARRRGKLKALVATARSILVIVWHLLADRTARYQDLGAGYYASRIDKNRKTRTHIRQLEALGYTVTLTQAA

SEQ ID NO: 233012 - protein, 365 aa, unidentified
MNKNSNAKEMKREEAKQSFAFYIGIDLGDKNSDVCVLDPAGEVNKQFHLRMKEADFREYFTSIGRSRVAVEAGGQSRWVADVIEKCGHEVYVSNSRKVPYIHDSDDKDDPGDAYKLAELVHFKPRLLHPIQHRSQEAQTDLSWIRAREVLVESRTQIVNAVRGISKSFGERLAKCSTKAFTAKLADQVPAAVRGAVAPLLETIDHLNEQIDYYDQMEEQIARQRYPKYWLLDQVNGVGVHTALTYMLTIGDPDRFEKSRMVGCFLGMRPRKKDSGSSQPQLGITKAGDEFLRKTLVNCAHYILGPHGKDSDLRRYGQRICERGGKNAKKRAVIAVARKLAVLLHRLWVSGEVYEPLRNSQKTAAA

SEQ ID NO: 233013 - protein, 411 aa, unidentified
MENVFPCCAGLDVHKESVEACVRRIEPNGRLHQQTHHWGTMTCDLLAMADWMTAQGVTHVAMESTGVFWKPIYNILEGRFTMLLVNARHLKQVPGRKSDVRDCQWIAQLLQYGLLKGSFIPPRSQRELRDLTRHRTQLVEEKARTANRIHKVLQDTNIKLSSVATDVLGASGRAMLEALITGEEDPIKLADLAQRKLRGKIPQLEKALEGHLTEHHRFMLKLLWKQLAQQEELIAELDCKIEEQTRPFAVEIDRLDAVPGVDRRVAEVVLAEVGPDMKAFPTHENLASWAGMCPGNEESAGKRVRNRITPGNRWLKRTLAQATWAASHSKNSYLASQYRRLAGRRGKKRALIAVGHSILVIFYHMLKTGTSYTDLGGDFFDRLEPQRLTRYYVKRLESLGHKVTLQSCAAA

SEQ ID NO: 233014 - protein, 425 aa, unidentified
MSSSDAPSSPVDASGFAYVVGIDMGSQAYVYSVLQPDKRPVGKPTELANNRAGFEQLHGCLRQLGVAPERVLIGLEATSRYSENLYQFLSEQGYPLCLLHPRQTHQFAQQRGLRAKTDRLDATTIARLLLSGEARRGYVPDELIATYREVARLHSQLADDSARYQNQIQALLVVLFPEFVQVFADPCRPTALALLKRYPSAQAIVEALVEALTATLRALAPRHYGRPTAQALVRLASQSAASGLATGARSLSLHVLCDQLEHTLANLAQVEHELDQLLDRDQGASNLKSTPEFGRKTVAVLRAELGDVTRFQRVDQVVAYVGLDLQVRQSGQWKGQVKLSKRGSGRVRRVLYMAALRSIRLPASAFGAYYRRLIGRGMKARDALMAVMRKMLIVAYHLLRSNETYDPTKVCAVACTPPRTPSSGS

SEQ ID NO: 233015 - protein, 344 aa, unidentified
MPSIGKPEQLCGLKDRILLERATSIIQGEGEMKVEKKLSIGVDVSKETLDIAVGKDGLFTTIKNNARTIRHLFTSLSVEEIAQVVVESTGGLEQTLLAELSAASIPVALINPARVRYFAKSTGQYAKTDRLDARILAEYGEKVKLRLYRLPSDEENRLSDLGSRRRQLLEMIVSEKNRYQAMPRLQKSIQKHLAWLQEEVLQIESETEGLLAEHQEWQEKREILTSCKGVGNVTAFTLIAELPELGSINRKEIAALVGVAPINHDSGKRRGKRTTYGGRSKVRSVLYMATMSAIRYNPVIATFYNRLIENGKKKMVALVAAMRKLLTILNAMIRDNHRWMPDFA

SEQ ID NO: 233016 - protein, 337 aa, unidentified
MNGIAARFGVDTAKNVFAIYGVDKFDKEVVSKVVSRKKVLAYFANISPVIIGIEACGGSHYWARELSNLGHEVRIISSQFVVPYRHKGKNDINDAQAICEAIGRPGMHFVAHKSEDQQSILMAHRIRSLSIGRRTALINQIHGYLHEFGIVVSKGRHKLKRDLHEVLASDKLPDIVIELLHGLLIGLIREEENIEHLDSMIESWAREDERTLRLLELEGVGPLTASAVVATVGDPSMFKNGRQMAAWLGLVPSQHSSGGKSRLGSITKRGDRYLRMLLIHGARTVLLKSSRGTAKHQDWIESLRLRRPDNVVAVACAAKQARMMWAIMMGKQQLTAS

SEQ ID NO: 233017 - protein, 362 aa, unidentified
MRILALDLGKNKSVFVDYTVGGGGEAFRGERKFGKIGSNAHEVRKLLERCAPDRLVIEACPAAGWVCDLAELMKVQVQVANGNDERWRWKTVKEKSDRAEGFASAKDALKLAQLSEMDSLPTVHVPKASVRQLRSLIEYRHGLVDRRTAIKNSIRAIYERQGTHLPSARKAWTKAAVEELKQESASASAEQLWLFQVGCELKQLESVQQQIEQVEGKLKEIAGSKSSVQLLQTAPCVGPRLSEAVVAILDDPHRFKNGRQVGCYAGLTPRRWQSGQSDRQGHISHAGNRLLRELLVKIAWLGVRNNTWMLQVYENVRRGSEKRKKIAIVAVARRLLVRLWAMLRDGTEWKEPALSPVAMATL

SEQ ID NO: 233018 - protein, 331 aa, unidentified
MDGEKRFVGIDIAKAALDVFIGSGGAAFSVTNDEVGIRELLRHLAPGDFVILEATGGLEMPAASALAAAGIAVAIVNPRQVRDFARATGRLAKTDRLDAEVLARFGEAVRPEARPLAAEQAQTLEALVTRRRQLVEMLTAEKNRRARAPKILHRSIDEHIGWLEKRLAGFDDELAELIRDTPMWRERDELLRSVPGVGKVLSSTLLAQLPELGMLNRKQIAALAGLAPFNRDSGNMRGSRCIWGGRAQVRRVLYMATVAGVRSNPTIRTFYLRLRANGKHAKPALIACMRKFLVILNAMLHHKTHWQTPALAPSTVALSPLPGAVSEHGCC

SEQ ID NO: 233019 - protein, 428 aa, unidentified
MNVKNTTRREQFCQIVKEIRGSHEHLIVGIDVGKDKHHAFMGTATGKSLRRRLIFENNTEGFSGLLTHAEAVKVRNGLSRITFGLEPTGNYHKPLGSHLIRCGCNLVLVTGSAVKHNRQLLDGRWDKHDTKDAANVADLVSRGRCLYYDLPSSKIDELRDLLSLRRRLKKEEHSLRMRIRNNLLAKFFPELDRFYSACKTETLAIVKWCLDPNKIAGMEFDQFFRIVTRTRRGIAQQLRLRKIHRLAAESVGCPMSPAAEFEAGLLVEKLKQVRQEIEETKEFIQDVSIDFAEYSWLLTIPGFGPYVSARVLASIADPRRFDNRKQLLKLVGYDLCANRSGKQSDKAVPVISKKGNAEFRYALYQAALVASTRDQYFIAYFNKLLQGRERERGIKTKMRVKLAAKLLVIAWTLMKRREPFDPHYLNIE

SEQ ID NO: 233020 - protein, 395 aa, unidentified
MYSLLVGIDVSKDFFVTAGIDSEGKGSFSRSYSMDSNGFDDFLKTITSHGEDLSKVIVAMESTGCYHINLFSFLASQGVRTVVVNPLLIANFAKLSLRKTKTDKKDAMTIARFLLDHHEEVSYLSLSQDHQDLRDLSRERESLCHLIAAAKVEIKRVLRVTFPELESIGNLYTGAMLRFLQQYPSARLARAAKSKAIVKALKQPYVGNKLTYSAEDILRAANTSIGTVSSAKEIILEGKIATLLHLQGRLDEMTKLLTDLCKATRIDDLKILRSIKGVGPKTAAPFLAEMGEVQNYSSHKKLIAFTGIDPSLHESGNYVGMSKLSKRGNRHLRRAVYLMTAAVVSKNPFFKAYFLRRKREGLPPQKALFATAHKLLRVIFAMLTQRTYFNPKEVI

SEQ ID NO: 233021 - protein, 371 aa, unidentified
MTDGSKGTLKMTAGLDLGDRYSYLCLLDNESGEVIEEGRLRTTPEAFKRRFDSERPLRIAIEVGTHSPWVSRVLKECGHEVLVANPRRLPLVYGERRKTDKLDAEKLARLARVDSKLLAPLQHRGEASQAHLALIRSRQALVNTRTQLVNHVRGSVKSFGGRLSRCSTASFHKKVAEQIPQELRPALEPLLETIASLSACIQHYDRELETLAQEHYPETKLLRQVQGVGTLTALTFVLTLEDPERFEESRQVGAYLGLAPSKDQSGERDPQKRISREGDEMLRRLLVGSAHYIVGPFGEDCDLRRHGLKIVGGAAGKNARKRAVVAVARKLSVVLHRLWISGEVYEPLYNAQRSKDRAASEKLLHPLGRGV

SEQ ID NO: 233022 - protein, 348 aa, unidentified
MTLTIVETRAITGGVDTHADVHVAAALDVIGGLLGVQEFPATPAGYAHLLAWLGGFGTVCLVGIEGTGSYGAGLARHVTAAGVRVVEVDRSDRQDRRRQGKSDPLDAVSAARAAQSGRAAGVPKGRDGAVEAVRALMVAKRTARSERTQTINQARALVLTGPDDLRTRFTRHTPADLVAGLASLRPRPGDVVGYATRIALRELGRRAEFLDGQLQRLDELIVPLVTARAPGLLALYGIGPDTAALLLVAAGDHPERLRSEAAWAHLCATAPIPASSGKVTRHRLNPGGDRQANHALWRIVITRMSSHPPTRAYVERRTKEGLSKKEIIRCLKRYTAREVYRHLRPGPG

SEQ ID NO: 233023 - protein, 405 aa, unidentified
MEVLYKRCCGIDIHKNMMVACIFTSVRKKEIRQFSTMTEDILQLVSWLKETDCEMAAMESTGSYWKPVYNIFEEEQIPIMVVNAQHIKGVPGRKTDVKDAEWIADLVRHGLVKASYIPNRDQRELREITRYRQEVIEERARELNRIQAVLEGCNVKLSSVITDISGKSGMTILKAIVSGETDPVVLSELAEGRARDKIPEMQKSLQGRISEHQQKMLKHQLGHIESLTALIMDLDADIKKKTESINWAIEALDDMPGIGRKSAERILAETGVEMEHFQNESRFSSWAGLVPECKESAGKKMSTRIRKGNKYLKATLVECARAGIRNKQSYLYSRYQRIAARRGGKRALIAVAHTMLIAIYHILKEKVPYHDLGADYYSVINQEKIINRNIRTLEKLGVNVMIQPK

SEQ ID NO: 233024 - protein, 388 aa, unidentified
MMKNLLCQNLGVDVSKDSLDVVFSTLDMERQVRVKASRKFANTPAGIRQLQRWMESKRAAEVELRILMEATGIYYEQLAWFLHQQGYQVSVILPTKAKRYLQAMGHKSKNDSIDAKGLARMGLEQLLPLWQPLSQNIYQLRLLTRQLEDFSNQRTVFLNQLHALHHSAFAVKQVEKSLKKMVRTLEKSIQELEEAIQELICQDPLLAERVEKLLAIKGVGLKTVAVLLAETNGFATFEKQGQLVSYSGYDVVENQSGKRSGKTRMSKKGNAHIRRAMHLPAFSVVRYKEPVFTALHERLLAKGKTKMQAYVAVQRKLLILIWTLWRKNQVYDPLYDQRHQKQKEAILSLEAGASLSGVCAADENKVAPLGRATQDEHPAPVGQELSFR

SEQ ID NO: 233025 - protein, 990 aa, unidentified
MQYSAKSNINLTFVGDDDQSIYYWRGSDNTIIKNLIGKPNCKTTYLLTNYRNNPNIVEAGNAILSTIQNRAKKGKPIRANRATGEKIRVTTYNSKFTNLVNEINILLASGKSADEICILSRDRRTANSIRDELTAADIAVSKEDSIIVLSDMYREMKAILSILNAYNITASAKELRLITQSVNVTERHIQKIVKGRCTEVECEDSLKKVKALSDEVRLNQITSLADAVDRFSIKAGELYEGRVNEHHSDEVFEQFEEYCQNTSAPWPVPRAQLKEIFSTFEDNAKKRAVSGKPLTPGVRISTIHSAKGLEYDIVIITGLSAGQYPNTEQIDRKYAERNEQLKTFQESRACYYRQKQELDQSVFPTLLEECDSPIFTEAERDRMQDFQQELFDMRDGLLTLSADGVEEYLDAYVYFMTPLIAQYSSDIAKLNTELLNKQSEAEEMKEQILVATSDTAEDESNYNSQLEELCKSIADIGESIERLKIKRNRFFEATANLNNFYVQCLTVKGLLADMARADEIEELQQELKVEREQRTNEERRLFYVAVTRARDYLYLCYEAGTQPSEFIRLIPEKLKAEHIMMTLEEERDYRRIAIGIDVSKGKSTVCGMKPGGEIVYTPFEVQHTREGMSELVSLLHNSGEEVRAVLESTGSYHCPVVAALLENGIFVSVINSLRMKRFCSQSIRKVKTDRIDAMQIALYGLAYWQELQPTRLPEDTYRELQLLARQYYQMTSILIKAKVDFNAICDQVLPGMQELMNDHAGRHKLSDFVLQYCHTTHILEMGETRFRKDYCKWAEKKGYRNCERMAMLIFATAQNGIPVLPNAPSTQIVITEAIRVLHTVEASRDAILTQMQALAKTLPEYSLVREMPCIGDTLAPRLIAEIGDVRRFHSKRALIAYAGIDAPPYQSGKFRANNRHISKRGNRYLRKTGYEVMQSYVMHKPANDPIFTFIEKKRGEGKSGKLAMVAGLNKFLRVYYGKVTELYRSLSAIE

SEQ ID NO: 233026 - protein, 337 aa, unidentified
MKSYLFIGIDISKATLDVCILSASGSMEIHYHEFSNSLKGFIQLLKWLKEKSEGIEIEDWRVCMENTGIYSLELNCFLHEKGIWQSMENALQIKRSMGVVRGKTDKADCKTIALYAYRFYDKLKPYVLPSKTLLRLRALFSQRERLVSIHSQLLVANQSMKGYARELVKDIQNQNETLLKNLAEQIKTIDKSLKECLQQDEELQRKAKLIQSVPGIGQQTASYLLIVSRGMQSFATAREFACYSGCAPFAHTSGTSIRGKTKVHFIANKKMKMLLHMAAMNAITFNEEIKAYYQRKVAEGKNPMSVLNAVRFKLICRIFSVVKRNEEFQKEYKKIAA

SEQ ID NO: 233027 - protein, 319 aa, unidentified
MTASPVVVGVDVAKDRLDVAVRPSGEAWSEANDDTGVGALVARLRPLAPALVLCEATGGFERAAIAALAAAGLPVVVANPRQVRDFARATGQLAKTDQLDAAMLALFAERVRPTPRPLADEAARLLDAVLTRRRQLLEMLVAEKNRLGFAPKPLHRGIQAHIRWLERQLDDVTKELAGLIEASPVWRAKDDLLQSVPGVRPIVSYTLLGELPELGTLSHKQIAALVGVAPLARDSGTRRGKRLIWGGRTGVRTALFMAAMCGRRWNPTLKVFYQRLKAAGKPTKVALVACARKLLTILNAMVRDDTRWGAPAPTVQYSC

SEQ ID NO: 233028 - protein, 414 aa, unidentified
MDVPAPHHFAGIDWASDKHDLCVLDPAGKVCLHLCIRHTAEGLAELIRALDRFGPRAQLPIAIERPSGLLVDTLVEAGFPVVPIHPNALKATRPRYSAAQGKSDPGDAFILADVLRTDGHRFRSLRAPSDQTRALRAAVRTRDDLVATRVQLANQLRSLLDSFWPGAVAIFADIDSPIALAFLDDFPSPESAAHLGEKRLDRFLKRHAYCGRRSPAELLTRLRAAPQGKAEALESETKGQLVRALTAVLRPLVQQIRDLGGLIDAHLQQHPDGPILQSFPRTGSVNAAQILAELGDDRLRFDSFEQLAAEAGVAPVTRTSGKHRGVSARFACNKRLRQALTTWADNSRHASPWAANVYRQARARGCDHPHTIRILARAWARVLWRCWHDHTTYDPQSHGRALPFLAPEPLPLAA

SEQ ID NO: 233029 - protein, 326 aa, unidentified
MTITTVGIDLAKNVFAVHCIDQNGKAVLVKPKVSRAALSELIAGLPPCVIGMEACSGAHYWARLFRQYGHDVRLMAPKFVSPYRMAGKTGKNDAADAIAICEAVQRPHMRFVPVKDESQQAMQCLHRTRQGFIQERTATYNRLRGLISEFGVIAPQSTDALRHVVSDQKETLPVQVRLCIDDLLTHVTNIEEKIAEYDRVLSRVAKTDHRSQQLMELKGVGPTTASALVASIGNAHDFKNGRQLAAWLGLTPSQYSSGGKSKLGRITKAGDAYLRTLLVQGARSVMVGAENRTDPFSRWVCSLIGRRGCNRRQECEVVLGIITLRR

SEQ ID NO: 233030 - protein, 368 aa, unidentified
MFEHTFIGLDVHAVNVVGHALNPDTGEITRHTMAPDPAVVLEWVRRFEPPVKVVYESGPTGFVLARHLRVAGINCVVAASSKLLRAPGDRVKTDRRDARVLAEMLAVGSVTEVRIPDPDEESPRDLSRLRSGTARDLAHARQHVNAILLRHGIRYPKATRWTKEHRLWLHRQNFDEPALQFTYEADVEQAELLAAHLARIDKQVAATAGACRYAPVIAALMCLRGIQLTTAFGLAVEIGDWTRFTGSTIGSYLGLVPSEESSGPSRHQGPITKAGNTYARKLLIEAAWQHRRPYARPGERLLRQLELVAPATRIRALEGNHRLHQKWEAFDHRHKMSVKANTAIARELAGWCWSLATPLQQGQRMAAP

SEQ ID NO: 233031 - protein, 416 aa, unidentified
MNAVGIDVSSRKSTVAVLRPLGEVVCLPFDVTHDIAGLASLVEKLKALDGETRVVMEHTGRYYEAVAKALHEAGLFVCAVNPLLIKEYGANSLRRVKTDKADAIKIARYALDNWADLRDFTPMDAIRYDLKTLNRQFQLASKQRTASANNLIALLEQSFPGIRKCFDSPVRSDGTQKWVDFAHSFWHVDCVRKQPFPAFCERYRKWCKRHAYLFKLSNAEEVYALAKRAVVLTPKSKVVKVLVQEAANQLISISRSVEVYRAEMDRLAAMLPEYPVVMAMYGVGKSYGPQLMAEIGDVRRFERKQALVAFAGIDPMPNQSGDKNVRSNKSSKRGSPYLRKTLFNVIRTYLQCAPQDEPVFQFLNRKRAEGKPFYVYMLAAANKFLRRYYAKLRDYFASLDTLQPVAPIPTILKATL

SEQ ID NO: 233032 - protein, 342 aa, unidentified
MKIIGCDFHPSFQQIAMVDIETGEYTERRLTPEEARQFYAELEGPVLVGMEACGNTLWFERLLASLGIELWLGDAARIRAMEVRKQKTDRRDAALLLRLLLENRFPQVWVPTPAQRDTRQLLLHRHKLVCMRRQVKNELQHLALNQGVQQKRKLWSVAGRQRLEELPLAGWTARRRQDELELLDELDGRIAKLDVAAQQEAEKDAVAKLLQTHPGVGPITALAFSLTLGEIERFQRSRQVVSYLGLNPAEHSSGGRQHLGGISKQGNPMLRSLLVEAGQSAARYVPELKRAYQRLKHRKHSGVAKVMVARKLAVRLFWIWKTQQPYTAARTQGSPSHHVVAG

SEQ ID NO: 233033 - protein, 426 aa, unidentified
MVIGSKGAALGRQDVKDEVIYLRAAGLDLGKRFLVACVRVPNPRRHGTWSLETERFGTTPVEVRRLLAWLVEHRVEIVVMEATSDYWRFVYYTLQESLNLMLVNPAHLRGIRGRKTDPSDAAFLARAGASGMVMASLVPGRAIRELRDLTRRRTEVAVARGQEAQRLEKELEDTGMKLTSVITDVTGTTGRRILGALIDGERDPATLADLAVGVARQKVPALVEALDGTFTDHHAWMCRHYLDQIDHWNTLAAALDERIASFMTDHDQDLTNLDTIPGISRKAAEIIIAETGGDMTAFATAGHLASWIGVCPGMNESAGVVRSGQTRDGNGNLKRVLGVAAMAAIRQKNSYYGAFYRRIATRRGKQRALVAVMHKLTVAIWHVLHDRTGHKDLGADYHTRKNPQRAMRRMIREANALGLTIRFDPA

SEQ ID NO: 233034 - protein, 398 aa, unidentified
MLSIGIDVSKGKSTVCGMKPGGEIVYTPFEVQHTREGMSELVSLLHNSGEEVRVVLESTGSYHCPVVAALLENGIFVSVVNSLRMKRFCSQSIRRVKTDQIDAMQIALYGLAYWQELQPTRLPENTYRELQLLARQYYQMTSLLIKAKVDFNALCDQVLPGMQELMSDHAGRHKLSDFVLRYHHTAHILKMGETRFRKDYCKWAEKKGYRNHERMAALIFATAQNGIPVLPDAPSTQIVITEAIRVLHTVEASRDAILTQMQALAKTLPEYSLVREMPCIGDTLAPRLIAEIGDVRRFHSKRALIAYAGIDAPPYQSGKFSANNRHISKRGNRYLRKTGYEVMQSYVMHKPANDPIFTFIEKKRSEGKSGKLAMVAGLNKFLRVYYGKVTELYRSLPQ

SEQ ID NO: 233035 - protein, 339 aa, unidentified
MKKSYSPTYLGIDVSKGSLDCCLYNGTEHKTRSFNSNKLSTVQKIISHFKISPDSCRVVLEATGVYHSAAFIGFTSQGFDVAVENPLRIRSFATMKNLLRTKTDPVDAKTIAEYGFTNNPVSTKPKEAYQCKVVARLKLIGFFKKLIAQNRNYIEALNNNSFECNATSLITHVKNEINHLNVTINEIKSDIEKILTKHCPELYKQYKSIPGIGPTVAGAIICFYGDFSEFSNSKKAAAFAGLCPKVCKSGSSVDKKGSISKKGNSMLRTLFYMAALSAARCNDTCQEAYLRLRQAGKPAKVALIAIANKLLRQAMALARKGESFIENYKEISPCAAKTT

SEQ ID NO: 233036 - protein, 366 aa, unidentified
MKKNSTVATKRKKIFREKKLTIGMDLGDRFTYYCVLDEAGEVVVEQKLATTKQAMKQAFSRMPSSRVALETGAHSPWVSRQLTQLGHEVIVAHARNVRLIGESSRKDDRLDARMLARLARLDPRLLSPVQHRSAQAQLHLTVIRARAALVGARTALVNSARGLAKSYGERLRKCGTQQVSRDLAAGLGVELKAALEPLLAEVTSLNQRIAEYDRRIEQIATEMHPEVALLKQVKGVGTLIALTYVLTVADPHRFRRSRDVGCYLGLRPGRRNSGNSQPQLHISKEGDRYLRTLMVQGAHYILGPFGQDSDLRRWGLKLSERGGSNAKKRAVVAVARKLSVLLHKLWVSGEVYQPLRNHRAVESAVA

SEQ ID NO: 233037 - protein, 445 aa, unidentified
MSKSKSVSLEVINTQAAGLDVGSQKMFVSIAGGEPKIFGCCTADLRDLRDWLKEHNVKTVAMEATGVYWICVFDILEEAGLEVRVVNGAHVKSLPGRKSDMQDCQWLATLHMHGLLRSGFVPPGDIRQLRDYHRLRSDLVMMGAQHVQHMQKALERLNLKIHTVISSIIGVSGLRMIHAILNGVRDADALLKLCDEQILEKKAGRLRRALEGNWKPEHLFALGKALEAWEFYQRQIEDCDKEITRCLQAMAQDKPAPKLGPKKELRNNAPRQMPELHKQMGQIYGSDLTRIPGLNHYTVMQLLSEVGKDMSRWASVKHFTAWLGLAPATRQSGKTRRKEKRRAGRAGRIFCLAAQSMALAKKSWLGSFYRRLACRKGGALALKATARKIAQLFYLALTKGWEYVEQGVTMYQQKYQESRMKHLQALAAEFGFQLNAIRAETASPK

SEQ ID NO: 233038 - protein, 314 aa, unidentified
MNPQSVHRVCYLGADIAQNHLDLHGEIPGLPPRIANTKTALSKLLKQLLHQGGVHIICEATGGCERLLVAACHQAGLAISVLNPRQVRDFARAKGQLAKTDAIDARILCAFGRTFAPSPTRPLPSGLLKLAAFTARRQQLIAMRTAESNRLRRADPLLLAFHRSLLRSLDKQLELIDAALARIVTSCPRLHAKITTLTKVKGMGPTSAIALIASLPELGSLSKNQAASLAGLAPFNRDSGLFRGQRHIHGGRINVRSALYMPALVASRHNPVISSFYLRLRSNGKPPKLALTASMRKLLIHLNSLLKHPPLTHA

SEQ ID NO: 233039 - protein, 312 aa, unidentified
MAMLSFCGIDVSKDCLDVVVLPEGWFFSVSNDTAGWAELVARLRPLTVSAIGLEPSGGYERGIIRALLAAGLSVRRINPNKLRQFARARGVLAKNDRLDARLIAEYVAIMPTRVVQRDAAVEKLAEIVTMRRQLCDEHVAAENQAAHLEDAMLRRLSKRRQTRLEADIRLLDKRLAEMVAANGALAQRYELLTSMPGVGPVLAFTLIALLPELGKMSRKQIAALVGLAPYDFDSGKLKGHRSIYGGRMPVRNVLYMAALSASRYSPALKTFHKRLAAADKKSKVIIVAVMRKMITTLNAMLRDNAAWQPRSV

SEQ ID NO: 233040 - protein, 347 aa, unidentified
MKKHNTIGVDLAKNVIQVCVVSVTNKELLNKALTRKKFAEFLVKQKPSLVAFEACATAHYWARVAQRQGHQIKIIPAQAIVPFRQGHKTDRNDALAVAEAANRPNIKVAPCKGIEQQGMQSMQRSRELLIHERTALSNHLRGLLLEFGLVIPRGFAALTQQLPDILEDGENELPGIYRPTLARLYERFCRLREDIQFLDKQIACLVKQNESCNRLTEMEGVGPISSILLFATLGTGEAFKNGREFSAYIGLTPKQYSSGGKTNIVGISRHVANRRLRAVLIQGVRAYVHKMKEPKTPKDRWLWSLIQRAGYGRAAVALANKNVRTAWALLTQGTAYNKFYGNELRAG

SEQ ID NO: 233041 - protein, 347 aa, unidentified
MGYFAGLDVSLEETAICIVDDGGQIVREARAASEPEALVGFFGACGMTMQRVGLEACSLSAWLHAGLTQAGIPAICIEARQAKAAMGAMPNKTDRNDARGIAQIMRTGWYRAVHVKSPSCRSWRALLTARRMVLNKRRDVENGIRALLREVGLKVGTPSRKDFPVRVRELAADDPVLASLTESLLAVIEVMTQEANTLTKRVLDEVRVEPVCRRLMTVPGVGPLTALAFRATIDQPDRFRKSRDVGAHLGLTPRRYQSGETDVQGRISRCGDELARTALYEAAHSLLIRSTRWSALRAWGMNIAKRRGMARARVAVARKLAVILHRMWADGSEFRWGRQAAAPAAAA

SEQ ID NO: 233042 - protein, 460 aa, unidentified
MNRRRKKKAGNEQQDWSVNLDVVHPNAAGIDIGNESHYVAVPPDRDAEPVRQFACFTEALQQMAAWLKSCGIDTVAMQSTGVYWLPVYEILTEEGLQVFLVNARHTKNLPGRKTDVQECQWLLQLHTFGLLNNSFRPPEEICVLRAYWRQRAEHVASASTCIQRMQKVLTEMNVQLANVISDISGLTGLAIIQAILAGERDRYKLADLANFRIQASREEIARSLEGNWRKELLFILQQELNLYQTYQQQIAECDTALAAHLQTLEDKVEAGSQPPAAKANKRAGGNAPTSFDLRGELYRISGTDLTQIDGINIMNAQTIIAEVGVDMSRFPSEAHFASFLGLCPDNQITGGKVLRRGTRHVENRAATAFRMAATSLWRSKTYLGAKFRRLRARLGAPKAITAMAHMLARLVYRMLRYGEQYVDKGLVCNSPQRGRAYPTSAASPPCERPPKPEPRYPSGI

SEQ ID NO: 233043 - protein, 355 aa, unidentified
MPHNSSRRLEAVATIGIDIGKNTFHLVGLDSNGAIVLRQKLSRRQVEARLANMPPCLIGMEACVGAHHLGRQLKALGHDARLMPARYVRPYSKGQKNDFRDAEAIAEAVLRPTMKFVAIKTVEQLDLQALHRVRERLVCQRTSVINQIRAFLLERGIAVRQGLRALRTEMPIILAMTDKLSPRMIHMIEALCTDWRHLDRRIETVSDEIKTLSEQDDGAKRLMTVPGIGPIISTATVAAIGSGDAFSKGRDFGAWLGLVPRQMSTGGRTILGPISKRGNRYLRMLFVQAARAVLLRPQSWEKHGLKSWIEAAARRLNRFKLAIALANKIARIVWGVLHGGRNFEVRPMKPAPQAA

SEQ ID NO: 233044 - protein, 329 aa, unidentified
MGNVTTIGIDLAKNSFSVHGVDASGAVVLRKTVSRARLVGLLLEQPPCVIGLEACSGAHEWARRFREFGHTVKLMAPRFVAPYRKNSKNDGNDAEAICEAVSRPHMRFIPIKTPEQQAVLCLHRVRQGFIEERTATINRLRGLLAEFGFVLPQSSAAVRQGVAPLLEQLPPHAARALGGLLEHLRSLDARIREYEHAIESHARQNQAARLAQQRQGIGPITASAIAATVGDGREFKNGRQFSAWLGLVPRQHSTGGKQRLGHITGRGDPYLRTLLVMGARSVLQRAAGQTDPLSRWALAVRTRRGYHRACVAVAAKNARVIWAMLNHGA

SEQ ID NO: 233045 - protein, 414 aa, unidentified
MERYVWTIGVDWGSASHHLCVMHEDGRMIGSRAVAHTAEAVHAALRWLTELTGAPPQEMAVALETPRGVLIDTLLEQGFAVFAINPKQVDRFRDRFSVGGAKDDPRDARVLADALRTDRRAFRRVHADDPRIIRLREQCRIAEELQDTALRLSSRLREQLYRVNAAWLDLSPAADDPWVWQLLRDAAHPEQWTRLSRVRIARVLKQSHIRRVTADEVRTTLQQPRLSAAPGVSDAVAARIASLIPQLLLISQQRTDTDRQIERGLDALAESLDGEPCEHRDVVILRSLPGVGRIVAATMLTEAAGPLAERDYFTLRAHSGTAPVTKRSSKRTFMVHMRYACKDRLRNAVYHWARRSIQHDAAARAYYDRLRARGHRHARALRSVADRWLRILVAMLRSGAEYNPSRFETVSVAC

SEQ ID NO: 233046 - protein, 343 aa, unidentified
MDHFAGLDVSVKETSICIVDDTGRIVREVRVASEPEALLQVLGNPSYRFKRLGLEAGPLSQWLFSALAEAGLPVICVETRHMRAVLQAQINKTDRNDARGMAQMMRAGLYRPVHVKTLRSQKLRMLLTHRKLLQSKAIAIDNDLRGTLRNFGLKVGMVGTVKFEARIKELVENLPDLAALVEPLLMVRRVLREQFSILHRRLLAIVRDDEVCRRLMTTPGVGPVVALTYRATVDVPARFRNSKAVGAVFGLTPSKYQSGEINRTGAISKCGDEMMRVMLYEAAQIILVRTAKWSWLKAWAMKITRHRGMKKAIVALARRLTVIMHRIWVDGTEFHWSRETAAT

SEQ ID NO: 233047 - protein, 375 aa, unidentified
MSNHSEAFVAFDTSKLRNAVAIADSGRTGEIRFLGEIENTATTTAKLVRKLAGKYERLTFCYEAGPTGYELYRQIKSLGQECLVVAPSLIPKKPGDRVKTNRRDAVSLAKLLRAGELTAVWVPDRHHEAMRDLTRARDTAVDDLRSKRQQISAFLLRQGLHYCAGKKTWSQTHLNWLASQKFEYPEHRLIFEEMMMAMRQAQERLERLEQAIRAAVPDWSLADLVTALMAMRGIDLISAATILAEIGDLSRFQSPCELMAYLGLVPSEDSTGDCVKRGPITKAGNRRARRMLVECAWSYQHPPRVGKDKQAKVAAAPRAVREIAWKAQSRLNRRYRALIRRGKLKTVAITAVAREFAGFIWAVARAATAARAAAK

SEQ ID NO: 233048 - protein, 449 aa, unidentified
MGKPQVIEDEEHGRVFERVAAVDVAKASGMVCTRRPPPRPGGRRASTVQEVPASMTAIRQLGARLVRERIEMVTLESTSDYWRIWYYVLEEAGLVVQLVNASQARNLPGRPKTDRLDAMWLARLTEMGLLRPSFVPPAPVRALRDYTRARTHLTQDRTRCWQRLEKLLEGALIKVSSVASKLTTLSAQDMVRALINGERDPVVLAGLARTRMRAKHDALVEALTGMFDDHHGELARMLLDQIGFCTDRIGALDAKIAAAAGQLPAAWGITAEGVTGPGAGTGPAAQVLPAVQRLAEIPGISEDLARSIIAETGLDMTRFPTAAHLVSWAGMCPAARQSGARTRHGKKGQGNTYLRGYAGQAATGAARTRTFLGERSARIARRRGKAKAQVAIARSILVIIWHLLASPEARYADLGYDHYASRTDKDKKLRNHIRQIQALGFDVTITQAA

SEQ ID NO: 233049 - protein, 391 aa, unidentified
MIYVGIDVAKDKHDCFITNSDGEVLFKAFTIQNNHDGFDDLFQKILTVTDDLPKVKVGLEATGHYSYNILGFLLDKGLTTFVINPLHTNLFRKGLSLRQTKTDKVDAHTIALMLMSDVNLKSYSDTSYHKEELKSLTRYRFDKVCERAKLKTSISRLVCILFPELEKIVPTLHMVSVYKLLAEFPGASQIASAHLTRLSNLLSEASRGRYGKDDAIRIRNAARLSIGSVMPAKSMELKHTIRLINELTSEVNEIEAEIKSIMDNISSPILSIPGINYRMGAMIIAEIGDFDRFDSPEKILAYAGLSPSTYQSGQLKSSHSHMEKRGSRYLRYALFNATKYVCHWDPTFAAYLDKKRCEGKHYNVAVSHAAKKLVRIIYHLEKSGQLYVKAA

SEQ ID NO: 233050 - protein, 321 aa, unidentified
MQKDLLYCAIDVSKDKLDVDGAALALPAQLGNDHGSFRQLIKAAKKYPGAVQFVFEATGPYHLGLALALWEAQIPLSVLNPARVRYYAKAQGKAKTDPLDKQVIGDFARSFRPPPTPAPDPVRRELTELLQRRDGLISTRAAEQNRLGQCRHKIIKGQIRRLMAQLAEQIGQIDGLMKKLVNSSEELKAKVKALCQVKGVGHLTAVTLLITLPELGTLGRNRIVRLVGLAPLNDDSGTQKNKRYIQGGRARPRCALYMPALSASRHNPVLKEVYERLLKAGKLKKVALTALMRKLLICLNALLRKLADQHPSPQGLCLAKP

SEQ ID NO: 233051 - protein, 359 aa, unidentified
MSSISPPGPLSKIIIGVDTHKHVHVAVVLDDDGQRLGDLRVPVDSIGYQELDSWAQSFGRIIAYGIEGTGSYGANLTSYLRRQGRKVVEVNRGDRRARRANGKSDTLDAELAARSVIAGTSTAVPKSADGTVEMIRKIKVARDIACKNRTSAIISLKTVIVNTPQELKEQLDSLGDKALIQKCSGFRPGTVDDPISAAKHTLRALARRWEFLNAEVKDHDAVITKLTTSLSPTLCDGFGIGPDTAAEILIVFGDNPDRVRSEAAFAKLCGVAPIPASSGMTTRHRLAWNGHRQANAALYRTAIVRMQHHQPTKDYVAKRTAEGLSKRDIIRCLKRFIAREVYGRVMADFRARTALSAAA

SEQ ID NO: 233052 - protein, 415 aa, unidentified
MALKIVYKICCGIDVHKTFVVACIASTDKHGVTSYERHRFSTYTKGLKNLLQWLLEHNCKDVCMESTGKYWIPVYNILEKDCSIVLAHPKYVKAIRGKKTDKKDAKWIADLFKHDLVAGSFMPPAGIRQLRDLMRYRFKLTCFKSSEKNRLQNCLTVSNIQLGNVVSDTFGKSAQAILDKILENPADTSFDLEPLVFKSLKKKLPELRDAIDGYITPEQAGKLKVIKSHYENLEARKAELEELILALATPYQQELAILQTAPGISSDFTAIGIISEIGTNMEAFPSAKHLCSWAGLTPTNNESAGKKKSVRVSKAGCYIKPLLVQCANAVVKSNKHPEIRNRYLRIKKRRGHKKAIIAIARMLLTALYYMLKNGENYNAELYRKSDLPPVDREITVEQALMIARNQGYKIKSATA

SEQ ID NO: 233053 - protein, 449 aa, unidentified
MSRPQVIDDEEHEQVHDRVAAVDVAKDTGVVCTRLPHPSRAGARRSTVWTVKARMGAVRALGRQLARDGVEVVTLESTSDYWRIWFFVLEACGLAVQLVNAAQARNLPGRPKTDKLDAMWLARLTEMGLLRASFVPPKAIRDLRDYTRMRTRLVQERTRCFQRLEKLLESALVKVSSVASKLTTLSAQDMIRAMIAGQRDPRVLADLARGPMRARREELAEALDGMFDDHHGELAGLLLDQIAFLDERVARLGARAAELTAAMPAAWGVNPDGTTGPDAGTGPGAPAPNTMARLAEIPGVSEDLARTIIAETGLDMARFPTAGHLVSWAGLCPSARQSGPRTRTGKKGQGNAWLRGALGQAAVGAARTGTFLGERYHRIARRRGKAKAQVAVARSILVIIWHLLSYPEARYTDLGPGYYQARLDIGRKLRNHIRQIQALGFDVTIAKTD

SEQ ID NO: 233054 - protein, 366 aa, unidentified
MLYLGIDQHARQITISLRDEGGDVLQARQISTQPEKVMAFFQQLARERLHNGESFVAVLEVCGFNDWLIRMLREYHCHKVILIQPDERKKCKTDRRDAAALSELLWVNRQRLLQGKPVRGLRQVDLASGTDQENRRLTTLRKESGQARTRLVNKVRHLLRRHNLQWQMPTKRLPTLAAIAWLKQVALPEIDRLEMDHLLNDLEHIRQRLKELERVIAQRCGVSAEAVLLSSMPGVSYFTATSLACRVGRIERFPRARSLANYWGLTPGCRNSGENTQRLGNITKAGSGMARWLLAQVTHKVLRKDARLREWFKRIKRRRGSTIARVAVMRKLATIIWHMLSKRKTYAECRALAEAGGKEREEQTCG

SEQ ID NO: 233055 - protein, 372 aa, unidentified
MNYNTVYVGMDVHKESFSLCAYTIEAEKASHYQRTEADYKKVLNYLEFLRTIYGDNANFICGYEAGCFGYTLYHQLTANNVKCIILAPTTMLEQRSKKRIKTDRRDAEIIAKCLAQHNYSPVHIPTAKDEETKEFLRMRDDHKLALKKVKQQILAFCLRHNYRYDGKSHWTAAHLKWLKALTPEALYKEILDEYLLTYQTLSDKIERLDKRIEELATQDEYKEAVKKLCCFIGVKTHTALSVLVEVGDFKRFASAQHFASYLGLVPGEDSSGDDQNRLGITKAGNRHVRLLLTEASQCYARGQVGFKSKELKSRQSGNTPAVIAYADKANERLRRRYYKMVLNKYKKHNVAKTAIARELACFMWGMMTDNIA

SEQ ID NO: 233056 - protein, 369 aa, unidentified
MAKNGTLAKVQELQTSFQTTTEQITIGIDLGDRFSHCCVLGPDGKILTEGRLRSTPETMTRHFQGLPTSRIAIEVGTHSRWLSQLLTKWGHEVIIANPRNLRMIADSIRKSDQVDAHMLARLARVDPQLLSPIVHRKQESYPDIVQLKARDLLVKNRTRLMNAVRGVLKSTGVRLSPCGTSRFPSKAAICVPDELKLSLTPLLEAISHLNKQIYSLDMAIESTAQNRYPETNRLRQISGVGSITALQYVLTIGDPGRFAHSRDVPAYLGLTPRRHQSGSIEQQLRISKAGNKQLRSLLVQCAQYLLGRFGPDSDLKRWGTRMFERGGKNSKKRAIVAVARKLAVLLHRLWITGDTCHPLYNVATNSATP

SEQ ID NO: 233057 - protein, 355 aa, unidentified
MMNDEQVKVYGGIDTHADTHHLAVIDQAGRRLADAQIPTTATGYQAALRFLGSWPGLVSVGIECTGSYGAAVTRVVREAGITVFEVNRPNRFDRRLHGKSDPFDAYSAAEAVLGGRASAAPKGGDGLVESLRVLRTSRSSALQARTATINQIKGMLITAPEDLRTRYKGLSTPKLIAALAASRPTPTPVTAAEATAYSLRLLARRWQALTGQIEDLAGHLQRLLDDHAPDLMRVFGCGRDTIAQLLITAGDNPDRLRSEAAFAALAGVCPIPASSGKTKRHRLNRAGDRQANSALYHIVMVRLRYNQETQDYVARRTAEGKTKMEIIRCLKRYLVRQLYPLIVETLHPRKEVAAA

SEQ ID NO: 233058 - protein, 354 aa, unidentified
MSQKLSSAIAVIGIDIGKNWFHIVGHDQRGAIVLRQKWSRGQVEARLANLPPCLIGMEACVGAHHLSRKLQMLGHDARLMPAKYVRPYSKGQKNDFRDAEAIAEAVQRPTMKFVATKTADQLDLQALHRVRERLVGQRTGVINQIRAFLLERGIAVRQGLRSLRSELPGILATRTDVLAPRMLRIIEDLAGDWRRLDARIEDLSSEIEALARQDKGCERLMTVPGIGPIISSAMVAAIGTGDVFSKGRDFGAWLGLVPKQISTGDRTILGKISRRGNRYLRVLFVQAAWVVLVKVKCWERYGLKSWIEAAKKRLHHNVLAIALANKLARIAWAVLNKGRAFEYVKTDEVASRPA

SEQ ID NO: 233059 - protein, 417 aa, unidentified
MIDDQQTWVGAGELPEVRTAGRSAMHSVGIDIGKRQHVAAICRQGERVADKPVLRFAADRAGLGELERWLGRHGPVDRVVMESSGHYWLPLAAALHRAAVPVAVVNPISAKAFGKRRLQRTKSDPADARTLAALGMADQPRIREPLAGVELREAARFAMHLVEDQSRIDNKITRLIELGFPELERAYDDPTCVSALAVLRLAPTAQAVTRKRIATLADANRAPGHRAVGTAKAERIQALARDTMAPPELAAQIGFEMELLIAQHDLLEQQIAAAEARVAGLLDGELARRLQTIPGVGPAICATLIAEIGDIQRFTDFDQLVAYAGVHPAEQSSGQKGGPETSWKMAKTGNAYIRAALYRMSVVGLQHNPTIAAHYERKRAQGKTKMNALGHCMKKSLAIVWGIWRGDHDFQAEPPIA

SEQ ID NO: 233060 - protein, 375 aa, unidentified
MGDYSEAFIGFDTSKLRNAVAIADAGRGGEVRFFGEIENTPAATAKLVRMLATKYQRLTFCYEAGPTGYALQRQIRELGFACLVVAPSLIPKRPGDRVKTNRRDALSLAKLLRADELTAVWVPDGAHEAMRDLTRARETAMLDLRTKRQHISAFLLRLGRPYPAGKKTWSKVHVSWIASQKLEHPQQRLVLEEMMLAMRQAQERLQRLEQAIADAVPEWSLAELVTALRAMRGIDLISAATLLAEIGDLSRFRTPSELMAYLGLVPSEDSTGDTIKRGPITKAGNRRARRMLLECSWSYQHPPRVGSAKQAKVDAAPPAVREIAWKAQCRLYRRYRALIRKNKLKTVAIVAVARELAGFIWAVARAATTARAVPA

SEQ ID NO: 233061 - protein, 337 aa, unidentified
MDVHKKSWTAHFKTDLFDNKTVTMPAESESLINYVEKNFAGHAVSCCYEAGCCGYWIARSLQQRGWEVKVVNPADVPRSNKQGWQKTDRIDSRNLCKHLSDGNLKGIYVPGEEQEQLRALFRRRIHLARNLRSIKNHIKSQLLYFGIKLPAQYDNPNWSREMKTWIANLKWKYSSAAESMKSRLKQLEFMWYEELHISNELRAYCRKHYKKDYYLYKSVPGIGGITAAAIIAELGDIRRFNRLDELAAIVGLVPGIYQSSENKINLGMTKRSNHQLRSLLVEASWVAVRDDLVLQQYYRKHAHNEPNKAIIKVAHKLLNRLRAVIQSGIPYQKGLLK

SEQ ID NO: 233062 - protein, 432 aa, unidentified
MHNRLQVGIDFCQKRADLCLLFPDGRPLESHLAFDNSYVGYSRAKQLLLDALDDYTFDGIDVSGEATGYLWLPFFLHLAADPDLQLHDLRLHLLNPRWVKWFKKCFAQDDKSDQKDPYYIAERTRTRPPDVTWSADPSILALRFYTRFRFHLVQNLAREKCYFSAFLFLKASAYRRIEPFSDVFGVTSRLVLTQQPSLDDLAELPVEDLAMHLHEMSGHHLRDPLKNARKLKRVAEESFPLEQRLALPVQRILNLTLEHIQFLECQVERVNQWIATELQHHPSIQQLATIPGVGPVFSSGNGAEIGNIQRFLQGPKWDAKRKRYRPRNLRDAEDAVAKIAGLWWPRSSSGDFEAEDRRMAKTGNRYLRYYLIQAANKMRSNIPEYATFYARKFREASKHHHKRALVLTARKSVGLVVGLLHRNEPYRSKGHI

SEQ ID NO: 233063 - protein, 326 aa, unidentified
MAIIGIDVSKAKLDCLWLRDSVSLKVKSRVFPNTPAGYQALLAWMEKHTGEAAGELHCVMEATGIYHEGLAYALHEAGAWVSVVNPAQMRDYAKSLGTRTKTDKKDALVIARFGATQQPRQWQPEPPEIRQLKALIARLEAVKQDIRRELNRLEKTQVTQASAEVLTSIETVHQQLDTERVRLETLINEHIDQHPGLKQDRALLESIPGVGPVISQHMVALLRSRSFDAASQCAAFLGLVPVQHESGSSVRGRSRLSKTGNAQLRAKLYMAAIVAKRHNPDIKIQYERLLRHGKPRMSALCAAMRKLVHICFGVLKHQTPYLPQVT

SEQ ID NO: 233064 - protein, 347 aa, unidentified
MRFYTVSHQHYCGIDLHTQVMYLCILNQAGEVLLHRNMKSEPQAFLSAIAPYREDLVVGAECIFCWYWLADLCEREGIRFVLGHALYMKAIHGGKVKNDKIDSAKIAGLLRGGMFPLAYVYPAEMRSTRDLLRRRQYLVRQRAELLSHVQNTNSQWNLPQFAKKLDRKSNRIDVAQRFEDAAVRKSIEADCALLDRLGELIKELEAYLIRNVRVHDSRTWYRLRSVPGIGEVLALVILYEIQDVARFATVGQFCSYARLVRGAKESAGKKAGPMGRKIGNAHLKWAFSEAVCLMMRELPQASAYVERQEKAHGKGKAMSMLAHKLGRAVYFMLKRNDAFDVKYFFAN

SEQ ID NO: 233065 - protein, 367 aa, unidentified
MKKVSTVAAKQMKNFPQQKLTIGLDLGDRWSWYCVLDEAGKIRLEQRVSTTPKAMGEVFGGMPHCRIALETGMHSPWVSRLLSQLGHEVIVAHARNVRLIGESRKKDDRLDAQTLARLARIDPQLLCPVKHRSAQAQADLTVIRARAGLVRARTALINTARGLAKSYGERLQGCNPRNVNPEKAQGLSPELQAALQPLLAAVEALSEQIRECNERIEQLAQQRYPQTALLKQVKGVGTLIALTYLLTLEDAHRFRKSRDVGCYLGLQPGRRNSGQSEPQLHISKEGDPYLRTLLVQGAQHILGPFGADSDLRRWGLKLAERGGRNGKKRAIIATARKLAVLLHRLWVSGEVYEPLRNSKQKAMAIAA

SEQ ID NO: 233066 - protein, 365 aa, unidentified
MKKISTTTAEELRKMQKLTIGLDLGDRSSWYCVLDESGTAVLEQRLSTTPKAMKEVFGGMPRSRIALETGVHSPWVSRLLSELGHEVIVAHARNVRLIGEGRRKDDRLDAKTLARLARIDPQLLSPVKHRSAKAQAHLTVIRARAGLVRARTALINVARGLTKSYGERLKGCNARNLNSQKAQGLSPELRDALEPLLEAMESLSERIRECNQRIEGIAQEHYPQTALLKQVKGVGTLVALTYMLTLEDAHRFSKSRDAGCYAGLQPGRRNSGQSEPQMRISKEGDAYLRGLLVQSAHHILGPFGADSDLRRWGLKLAERGGKNGKKRAIVATARKLAVLLHHLWVTGEVYEPFHSSQRGRLAAAA

SEQ ID NO: 233067 - protein, 345 aa, unidentified
MKEYAGIDVSLEYSSVCVVDADGRIVRETKILSEPDALIAWFSAHGVAMERIGLEAGPLSQWLHAGMVKAGLSVELIETRHVRAAFKAMPVKTDKKDARGIAQLMRLGWFRPVHCKSLAAQEVRALLTVRKLIQGKLHDIEMSIRGILRGFGLKVGPTTRRTYAGRIRELIAGHSTLEAIATALLKVRDVLVQEFAGFERKLRAIARQDDNALRLMTTPGVGVLVALTFVAAVDAPERFRSSRAVGPHFGLTPKKYQSGETDHSGRISKIGDGSVRTALYEAANVILTRPVKGSDLKGWALAVARRAGPRKARVALARKLAVVLHCMLRNRTSFIPHQGAPAPAA

SEQ ID NO: 233068 - protein, 410 aa, unidentified
MSPLYVGIDVSSKSNVAYLMKPDGSKHSNFSVPNSRDGSRQLVKRILSAITSESLTDVVIGLEATSVYGDNLVCFLREDGSLAPYNKKIHVLNPKQVNKFKLSYNDLPKNDYVDSFVIADCLRFGRINKEVYLGDYRYAALKNLTRARFFAVQNLTREKQRFMNQLFKKYSTMTQEKVFSDTFSTTALAVYESFESAETLANMDLHQLTEFIIEKGKNRFPDPDSAAKAIQKAARSSYRLPKTVNDSVNQVLSISISSMRAMESQIKAFDKAIAEQMALIPNTLTSVNGIGPVYSAGIIAEIGDINRFPTQASLAKYAGLVWSQHQSGDFEAQNTRLIHSGNRYLKYYLCEAALSLVRCDAEYRSFYRRKYHEVNKYQHKRALALTARKLVRLVFRLLKDNCLYRAPESK

SEQ ID NO: 233069 - protein, 437 aa, unidentified
MSQNKNHAKKSVCLQSLPLIHPHAAGIDVGAKEHVVAVPADRDPRPVRSFKAFTPDLYELAEWLQQCGVKTVALESTGIYWITLYEILEERGFEVRVLNARHVKNVPGRTKTDVLDCQWIQKLHSFGLLSGSFRPDQQIRTLRSLMRLRDNLVVQSTQSVHHMQKALFEMNVQLSNVISDIVGESGMRILEAILAGEHDPARLATLCSPRIKAARETVAKSLHGNWREELLFSLRVALDSFRFAQGKIAECDARITEHLAQFADRAVLETPPSSLKSELHRVCGVDLTKIPGIKEQAAQIIISEVGLDMTRWNTEKQFSSFLGLCPNNSISGGKVLRRSTRKVYNRAADALRLCSQSLTHSKTALGAKYRRLKGRLGAPKAIVAMAHHLARLVYRMLRYGRQYVEKGIAEYEIKFRLQRLKWLKHEAKSLDMQLLPA

SEQ ID NO: 233070 - protein, 486 aa, unidentified
MGTQYALRIGLDWADQKHDLMVLAAGADAPVHCEIDSAPESIDHWLAERRIEHPAGRFAVCLEQTRGAVCYALLKYDFIDLYPANPSTLARYRHAFSPSRSKNDRCDAELLLDLLVKHPDHLRRLEPDSAAMRKLTLLCEARRKEVDGRTRLANRLQSLLRDYYPQALGLCGQKLHSPLALDFLGHWTTFQALRRARKTTITHFYKSHHASERTAARCLETIAASCPVTDDAAIMETSILRVRILLEQIRVANQAVKTLEDEIEKTHPEADASALFASFPGAGKALAPRLCGGFGSDRTRFASTESFQAASGIAPVTEASGKAHWVHWRWSCSKFLRQTLVEYAHESRKRSAWAKTFYDSQRAKGNGHHAALRALAFKWARIMYRCWQNRTPYDEEQYMQSLKKHGSWLAQATEAGVRHGCWSHAASSQNCSNLPEAKQQRRAMMSLAPLTDQNMPERLRRWPMRVLQPASMTPEPTNSPIPRNSA

SEQ ID NO: 233071 - protein, 354 aa, unidentified
MPHNTSRLEAVATIGIDIGKNTFHLIGLDRNGAIVLRQKLSRRQIEPRLANTPPCLIGMEACVGAHHLSRQLKAYGHDARLMPARYVRPYSKGQKNDFRDAEAIAEAVLRPTMKFVAIKTVEQLDLQALHRVRERLVCQRTSVINQIRAFLLERGIAVRQGPSALRSEIPIVLSMTDKLSPRMIQMIEDLCADWRYLDERIETVSDEIKTLSEQDEGAKRLMTVPGIGPIISTATVAAIGNGDAFSKGRDFGAWLGLVPRQMSTGGRTVLGPISKRGNRYLRMLFVQAAHAVLLHPQCWERHGLKSWIAAAARRLNRFKLAIALANKLARIAWGVLHGGRSFEVRSMKPAAQCL

SEQ ID NO: 233072 - protein, 365 aa, unidentified
MKQGSIKLFVGIDAHQESLSIAVLPETAETPEPVRELRNEPAKVRQYFRNLSSRGPIEAVYEAGCLGFVLHRQLVSLGVTCTVAAPSRIPILPGDHRKTDRLDAERLAIFLRGRQLTAVNPPTKETEALRSLTRTRLGVQEDVIRSRHRLQKFLLLRGEIYREGGNWSQAHMRWLAERKLELAEDQLTLDFLHMELDQRVMALKTLDERIGRRVEDADVKQQVQALRAFSGIGNLTALCVIAELGDPRRFPSSDQVASYCGLIPSEYSSGEKVRRGGIACSGNGRLRRVVVEASQHAARQLGTGYAREARRAKVPAPIVALAREADQRLSLRYKTLARRMHTNQAKTAVARELIGYLWRALLLVA

SEQ ID NO: 233073 - protein, 338 aa, unidentified
MSILYVGIDLAKNVFAVHGVNETGAAELRQPRVVRARLHALVASLPPCTIGMEACSGAHHWARLFQAHGHTVRLMAPKFVAPYRMSGKQGKNDAADAMAICEAVQRPNMRFVPLKTEEQQSRLLVHRARQGFVEARTATLNRIRGLMSEFGIVLPLKAEVVRRKAHNHLEDLPGYANTVIGDLLSEVAHLDERIRQYDAHIHAMARDCALAQRLMRLTGVGETTATALVAMVGNASDFDSGRQLAAWLGLVPGQYSSGGKTRLGRITKAGDAYLRSLLVLGARAVLNAATKKTDSLSRWAVQLRERRGYWKAVVAIAAKNARMAWAVLTKGESFKLPA

SEQ ID NO: 233074 - protein, 423 aa, unidentified
MMKLKYSICCGLDVHKNVIVATIVTTNKDGISEYLQKSFSTINSDIQRFHNWLIENNCYHVCMESTGKYWIPIFNYLENDIDVCLTHPKYVKAIKGKKTDKKDSKWIADLYKFDLVRCSFIPPKDFRQLRELARYRFKLVCMKSSEKNRIQNCMTVSNVGIASVLSDPFGKTATEIMSYLLEHTADSIDEKAVRKLIKKGAKAKSDEIIEAIRGYNIETDQAKKLELARGHLEYLDNMITQTEVELYVRIKPYYEFVEFVSTMPGMTELSSTIVLAETGVDMNIFDDAKHLCSWCGLSPANNESAGKKKSVRIAKAGDYLKPMMVQCALAAVQSKKQPYFAIKYGRIKKRRGHKKAIIAIARMMMVCIYHMVSEKKPFTPTDYEDLMAPQNHVERVVLNENNVFAYLESLGYDSSKLVKRNDN

SEQ ID NO: 233075 - protein, 347 aa, unidentified
MDQIIRIGIDTSKHVFQLHGVNAAEEPVLRKKLRRQDLITFFGKLPPTVVALEACGGSHHWARLLRSLGHQVKLIAPQLAKPYVKRGKNDAADAEAICEAMSRPTMRFVPVKTPEQQAALMLVGVRDRLIRQRTQLVNVIRGYAAEFGLIAPKGLCRIEPLLERVKTEETLPALARELFEMQATEYARLQVQLEEVEDRLMAWHRAHEGSRRLARIPGVGPIGAAMLVMKTPAPEAFRSARHFAAWLGLTPKDHSTAGKVRHGVITRAGDEILRSVLVVGATAVIRQLRRGQCAPASPWLVALLKRKPPKLVAVALANKIARIAWKLMVTGESYKGPSARPASACAV

SEQ ID NO: 233076 - protein, 423 aa, unidentified
MVVICLSDQLNSIYVGIDVSKLSNQVYFTDFNQSLSKSFSAPNNNHGAELIETNLLRFIENTQFTHVIAVLESTGIYSAHIATYLSASEVLFPYHIEVYCINPKISKNYRSSFSDMDKTDPKDAFILADLARVGRTKSMNPFKGSQKLALQRLTRHRVHLVELLNKEKNYVLTNIFLKFSEFSNKDSKITSDTFSKTAISILEEFSSPEDIINTPFDDLVAFISKASYNHFVNIDDVAILIKKAARASYRLDKSAYEPINYAISSSLVLVRCFEDELKKIDKSIELLAKGFSQNEYLSLRSIPGIGPVFAAGILSEIGSIHQFVSEESLAKYAGITWRKNQSGKFEADDTKMTKTGNHYLRYYLIQAGNSVKNYIPLYNDYYHKKFNEVTTHQHKRALALTSRKLIRLIYGLMSKGQLYNKNY

SEQ ID NO: 233077 - protein, 342 aa, unidentified
MYYIGLDVHKKTISYCVKDSSGRVHQEGKLGATRCELDSWMRTLPQPWTVAMEATIFTGWIYDHLHPHATQIKVAHPLMLRAIAAAKKKNDRVDASKIADCLRCDFLPECHMASTEIRDRRRTLRYRYLLVRQMVQTKNRISGLLMETGVTHNKQRLHKVGYFRELLASNEEVSESIRPLLRLSRDTIARLQKTERALVSSLQRDPLLTERIKRLRTVPGVGPITALTWALEMGEISRFPSIRQAISYCGLCGDERSSAEKSIRTPISKQRNKNIQFVLIEAAKLAPRQDHDLAVLYAREKEKGNANRATLAVARKMVAYLLAVDRGKRDFVPVDHGTNTAA

SEQ ID NO: 233078 - protein, 351 aa, unidentified
MATSCITVGLDLGDKRHAVCALNDAGQVALRTSIAATAAGLRGLIARVGRCRVALEAGTHSPWVSHELDGLGCEVLVANPRRTRAIWDRVDKSDGSDAEMLARLARVDPQLLRPIHHRGREAQADLALIKARSALVRARTGLISHARTLVKSFGERLPTCDADSFARRVWEAIPAAVTVALEPIVRTVGELTEKIRGYERRIEALSAQKYPETGLLRAVPGVGPLTALAFVLTIEDPKRFAKSRSVGVYLGLTPRRDPSGGCDRQLRITKAGDSLMRWLLVQCAQRILSPRGPDSALRQAGLRQMERGGKNAKKRAIVAVARKLAVVLHRLWRDQAVYRPHPRADAQSQAA

SEQ ID NO: 233079 - protein, 425 aa, unidentified
MNQSNHYTQNDYAAFIAIDWADKKHVFSLQVTGQTKKEAGTLEHKPEVIGPWVAKLRERFAGRPLAVAVEQSRGALIHALLTYDFLVIYPLHPTTVSKFREAFKSSGAKTDPLDADQILQILTKHLELLKPLTPDTEETRLLARLAEDRRKAVDLRTSHIQALTAALKEYFPQAIELVSGNLTSRLACDLLMKWPTFESFRQAKPSTIKRFYYGHNIRSSEVIQRVLDLAKAKSLTTDPAIVQSGSRLSQMYTQLIRALNPVIDDYDSSIEKAFEAHPEVNLFNRLPGAGPALAPRLLTFFGTDRSRYQSAQNVHSFSGIAPVTKSSGKTRAVYFRVACPKFDRQTFHEFARLSIAKSQWARNYVDYYTDKGKNFHTIIRALAFKWIRILWKCWQDRTPYCEEKYMQALKKRGCVFATLHLQNKS

SEQ ID NO: 233080 - protein, 342 aa, unidentified
MNTLYVGIDVSSKSNVVYLMLPNGDKHSNFSVANSHEGSTLLVKKIYSALTSHSLDTVLIGLEATSVYGDNLVYFLREDATLAPFNRKIHVLNPKQVKKFHDTYNDLPKNDYVDSFVIADCLRFGRINKEVYMGEYRYKALQNLTRARFFAVQNLVKEKQRFMNVLFKKYSTMTQEKVFSDAFSTTALAVYDEFESAEALANMDLHELTDFIIEKGKNRFPDPDAVAKAIQKAARSSYRLPKTVNDSVNQVLSISITSMKALESQIKEFDKAIKALMELLPNVLISIPGIGPVYSAGIMAEIGDINRFDNQASLAKYAGLAWKQHQSGGFEAEVTRLIPSGN

SEQ ID NO: 233081 - protein, 346 aa, unidentified
MDFDPKEAEMKYCGIDLHSNNSVVIVSDDEDRIVLQRRLTNDLGQIRGVLEPYREELVGVVVESTYNWYWVVDGLMDAGYRVHLAHPSAIRKYEGLKHSGDVADAAYLAQLLRLGLLAEGYIYPREQRGVRDLARKRMQLVRYRTAQILAIENILIRQTGARMKGEAVKRLTAEQVDTLALAPDVALAMEANRAVSQALGQQIEALERRLKERVSLRPEYRLLQSVPGIGEILATTIMLETGCIDRFAQVGNFSSYCRCVDSLRESNGRKKGEGNAKNGNKYLAWAFIEAANFALRCCPQAKSFYERKKSKANRVLALKALAHKLARACYYILRNQEPFDVSRCFG

SEQ ID NO: 233082 - protein, 370 aa, unidentified
MREPTPLFVGLDVHKETISVAHAVGGTVEPPHFVGQIGTLERDLDKLVRRLQSLSPQLVFAYEAGPCGYVLHRYLTGKGLDCRVVAPSLIPKKPGDRVKNDRRDALELARLLRSGDLTSVYVPSVEDEAVRDVSRARDATRVTLKSAKLRLKSFLLRLGFNYVGRADWNAAHRRYLAQVVCPTPAQQIVFQESLRAVDEQVERLARLEQQLLELAPAWRLYPVVEALQALRGVQWLVALTVVAELGDLTRFDNPRQLAAFVGLTPSEHTSGEKRRQGGITKAGNGRARRVLIEGAWAYRYPAKISAHIQKRIENLPKVAQDIGWKAQVRLCKRYRRLIARGKHANIVTTAIARELLAFMWAIAKEVKISA

SEQ ID NO: 233083 - protein, 442 aa, unidentified
MIRPHVAGIDLGSNEHWVCAPQVDGSGREVEKFGATTPELERMVEWLKQRRVESVAMESTGVYWIAPHEILERHGLEVVLVNTRELARVPGRKKTDRVDCKWIQRLHSCGLLTGSFRPAEQICILRTLVRDKGNLVAEAGDWVRRMQKSLDQMNVRVHRAVSDLDGATGMAILRAIVKGERDARQLAKLRDRRCQKSEEEIAEQLSGHWREDHLFSLQQALRMYDAVQERIADYEREILRKLADMERDECRGQRPPTSNHPQKAKAIRKRGEEPLRQALYRMSGVDLTAIDAIGVGTVEVVLSEYGADLSRFATEKQFVSHITLAPRQAVSGGKPVKKKKRGSASTRVAAALRMAALSLRHSQTALGAYYRQIARRIGGDVAVFATARKLATLIYRLLKWGQPYVDEGAQAYEKRYQEQRLKRLTAMARDLGYQLTPKAAQA

SEQ ID NO: 233084 - protein, 315 aa, unidentified
MTTIGFDVGKLELVGVRIGKDAKVRERYYIANQPKAIDNLLSILGNKYKHIRIGSEATAEYHRLLALSCIDKNIPFCLINPIVTKQFTRATVRKKKTDVSDALVIAKLIRQGEGRLVSKDDFMASKAILRTANKLSSMHQALSLIKRRFEDNYHNETTTIKIVDHCLSVVEDSIGQIRKQAQAEDEELLKLLCSLPGVGKITANALIAEIGNIERFKNSKSLIAYAGLDPRVRQSGKLLHHNTRLTKRGSPYLRKVLFTAASIGLRHDKELGDYYTKKRNEGRSYKEAVIATARKLTNRAYAVWKERRVYVKTQT

SEQ ID NO: 233085 - protein, 377 aa, unidentified
MGREQREEKIGQLSVGVDLHKSQLTICVMRADGELVQEGEYRTTAEGYRAFVQKMHEWEQELGCSVAMAVETTGNARYFRNRMEAEGFSVVVVNTNKFKVISQSTKKNDRGDAATLAYYLGKGMLPESHLADQSSEELRRMIKCRSLLVSSMVKMKNQIHGMLLGYGIATKAAQLQSNKKRQALVKDLADQGFTEAAASLEVILGIIEGVQEQIKVLEKRLHEMVRDDEDVDLLMSIPGVGFLTASTIAAYTKDLDKRFCGDFKRFASYVGIVPSVHNSNETVHMGRITKHGPQELRTALVQATMGMIRLSKITGEWRLMTDYRAMKTGKGSGKSIIATTRKLARIIFAMLHNREPFNPALMVRDKCLFTIEEVIGA

SEQ ID NO: 233086 - protein, 343 aa, unidentified
METFYYIGLDVHKKTIAYCIKTITGKLASQGVISADRKTICQWLTDLPGPWLGAMEATIFTGWIYDFLKPHAVELKVAHPEMLKAITAAKKKNDRADAEKLADLLRVNLLPECVMMPEELRELRRILRYRNMVVRTASTMKNKMSGLLMEVGATYDKRRLHGKRYFKNLLERVEDVPESVKELLSLSRGGLDLYEGVQKKLVKTLRENALIRERVERLMSIAGVGEVLALTWVLEIGEVERFSNIRQAVSYCGLCSAQRESAGKEQRGPLSKKRNKHLQTMLIEAANLAPRWNQHLAAVHEKEMLRGNKNQATIAVARKLVEYLLAVDRRGTPFTAEAPRLVA

SEQ ID NO: 233087 - protein, 422 aa, unidentified
MLHDSEDTEEIIERVAALDIGKAELMSCIRVPNPDRPGRRAQEITTYSTMTRSLLGLADRLHELRVTRVVMEATSDYWKPVFYLLEAHGLDPWLVNAKDVKHLPGRPKTDRLDAVWLAKVAERQMLRPSFVPPPQIRLLRDLTRYRVDLVSVRTAEKNRVEKLLEDAQIKVSVVASDIFGVSGREMLAALLAGERDPAALAQLARASMRRKIPLLEEAFVGRFTDHHAFLLRTMLARIDETSADIAAVETRIEELVAPFAQAVERLDEITGVGRTAAHTMIAEIGLDMTRFPTAAHLCSWARFAPGIKESAGKSKGRGSTGHGNPYLARVLGEAAVGASRTDTFLGERYRRIARRRGKKKAIVAVGRSILVIVWHLLSDPDTRYHDLGSDFYDNRLGPERKKRAHVRQLEALGFKVTLEPAA

SEQ ID NO: 233088 - protein, 309 aa, unidentified
MQDTLGIDVSKDRLDAHALASGEARSFGNDRAGWARLVRWLRHLGAPLVIFEATGIYHRGLERALAAAGLPFYKASPLRARRFAESCGRLAKTDRIDAEMLARMAAALALEAQPAAPENLRALKDLLAARRALARDLARERTRTPANALLGRLARARERLLVGQLAALDAGIAARIAADPGLARRAAILRSIPGIGPVTAAEILIDMPELGTLSGKAAASLAGLAPVPRQSGKTQGQAHIRGGRPGLRRALYMPALVAMRCNAGLKAKAQRMATSGKPPKVIVTAVMRNLLVLANVLLGEDRLWQPTRP

SEQ ID NO: 233089 - protein, 420 aa, unidentified
MDNSIAYKLAQLPQSALFVGIDSHKRQHTVCVLDQRVQVLAKFRITNLRPGFNDLLQRCETLRQQAGVDVCLFAIEPAAHYWRNLAYFLADHNQVFRLINPFTLKRQRDGNDLQRRKNDYRDAHMAAELLREGKYTWTSLPQGAYAELRQLHLTYQRLVTDYARLKLHLTRALDQLFPEFLTVCKAVDSATALSILRCGLAPAQIAALSQQEFVTHVRQQHDGRRLMVKKVYAVHALAGQSAGSGAAATALVNDVVLLTQHLVFVQRQRQCAEDQLVAAFAGFSESSYLRSIEGLGSLNGAGLLADIGDIRQYSSCKQLPKLAGVVPTQSQSADHSSARTPMSKKGRPLLRLVTHRAVVSLVRHNTVFKAYVQRLTTRAGGHTPLTKREAMGAAMNKLLRIVYSLLHGQQMFDAKKALAA

SEQ ID NO: 233090 - protein, 370 aa, unidentified
MGEYSEAFVAFDTSKTKHAVAIAEGERGGEVRFVGDVASSPARVERLTRKLAGRYDKLHFCYEAGPTGYGLYRQIRELGHDCTVVAPSLIPKKRGERIKTNRRDAVTLARLLRAGELTAVWVPDATHEAVRDLVRARGAAAQDLRRKRQQLLSFLLRHGRIYGGRQHWTLAHRRWLAGQSFTHPAQQIVFEDAIEAIEEALARLRRLEQQLIAIVPSWSMAPVVAAYQAMRGASFLVAVTVAAELGDLRRFDNPRQLMAFLGLVPRERSTGDTVRRAGLTLAGNRHARRVLVEAAWSYRYPARVSETLRARLEGLPKPVRDIAWKAQIRLCARYRRLSAGGKKLPVVIAAVAREMAAFLWAIAGQVALAA

SEQ ID NO: 233091 - protein, 374 aa, unidentified
MAAPTTCPVALRARIRRCRASPLLPKKRWRSHGDHRHGHSSLVRASGVLAGRAGQAEQRVDLVHDRLVRFGKSLSVEDEVVIEATGNSAAVERILRPFVKRVVVANPRMVRAIAYARVKTDKIDATILAKLHAGGFLPEVWVADEDTQRQRRQTAERMGVLEQVVRTKGRIQAILHANLIPKYSGHLFGKAGKKWLAGLPLPEEEKAIVGRLVDELERNLDQLAKLDMTIIREALENPRVVRLMTIPGIGPVVASTMLASIGDISRFETPEKLSCYFGLTPKVRQSGDRPARHGRISKQGNTHARKMLVEAAWSAKTAPGPLRAFFQRVQRNRGAPAAAVVRSERPGLVWWHPRHNGASGLQCPDRIQLYLHFS

SEQ ID NO: 233092 - protein, 354 aa, unidentified
MNKASGKIAYEGKKVFVGIDVHKRTYSVVAVVEGVIAKKWRTVASPEKLAEQLKRYFPGALIYTAYEAGFSGFVLHRVLAKAGIENMVVNPGSIEVAIHNRVKTDQKDAIKIATLLEAGRLTGIRVPTPQQEQERLLTRTREQLVHERSAIKNMIRMKCHQMGLIDPEDRREMSHKLVEEMLAQTPSTEFSLVIEAYWAVWKSIESQIQRIEQQLKEQAKSDPNETIYRSAPGIGPLSARILSNELGDLSQFANERQLFSYTGLTPSEYSSGDTVRKGHITRQGNKRVRYILNQAAWRAIKQDRDLKEFFERLTPRTGKKKAIVAVARKLIGRIRAAMKTGQPYLINSLSAQAA

SEQ ID NO: 233093 - protein, 342 aa, unidentified
MSKLYIGLDVSNALTSICAIDQAGEIAFELKVASDPDAIAAALRPHKRKIVVVGHEAGSLSQWLHVGMIRHRLPVRCLDSSHAHAALKAQRHKTDRNDALGIARIVKSGWVRDAHIRSPRSAQLRMALIMRRTLQRKIIDLELCLRQSVKVFGVKVGASNRKDFADKLRGAIGDDKLLQAIVHGVLRGRAALYEEFILVERELVKVAESDDVCRRLMTVPGVGPITALWFKATVDDPTRFGRSRLLGVYFGLTPRRRQSGEHDGRGSISKRGDPSVRSLLCFCAGSVLRAKAPSRLKLWAVALRKRASYGQTCVAVARKVCAILHRIWISGGVFDPGLPAQP

SEQ ID NO: 233094 - protein, 363 aa, unidentified
MRFYREQRRFYCGIDLHASKMYVCVLDDQGNVVLHRNLRAEPEPLKRALAPYRASLVVGAECMFSWYWLADWCRAEGIEFVLGHALCMKAIHGGKAKNDRIDSEKIARLLRGGTFPLAHVYPKEMRGTRDLLRRRTLLVRRRAELLAHVQNTHTQYNVPTASGKGRDRVREGIEPTAFEDPSVQLMLDADIEVIEQLDETIAKLETHVLKHAKVHDPARLHLLQTTTGAGKVLSLVMLYEIQDVNRFENIGQFVSYARLVSCAKESAGKKQGSGGRKIGNAHLKWAFSEAAALMIRSSPEAKAFMEKMTRQRGKARAVALVAAKIGRAVYWMMKRKQPFDARKLWKSSLPKGVRTTEEATMKG

SEQ ID NO: 233095 - protein, 386 aa, unidentified
MQAPHVSTPIIKDISTIFVAIELSMRSWLVTMYCPDRDKMSRHKLEGGDHGGLLALIDRMRERAARALGVTPAVVSCYEAGYDGFWLHRLLMAAGITNHVFDPASIAVDQRARRVKTDRIDGEKMLRTLMAYLRGEPRVVRIVRVPTPEQEDARRASRDRGRLTKEQTAHTNRIKALLRLLGMAIGNPRRRDWLSWLATQKDWQGQAVPPQIMAEIKREHARLMLVREQLEALARPLAAADLTPAAAQMAQRSELLLRLKSLGPAFATTLTHEVFYKDFRNRREVASYFGLTPSPWQSGGTDRDQGISKAGNPRARCAAIEMAWLWVRHQPDSKLTQDYRRRTLNASKRIKRIAIVALARKLIVALWRYLTTGLVPEGAMLKAVEM

SEQ ID NO: 233096 - protein, 349 aa, unidentified
MMLTIGIDPHKQTHTGVAVDPLGVQIAQRTVAARREGFGQLLEWARKLDSERAWVIEDVRHVSGGLERFLIDRGETIVRLPPRLMAKAREGVRERGKSDPIDALAIARAALREGVDTLPTARLAGAELEIRLLALHRERLVDSRTRLINELRWQLHDLWPEWEIPKRVLIHPAWQTKIAGRLRRTATTVQVQIARDMIARVRELTRTITQLYEQLAGLVKQVAPQLLAEKGLGVLIAAKLIGEIAGIDRFTSDAQLARISGCAPIPVSSGRTDRHRLDPGGNRQLNHAFHMLALTKILHDPRTAVYLAKQRSNGKTSKEAIRSLKRHLVRRVYHLLHDPNNVPITICLT

SEQ ID NO: 233097 - protein, 319 aa, unidentified
MSQSLCVGIDVSKTYLDLATCPASAPARFANTQAGRKLLVRRLHQLQPELVALEASGGYELQILRCVARAQLDVVRLNPRQVRDFAKGLGRLAKTDRLDAQMLAEFASRNQPELRPLPADDLLELRSVVRRRDDLVQERVRESNRRELTQGWAARDLARHVAYLDRRIAAAEAEIQRLLQGQAAWQERAALLQTVPGVGPGLAWTLLAELPELGQVSGKQIAALSGVAAFARDSGNFRGRRCIWGGRAQVRCKLYMAALTATCWNPVLREFYQRLKAAGKPGKVALVACMRKLLVILNAMVRDGVPWQPRTDLAPLALS

SEQ ID NO: 233098 - protein, 402 aa, unidentified
MVMYFAGIDIAKYKHEVSVINAEGKALQESISFPNSKKGGEKLLSLFERLGVTTDNLIIGMEATGHYWLTTYSFLTEAGFDVKVINPLQSDAFRRMYIRQTKTDRQDSFIIAQVMRFGEYSETKLASEEMIALRQLSRFRLSLVDTCSDCKRKVIALLDQVFPEYAALFSDIFGVTSKELLLNYPLPEDMLSVSTIKLTELLKKTSKGRFGQDKVAELREAAQESFGIGYGKSAFSLQIRQLIEQINFHESQIEELEKEIAVLLKATGSFIATVKSIGPTLGAVIVSEIGDIHRFDAPGKLVAFAGLDVKVNQSGEFIGTKNKISKRGSPYLRRAIWLAASRAAFCDPILSEYYQSLKARGKHHGTAIGAVARKLCNIIFVILRENRPYELLPPKAKITVDI

SEQ ID NO: 233099 - protein, 341 aa, unidentified
MTSYVGLDVSLAETSVCVLDADGAVRFEGRVKSTPEALIRCLADRAPEAGRIGLETGQTAGVLVRGLRAAGLPVICMETRHAHKVLSARTHKTDRNDARGLAELMRVGWYREAWVRGASATYVRSLLQGRKLLMQTKRTLENTLRGAVKRFGVITTKTAGRGFAQRAALAMVQDPAYAAYATPMLEVLRGVVEQIRVYDRQLRAIAREHAVGRRLMTVPGVGHLTALAFLSTIEDPSRFKRSADVGPYLGLTPRIYQSGEIDRSGRITKTGDAMTRSYLVEAANVLLVRIDRPVPLRLWGLRIMERAGLKKAQVAVARKLAVLMHAMWSDGTEFEWAQADA

SEQ ID NO: 233100 - protein, 414 aa, unidentified
MEVLITRAAGLDVHKKTVVACALVGEADAVVEPEVATFGTMTGDLERLAGWLAARGVTDVVMEATGVYWKPVYNVLEQHGGFRLVVGNAEHLKAVPGRKTDVKDAVWLARLLRHGLVRPSFIPDREQRELRELTRYRTALIRERASEINRLQKTLEAANIKLAAVISDVTGVSGQKILDALVNGEDDPAKLVDLAHARVRQKREALEQALVGQLSPTLTFVVKHQLRHLHELDDLIAACDAEVEQRMRPFADAIERLDEIPGVGTRTAQVIVAELGVDMTRFPSHRHAAAWAGMCPGNNASGGKRRRAKSRKGSPWLKAALAESAWAAGRCKAGYLPEQFRRLAARRGQKRAIVAVGHSILVIAYHLLARGTSYADLGTDHLDRRDAERVKRRSIKRLEALGYQVTLTPTKEVA

SEQ ID NO: 233101 - protein, 322 aa, unidentified
MGTLSFCGIDVSKDRLDAVSLPEKQSSCMGNDPAGWAQLVEWLSDFSIGAIGLEASGGHERGVMRALLAAGLSVRQINPFKLRQFANASGVLAKNDRLDARMIASFIAVMPTRAAQRRTPGIEQMSEIVTVRRHLSDQKIAAENATKLLEDAMLQRLSRRRIAQLASDIAQLDNRLAEIVAADSALSRRYQVLTSMPGVGLVLACTLIALLPELGRMSRKQIAALVGVAPYDFDSGKLKGKRCIWGGRAPVRHVLYMAAMSAGNWNPTLKAFRHRLKTAGKVPKVTIVAVMRRMITTLNAMVRDDVAWADHLAGRRSAPTAR

SEQ ID NO: 233102 - protein, 343 aa, unidentified
MSIVGGFDVHRRQITFDYVDTDTGRVLRGRIAPACRPVFRRWLAERFAGRTDVEFAVEGCTGWRFVVEELERAGIEASLAEPADTAAARGRKRRAKTDPADAAHLRELLAGGRLPASWIPPVQVRETRAILELYKDLRDEHTAWVQRIHATLFHHGVPQLGTGGVTSPAGRARLETGEGLSPAGHQATMVALRVLDALDVELDVLHRQIRTFASAQPGCKALQAQYGVGPLTSTAIWAMMGDTRRFSASRQAVRHTGLDVTVYSSDGKRAPGHLAKQGPPLLRWALYEAACLASHTRAPDHDFYASVKQRIDHKRATISVARKIARRSHHILRELGDKAYAAA

SEQ ID NO: 233103 - protein, 388 aa, unidentified
MIAVMRPMGEVVIPPFEVGHTNVELCRLLELLRGLDGETRVVMEATGNYHLPVASFLYDSGFYVSVVNAMLVHGYGNNSLRRAKTDKKDAIKLANYGLDHWLTLPRHIPEDEVRLMLKTTYRQYQQCAKVQTMLKNNLIALLDNAFPDANRLFTSTARADGSEKWVDFVAAFPHCECVCGLSEKAFTAKYQKWCKKHGYSFNQDKALDIYASACGHFSVMPKTGTARLLVEQAVSQLRAVSAALAALRSEMQSLASSLPEYPVVMGMFGVDPVLGPQLMAEIGDVRRFHSKKALVAFAGIDAPPYQSGQMEIRSRNISKRGSAALRRTLFLVMGSILCSSPADNPVYQFMDKKRTEGKPYRVYMMASANKFLRIYYALVKKHLDDPEA

SEQ ID NO: 233104 - protein, 353 aa, unidentified
MTSAKYIGMDVHTESISIAVRNSVGKVVIECVIETKASTILQFIDGLRGDLRVTFEEGTWAAWLYDLLKPHVTEVLVCTTRKNVQNGSKSDRIDARKLSEMLYMNNIKSVYHGQHGLRTLKELGRSYLTITKDLTRVMNRLKALYRSWAIPCGGKEVYAPRYRAEWLAKISEAGVRRRAEHYYQQLDALRALRPEVRRDLFVEAKKHKAWKLLRHIPGIGPIRAALLMAVMQTPHRFRTKRQLWTYSGLGLETHDSAQYNVAEGQLQRSKKPPMVRGLNKDHNHDLKDIFKGAATRVSSSRGPLHDFYEDLLAKGRKPTMAVLPLARKIAAITLIVWKKEVRFDANYLKQQAA

SEQ ID NO: 233105 - protein, 316 aa, unidentified
MSKKKTFIGIDICKASLEVAVFQRDTRFVLANKESAFPELLAELISLRPKRIVVEATGGLEIPVVSALYAAGLPVVVVNPRQIRDFAKSTGQLAKTDKLDAAVLAHFAAAIQPELRRVKNAAELELDALVTRRRQLVEMLAAEKTRLSSTATTAMRAEVRTHIEWLEQRLEDIDEQLRKRITDSPVWRVKDDLLQTVPGIGPVTALALVADVPELGDLNRHQVAKLVGVAPLNRDSGKLRGQRHIFGGRQAVRNTLYMAIQSAVRHNPIIKEFYLRLLANHKPKKVALVACMRKLLTIVNVMIKTNTKWQLAQKTS

SEQ ID NO: 233106 - protein, 346 aa, unidentified
MNLRNEQGDVLVKRQVSTEWPRVRSFLEEVREMSLPEEGFITILEVCGFNDWLLKLLTECGCRETILIQPEKRSKKKTDRRDAYALGELLWVNRQRLLAGKKIQGIRRIQLPADGEAEDRQLTVVRQRMGQQRTRTINRIKHLLRKHNLEQQQPAKGLDTQRTRKWLITLPLAAIDRLEMDLLLSQWKLWDEQLAKLELEIEKRQAQSKTAAVLATIPGCAAYGSLALASRIGSIERFPRPASLANYWGLTPGCRNSGEATDRLGSITKQGSAMARFVLGHMVLHVLRRDGRMKAWHGRIKRRRGSKIARVAVMRRLATIIWHMVKHNEPYAVGGPPRRKLPAQAA

SEQ ID NO: 233107 - protein, 431 aa, unidentified
MLSNEQNNSTISVVHEISCGLDVHKKSVSACLLYSDSSGAEQSEMREFETFTDDLIKLKEWLLERECPVIAMESTGPYWTPIHNVLEDSVRVILVNARHMRNVPGHKTDISDSRWLAGLLRHGLLKAAFIPPKHQRQWRDLTRMRRNYKEDLGDFQRRVHKLFQQSNIKIDSVVSDLFGATGRNLMKLLISSDNSPTISEVENCLRGSLQDKAAELHRSVQGFFEAHHRFLLSVLLNTIENLETQISVLESRIREVMRDAQEAIRRLEEIPGVGAVSSHAILAEIGPTLDEFPSAHALASWCGLSPGNNQSGGKRFSGKSPVKKNHLKTIMVEVAWPAIKTRGSYFRAKYYSLRARLGPKKAIIAVAHKILKAIYHVLKDGVHFKDLGETYLLERNREAKIKYLTWQASLIGYELVPLNQPEVTTPIPIFS

SEQ ID NO: 233108 - protein, 423 aa, unidentified
MMKLKYSICCGLDVHKNVIVATIVTTNKDGISEYLQKSFSTINSDIQRFHNWLIENNCYHVCMESTGKYWIPIFNYLENDIDICLTHPKYVKAIKGKKTDKKDSKWIADLYKFDLVRCSFIPPKDFRQLRELARYRFKLVCMKSSEKNRIQNCMTVSNVGIASVLSDPFGKTATEIMSYLLEHTADSMDEKAVRKLIKKGAKAKSDEIIEAIKGYNIETDQAKKLELAQGHLEYLDDMITQTEVELYVRIKPYYEFVEFVSTMPGMTELSSTIVLAETGVDMDIFDDAKHLCSWCGLSPANNESAGKKKSVRIAKAGDYLKPMMVQCALAAIKSKKQPYFAIKYGRIKKRRGHKKAIIAIARMMMVCIYHMVSEKKPFTPTDYEELMNPQNHVERVVLNENNVFAYLESLGYDSSKLVKRNDN

SEQ ID NO: 233109 - protein, 346 aa, unidentified
MIIIGCDFHPSWEQVAWLDTETGETAERRLVHAAGEAGPFYRQWPAPTLIGMESTGNCQWLIDLLTELGHEVWIGDAAQIRAMMVRQQKTDRRDAAHLLELLVEGRFPRIWVPSSGERDQRQLLIHRYKLVTLRARVKNELQHLALNQGVQKKRKLWSEAGQKLLRELPLKPWASRRREDLLKVLSMLDGQIKPLDEAAKEAAEKSKMARLLMTQPGVGPITSLAFVLTMGDVKRFARGKQVASYLGLIPREYSSGGRQRLGSISKQGNRFLRMLLVEAAQGAVRCDPGFRQEYLHRCHQKAKGVAKVAAARKLAIRLYWMLRTQTPYPEVVRIESSPRVPLVGRS

SEQ ID NO: 233110 - protein, 404 aa, unidentified
MAVYAGIDWGGTAHAVCVLDESAVPLAQFEIKHAAAGLAELGIRLRQFVHTPSELRVAIERPSGLLVDSLLDAGFALVPIHPNVVKASRPRYRAAAGKCDRSDAYLLADLLRTDGHRFRALAPECDAIRALRALVRSRDDLVTHRVALANQLRSLLESFWPGAAAIFAEVDSPIALAFLERYPTPHSAARLGQKRLRSFLASHAYCGRRHPIALLARLRNAAQVALGEHEAEAKGELVKALLRILATLVAQLATLSARIEHDVAALPDGQIIMSFPRSGRINAAQLLCELGSVRERFATEAQLAAEAGVCPVTYQSGKFRGVVFRWACNHRLRAALITWAGNSRHACPWAAHLYHGARRRGARHPHAVRILARAWVRVLWRCWIDQRPYDSAKHHAAASLLATA

SEQ ID NO: 233111 - protein, 354 aa, unidentified
MSKYITESFVGMDIGDREIRFCILDPDGSVMDSGSLETTVRGLNAFLDRFDTPETVLVALETGTHSPWISHLLEARGLRVLVGNARKLRAIWDTDNKFDDRDAEMLARIGRFDPALLYPIHHRSRRAHADLAVIKARDTLVRCRSTLIAYLRGICKTAGARLPSCTAEAFARRVVEHLPKDLLAAAIPCVNTIDELNGKIRQLDSQIEKLCAEAYPETKTLRQIAGVGPITALSYLLTLEDPNRFLKSRDVGPYLGLTPKRDQSGQSDKPLPITKAGDTYLRRLLVGSAQYILGPFGADCHLRRYGMRIASRGGKAAKRRAVVAVARKVAVLMHHLWKYNAPYDPWYQPNAKAA

SEQ ID NO: 233112 - protein, 457 aa, unidentified
MNNFYLGIDVSKGYADFVIINHCKKTVMKNFQLDDTFDGHTRLYQTIKSFCIQNPGCQIMAGLESSGGYENNWHQTLLNFQNSLNLKIAHLNPLAVCHNRNADLKRIITDSISAKSIAEYLISHPEKVTYQKQRNPLQSHSKQLGFIIMLEKQYTLFRNQFESILYVANPTIMAYCKDGMPEWVLKLLIKFPTVKQLSRVKPHTVAKIPYLSRERAVALISDAKSSIASCTDDVTGDLIKSYAQQMLNLKTTIKTQKKALEKSCDMPEVRLLQTVNGIGAFSAVALMIYIQNIERFHSSKKISAFYGLHPVFKQSGDGISRVQMSKQGQKNVRRILFMVTLNAIQSNPLIREIYEKKVSEGMEKMAAIGLCMHKLLRIVYGMLKTQKPFDPEIDRCNRQKSIMTDEGVKKDKNRRLQNYDSKAPISRRQHSKRVERKKSQVDNINKCGIIASVPETI

SEQ ID NO: 233113 - protein, 350 aa, unidentified
MNSLTVAIDLAKTVFELAAADSSWRIVERRRLSWSQLERYLATRDIAHVVMEACSSSHYWARWVQSRGVRVSLLPAQYIRAYVRRDKTDRTDAAALLEAARCGDIRPVCVKSVEQQALQGLHRVRSLWMKTRTARINSLRSLCREFGMIAPMGVKRGLPELLERLSADTQAIPAVLRAALHRLVEEIRELETRIHEIEMELRAVVRQSEVCQRLQTIPGVGLLGATAFLASVGDIHSFRNARQFACWVGLTPREFSSGNTRRLGRITRQGDGYLRMLLIHGARAVLHSGRVARRAGRPLDRLREWALQLEARSCHNKAAVAIANKLARVVWATWHRERDFEFRSKTAVAG

SEQ ID NO: 233114 - protein, 338 aa, unidentified
MTIKALGIDLAKNVFQLHGVDGIGTAALRRRVQRAQLLEVVAQIEPCIIGIEACTSAYFWAEQFGRFGHTVRIISPQYVKPFRLSQKNDTNDAQAICTALQQPNMRFVPCRSAEQQDIQALHRARQRLVNHRTALASQIRGFLRDRGLVFPRNIGQLRRTVPQILEDAENGLTVSARTTIAELFDFLREVDRRVTVFDRRIDEVFRASSLAQRIARIEGVGPKISTAVVAAVGDGRDFKNGRHMAAWLGLVPRQHSSGDRTQLFGISKRGDQQLRTLIVHGARAVVRTAARKTDPKSCWVNQLRDRRGFNRAVVAVANKNARVIWAVLRREEPYRRAA

SEQ ID NO: 233115 - protein, 332 aa, unidentified
MQKISTMRRNGKNIFKGQLTIGLDLGDRFSAYCVLDEAGEIILEQKLPTTPEAMKQTLGKMPRSRIAMETGTHSPWVSRLLAALGHEVIVAHAQNVRLIVKSRRKDDRLDARTLARLARIDPELLSPVRHRSAQAQLHLTEIRARAGLVSARTALVNAARGLVKSYGERLRKCGTQQFRRETMSGLSAGLREALEPLLQEVESLNERIQEYDQRIERMAKERYPETALLKQVKGVGDLIATTYVLTIEDPHRFRKSRDAGCFVGLQPGRRNSGESEPQMHISKEGDEYLRTLLVQGAHYILGPLGKTVIYGAGDRSSPSEEGKTPRNERWLR

SEQ ID NO: 233116 - protein, 315 aa, unidentified
MRSTVAQSVGVDISKDALDVAIHPSGESFRVTNNPEGHRTLIKRLKEFDIARIVFEATGAYHRLLQQALVEAGLPWVKVNPRQARRFAQATGKLAKTDRCDALMLARMGAALDLEPGAPASKTVEAMKELVNARDALVKDRVAALNRQAIVVSPLIKRQLAQRLRQINGQIEAIDKHLKMLRNADSDLCQRFDILTSIPGLGEVTANVLVVETPELGRLDNAQAASLVGLAPLARDSGKTHGKRSIRGGRPRARQALYMPALNAIRCNPEFKIKYQAMIKAGKPAKVAIVAIMRKLLILANALIRGQRKWAPAAP

SEQ ID NO: 233117 - protein, 354 aa, unidentified
MKPEDGQTEVILGVDTHLNVHVGVVIDAVGRMKGTLSIETTPDGYEQLLTWARSFGRLTRAGIEGTSSYGAGLTRFLEKHGIAIIEINRPNRSRRRNRGKSDPTDAENAARAVLANDATGAPKAQSGMAEALRTLSVARRSAVKAKTQAVNQLRALLISAPSFIRDAALKVKPEHCVAACAALSEDDEKSPVLASLKMTLRLLAKRWNALHEELRELDKQLTRLTKLAAPRLFGRFGVGPQTAATLLVTAGDNPTRLRNEAALAALCGVNPLEASSGKTSRHRLNRGGQRQANNALWTIAMVRMRSDARTREYVARRTGEGLSKKEIHRCLKRYIVRELYPLILADLADSARAA

SEQ ID NO: 233118 - protein, 316 aa, unidentified
MIVLGIDIAKRKFDCALLLGERFRTKVFENNSSGIELCVSWIARHAAEPVHACIEATGPYAQAVAETLFDAGHRVSLINPARSRAFAQSLGARSKTDAVDARILARLCQALDPEPWIPAPRSVRELQELVRRLDALIQMHTQETNRLGSAHERVRGYIEESIAFLERAISDIRQAINQHIDRHPDLRTQRDLLQSIPGVGAATCAWLIAELNAKRFVCARSAAAFTGLTPAHWLSGSLQRKARLSKHGNAQLRKALYWPAITALRCNPIVRALAQRLLARGKHKMVIVAAAMRKLIHIAFGVLKSGKPFNPTLAGA

SEQ ID NO: 233119 - protein, 458 aa, unidentified
MPKKSSKKAKSQRSRERALLNKVHLNAAGIDVGADTHWVAVPEDRDQRPVRSFGVFTADLIALCGWLKECQIQTVAMESTGVYWIPLFQLLEREGFEVQLVNARHVKNVPGRKSDVQDCQWLQQLHTFGMLRGSFRPQAQMCVVRSYLRLRDTLSKDCNSLVQRMQKALTEMNLQIHRVISDITGVTGMSILRAIVAGERDCVKLAQLKHPQIRSSVQQIAKALEGAYCPEHLFALQTALQLYDSYQLKILQCDKHVEEVLGAFEAKVEVAAPDLSRLRSAQKRLDALQRHHLEQVAGADLTKLPGLDVLAVQRILSEVGLDMSRWPSEKHFCAWLNVAPNNRISGGKILSSKPRKNANRAAAALRLAAQSAMQSKTAIGAFIRRIKVRLGAPTAINAGAHKLARLLYRMLKYGKAYVETGQQTYERLFKERTIRNLQRKARELGFHLTPAIPGAVVS

SEQ ID NO: 233120 - protein, 358 aa, unidentified
MMKVTTIGIDLAKDVFGLHGVDGEGRVVFKKRLVRNLLLEFLSKLPRCLVGMEACSSAHYWARKIEQLGHRVRLMNPRFVKPYRKSDKNDANDAEAICEAVIRPSMRFVAIKSAAQHEVQALHRVREQLLKSRTALVNQARGLLAEHGIVAPQGIARARRLLLEILADPQRHGLSGLFRETLQEVAERLRFLDERVSAYDDRIERVFKQDERCRRLAKIEGVGPLVATAVVAAVGNAREFKSGRELSAWLGLVPRQHSSGNRSQLLGISKRGDRYLRAILIHGARAALRRADHKRDQRSRWAMRIKLARGYNKAAVAFANKNARIIWALLTRGENYRPPATSVASAGAARIILAQVQA

SEQ ID NO: 233121 - protein, 356 aa, unidentified
MSATIIGVDPHKRSHTAVVLDDCEEIAAQLRVTASPHQVDQLLGWAPATVQRLWAIENANGLGRLLAQQLVARGEVVIDVPATLSSRARKLSGHSGRKTDEHDARSVAIAAGHNHGLRRVSIENVTVAIGLLLDRRWQLVAQRQPTICQLHALLTELVPAGAATHLTSTKAAALLRKITPSSIVELERKLVARELLEDWRWLDRRIPAAKQRLSDALTAYGTTLTDIHGIGEIGAATVLSIVHDPARFPSRGHFAAFNGTAPLEASSGDVRRHRLSRRGNRQLNKVIHVAARTQIRRDGPGRTYYERKLSEGKSKMEALRALKRQLSDVVYRRLLTDDRQRQAVQGGQAGTRPKSA

SEQ ID NO: 233122 - protein, 336 aa, unidentified
MFQLGIDVSKNTLDLCLLREGVKGRVKTRRIKNDVNAASTVITWLGKQQCAPADVHIIMEATGIYHESLAYGLYRAGAKVSLANPHRSREFARGMDILTKNDQVDAYMLACYGALKVPEPWVPPPESVRYLCALLRRRDALVTDRSREKNRLEKCRATDIPPAIAESIENVLRNLSAEIEHLDELILTHLDQHPELKKDFGLLTSIKSVGFQLGLNMLVILRSHHFDTAEQVAAFLGVVPVERSSGTSVRNKPKLSKNGPPEIRAKLYLSSMCGLRFNPAMKAIYERLCLSGKAKMCAIGALMRKLVHWCYGVLKTQKPFDAEYLSSDARSACKAA

SEQ ID NO: 233123 - protein, 359 aa, unidentified
MTEVVHNRRVTIGVDTHLDVHVAVALDERGVRQQEIHVPTTLAGYRELERWAVGLGAIEVFGIEGTGSYGAGLARFLRVSGHRVVEVNRPDRATRHRLGKSDPIDAEMAARAVLSGVATGTPKAGDGSVEMIRMLKMARDSAVKARTQSLNQIRALLVTAPAELRESTVGLTSGALLDRCAAFRPGPLNSPAAVAKHSLRLLARRNVRLRTEARELEVEISRQVASTAPDLLEAFGVGPDGAATFLLTAGDNPGRLRSEGAFAALCGASPIPASSGKTQRHRLNRGGDRQANAALHRVVVVRLRWHAPTQAYLARRLGDGKTKPEIMRCLKRYVAREIHGLLCPSESAVGVLDQGIQAA

SEQ ID NO: 233124 - protein, 307 aa, unidentified
MTAAGIDVGKARLDLAVDGQAGVAGFANDRAGVAKLIKRLRTLGTTRIVVEATGGYEEPLLEACCDAGLWIARVNPRQARAFASATGELAKTDDIDARILALMARLFADRLRPYVAPPSWQRQLRDWLRRRGQVVVLLQAQKQQAAMAPASVRKLAARTIAALARELAAIERTIKTLINEHATPALRSSKGLGPVFQATVLALLPELGHLDRRQIAKLTGVAPMNRDSGQGQGKRRIRGGRAPVRVALYMATLSAVRWDPMMKAHYQQLRARGKLAKVALVACMRKLLGIINAKRRDELRVEGLALG

SEQ ID NO: 233125 - protein, 367 aa, unidentified
MKRAKTETPRYVGVDLGKRTYVAAFVDGKGKVTMGNGTTGAAGRQALYGKLRPTDKVALEAGNMAFVMAKEIGATVGCTVYVLNPSGLAVIYRSMKKTDKEDALKLAHILEDCREERLPTVPVPSDEEMAKRKLVSSHRREQKCRTAAINRLHGMFVSQGITSMVRKDLATAGERRTAVEKLAGLERKEAEHLLKCLVLHEERIAELEAEMAEEVAGSAEIDLLRTVPGVGPKVSFAFFAYVRPERFENASQVSNYLGLAPRVYMSGDTVRYGRITKSGNGYVRALLVQAAWALVRSKAGGRLKERYEEMTAKKGMSKKKAIVALARRIAELMYVLMRDGKKYDARPPAPGRQKQGGEALAVEALVA

SEQ ID NO: 233126 - protein, 349 aa, unidentified
MKIIGCDFHPGYQQIAVLDLATGEMVEKALSHERKEEVRAFYAGLEGSVRVGIEASGQSQWFERMLAELGHEVWIGDAAKIRASCERKQKTDRRDAELLMRLLAEDRFPRIWVPTAAERDGRQLLLHRHKLVRMRTQVKNQLQALALNQGVQRKRKLWSEAGRKQLESLPLLPWASRRRAELLQLLDQLEASIGELDRAVAEQAYVRPAARRLMTHPGVGPVTALAFTLTIGPAERFQRGKQIASYLGLIPSEYSSGAGKQRLGHISKQGSPFLRGLLVEAAQSAVQHEPEMHRAYQRLAQRKCRALAKVAMARKLAVRLYWMLRLQVNYAQLIQGSHAGQPGTFRGRG

SEQ ID NO: 233127 - protein, 341 aa, unidentified
MGIVTVGIDLAKNVFALHGVDQSGKAVFIKPKVVRGQLLEMVAQLPPCLTGMEACSGAHHWAREFCRFGHTVKLMAPKFVAPYRMSGKRGKNDAADAAAICEAVTRPNMRFVPVKDVDQQAILCLHRTRQGFIEERTALYNRLRGLISEFGIVLPQKVERLRREIGAHLEELPGWANRCVGDLLAYADRLNERIEEYDRAIAEAARQDARSRQLMQLPGIGPTTASALVASLGGGHDFKNGRQLAAWVGLVPGQYSSGGKARLGRITKAGDAYLRSLLVMGARSVIAGLGEKQDRFSRWARSLVERRGYWKAAVAIAAKNLRLSWAVMKYGDDFRLTAALA

SEQ ID NO: 233128 - protein, 327 aa, unidentified
MSNPQEVSVGIDVAKAALDVAIRPSGEERPAERPAERPEERQLANDPAGIATLVGWLQTLRVQVIVVEATGGYEAPLVAALGLAHLPVAVVNPRQVRDFARATGRLAKTDRLDAQVLAHFGAALRPTPRPLPDEAAQALAALVERRHEVVAMRTAETNRLGATRVQAVRERIQAHLEWLAADLKVLNDDLQQRVQASPLWQAQDDLLRCVPGVGPTLALTLLAELPELGLLAAGQIAALVGVAPLNRDSGTLRGRRAVWGGRASVRSVLYMGALRATRCNPVIRAFYERLLAAGKAKKVALVACMHKLLTILNALLKHHATWQAQAA

SEQ ID NO: 233129 - protein, 353 aa, unidentified
MKRTTKYVALDVHQATSVASVRIRGGRVIARSILPTESCAITEFFAGMRGSIHVAFEEGTQAQWLHDLVAPVVDRVIVCDRRGEHRGNKGDRMDADMLSQRLLTGDLRPVYHGSTDRATLRELARTYSNLVEDATRVMLRLKSLFRARAIRAPGKRVYGERDRARWLAKLPDRAVRFRAETLYAQLDLLRELRPKVKAAMVAEARGDPAWDVLRSIPFLGPVRVALLLATLKTPWRFRTKRNLWAYAGFAVVTETSAEHDFVAGRVVRRRRRPLTRGLNKNHNRTAKNVFKATAVAALGRPGPLRDFYDALIERGMRPDMARLTLARKIAAITLRLWKTGERFDPTLVNVQPT

SEQ ID NO: 233130 - protein, 425 aa, unidentified
MTYRIAGIDVHKRMLAVVIADVAVEGEYQFERRKVGTSPSDLCRLADWLVAEQVEEVVMESTAQYWRPVWATLEQWWRPKLRESAGARSGQLHLAQAQSNRGAAGRKKDFPDAERLVKRLVAQELKLSFVPDVEQRLWRTVMRRKHQLTRNRVQFQNRLECLLEEAHIKLSSLVSDLLGKSARYMLQAVAEGETNPETIAALADHRLRATAPQLRDALGACRDLHPVYRQLLKMALEELKLMEEQIDKLEQEMASLLSAQQDVVQRLAEVPGLGVDSAQQIIAEVGPEATAFPSAKHLASWVGVCPGEEESAGVNYSHRSPKGNRQMKGLLNQASNAAVKTKGSIFEFIYRRLVPRLGHAQAIGAIAHRLCRLIWIILHRAIRYEERGPAVSRSKTERRAAKMIRELRRLGYRVEPVACQTGVSV

SEQ ID NO: 233131 - protein, 609 aa, unidentified
MKICVGIDAAKVTHWAVAVDGEGRVVLDRAVENDPEAIDGFVAELRGLGQEMAIGLDVVGSFARFLEATLLAEGFALVHTPGIAVNRAGQGFAGGESKSDPRDAARHCPRTNGGQCLAIAELVRTRELRPILPDGDSLVAIRLKVGRRRELVQAQTRRIARLRGLLCGIHPGLERALDIGCKGPLALLARYVTPAGIRHAGKARIVAHLKKTPHLHGAQALADRALEAAHARKIAVPGEAPTAELIRELAAEALDSRAKIARIDRDLETLLTDHPDGALIRSLPGMGAVLAAEFIACTGDIRRFGSADALASAAGLAPVQRQSGKRAGWRRAYGGDKALKRVFYQSAFCAVSARDPLSKAFYDRKRREGKHHNQALIALARRRVTVIWAMPAPADLRSSHQSCLTSALRSPPYAVVDRQIVLGDPHPGQVSDRRLTVLAPSWRARQEGRLFLGEPIGRTFPGLAVDADIGHVAEPGADFGIGRGGIETEPQRLQPAFQRPDEAFLQVSVEALDFAFGLSAIRRAHARPEPVVLGKISEAGMEPVLAGAIGIAVDDHGLRSAALNRWRLTPHYRRGSSSASRRSHRKIVRARRPGSRRSRRSRTTRSSSG

SEQ ID NO: 233132 - protein, 472 aa, unidentified
MKSKSSRKRNPVDPVAEEIPDAEHELVIERVAAIDVAKASGKVCVRLPGKTGRRFSRVWDVPARTGAVSELAEQLIESGVEKVTVESTSDYWRIWYYLLEAAGLDVQLVNARDVKNVPGRPKTDKLDAVWLAKLTEKGLLRPSFVPPAEIRQLRDYTRLRVDLTRERTRYWQRLEKLLEDALIKISAVASTLDTLSTRDMIEALIAGERDPGRLADLARGKMKAKRSELIAALDGRFDDHHRELARMLLDQIDTLTAQIAALTSRIEQLLAAMPDTRSRGDGGTGGDPDRPSTGHGVEPETAARFTDATLLTPVERLDEITGIGELNAQVVLAEVGLDMTRFPTPAHLVSWAKLCPRTIQSGPVTRGGKTGRGNPYLKGALGEAAAAAARTDTFLGERYRRIVKRRGKLKALVAVARAILVVIWHLLANPEARFRDLGPDYHTQRIHTERKLRNHIAQLTAMGYRVTLEPAA

SEQ ID NO: 233133 - protein, 391 aa, unidentified
MIYIGIDVAKDKHDCFITNSDSEVLFKAFTIANNLDGFNDLYQKIESVMDDVTKVKVGLEATGHYSYNLLGYLIDKGLPTYVINPLHTNLYRKSLSLRQTKTDKVDARTIASMLMSDVNLKSYSDTFYHNEELKSLTRYRFDKVKERAKLKTSVSRLVCILFPELEKLVPTLHIASVYALLSEFPSAKHVATAHLTRLTNLLSESSKGRYGKDTAITFRDAARASIGSNMPAKSLELKHTIKLIQELDSEIDEIENEIKIIMDEINSPILSIPGINYRMGAMIIAEIGDFNRFDSPDKILAYAGFSPSTYQSGQLDGAYAHMEKRGSRYLRYALYNATKYVCHWDPIFAAYLAKKRAEGKHYNVAISHAVKKLVRVIYHLEKTKQQYIKVA

SEQ ID NO: 233134 - protein, 340 aa, unidentified
MKVHVCGIDIGKTVFHLVGLSKEGHIVTKKRFNRKQLLTHTVNMPTCLIGIEACPGAHFLARALLQQGHDVKLMPAEYVRPFVKSNKNDYVDAEAIAEAVQRPTMRFVPVKNEAQLDLQALHRVRDRWIGRKTAVINQLRGFLLEHGITVRVGPAHLQRQIPSILEDAENLLSARMRMLLVELRDEWVKLEEQIDASTRELALFAKKEDGCRRLLTIPGIGPLTATALTAAIGNGAAFRKSRDLAAWLGLLPRQHSTGGKARLLGISKRGDPYLRRLFVHGGRAVLAQVKRERHQFGGWLDRLEARSPRNVAIVAMANKIARMAWAVLTSGQSYNAAFST

SEQ ID NO: 233135 - protein, 347 aa, unidentified
MRFYTKQHQFYCGIDLHARSMYVCILSQDGEVVLHRNMPASPDTLLKAIAPYRDNIVIAVACILTWYWLADLGAQEGLPFVLGHALYRKAIHGGKAKNDKIDSQKIAVLLRGGMLPQAYGYPAEMRATRDLLRRRLHLTRKRAERLAHIQHTNRQYNLPEIGKKLAYKANRDGVVERFSEPAVQKSVEVDLALLGSYDPLLSDVEWTSVQTAKQHDAHTLYRRPSVPGIGKMLRVVLRYEIHAIRRFPRGQAFVAYCRLVTCAQESAGKRSGTSGAKLGNAYLTWAFSEAAVLFLRHNPVGQKYLTRLEKKHGQGQAFTVLAHKLARAVYDILRRDPVCEMDQLLRG

SEQ ID NO: 233136 - protein, 338 aa, unidentified
MLYSGIDLHKRTVVIATVDETGKVVCEASLPTSRFAVARYFAELPDSTRATVEATSSWYWLRDLLHQEGVPLTLAHAKFVKAIAYAKVKTDAVDALTLAQLHRVDLIPRAHMVSPELRPLRDLLRTRLQLVEKRVSAKNSVHRLLEKFNVPDPASLPDEAALSASLYEEQIELLDSQIRRIEQQLQPRLIPEPDIQRMLWIPGIGKITAFTLYLEIDGIDRFPSVRQFFSYCRVVPGAHNSGGKNRHGRRKDGNRYLKLALSHAAVRAIQYYPEIKRFYQRKARQKNPAIARTLVQKELARSVYIVLAEGVEFNHTFKGQPLERRKQSKWPRQASPGV

SEQ ID NO: 233137 - protein, 377 aa, unidentified
MSNIIKWPGEADGPNPNQFLYVGVDIHKDKHTAVATNCFGHKLMEMEFANTAKDFKQFVASMQSLADRQNREFIFGLEDSFGYGLHLAKHLFDSHLPVKMIPPVLVDRSRKYETHPEKSDSLDALGVAKVLIQRIDTLPDYSISITDELAKEIKELAMDRDFLVKEQTRIKNQLHRLLHKTYGSEYQKKFKDIFALKALRYWKKYPTGKAYILVDDSILKNQVRRKINRLMDIRQECKEIENELKILLDRTGQKLPTMNGCGTVLASAVMAEIRNIERFHSLAALAKYAGLAPRQKSSGKTIRHVKSKSGNRKLNMAIHRIALSQISNSGNQYAKAYFKKKITEGKSKNQALCCLKRKLVNIIYMMLKHKQAYNYQK

SEQ ID NO: 233138 - protein, 359 aa, unidentified
MSNEGTLQMIVIGSDPHKRSHTCAAVGAATGELHGSETVQATGAGLERMLAWGRSLDRERVWAIEDCRHVSGRLERFLIARGERVVRVPPKLMAGRRRAARERGKSDPIDALAVARAALAEGVETLPVAQLEGPAREIKLLLDHREDLVSERTRIQNRLRWLVHDRWPELELPKGCLDRLCWLDRLAGKLSRASQDADVRVMRAQVRRLKELVREAAALERELLLLVRGQQPRLLALPGVGPLTAAKLIAEIAGIERFRSHAKLARLAGVAPIPASSGNRTRFRLDRGGNRQLNAAFHRIAVTQMRWHEPAKEYVSRRLSEGKTKREALRCLKRHLVRTVFNTMVNPAAAAFDTAVGLT

SEQ ID NO: 233139 - protein, 339 aa, unidentified
MHIVGCDFHPGWQQVAVLDTESGEIQEHKLENSSGEAERFYKRLSAPALIGLEASGNSQWFEDLLQDLGHEVWVGDAAQIRASYVRKQKTDRRDAAHILKLLMENRFPRLWRPNVQQRDLRQLLIHRHKLVVIRVRVKNGLHHLMLNRGIQLKRKLWSQAGQRVLRELPLQGWAAQRRKDLLQLMASLDEQIKTLDEAVMMEAKKHPQAALLMTQPGVGPNTALAFVLTLGDVSRFQRGKQVASYLGLIPSEHSSSRRRRLGSISKQGNPFVRMLLVESVQAVNRLDEGFRKQYQHRCHRKAKGVAKVAAARRLAVRLYWMLRSNTPYPEIARIESSSR

SEQ ID NO: 233140 - protein, 405 aa, unidentified
MGDIVEVAWVGIDAGKVSHHATLVDADGTIVWSRQVRNDQAAVEQLIAKAAATATTVRWAVDLTSAGAALLLALLIAAGQRVVYVPGTVVNRMSDTFAGEAKTDARDSYVIAETARLRRDLTELITPNELVAELALLAAHRADLMADWVRGVNRLRELLTRVFPALERSFDYTTRSALILVSRYSTPDAIRDADADQLAAYLRSEEAHRPSIPGMVAKAHAAAAAQTVRLPGEAATAALITRQARKLLDLDREIKDLDKQITERFRAHPQARIIESMPGMGPILGAEFIAITAGDLAAFGTAARLATYAGLAPVPDDSGKRKGVRHRPRRYHRRLRHVFYMAAFSSLKTDGPSREFYARKRSERQRHTRAMIALARRLVDVLWALLRDNRTWQPEPPTPLPATAA

SEQ ID NO: 233141 - protein, 413 aa, unidentified
MGFEATLVAGVDTHKDSHVLCVLDGLGRKVHEGVYPATAGGYDEISRAIGPADGCMVVGIEGTCSFGAGLSARLSHLGYNVVEVLRPKRDKRRRGSGKNDYVDAERAARDAAASNGVSIPKSRDGWSEAARPLLCARSMLVSTQTRVSNLVKSLIDTAPEPIREKYSKLGNARMMAALSRKRKPTGDLVTDGLMSALRSMAKTWIEAADKAAELESAIEGLVRREAPALLEVNGCGAISAATLGIAAGDNPGRMGSEAAFAMLCGASPIEASSGRTVRHRLNRGGNRKANQALHSIVINRMRYDERTSEYVERRTSEGKSKREIIRCLKRYVAREVYRALLHPKETHHPSGESLRARRAAVGLTQKAVAESLGTESMRISEIETERRKSFDLRDAYDKLLERHEKGVLALDAI

SEQ ID NO: 233142 - protein, 315 aa, unidentified
MKLHIVGVDVSKETFDASKSEREVTLLSNDESGFEAFVAWLPADAHVVMEATGTYYLKLATYLFEQGMAVSVVNPVKVSYFAKMRLQRVKTDRTDAGVIRRYGEYDTTSLWQPGAQVFIELNQLDSHLAGLQKDLNRVIGRLEALTQHVTIDTFTLNDLLAQQADLEARVNACEKELVDRTKKHFADLYALLTSITGIGPKTAVMFIVLTHGFNRFPSAKMFAAYLGTTSFISTSGSSVKGSGAITKMGHPRMRQLLYMAALTAKRRNIACQVFADRLKVNGKPPKVIRIAVANKLIRQMFAVCEKQEKYSEVFA

SEQ ID NO: 233143 - protein, 364 aa, unidentified
MEVTTIGIDLAKNVFAVCGADSSGRVLMRRQLRRAQVLSFMRGLPRCVVGMEASGGAQYWARQLTALGHEVRLMSPALVMPYRKGNKTDRNDADAILEAVTRPSMRFAMVKSVAQQDLLALHRVRAQLVKSRTALCNQLRGLLRERGVVVRTGAAALKRSLPAALADDSSELSGEMRELLCEMSQWLRSLEQRIASCEARITRKFKHDERCQRLAAVPGVGPLTATALVAAVGNAQRFRNGRELSAYLGLVPRQHSSGGKTVLLGITKRGDRYLRTLLIHGARSALRQCEGDARSGWARRIGAERGRNVAAVALANKNARVLWALLARGDRYRSTNIAAHAVFRSGSPPAVKRARSAKLHVRKD

SEQ ID NO: 233144 - protein, 388 aa, unidentified
MNVVADKSEPLTAIHTQLGAIFVSLELSRSSWLITSLSPGGGEKMSKHSVRGGDFAGLMERFAQLQEKAKLRTGQSFRIIVVQEAGLDGFWLHRALQSEGIESHVVDAASIATSRRRRRAKTDKIDGETLVRALLAYKRGEPRVCAMVKAPTPEEEDRRHLCRERKALTAERVRHVNRIKGFLFSQGISGYEPLRCDRRQRLEQLQTGDGRALPQNLKALINRELDRLELLLKQIKTVEAARDALLAVEQTAKPAPAAMLLAIRGIGPEFAAILWSEGLFRHFENRRQIAAYAGLAPTPWQSGAVDREQGVSKAGNPRLRTTLIQLAWLWLRNQPRSALSVWFHERVSRNGGRLRKTTIVALARKLLVALWRYVTAGVVIEGVTMKVA

SEQ ID NO: 233145 - protein, 341 aa, unidentified
MEQATTIGLDIAKHVFQLHGADAAGHVLFRKRITRVRLLSFLAAQTRCVVAMEACAGAHYWAREIAKLGHHVRLIAPAYVKPFIKRQKNDAADAEAICEAAQRPSMRFVPVKTEEQQANGIVFRARDLLVRQRTQCVNALRGHLMEYGYVFPKGITHVETLIALVEDLQSSLPDSVRVILKLLIDTFTALEAQIAVLDAEINQRSKSDPTARRLMTIPGVGPIASTAITALVPAAEGFPAGRDFAAWLGLTPLQKSTGGKQKLGAVSKRGERTIRRLLIIGASAVVQQASRRGAPKGSWLAQMLARKPKMLVTIALANKTARIIWALLVKGGTYRTPAAVA

SEQ ID NO: 233146 - protein, 356 aa, unidentified
MAKYSVSALQSFIAVHQTDPFWIGIDVHKRSYHIALLRADSKTFTFTSPASPDAFIEQLRWLNIRVAGVAYEAGPTGFSLARALQAENVPITVAAPSKIPRSVSAGSKTDRLDCLKLAHYAAKGLIRPIAIPTAEEETQRALLRRRHQLVDRVRQSKQRIKGFLLYLGFKETDAIRNWRSDCEEQIAALPLLPEGRLTMESHLRELRFLQQELSEVAKQLEHLNQQLGHCTVIKSLTSVPGVGTVVATSFHLELFRPERFQRGEEVTSYLGLAPTVRHSGEQTPRGYLAPCGQKRLRSLLIEAAWMWRAKDAKAGELYNKLLSKTGIPQKAITALARRLAIILWRLSIEQRAYRPV

SEQ ID NO: 233147 - protein, 428 aa, unidentified
MSENSTTHPEPEFVAFVGIDWADQKHAWCSQRAGATQREHGEVEHTPEMVEVWVSQLAQRFGPGPIAVAVEQVKGALVYMLSKYECLHLFPVPSTMSASMRKSLYPSGSKDDPRDAELLLDLLLQHRKKLRRLTPDDEVTRRIQNLVEERRTLVDEKTTQLNRLTGYLKVYFPQMLEWFEKLDTQLVCDLLERWPSLEELQKVPPAELRKFFGQHRGRHQELTERRLEGIGQAMPAIRDRAVLEAKRAMVQVSAQLLRILLEGIANLDSKIEEAASAHPDFFIFESLPGAGSALAPCLLAAFGSQRDRYGSAEEVQTHSGIAPVMEKSGKKKWVHFRWACPKFLRQSFHEWAGHSISQSTWARAYYQQQRGRGKDHHAAVRALAFKWIRILFRCWQDRVAYDENKYLAALARRGSPLSSVLTVTAATL

SEQ ID NO: 233148 - protein, 322 aa, unidentified
MRYIGIDVSKATFVVAYSSDKGGEIRTFNNTTTGIKQFIGALPKDGSIHCVMEATGNYSALLLYMLNVAGITVSMENPLKVKNFAKAMLSTIKTDKSDARLITLYGEKMNPRPFKVQGEAILRLRQKRTVIRQLTKQITAMSNLRGSLACLPVPDKGATHTVDETIKFLEKRRDRLQSELTELVEVEFSRQLALLTTIKGIGITLATALIITTGGFTYFQNAKQVSRYLGICPTYEQSGTSVNIRGHINRNGDAYTRGLLYVAAWTASRFNTKCGETYTRLRQNGKPGKLAMIAVANKLVRQAFAVVTHDKEYVDGFVSNRP

SEQ ID NO: 233149 - protein, 352 aa, unidentified
MERFCVGIDVSAKKLDVAYRGQRQGVVVQTFENAPASHAALVKHLAKRAGRTGTIRVVLESTGVYGIEVATALDRAGCEVMVVNPRAAAHFAKAAMQRSKTDPLDAAMLLRFAEQMPFTRWKAPSAAQMQIRMISRRVHALTATIAEEKNRLHAAGHLGEGRIIKRSIESTVRALDKEVARLRAEALKLIASEPTLERRYELLLSVKGIAEKSAIAIVAELAVLPSDMTDRQWVAHAGLDPRLFESGTSIHATARISKRGNKYLRSALYKPAQTACTHDTGVKAYAARLRERGKAPLQVHVAVMRKLLHAIHAMFASDQLFDSSRFSPAAGAVGTAEIAPSAISAVSIALRS

SEQ ID NO: 233150 - protein, 341 aa, unidentified
MEEYIGLDVSMKETSVSIRRAGERIWRGKCASDPRIIAELIRKRAPAVKRVVFETGPLSIWFYHSLRTEGLPAICIDARHAKAALDMAANKTDANDADGLAQLAEVGFFREVRVKGFDSMLTRTLVGARTRLVRITTELSNQIRGVMKTFGLLVPAGKGSIFEKNVRSLLTDQDGLASIVLPMLEAWRGIRIRAAELGRQLVRDARQNQACRILMSIPGIGAITATAFTTAIERPDNFKKSRSVGAWIGLTTRRYQSGEVDYDGHISRRGDAHLRGLLYEAAAVILTRSSTDSTLRTWGLKLRERIGFKRAAVAVARKLAVIMHTMLKTGELFNPNAGAIA

SEQ ID NO: 233151 - protein, 337 aa, unidentified
MYYVGLDAHKQYTTIAVLDSRSGNMKLHKRVANTAEAFAGALAGLDGPLHGIVESGRSTWALHDRVCHLLTSLRICDALDLKHCRPPRGATTDPRVARDLAEILASGHAPKPLWVPDADTRINRTLTRGTIRLSQAMNRTINSIRAFCANAGQECPFTSLHGSGAKAWLAEVELPAEIRAMLDLYLANLAQLEALHKQAMKHLRQRAAADPRAQRLMTIPGVGPFTALGILAELGDLHRFTTRRAVVAYAGLGPQVHQSGQVNRTGPLPRTGDRWLRFALVLAAQHIANSKRLDSPLRRHGWCVALKHGKNPGKIAIARKLVLLAHHLLVHEEDYAA

SEQ ID NO: 233152 - protein, 349 aa, unidentified
MLADQVDYVVGVDTHRDEHVLAVVVAPTGAIVAQRSVRATARGYAQALRFTQEHAAGARVWAVEGAGHYGAGLARYLSGHGETVYEIGRGPRNERRLRGKDDSLDAVRAGHAALSSETLSLPRAGQRREALRLLLLARRSAVDVRRQALVQLRSVIVTAPDGLREQLHGLPAGRLIQRCSRLRRSSSRTPDELATILVLRSLARRIEAATAEAAELEAEILGHVRALAPQLLDEAGVGPIVAAQLLVAWSHQGRVRSEAAFARLAGVAPIPASSGKTIRHRLSRGGDRQLNRALHTVILHRRQHDAATKDYIARRVAEGKTQREAVRLLKRYLARHLYRVLDHQAALMT

SEQ ID NO: 233153 - protein, 353 aa, unidentified
MNSLTDLREVVDVVIGVDTHVHTHSAAVVDAATGGVLDEITVEATVEGYAELVEFANNHPMLRAWAIEGTSGHGAGLSRHLLEMSEIVIELDRPKRAARRNGAKSDPLDAIRAAREAMARPRLGTPRTGGERQALSVLLAARRSAINASTEAQLQVFSLVIAAPEPIRVRFRRQKLATMLNTAANLRVHAAWDTETTSTVVALRTLARRAHAMLKEARELQKAMLAIIRSWRPDLLQEFGVGPIVAATVLCAWSHPGRIHSEAAFAMLAGVAPIPANSGQVTTRYRLNRYGDRQLNNALHTVVQIRIQYQPATRDYVARRTAEGKTGREIKRCLARYVARDLYRLLESGAATA

SEQ ID NO: 233154 - protein, 354 aa, unidentified
MSQIPNTAIAVIGIDIGKNSFHVVGHDARGAIVLRQKWSRGQVEARLANIPPCLVGMEACVGAHHLSRKLASLGHDARLMPAKYVRPYSKGQKNDFNDAEAIAEAVQRPTMKFVATKTAEQLDLQALHRVRERLVSQRTGIINQIRAFMLERGIAVRQGIGFLRTELPTILATRTDALSPRMLRVIEELAGDWRRLDQRIDGLSGEIEALARQDQACSRLMTVPGIGPIISSAMVAAIGTGGVFSKGRDFGAWLGLVPKQISTGDRTILGKISRRGNRYLRVLFVQAAWVVLVRIKDWERYGLKSWIEAAKRRLHHNVLAIALANKLARIAWAVLAKGRAFELTRTDDAGVRSA

SEQ ID NO: 233155 - protein, 359 aa, unidentified
MLLQRNKIDFKGHHIYVGIDVHLKSWNVTVMTEQLIIKTFSQNPSPEILHQFLTRNFPNAIYHTAYEAGFCGYWIHNQLSALEIDSIVVNPADIPTTDKEKVNKTDKRDSKKIARSLRSGHLKGIHVPSLKTLEDRNLLRTRGVLVRDLTRNKNRIKSFLYFHGIEIPERFKSKSTHWSKRFMSWLKSIEMSETSAQKSLNLIIESSENLRLTILEATREIRKLSQSEAYAGQVRLLRSIPGIGLLTAMTILTELERINRFSNFDQLCSFVGLIPSTNSSGDKENIGELTHRGNNFLRCIIVECAWIAARRDLALNKSYHEYCKRMEPAKAIIRIARKLLNRIRFVLKNNQPYECPVIK

SEQ ID NO: 233156 - protein, 365 aa, unidentified
MEIIHWIGIDDHADKWTIAHLRGAEDKPAKEFELVPNDRGYRKLLAFAKALGGTVRFVYEAGPCGYDLYRRLNKAGYRCDVAAPSLTPRKPGQRVKTNRRDALNLARYLRAGELTLIAVPDENRESLRDLIRARTAALKDLLSIRHQIAKLLLRYGQRYRDGRAWTQRFWIWLGKVRLDGEHARFVLDEMVGAHAERIERVARYTEAIEAAATKPEYAAYVAALSVLRGIDTVSAMTILAELGDLRRFESAPQLMAAIGLVPAEHSTGDKTVRLPITKAGNAHVRRIAVEAAWHYQRRATSGRTVTRRRKGQPKELLDIARRCDQRLNRKFQRMTSRGKRSTVAAVAVARELMGFIWAVGQIVHP

SEQ ID NO: 233157 - protein, 387 aa, unidentified
MYFVGIDISKFKHDCAIIDELCDTVMPSWSFSNDREGFSHFKALLDSLEGEKKIGLESTGHYGQNLKQFLESNGFTFMEFNPLLVSRFVRSKSLRNTKTDSIDALSIAQYVMTVEYKPYPSSFYHLDKLKSLTRFRNSLVRQRSRQLVELTNVLDKLFPEFKPFFKDKFSVTALYILAHYQTPERIANMNARSYEALRKLSRGRFTLSNFTQLKALAKNTVGTQSDYLLDQMNILLELYSQLDSKVDELDAQIKECVRGIDPPCLSIPGVGELSAAMILSEFGDFSKFQNPSKMLAFAGLEPGYFQSGQSEYTGHMVKHGSSRLRYALMNCCLPLISNEPVFAAYYTKKRSEGKPHRVALTHVAKKLLRVIYTLQTKNIRYDPTMIH

SEQ ID NO: 233158 - protein, 368 aa, unidentified
MKHDSTVFVGLDVHKDSIAVACVGSLPDDPVVDVGTIGTQQYAIDRLITRLAGRGSLHFVYEAGPCGFWLHRYLVQKQQRCCVAAPSLIPKSPGERIKTDRRDARKLALALRAGVLTPVHVPTPEQEAFRDVVRAWQQAKRDIVAARQRLKAFLLRNDIRYTGRATWNAAHRRWLSELVLPSAPQQIVLQELIDTISQRERRRDRLEAEMDHLAPAWDGYPLACALQAFRGIQKTVAYTVVAETADLSRFSHPSHFMAWLGLVPGEHSSGNTRRQGPITRCGNRWARTLLIEAAWAYRYVPKVSVIIERRAQDIDPCIRELAWKAQLRLTHKFRKLKARGKHNNVVVTAVARELAAFIWDADRTLRAA

SEQ ID NO: 233159 - protein, 461 aa, unidentified
MRKTRKVAGQRGKKRVDVTANLEILHPNAAGIDVGNAQHYAAVPVGRDPQPVQTFGSFTADLHRLGQWLRACKIETVVMQATGVYWIALYEVLEGYGFNVYVVNAKHTKTLPGRKTDVCECQWLQKLHTFGLLNNSFLPPEEIRVLRTYLRQRENLVAGAGTCIQQMQKVLTQMNVQLANVLSDLSGRSGLEILKAILSGERDPYRLAALADPRVQASRKEIAQSLEGHWREDLLFVLRQVHDLYFFHLDNIAECDRRIEAHLQTLGSKVDLATQPLPQPTPLPRRKHIPQTNLREELYRITGVDLTRIDGIQVQTAQVVLSETGVDMTPWEDEHHFASWLGLCPNHQITGGKIIRRGTKKVLNRATTALRLAAQTLHHSQSYLGAKYRRLRAKLGAPKAITAMAHQLARLIYRLLRFGTEYHDKGMQHYERQYRKNQIEWLKRQAAQLNMQLLPNTGVAR

SEQ ID NO: 233160 - protein, 362 aa, unidentified
MQHSMSLVGLDVHAAQTHAAILDMRTGELRGVKLRMAPAEVVGFLATLPGPVRAVYEAGPTGFGLARAGVARGIDVRVVAAGKVPRASGDRIKTDKRDAERLARLLAAGELRFAFVPTVADEQFRDVIRAIEDCRGDLMRARHRLSKLLLRRDIRWEGPGSTWTQTHMRWLQSLRFDDVCSQAVLVDYLAGVQMLVARRAALITALEQVIPDTRHANTIARLRCFRGIDTLSAAGLCAEVGVWQRFRPKQLSGFLGIVPTEHTSDTKRRQGSITKAGSVHARRLLVEAAHHYRHQPAIGKTLARRQHAQDPRVIEVAWRAQRRLHQRWTVLRLERRKPAGVVAIACARELAAFCWEAATLTT

SEQ ID NO: 233161 - protein, 337 aa, unidentified
MKFCGIDLHSNNSVVVVTDEGDQVIVSRRCPNELAKILHVLAPYRDELAGVVVESTYNWYWLVDGLMAAGYPVKLANTVAMKRYDGLKHSDDKDDAAFLAHLLRLGILPTGYIHPPQQRALRDLARKRMQLVRSRTQHVLAVENILARQSGQQFSGTLIKQLSATLVDRLSLPTEVALAIKANVAVIETLNGQIDALERYLLQRSQLREEFALLKSMPGIGEVLATVIMLETGDIERFADAGKFASYARCVASAHYSNGKKKGEGNSKNGNAYLIWAFIEAANYARRFSAEAKRFFEKKRAKTNNVVATKALAHKLARASYHILKEHKPFDAKRCFV

SEQ ID NO: 233162 - protein, 366 aa, unidentified
MKKISTVAMRGNKVFNEPKLTIGLDLGDRTSHYCILNEAGNVILERSLPTTPKGIHQTFSKIPRSRIALETGTHSPWVSRQLSQLGHEVIVAHARNVRLIGESSRKDDQLDARTLARLARIDPELLGPVRHRSANAQIHLTVIRARAALVSTRTALVNAARGLTKSYGERLRKCGTGQMNREIAKGLSQELRDALEPLLQEIESLNERIAEYDRRIEQIAKEAHPEVALLQQVKGVGSLIALTYILTLDDPHRFRRSRDAGCFLGLRPGRRNSGMSEPQMHISKEGDRYLRTLIVQGAHYILGPFGEDSDLRRWGLKLAERGGKNAKKRAVVAVARKLAVLLHKLWVSGEVYEPLRNNHKVVSAVA

SEQ ID NO: 233163 - protein, 343 aa, unidentified
MDPARTAARADFKSSSHPQDRDKFMDAIFDSFVGIDVAKDSLDVCLLIEGRRFTTTNDRTGFRRLLDELPMAGSCLVVVEATGAYQRELVAELVAAGQQVAVVNPRQVRDFARGLGILAKTDRIDGEVIARFGQHVQPRPVEKIPEIQEELQQLVVRRRQLIELRTAESNRLESARSKSVIKSVRSMIEQLQKKVRQIEKEIAGLVKSDEQLQCQTALMESVPGVGAVTAATLLAELPELGRLNRQEIAALVGLAPFSRDSGKFHGRRAIWGGRRAVRSVLYMAALSARRFNPVIREFAQRLEAAGKPFRVVLTACMRKLLVILNTIVKNHSAWNRQIPSPAS

SEQ ID NO: 233164 - protein, 416 aa, unidentified
MKIVRPICCGMDVHKNIIVATIGITNKKTRITEYIQETFSTLNPDLLNLKQWLINHKCFDACMESTGKYWIPIFNILEDEINIYLTHPKYVKAIKGKKTDKKDSKWICDLFKHDLIKFSFIPPKEIRALREISRYRYKLVGMRSSERNRYQNCMTVSNIGIGSVFSDPFGKSAQAIMKEVLESDIIEDEKILKCIHRSCKNKDKILDSIKHCNIETDQRFKMNESMTHMEELQVHINNCEIEMMKRAAPMFDQFMHITQLPGISTLSAILIISEIGVDMKQFESDKQLTCWAGLAPANNESANKKKSVRISKAGQYLKPLLVQCALGAIKDKESYFGIKYSRIKKRRGHKKAIIAIARMMLVSIYHMILTGETFNPSDYESFRNPNPPIKQQVLTEESAIEFLKKSGFDVSKLTKP

SEQ ID NO: 233165 - protein, 332 aa, unidentified
MAIIGCDLHTRYQVIAMLDTMTGEMTTRELEHENCAARKFYAELEKGSLIGIEATGYTQWFERLMAELGHELWVGDPAEIRARAVRRQKTDTRDAEHLLELLLTKRFPRVWVPTPEERDVRQLLKHRDKLVKMRTSVQNQLHFLAMSQGVCRKRKLWSERGRTELEGLKLGVWAGQRRQELLDLLDRLGPRIEELDRAVKGEATRRPEARELMQEWGVGPVTALAFVLTVGPIERFRRSRQLVSYLGLNPREHSSGGHQRLGHISKQGNEMLRWLLVEAGHTAARCDPQFRQQYAHLKFRRGGRIAKVAIARRLAVRLYWRLRRHAAGSHVQ

SEQ ID NO: 233166 - protein, 426 aa, unidentified
MTRYYLGVDWADEFHQVWVSDPQGKKVVEMKVVQSPEGMGEFGRWLHERKAEEIELWAAIEKPHGRIVEFLLDHGVVVYPVNPKALNRVRDRFRMSQSKSDSFDAYVLAEFVRTDHAHLRALEPDSHEAQELKMITRDHHRLVRQKARLLNQLKVTLKEYYPRPLEVFSDLESQIALDFLKQYPTPQALCELSRRNWNRFAKREHHLGEARCNELWEKLHKPQLAVPQHVVRAKAQLLGALLVQLEALLPAVESYSERVKSFFASMPAAKLVETLPGGKSGTIVPMLWAELGDAKSRWESFRHLQAEAGAVPVTKASGKSRFVQFRFSCNKDLRYAAYWLAFTSLNRSEWANAYYRDQRAKGHRHPQALRALGAKWLKIIFVMWRDHKPYDENYHLGKHCPTEDAPGGMKKIDRGLDKPHRKSRSV

SEQ ID NO: 233167 - protein, 475 aa, unidentified
MNSTVLPASVQPNIDCNYIGLDVHSDNVVVCVRRNILKVGGELQGKTIKLKKVSICDSQDSLTQLLSEYADGQQHVMTAESTFNWYWLADIAEEHGWNFRLADPCTVSQANIKAANDETDAQYLAERLRMGSLKSTTVLPRALRGARDLTRHRMRVMQEVSEKKIRLSNLYHNHCAHPLHGKQLQDLQFAYEENGIDAVLASGISGNGSELIIADLLAGLHDAQMRLERIEAQVYERLDQIDTYREGRLLLKNSMKGCGDVLSAVIITEIGDISRFRTMGEFVSYCRLAPASKLSNGKSKGQGNAKNGNAYLSWALTELATLMARYNKSIQHYLERKVKKNGLRVIGIRALAAKLARCVYQVLRKKEAFDLLLAFGGSHPQEPSASRAKTEESSQRKTATKSSGTKVTGMTRTVVTDKKKIPGKKPALAVTQTQRLKSAVGQKTASVASRLKAPCALTTTKPAYADRGCVKSRRE

SEQ ID NO: 233168 - protein, 408 aa, unidentified
MFCGCSIINLYPGGIIMVCVGIDVAKDKHDCFILSSEGVVLADAFTIANNREGFEMLLQRIRTCTRPTDNIKVGLEATGHYSYNILGFLLDNGLTTFVLNPLHTNLYRKSLSLRKTKTDRIDARTIASMLMSDVDLKSYTDTAYHNEELKSLTRYRFEKVQERAKLKVSVSRLVNILFPELETLVSSLHTVAVYTILREFPGAKQIAAAHLTHFKTVLSDASKGRYDREKAVAIREAAKTSIGSIMPAKSLELQHTIRLIRELDEEIEEIELAIKAIIDEMAPPILTIPGISYRMGAMILAEIGDFSRFDSPDKLLAYAGLSPSTYESGKLKAAGAYAHMEKRGSRYLRYALFNAAKYVCIWEPSFAAYLAKKRAEGKHYNVAISHVAKKLVRLIFALQTSGKVFQPA

SEQ ID NO: 233169 - protein, 386 aa, unidentified
MKEETFVPREYDVFAGLDVDKKSIAATFSSQQGFIRSLHMPYSVDYLLNHVRKHFGDQKVAFVYEAGPTGYGLYDGLVAQGFRCLIAAPSMIPRAPGQRVKTNRLDSRGLSESLRGGQLKSIHVPSPIYRELRHLTQLRDTVVREAAAHKQRIKALLLLEGIGFPPATVGRQWTLRVKAQLRKLRCSRTVRFKLDQLLDSLEFCEKQVVSSTKEIRRFCKEDAELFQSIEYLMSIPGIGWIVASQLLARIGDWREIDNVRQLGSFLGLVPTENSTGDSVDRGSITRAGDGRLRSKMIQAAWSAIRQDGELREFYRSVCQRNPRGKGARIAIVAVARKLSTRIYAVLKNQRPYIVREQVHSAPLTQEEASPQGTTRRCAEPGETDNS

SEQ ID NO: 233170 - protein, 423 aa, unidentified
MREFGAFTKDLDELVEWLLTCGVKTIVMESTSVFWIPLFQKLEAARLEVLLVNARHVRHVPGRKSECKDCQWLQRLHSYGLLNGSFRPSDDICRLHTLMRHRDNLTKSCGAEVQHMQQALNQMNIHLHHAVSDLNGETGLRILDSILAGERDPKKLVELRDAQCSKTSPEELGAALQGDWREEHLFVLRQSLENYRHLLKQMEICDAELEKALAKVVVNPAAFTEEERPENPPAAEAKAKTRKKFKKLKSSTGLKRDLSAELTRICGVDLTRVIGLNVLGVLILISEIGVDMSRWRSVKAFCSWLGLCPGNKISGGKILSSHTVHVVNRVSILLRTVAPAVGRSDTWLGIFHRRMRARLGPAAANTATARKLACMIYHLLKYKEDYIDVDCLIYQEKIRKSRITKLSRQAEELGFELTKKEAA

SEQ ID NO: 233171 - protein, 400 aa, unidentified
MISVGIDVSKGKSTVCVLKPYGEIVCRPFEMQHVEKDLEAFHNLLQKLDGEIRIVMEATGIYHLPILIFFHNKGYFVSVINPFAMKKYAKDNSIRGAKTDKLDSIMIANYGIEKWFKLQRYEGDEEIYAELKLLGRRYRYYMELHVKALQELTHILDYVMPGIKKLFSSWNEANGKDKLSDFVERFWHFDLITSMSLETFTDEYLVWAKEKKYHRSRSKAETVYELASSGIPTLPSSTPSTKMLVQEAISVLRTVDSSLSLIVTRMQVLAKSLPEYSTVREMGGVGDVLAVKLIAEIGDVRRLHSAKALIAWAGIDPPPYESGQFIGSKRKITKRGSSTLKKIGYEVMRVLKSHPAPKDDAVYNYILKKEGEGKSKKHAKIAGLNKFLRIYYARVIAVYQ

SEQ ID NO: 233172 - protein, 388 aa, unidentified
MLPSVHHANTEQTASDRPDLTLYASLELSRATWLVTCLLPERDRMSKYSTPGGDGGALLGLLERMRARAQQLTGRPVKIVVIQEAGLDGFWVHRLLEANGIESHVVDPASIAVPRRRRRAKTDAIDGETLLRTLLAWTRGEPRVCAMVVPPTPEEEDRRRVCRERAILLQERIRHTNRIKGLLAGQGITDFNPLHKDRRQLLDAARTGDGRPLPLQLKAEILREIELIELLLRQIADVEAAREVLAGPKTAKAPSPVVLLKQLKGIGPEIASVLYFEGLFRSFGNRRQLAAYAGLAPTPWRSGTVDQEQGISKAGNRRLRRTMIELAWLWQRHQPASALSRWFHTRVGNERGRIRRISIVALARKLLIAVWRYVTQGEVPEGAVLKAA

SEQ ID NO: 233173 - protein, 338 aa, unidentified
MSEITAIGLDLAKHVFQAHGVDEAGTVVVRKRLRRSQVLTFFAGLPPCLIGMEACATAHHWARELSALGHEVRLMPAQYVKAYVKRNKNDAADAEAICEAVMRPSMRFVAVKTTEQQSALMMHRARDLLIRQRTMLVNALRGHLAEFGLVEARGLHKVAGLIAIVMDDADERVPDLARQVLKVMAEEIDELQRRIAAIDAEALAWHKSSPVSQRLASVPGIGPIIATAIAATAPDPSVFRSGREFAAWLGLVPRQSATGGKMRLGGISKRGDGYLRRLLVCGAQAVLLRSRAPKADPWLISLLGRRPRLVVAVAVANKMARVAWAIMKKEETYRRAAA

SEQ ID NO: 233174 - protein, 544 aa, unidentified
MARRKGGSRRQGRIHRQKVNSAFLERARAVGAERFGILTVDPAKQRSVVKLTNFYGLELMAPQVVEHTDRDLKALVETVKREHQEHGLGDLVVGVERTGRYHAPIRRALQAHWTVQMLHPFATKQLRQPVDPGQKTDPNDLNAMTRGMIVGYGAEEPDLPERWLEWRLVSRERENFVRKTATLRNQMKERLEALLPGYAALFGAFWQAPVARAVAERYPSAPALLQAGADAILEALRRDGQMTRRDTVARLLEWARNAPTPDPCAILNHRLLRGEFALLRHLESALAAFERELVQYLVDTPFVLLISIPGIHVVSSASYGAELGPLEHYLTPKNISGRAGLYPSRYQSDETDHADGPLVSRRNARLRDAIMEIAHNLIRCNHYFEAWAEVRRRQHWPARKLDLAVATRFVRISFRMISGRMVFRHPCAQGRDAILDKLLDFGLRHQIPPRDIQDLLQRALRQIPQDAFEEEARALIGRLPRRDRRDPPRPDTSGREPVRLGDLLRQVIHHLAPHLSLELPRSATEQPTHTGGLPNHRLSAAEGS

SEQ ID NO: 233175 - protein, 369 aa, unidentified
MSKAIICGTDMHDNNLVCRVAVDKEEPETKGYRNTARGRRQLFNHLKKEAKCRGCDRIVLAYEASTHGFCMYDDCQSARIECFVLAPTKMRKSRKDRKNKNDDKDAQLILETLRGYVLAGNDLPSVWIPDDQTRVDRETVRARLDLGHKLTRVKTQVQTLLKGNRVQKPREVGQSWTKSYRRWLKTLCSESWPALATLLRQIEALESEIFILDKDVATLSEKTRYKDAARALVEKIKGTGLLTAMVFLTEMGDMSRFSNRRQVGAYLGLVPSSNESGENDDRKGHITREGSGRLRRVLCQGSWSRVIHDPGESKVYERIVRRNPKHKKIAVVSAMRRMGILMWHVALAAQQEAGVFPVRNNDIVDKVVA

SEQ ID NO: 233176 - protein, 451 aa, unidentified
MKKKKVSLEVVNPYAAGIDIGSRSHFVAIGQDADEVREFGVYAEDLQKLAAWLLEHGIKTAAMESTGTYWQKIFSTLQAFGIEVFLVNGKFTKNMRGKKSDVMDCQWIQKLHTMGLLSSSFLPDSTTETIRTYTRHRLSLIQLAADTSKKIQKYLRLMGFRLDVVVNDICGLTGIAIINDICNGNLNPKLLSVHRHYNCKKSIEEIEKALHGNGRKDYMFALIDEFEMYQILKTKIEKCDKEIESLLKEIIEKNENKKYHIAEAKPHKRITKNTNKQLDLNQVAFQYFEGIDLMKIEGVSHATVMTIISEIGLEGFSKFHTSKQFVSWLRLSPNNKISGGKVLSNQIARGSNRLKIALRQAANCIGNLKETHLSDFFRRICIKRGRASAVSATARKLGVIIWTMITKKIQYAPPKEYLMLDQKRKLGLVSRIRKSIAKFDLKPDDLGFATV

SEQ ID NO: 233177 - protein, 484 aa, unidentified
MARRKLSTFERLQRGEKLNRRERKQIQRQLEKEDPGWEIVHKNVAGIDVGNESHFVSVDPKRGKPSVREFGAWTAALRETAQWLKSCGVQRVVMQSTGVYWIPLQDVLEREGLEVVLVNAHATKNLPGRKSDVQECQWIRKLDRYGLLRGCFQVPEKIRSVRTLWRLRERVVQEAGRAIQQMQKALITMNVQLANTISDISGKTGMAILRAIVEGERNPWTLAKLRDERIQASEEELAHSLEGNWREDVLFELQQVLKAYDFYQQQMAECDQQLEKYMKAQPARMVEEKVEAMAAPAQANGKLDRKKKRCKPPKNQPSFGLQEELTRVMGADLSVIDGIKLMTIQTIYSELGADLSAFPSEGHFTSWLMLAPRRDVSGGKVIRHHSLRGRNRVANALRMAAESLKDSDSYLGARYRSLRGRLGGLKAIKAMARYLACLVYRMLTKGQAWVDRGAAWYEERRRDRELVHLQKKAAALGWQLLPKQ

SEQ ID NO: 233178 - protein, 364 aa, unidentified
MEYIAFDAHKKYTLASVERATGGGILQEARLAHRRGAIREFLAQWEPGSPVAVETVGNWYWLVDEIEAAGMVPQLVHARKAKLMSGMINKTDKLDVRGLNRLQRTGTLPTVWIPPTELRDQRDLPRTRMVLVRERTRLKNRIHATLAKYAVPVPDVSDLFGLRGRELLGSGLELLPPHTRFATDRLLEQLDLVEEQIDQFEERMRAVFHTTPALELLMTLPGVAFILGIVILLEVGDIHRFPDAEHLAGYAGTTPRVDATGGKTRYGRLRPDVNHYLKWAYIEAASVICLNQRHWPTRHVVRLYQRIRHRKGHQKAIGAVARHLAEATYWILTKEVPYQEPQRHPDASTKASAREPHEPARLVK

SEQ ID NO: 233179 - protein, 345 aa, unidentified
MKKLIAGMDLHSNNVVIGIMDSDGKRVASRKVDCNLAAVTKVLAPYKKQLEQVAVESTYNWYWLVDGLRAEKYPVVLANPAAMVQYDGIKHADDTNDAFFIAELLRLKILPTGYIYDPQLRPVRDLLRRRMMLVHQRTALMLSFKSLYARTTGQEMTLSRVKEMEVTAAAELYEHPANQLIAGLQIEHMDALAASIAKLEKVVLGAARALPCYTHLTTLPGVGRILGMTITLEVGDIQRFAGPGNFASYCRTVAAERISNHKSKGENNAKCGNKYLAWAFVEAANFARRFDEPCRKWFDRKAARTSQVIATKALACKLAKAAWYLMAEGTAYDSRRMLGQPPSQP

SEQ ID NO: 233180 - protein, 365 aa, unidentified
MKSNTQNAKIEAITEKTLVLGIDVGSETHYARAFDYRGIEYSKKPFKFSNTEAGFVTFKEWILDLKERHEKDKVVSGMESTGHYWFNLGKFLQDNEIKSVLVNPHHVKKSKELDDNNPTKNDRKDPKVIAGLVREGRYMIPYLPDGVYADLRTASNIRFQLQAELTRIQNRISRWFNIYFPEYKTVYGKPDAKSGMLILKAAPLPEDILTLGIDGVNQIWRDAKLRAVGKARAKTLIEAAVSARMEIRMLLEDYESRNTRLQEVMVLIEELVRKIPMAEKLLEIKGVGIRTVSGFLAEVGDISRFNNPKELQKLAGLALVENSSGKHKGETTISRRGRKRLRYLLFEVAMSLVAKNPEFRELHNY

SEQ ID NO: 233181 - protein, 363 aa, unidentified
MNFIGVDLHKKSITICVLNENLKVLARKTVFCDQTDQIVEFFRQLRPFKVVVEATASYLWFVELVEPLAEEVVLANPKKLRVIAESTKKTDRLDAQVLAEFLARDQIPRAYMPTPRQRQHRRLVRHRQYLRQRMTSVRCKIRHILSDYNADRKDLFSTQCGLAYFKEIALSDADRFVIKQLWSEWQDHQSRILALTKKIKAFIVKAPNREKETRAILKTAPGVGFVTAEVIVSEVGDVSRFRNAKAICAYAGLVPTVRQTGGKKSKDLRITKEGSGLLRWALVESAWRLVKTSPKWSAFFSQLRKRSGSKRAIVAVARKLLCVLYAMLKTSTPYKIVATQTKAPKPTRRRLVRKSSPKETVTT

SEQ ID NO: 233182 - protein, 312 aa, unidentified
MSEFIGIDVSKAQLDVRTHLGAASFTYGNDEPGLEQLVQRLRPLQVQLIVLEASGGYERLPAATLTQAGFAVAVVNPRQVRAFAIASGVLAKTDRVDARVLAHFAAAIRPAQRVIADEQRTLLDELLSRRRQLVGMLVMEKNRLAQARDRRVRRDIKSLVEILEKRIRGCDGELQQLIQSSPIWRTQEDLLRSFNGIGPVSARTLLIELPELGRLSRKKIAALAGLAPIAHDSGTRRGARHISGGRTQVRNVLYMAAVTAIRSNPCIREFYQRLLAAGKPVKVALTACMRKMLTILNAMVRTQTRWQQPLSV

SEQ ID NO: 233183 - protein, 427 aa, unidentified
MSEEKSIELRVSVDVGYRRHSVAIGLPNGEVLEEFEIAHGPEGFREFFLRIEKHRKAQDCGVGVAMEGYNGYARPLDSLVRSRGYRLYNINNLKLARFKEIFPGAAKKDRIDARKGLELFQLSDHLPLAKEVLQEVKGTPHENEVLKRLTRRRRRLVNERVRVVNNLQADLQAVCPGLLEITTEAGNQWFLNFLLSADTLPQLARLRKATLLKIPSVGRKYASLIQEWQKRAHFSEEAAWVSEMIQEDAKRCLELDEKVKTLETKIEQVAEDSKIAKILSSIPGFGPVCTTELAGEIGTVERFSKEGSLALYLGMSTLDNSSGKYQGTKAPKHVNTRAKAAMMIALDRHRKYIPESQRYYEKKRAQGKKHNQAIRALGRHLCRIIYKMLKEQREYQIRSKQGDTQARVRSRSCVKTKMRRPKISGKG

SEQ ID NO: 233184 - protein, 417 aa, unidentified
MKDSRKRYIGLDVHKQYLIALGVDDELNIVLPVRRVELTRLEAWMKKTLTQQDEIVLEMTTNTWQLYDELCEHAGKVIVVHPPHVALITRSQVMNDKIAASILARLLAKGLLVGIWVPPQEVRELRGLVAQRKKMTGLATQAKNRLHAVLQRHHLVPPKGNPFYASQQRWWLTLPLGALEKVNVQSDLDTLHFAEAQRIHLTSMMEEIASQQEQVTRLLQIPGFGVVTAVTVWAAIGDIQRFVDPQHLVGYAGLGTRVHDSGMSTRTGRITKAGRRDLRVVLIEAAQVAANSHPHWKAELARLQPRLGRNKAIVAIARKLLVAVWYILAQHKTDRFAEPEAIAQKFLKFAYQLGKANRPAGQSAAQFVRKRLDALQLGHELTSIAWGSRLEETDPLATLHKQSERRPKWRLGAMNSG

SEQ ID NO: 233185 - protein, 447 aa, unidentified
MEEAVAVRKRELAVLYPNAAGIDIGSAKHYVAVPPERCEQSVREFESFTADLAAMAEWLASCAIDTVVMESTGVYWIPVYELLESRGFTVYLVNARHVKNVSGKKSDVLDCQWLQQLMSFGLLAGAFRPDGKVCALRALVRQRETLIAGQAQQIQRMQKALTQMNVQLVQVISDIAGQTGQDIVRAIVAGERDARKLAQLRNYRVHASEEQIAKSLSGNWREEHLFCLAQALTLFDTHQQLLEQADAQIEAMLGHLQRHAPGAIKPDKNKGRAKHAPRFDVRAALVRWAGVDLTRIGGIDVCTALKVLAELGTDLSKFKSAKHFASWLGLCPGTRITGGKRISGVTKRIANRVAQALKLAAHGLHRSHCALGAYYRRMAARLGAGKAITATAHKLARLVYAILTRGEEFIERTQDHYEDQVRSRTIRYLQKKAASLGFKLQPNAVCP

SEQ ID NO: 233186 - protein, 398 aa, unidentified
MKSTKTHPEQGITYTQTEVTMYRILNFGADVHNDSYSLCAVLKGNNGPDQIISEVRVTADYRKILKFIDSVKKQFRPEDELDIAVGYEAGGLGFSLYHDLTAAGVNCKVIAPTTLPTQKGKKQTKTDRIDAQVIARAMTTNSCSYVHVPDEEDEGVMEYIRMRDDHKIALKKVKQQIIAECERHGYIYSGGKWTHAFMDWLSKLEFTGMSRETMSVYLSTYYYLSDLVERCDKRLEEIAERPKYKTQVHNLCCFKGIKTYTALAITVEIGDFSRFEKAVKFIGYLGLDPWQKSSGKDQNYLGITKAGNRHLRQAFVESAQAACQGKLGYKSKALKARQNGQPPEVIAYADKANSRILRKFNRLMKRGKNRNVAIVAAARELAGFIWGMATDHIALATK

SEQ ID NO: 233187 - protein, 347 aa, unidentified
MQITTIGLDLAKSIFQVHGVDATGQVVVRKSLRRSQMLAFFTKLPPCLVGIEACGTSHHWARELIKLGHEVRLMPPAYVKAYVKRGKTDAADAEAVCEAVARPTMRFVPVKSPQQQAALSMHRTRDLLVKQRTQLINMIRNLLAEFGVDIPKGLERALLMARQIVDGKAPDVPIEAAKILGTLSQQVLTTHVRLREIDRDLAVLLRGNEVARRLMTIPGIGPVGATALAASVTDPHQFRSGRQFAAWLGLTPLQKSSGGKERLGRITKMGDKYLRKLLIVGMTSLVRRAKYNPGKIDPRLADLLTRKPTRVAPSRWRTRPRGSSGRSWHVARPIVPATGQRWPHRQR

SEQ ID NO: 233188 - protein, 375 aa, unidentified
MKEKLRFLGLDVHAETIAVAIAEPDGEVRSLGTIPNRAESIRKLIRKLGPAEKLRACYEAGPTGYVVYWQLAELGVQCEVVAPTLVPVKAGDRVKTDRRDAEKLARCYRSGDLTAVWVPDEGSEALRDLVRAREAAKQDQMRARHRLSKFLLRSGQRPPTGVRPWTRPYLIWVAQLRFTQIAQEATRQDYLHEVEHMRERVARLEQAITEAVKLASPALQQVINDLQALRGIADISAVTIAAELGQVSRFGSARQLMGYCGAVPSEDSSGKRTRRGGITKTGNAHLRRIVVEAAWSYRRPPCIWYGLRRRQESISEEAKEIAWKAQHRLHKRYIKLGAAGKDQRKIVTAVARELLGFIWAIGTRSETISKQQVAA

SEQ ID NO: 233189 - protein, 420 aa, unidentified
MPNIEIGVDFMVKENFIYVGIDLHKETHTAVMIDCYNQKLGEITFPNRPADFPKLVTKVKKCNTDAKEVVYGLENAYGYGRPLAVWLIDKGYFVKDVNTAISHRQAKHRGAMYRKSDSDDAEAIALATLNMHDKLPDAYPNDAYWSLGQLVHRRDNIMKQRTRLVNQLHEQLCIAYPSYKSFFNDISRPTALYFWEHYPSKKYLKGKSVEDLRAELVPVSHNKCSTKTCEKILDAVASDKVKNNAYQDARDMVTLSIVSDLQHYGSQLTEVDKMLEQMYKMLGCTLTTIPGVNVITAVKILAEIGDIKRFSNANKLAQFAGIAPLHLSSSGKGKDLATKQGNRRLQATIYFLAIQMVQVSSKGTPRNSVVRAYYEKRKAEGKTSQQALICISRRLISIIYGMLKHGTEYRMPVVESAGEK

SEQ ID NO: 233190 - protein, 347 aa, unidentified
MNFYNSTHRHYCGIDLHARSLYVCIIDQSGEVRLHTEIKAQPQALLDLLEPFRDDLVVGVECMHCWYWISDLCEEHSIDFILGHALYMKAIHGGKTKNDRIDSFKIAMLMRGGNFPLAYTYPKEMRATRDLLRRRSRIVHHGAMLKAHVVNTTSQYNLPPSKLNLKNRGHREQAHAAFADKDAQRNIDLDLALIDCYHQQLSKLEWHLEQQAKQHDPAALSVLRSIPGIGRILALTILYEIGDIRRFETVQKFASYARLIKCKAESAGKVYGTQGNKIGNAHLKWAFSEAAVLYLRGNDKAQRYLQKLQKRMNKAKALSALAHKLGRATYFMLKHQRVFDEQRFLKG

SEQ ID NO: 233191 - protein, 308 aa, unidentified
MEQHAGIDVSLKLSSVCIVDTSGKIVRETKVASEPEALIAFFKGLSIPVTRIGLEAGPLSQWLHAGLVRAGFEAVLLETRHVKAALSAMSTKTDRNDARGIAQLMRMGWFRAVHAKSVGSREVRALLVARKQLLSKLMDLEASMRGILRGFGLKMGVVTRKGFEARVRELSAGQAMLERITNAMLDARAALWREFEQLHREMLRIVRDDEICRRLMSIPGVGPLVAVTFKSAIDNPGRIVKSKSVGALFGLVPKKYQSGERDFSGSITRTGDESVRTALYEAANVMLTRTTRFSSLKRWALEWRSGAV

SEQ ID NO: 233192 - protein, 320 aa, unidentified
MAVYWLGIDVGKSDFHCALMSGDLSMKRHSFPNSQPGFTQLRKWLANRRVSHVHACLEATGGWSEELAVFLYDHGHTVSVVNPLAIKAFSQSTLTRTKTDKADADLIARYCRTMQPEPWRPPSAAQRRLQQLTRRRTALSDMLVQEQNRLQGPGIEAIRSSLERTARFLERQIAGIDEEIRAFMDSDPTLREQRELLESIPGIGERTSATILGEMPNIAEFRSGKAVAAFAGLCPRERRSGTSVSSSWLSKVGNHVIRRALYLPAVCAIRYNAVLKEWAARLRARGKRAKQIIAAVMRRLLVIAYGVLKSRRPFEVRITA

SEQ ID NO: 233193 - protein, 323 aa, unidentified
MTVYLGIDIASKKFDVAELCDGNYRCKAFENTSAGFLALYKWLGQRTMPDIHACLEATGDYGTSLATFLYENKIKVSVVNPARIKGFGASELSRTKTDKADSKLIARFCKAAVPDGWKPTPAPVRKLQALVRRISALNGMLRMECNRRENADANIQASLDRIISLLKTEIEVVRQEIKDHVRSDDELKKQDALIQSVPGIGEVSSNLILSFMSGKGFRKAKEVTAYLGLNPRHHQSGSSVRGKTRMSKMGDTRLRSALYMPALVALRYNPDIKAFGQRLLLAGKPRMLVVGAVMRKLIHIVFGVLKSGTAFSSRIAVHSVVTS

SEQ ID NO: 233194 - protein, 362 aa, unidentified
MELRACIHNVRHPSRDGKPEFVSSLIILFPGRMHKNLFAGCDISKHHIDACLLRVDGRRHRSRFKNEPSGHEKLIQWLCRGGIVRVVIEATGHYSLDLALALERTAGIELMVANPRAVKTFASAQMRRSKTDRLDAEVICDFAQRMQFVPWQPPDEAVLKLRGISRRMQALTTERTRELTRLEDAHATQTTSGIIINDIEVNLRHLERRLNEMLRQALKIVRSHSRLETAFNRLTSVRGIAEKSAIMILPEVLILPAEMSIRQWVAQAGLDPRRHSSGSSIEKNERISKVGNVRLRRALYMPALVAIRWEPNVSAFYEHLIAKGKKPIVAVVAVMRKLLHAIYGMLKHDQDFDGSKFYQIPA

SEQ ID NO: 233195 - protein, 343 aa, unidentified
MNDITTIGLDTAKSVFQVHGVNAEGETVVRRQLKRRQVLAYFRKLQPCLIGIEACSSSHHWSRELQALGHTVRLMPPKYVKAYVKSQKNDAADAEAICEAVTRPNMRFVPTKTEEQQSILMLHRTRQLFVRQRTALINAIRAHLAEFGIVAGIGRNGVEALLKVVADGNDNRVPDVARDCLVALGSQLEAVKVQILSFDRHILASHRANETSRRLESIPGVGPLIASALVATITDPKAFRSGRDMAAWIGLVPKQNSSGGKEKLGGVTKAGNRYLRTMLMIGALSVIKRAKQLGYSNRPWLSALLARRPTKVAAIALANKIVRMAWAMMARGEKYREPVGLAA

SEQ ID NO: 233196 - protein, 423 aa, unidentified
MEVMHRRVAGLDVHKQTVVACVRLMAGHRATRECRTFATTTEALVELLSWLAASQVTHVAMEATGVYWTPVWKILSEGDFELIVANAAHIKQVPGRKTDMNDAMWIADLLACGLLKASFVPPEEIQELRSLMRTRKQLVREQTRHVQRIEKTLEEANIKLGTVLSDLMGVSGRRMIEAMIAGERDPHRLAALAKRSVKASPKALHDALHGRLREHHRFLLALHLQQWDALDAAIRQIDGQVANQIEGMDEGLADGPPPFCELITLLCGIPGVSVLSATTILAEIGRDMSRFPTAGHLVAWAGLCPGQNESAGKRKSTRLRKGAPWLKTMLVQCAWAAKRSKNSYYRAQYLRLSGRRGPQKAICAVAASILTAIYHMLKSGAPHRDLGADYFDRRAPEAKAKRLVAQLAKLGFAAQLQPLAEAA

SEQ ID NO: 233197 - protein, 344 aa, unidentified
MTIMMLGIDLGKNSCSVAGLDSDGNVVLRRRMQPKRVLNFASKRAPCTVAMEACCGAHYLGRLLAEQGHEVRLMSPEYVRPYVKAQKNDDRDAEAIAEAATRPTMRFVELKSQAQLDVQSLHRARSRLVGARTTLTNQLRAILLERGTVIVQRRHKLEQAVDALLADPDFMSGSRIRRLLADMRQEWIDLDRRIGALDREFVELARDNVAARRLTSIPGIGALNATALVAAVGDGATFAKARDLGAWLGLVPRQHTTGGKPRLLGISKRGNKYLRTLLIHGARAALPSLARSQTTLGVWLRNLLARRHRNTVVVALANKLARIAWMILRHEVTFQANRATAMAA

SEQ ID NO: 233198 - protein, 344 aa, unidentified
MEHYAAIDVSLEWSSVCVVDATGEIVREVRVPSEPEALVAFFAAAGLCIARIGLEAGPLSQWLHAGLIEAGLPAILIETRHVKAALNAMTVKTDRNDARGMAQLMRMGWFRPVHVKTLQAQEIRALLTARKLLVAKLRDVQSSIRGILRGFGLKVGAISKGKFEARIRELVSGQAMLERVAEPLLRVRAALGAEYRALHRQLLAAVRQDQVCGRLMTVPGVGAVVAMTFRSAIDQPGRFAKSKAVGAHFGLTPKKYQSGEIDRIGRISKVGDAMARTALFEAANVMLTRTGRFSTLKAWALRVAGRHGAKKAKVALARKLAVVMHRMWVDGTTFRWGEASVSAA

SEQ ID NO: 233199 - protein, 422 aa, unidentified
MLEETEDREVIIERVAALDIGKAEAMWCVRVPAEGGRGRRAQEVAAYPTMTGSLLRLADRLAALGVARVVMEATSDYWKPVFYLLEAAGLETWLVNAKDVKHLPGRPKTDKLDCIWLCKVAERQMIRPSFVPPPQIRRLRDVTRYRADLVGARTAEKQRAEKLLEDACIKLSVVASNIFGVSGRAMMAALIAGQRDPTVLAQLARGRMRVKIGALEEAFTGHFTDHHAFLLAKMLARVDAIDTDIAALDAKIEELIAPFAAVVDQLDEVDGVGRTAAACVIAEIGTDMTRFATPGHLASWAKYAPGVKESAGKKKGKSTTGHGNRYLARVLGEAAIGAARTDSFLGERYRRIARRRGKNKANVAVGRSLLVIFWHLLSDPQARYHDLGPDFYDTHISNSRTMRNHVRQLPALGSKVTLEPAA

SEQ ID NO: 233200 - protein, 341 aa, unidentified
MKKNLFFIGLDIAKADFAASIYQTPGQSIITKEAIPNDPKGFEMLLLWLKDYHIDKKNCRICMEATGVYSQAIAYYFLFAGFPVSVEPPLKVKRAFDPIGHKTDPVDSKQIAEYAYRFRDELTSWQPRDEILEKIRQLLSVREQFTKQKVALDNSIQAYSKQRVQVALIKKAQKETLDQLKKQIARIDKELANLIKQDPEIFQRVNNLDSIPGCGMLLAAHLLVITENFTKIQNSKRLAAFIGIVPYQHQSGTSVSKRAKIRHFGPGPSRKLLRLAAQSVSTHNVTFRRYYLRKLDQGKAKPLVLNNIANKLLKVACTIIRNNTRYIKDYRSIHPMYLKSA

SEQ ID NO: 233201 - protein, 430 aa, unidentified
MKSNTQNAKIEAITEKTLVLGIDVGSETHYARAFDYRGIEYSKKPFKFSNTEAGFVTFKEWILDLKERHEKDKVVPGMEPTGHYWFNLGKFLQDNEMKPVLVNPHHVKKSKELDDNNPTKNDRKDPKVIAGLVREGRYMIPYLPDGVYADLRTASNIRFQLQAELTRIQNRISRWFNIYFPEYKTVYGKPDAKSGMLILKAAPLPEDILTLGIDGVNQIWRDAKLRAVGKARAKTLIEAAEHSVGSKEGAVSARMEIRMLLEDYESRNIRLQEVMTLIEGLVKQIPMAEKLLEIKGVGIKTVSGFLAEVGDISRFNTPKELQKLAGLALVESSSGKHKGETTISRRGRKRLRYLLFEVAMSLVAKNPEFRELHNYYTTRRLNPLKKMQSLMAIAAKLIRVFYAMLTKGVDYDPKKMVSDIKRPVVYLQAV

SEQ ID NO: 233202 - protein, 470 aa, unidentified
MGHNRSPRHLQSRTPSKRGSPSLIERIKPNAAGIDCGSEQHYVAVPSDRDPEPLRSFKTFTADLHRLADWLVACGIETVAMESTGVYWIPIYEILEERGLEVVLVNARHVKNVPGRKSDVLDCQWIQELHSVGLLRGSFRPAAEIAALRAYLRHREKLIQGASSHIQRMQKALVQMNLQLHNVISDITGVTGMRILRDLVAGITDPKVLAAHRDHRCRASEEEITASLTGHFRAEHLFALRQNLELYDTFQRQIQDCDRAIEALLQTLAAQQEKPHVPPPPARSKKKPRDNEPRFDIRTHLYRLAGVDLTQIDTIGPYTALQLIAEIGTDMSRWRTDKHFTSWLTLAPKNKISGARLLSSKTQPSANRAAAILRMCAMVAGHTTTALGAYYRRIAYRIGKPKAITATARKIAVLVYHLLRGDWDYRDPGADAYEAQHRTRTLRHLRNRARLLGFGLLHLETGELLEGAVS

SEQ ID NO: 233203 - protein, 317 aa, unidentified
MEQLDGSTKIAGVDVGKFWLDAALAEPGAPLRVRNDAAGIGTLADWLQQHGVGRVGLEASGPYDRPVRHALQAAGLAVVLHQPAEVKLFGRLKRQRAKNDRLDARLIAAATAGIERPARPADPRLAELAEWLTVYEHVAATIAGLKTLLESVSLDALRHCVLAQIDRLKAGKAELAATVMAAITAQPDLRQRLGLLMSLPGFGPIVATSMLIRMPELGDMQHGQPACMIGVAPHDRDSGTWHGTRCITGGRSRPRRMLYIAALAARRCDPDLKAFADRLEQHGKPKKLILVAIMRKLIEAANIVLKRKTPWIPKTAK

SEQ ID NO: 233204 - protein, 346 aa, unidentified
MKVLLKQTVGIDVAQNELVVSLGRMDQQISIEVYAYKVFPNSKKGFSSLVSWVNKQTITDAEVRYVMEATGVYHESLAYYLCGNKKQVSIVLPNKISNYVRTLDIKTITDKSASQAIARFGLERQLEVWQPPLKIFNDLRQLCREREQLVQERTMLKNQLHAERSSATSSEKSIKRTKKRIAMIDKQEKEIRDEIATLIKGDEAIAKKMKVITSIPGIGNLTAVTIIAETNGFELIKNKRQLVSYAGLDVREKTSGTSVKSKPRISKRGNRNLRKVMHFPALAAIRTDESFRFIFLRLVSRHGIKMKAIVAIQRKLLELTYILWKSNTSYCSNYHNQSITIETITV

SEQ ID NO: 233205 - protein, 341 aa, unidentified
MKRLYYIGLDIHKKTISYCVKKVDGTIVQEGKIAAERKILLKWVEGLPGPWYGAMEATIFTGWVYDFLKPHAVELKVAHPAMLKAITAAKKKNDRADAEKIADLLRVNLLPECYMLSEELRELRRILRYRNMIVRTATKMKNKISGLLMEVGAAYDKAKLHRRKYFSDLLERIEDVPDSVKDMMKLSRSSLDMFEAVQKKLVHTLREDKLIRERVQRLMSIKGVGEVMALTWVLETGDSSRFHNARHAISYCGLCSAQQESAGKEQRGPISKKRNKHLQTMLIEAAKLAPRWNPQLAVLHEKELNRGNRNRATLAVARKLVEYMLAVERQQKDFVPSELAA

SEQ ID NO: 233206 - protein, 430 aa, unidentified
MKSNTQNAKIEAITEKTLVLGIDVGSEMHYARAFDYRGIEYSKKPFKFSNTEAGFATFKEWILDLKERHEKDKVVPGMEPTGHYWFNLGKFLQDNEMKPVLVNPHHVKKSKELDDNNPTKNDRKDPKVIAGLVREGRYMIPYLPDGVYADLRTASNIRFQLQAELTRIQNRISRWFNIYFPEYKTVYGKPDAKSGMLILKAAPLPEDILTLGIDGVNQIWRDAKLRAVGKARAKTLIEAAEHSVGSKEGAVSARMEIRMLLEDYESRNTRLQEVMVLIEELVKQIPMAEKLLEIKGVGIRTVSGFLAEVGDISRFSNPKELQKLAGLALVENSSGKHKGETTISRRGRKRLRYLLFEVAMSLVAKNPEFRELHNYYTTRKLNPLKKMQSLMAVAAKLIRDFYAMLTKGVAYDPQKLVSDIRRPAAYLQVA

SEQ ID NO: 233207 - protein, 530 aa, unidentified
MVTRSKKRKSKGSKNRFIGKPTGQIQERVRAVGPEHFGIVSVDCAKRRSKWMLCNFYGKVIIEPTTVEHTSGGLRVMTQLVAEACRAEGLTDTVVAVEMTGIYHKPTFRAFRKAGFDTRIVHPFASNHYRRPLHSDQKTDDHDLEAIFHAAVKGYGLAGLPVSEVYQSLQAVSRHRHNLVKQRSRLMMQIRRLLHQTMPGFADLFEEDTLFHKSIALPIALKFTSADAIRDAGVAGITSHLTKTNVRFQTRTIERIVAWASTAADPSELEEIHTRQWQQLNEVRRVFDEHVESAEREMASFLVKTPYVLLLSVTGINVVSAARLAGEAGPIEHYASARAINGRAGLYPSRYQSDEVDHADGSLVRQCNRKLRGAAMLVAENLIKCHPYYRGLSALWTQRKVDPRDRRCRIANRAMRMVFQLVGGRQVWRGRSVDREHLLANLQEFHRLHQTPIEQSIRDLNEAFMWLPKSTYTAEAKPLAEWARQKHRGPQRIGDLMIPLLIRLGVTREELGVPSEETLESNTSEARSSD

SEQ ID NO: 233208 - protein, 435 aa, unidentified
MRLANYGRNPTKRKQYVQQPGLLLVGIDVSKAKHSACIGTQSQVINRKLSFTHSREGFQLFEKIVRKTMFQNKCRRVLIAMEPSGIYWYGLYNRLKSCGYGLCLVNCQAVSNNRKTMPDGANKTDPKDAYSVFDLLCQAKFFLPVQRDAELQAAYRMMQRHMALKKRISRIRNQLRQAIHLAFPELNPMIKDLTLPTSLRFLQANPTPRSIRYNGRRRFMQKWQPRRRCGQWRPQKLEKIYELAAHSIGLKDPCRIYEFEIKTLAQDLTDAVAKANLWLQTAIELVESRPDFQLLMQMPRIGKPTATAILTAVGDIQQFCCGKQLVKLAGLDIKLFESGSSIRKRPRISHVGSAYLRHWLYYYSMRLVAHEKHFKGLHQRRKNKSPGKGAGQRALIAVSDKVIRIAYRILKDKLKYAPSKDRVVAQYYATLKKAA

SEQ ID NO: 233209 - protein, 356 aa, unidentified
MSRDLKYIGMDVHQEAIVIAVLNGSGKLVMESVVETQGSSVLQFIHGLRGELHVTWEEGTWASWLYDLLKPQVHEVLVCNPRRNALLKEGSKSDKVDARKLADLLRTGMLRPVYHGEHGLRTLRELARSYQTISKDLTRVMNRLKALYRGWGIACAGTQVYAPRYREEWLRKIEHAGVRRRAELLYEQLDGWQGLRRKLRPELLAESRNHKAAKLLRQIPCIGPIRAARLLALMQTPHRFRSKRQLWTDSGLGIETHDSAQYRYVRGQLQRSKKPQQIRGLNQNHNHEMKEIFKGAATRASCGVGPLREFYVALLDKGMRPEMARLTLARKIAAIALTLWKKEERFDAEQLKPQAA

SEQ ID NO: 233210 - protein, 337 aa, unidentified
MKRYLGVDLHRTQFTVCTRVENGRTYLRQWPIRDLKLFAAQLRKEDELAVESTGNTRLFHDAVIEHVARVAVVNPSQFKVISQSVKKTDKNDAELLALYLAKGLLPEVRMKEPKQREMSHLAQTRDLLVKQRSALKAKINNLLSAEGINLKRESLSSNKALERVLAMPLSPLMQAETRVLVSQIRSLNQSIAELEELIEAEGPKLAGHENLMSIKGIGSVSAAVLLSVIGDIRDFSDAGKLAAYLGLVPRVQNSNETEHCGRITKQGNKLARTCLVQCALVAKRYSSFLQNFYQRIQRRRGGGKAKIALARKFLGVIYHTLKNNWVFEDFPNFVLAS

SEQ ID NO: 233211 - protein, 427 aa, unidentified
MLKILNVGIDISLREAVISFLTWEGKYLGKSFRIPNNLPGAKELENRLLSVLSTGLFEHVRFGMEATQNYGFHLAEYLAISDKLSVWKPLVYVINAKYIKDFKRAFPERDKTDLIDSQFIAEYLRFGKLPHPFEANNRYLPLQRLVRYRYHLVKNIERETKFFLANLFLKFPGWVQRRPIRTLGKSAMDVLSEFYSLDEIVQMPLDELALFVAKAGKNRSPNPEKIAEEIKKAARESYRLRADLADSVQFILESTMINIRSLKSSLKEVNKAIEEEMKGFSNPLLSIKGIGPVYAAGIFACIGNIKRFPSHDQIAKLAGLVWKRNQSGKFEAEERCLIREADRYLRYYLVEAANSLRVYNEEYQAYYQRKYWEANKHQHKRALVLTARKLVRLVFALLSKNQLYEPARTFQCVQPSLTLSRKSKSRR

SEQ ID NO: 233212 - protein, 333 aa, unidentified
MGFEPEPSKEGSWMMAQNDLIVAGIDVAKDKVDVCIRPLSLRRTFASTTEGRRELASWLRRKKVGKAVMEASGGYEREWAKALRDAKIEVRIVDPKRVRDFARSAGRLAKNDMIDAEMIAWFAETFDEAPGQAHDAVREELAQIVNARLGLIDLQTRLLNRDEHAGPEPVQKMHARMLKKIAVEIAKLETVIAVMIKATPRFVELAEIIESVPGLAETTSATLIAKMPELGQVNNKIGAALLGAAPYDDDSGCRRGERHIKGGRRKVRNLFYMACLGAATQHNPVLKAFYDRLIAKGKEKKVALVACMRKLIVILNIMIARRQKWDPNLHVLG

SEQ ID NO: 233213 - protein, 362 aa, unidentified
MRMGGTVIATLVSGTVGKPGPSVLGSCPQQMKGSTSRMQGKEASEQETRKCSAGIDVSKSWLDAHIRPAKESLRVANTAEGIRRLKRWLLRHKVTLVVVEATGKWHRDVYRSLSASQIAVAVVDPYRVRMFAKAHGIFAKTDRLDAEVLAMFAEMMAPSCRAPMPQALEALQELVTARDSAVAEHISLKNQLSTAEGSFLRRQLTKRIAQLAAHIKAIEKECMTQIKADEGLVRRFDILTSIPGVGGVVATTLIACLCELGSLTNKQIGALAGLAPVADDSGERQGARVIWGGRAAVRRMLYLAALSAAQHSSDMKAFYSRLLANGKAHKAALIAVARKIVLLANTLIAQNRAWLPIAPKNA

SEQ ID NO: 233214 - protein, 317 aa, unidentified
MMQAAPIFVGIDVSKARLDIALRPSGATESFPNDETGIRTLVQRLCAVKPLLIVLEATGGIERSAVRALVAAELPVTVANPRQVRDFAKATGQLAKTDVLDAQILARFAEAVRPVLRPLPDEMTLELRALIGRRRQIIEMLTAEKNRLSRAPQRVQKRIATHIRWLQSELERVNEDLDQAIRQSPIWREQEDLLKSVPGIGPVVSRTMLAELPELGSLSRKQIAALVGVAPLNWDSGLLRGRRVIWGGRAHVRTALYMAALAASRRNPVIRDFYRRLRAAGKKPKVALVACMRKLLVILNAILKHRVPWRPVVAQVP

SEQ ID NO: 233215 - protein, 338 aa, unidentified
MSESALIGIDLGKHTFHLHGQDNSGREVFRKKCSRAQMMQFFASSQSCVVAMEACAGSHCVARQLAAIGHTPKLISPQFVKPFVKGNKNDFVDAEAICEAASRPSMRFVTPKTESQQTLSVLHRMRESLVRDRTRTANQMHGFLLEFGVSLPRGLAIMKRLAVVLAEHELPVRLTVLLQRLHNHLIYLDEQIKAMDKELACQVADDDLGSRLLSIPCVGPITASLLAVEMGDGKQYRCSRDFAASVGLVPKQYSTGGKANLLGISKRGDKHLRQLLVQCSRVYMQRLDHQKGALADWVRSLLSRRHSNVVACALANKLARIAWAIAAHHTQYEAGPSA

SEQ ID NO: 233216 - protein, 422 aa, unidentified
MFTERTSVGLDVHARSVAAAAIDGVTGELFQSRLTASYEHVRSWLGRLPGPVAVVYEAGPTGFGLYRHLRSAGIRCEVVAPSKLQRPAGDRVKTDARDAVHLARLLRLDEVTSVAIPSVDQEAARDLVRAREDCRSDLMRARHRLSKLLLRHGIVYSGGAAWTGQHDLWLRHDALVQLTSPATRLSFDADYDAVLNVKARRDRLDAAIEEMAAGSEFTALVRRLGCLRGISSLTGLALAVEIGDWHRFSGNSIGSFVGLVPTESSSGASRSQGPITKTGNGHVRRLLVEAAWHHRPQYRIGKTMRDRWALAPAAARDRGDQGNRRLHHRWVQFLTRRKRHTIATVAIARELAGWCWSLAVLDDSRPNPDLACAAGFGGSARSDPRPFYEQPTASTRATLDPRHADPLQPKHRPAVTNPRISE

SEQ ID NO: 233217 - protein, 323 aa, unidentified
MEKEPLYCAIDISKATLDVDGAALALPEQLGNDQAGYRRLIKAAKKYPGPVHFVFEASGPYHLGLALALWEAELPLSVLNPARVRFFAKAQGKAKTDPLDKQVIGAFARTMRPEPTPAPEPVFRELTELLQRRHGLVDCRVAEQNRLGQSHHSLIKGQISRLISQLTAQIEQIDQLVNKLVSSSAGLKAKVDQLCQIKGVGQLTAVTLLVTVPELGTLNRNRISRLVGLAPLNDDSGLQKKKRFIQGGRKVPRCALYMASLSASQHNPVLSAFYQRLLKAGKPKKVALTAVMRKLLICLNALLRQALEQKAFSGDFCSAKAPQ

SEQ ID NO: 233218 - protein, 323 aa, unidentified
MIKDIKYFGIDISYLVFDVTDSDGNYYQFKNNASGFKKFTKLLDINSHCVMEATGYYHYQLAYHLLESGIKVSVENALSVKRFIQMKLSKIKTDKSDSKLICEYAQKVDLKLWKGNTKDEMECLQITRALSVYTKQSTMLKNKLHGEAVLGAPSKAVVRSLKRSLTQLKKEITTLEDKLLVLVKLAHQDLLTRLKTIPGIGPKTSIMLVVLTGGFDRFTSAAELCSYAGLTPVIRQSGSSVKGRPRISKIGNQKLRNLLFMCSFNACKYNKACRDLYERIVAKGKSKKLALIAVCNKLLKQAFAIAKSGLIYDKEYKSTLVRN

SEQ ID NO: 233219 - protein, 320 aa, unidentified
MRNAVGLDISQNTFDAAAIVNGQRKQALFDNSINGFENFKAWLDGFDCELHICMEATGNYFEDVADYIGQFYTVSVINPYKISEYGKSRFHRTKTDKQDARLIAEYCHTAMLKDLPARKKISIGHYRLKRLLALYEQLKTQKTAQKNRLKVAKDEFVRRIHQAQIQELDQHIQQAEAEIQAITNGNQDLKIVSEGLQTIPAIGKLTAAILTNYLLSGDFKTSNQFTAFAGLNPQQKESGTSVKGRSSMTRYGNRRLKAALFMPAMVALNRDYFHDFVKRLKAKNKPKMLILGALMRKLLVVAYHVYKTQKPYNPERYKPA

SEQ ID NO: 233220 - protein, 326 aa, unidentified
MRQAKSENQVKTTVAFDVCKAALDVHIHADAKAFQVPNTHEGFDQIALTLADYDVSLILMESTGGYEDAAACNFQSLGYDVAVINPRHARNFAKAMGKLAKTDRLDAAILADFAAVIDSRPDRARYIKPPTDEERKFLSQMVARRRQVVDLISTEKQRLAHADDYAKASINIIINLIESQLKEINSDISFYVKKNYSDLSNMLSGIPGIGDLAVGLLIGDVPELGQIGNRQLSAVIGVAPFNHDSGKMRGKRCISGGRQNVRNVLFMGAMSATRFNPVIKAFYDRLINKGKPKRVAYIACIHKLLRIINAMVRDGTSFNPDLHAVI

SEQ ID NO: 233221 - protein, 329 aa, unidentified
MLGIDVSKSKLASSLVDPKSLLAISSSVITNDATGVDSLLSSIDPKIAWVVEPTGRYSALVVKQATEAGRRVLLAPPRAAKLFLKSNNPRAKTDKIDGRGLALFGLSRPLKPFPQKSENVEHLDQLLSARKGLSRARSSLTQQKNELPYAADALTKAINAVHEQIGQLDKAIHKQVTIHPEFSLVNTLMQIPGVGELTAAAVASRLVSKAFPTPDAFVAYVGLDVGVRNSGKSIGRVKLSKQGDAELRRLLYISALANLRCKKSVFKDRYNQEIARGRKPTAALNIIARKIAHICWALQKHPGPFDASRVYRGQQSVSGNQNLDNQQED

SEQ ID NO: 233222 - protein, 387 aa, unidentified
MMVRTVNDLSAATHGETVRCLIAIELSKKSWVVAFNTPLSEKISRRTLTGCKWKKLLELIEDVRARVSRQMGRPVEVMSCYEAGYDGFWLHRQLEAHGVRNYVIDPASLQVDRRARRVKTDRMDTERLLRSLMAYLRGEPKVWSVVRVPSVAEEDARRLHRERDRLVSERVQHVNRIKGLCALHGIYDYDPLRRRAMAQLEQLRMTEGEALPPRLKSEIKRELQRLELVVEMIATLEAERDAIVEDEASPHVNAKKIQNLHKLKAIGPEFAAVLVGEIFHRGFNNRRQLASYVGLAPSPFQSGNVAHDQGISKSGNRKGRTTGIELAWLWLRYQPDSDLSAWFRARVGITKGRIRRIAIVALARKLLVALWRYLETGLVPRGAVFKG

SEQ ID NO: 233223 - protein, 366 aa, unidentified
MKKTSTVQINGNMIFKGHKLTIGMDLGDHWSCYCVLDEAGKILLEQKVAMTPEAMKQVFAKIPQSLIAMETGTHSPWVSRLLTELGHKVIVAHAQKVQLITKSNRKDDRHDARTLARLARIDPELLGPVRHRSAKAQIHLTVIRARAELVRARTALVNAARGLVKSYGQRLPKCGTQQVNRELAAGLHAELREALEPLLQEVESLNERIQEYELRMEKIAKESYPHVELLKQVKGVGTQIGLTYVLTLDDPHRFPKSREVGCFLGLCPGRRDSGESQPQMNISKEGDRYLRTMLVQGAHYILGPFGEDSDLRRWGLKLAARGGKSAKKRAVVAVARKLAVLLHKLWVSGEAYEPLRNSQKAMRAVA

SEQ ID NO: 233224 - protein, 346 aa, unidentified
MNELKEFIVGVDVSKKTLEIAVLEKEPQKVIGTKSFPNTTSGFEELKKYVLAKVKRGHWTVVLESTGVYHENLVDYCSLNKIPVSVILPNKIKNYTKVENIKSKNDQIDAKVIARYGCIFPLKLWSPMADNYYELRTLSRHIMSLKKERARAKTRLQTYKSTKRTPQSILDSEDEHILCLTDMIEHEEVELKKLAYSNKDLKERIIHIATIKGVSEIVAIQVICEVNGFEMVENARQLTSFAGLDVVERQSGEFAGRTHISKKGNRYIRRLLYMSAITAATHGSGKFIILYQRISERNTGTSKLKGLIAVERKLLIMIYTIWKKNERYEPDYIHASAKIASGIAET

SEQ ID NO: 233225 - protein, 385 aa, unidentified
MSMLADAVDAVLGVDTHRDTHHAEIAHPSGAVIATCSAPNTSSGYAQLLSWAREHAPGPRLVASIEGTRSYGAGLARAAAAAGLVVIECEQPTRRTRRGKGKSDPVDAHLAVLTALRLDAGKLPTPRADGDREALRILLCARQELTTTATAQVNRLRALLRDGGDHDRALARGRLKGTALAALARRRQPHGATRAQAVRHGEIRRLALALREASRALKDNGAELDTIVSDLAPGLTSRAGIGPVSAAQAIVSFSHPGRCRHDAAFARLAGTSPIEASSGQVTRHRLNRGGDRALNRAIHIIATTRMRDDPATRAYLTRRRAEGKTDREIRRCLKRYIARQLYRTLTTAMAPVPGPGEGLRRPGLGSPVILRRPDAGCEALAAPPG

SEQ ID NO: 233226 - protein, 341 aa, unidentified
MGEVITIGLDLAKSVFQAHGADAAGGVVFRKKLRRDQLLAFFAGQPRCLVAMEACASAHYWAREIGALGHETRLIPPPYVKPFVKRQKNDMADAEAICEAAQRPTMRFVTPKSAEAQGAAVLFRTRDLLVRQRTQLINALRGHLTEFGFVVRQGVGHVSKLVDLVKDPATDLPAAARPVLLMISENLQAAQLQIAKLDREIANRAKADPVAKRLMTIPGVGPVVATALVALAPAANTFRRGRDFAAWLGLTPLQNSSGGKQRLGKITKMGERGLRRLLIIGASSAAKAAARNGCGSNPWLAQMLSRKPRLLVIVALANKIARTVWALMAHGGIYRAPAAAV

SEQ ID NO: 233227 - protein, 429 aa, unidentified
MNYNTQNAKIASITEKTLIIGIDVGSETHYARAFSWRNYEYSKKPFAFSNDEAGFAAFKEWMDDIAEKHGMEVIIPGMEPTGHYWLNLGAYLQEQGMKPVHVNPHHVKKSKELDDNNPSKNDRKDPKTIAGLVNEGRFSYPYIPTGIYAEIRNLSNLRIQTQEEITRIKNRMARWFSIYFPEIKDVYRNPDAVSGLMVIKQAPMPCDIRELGVEGVNKIWRDARLKGAGIKRATTLVTAAEHSIGNTEAPRSARKEIRNLLEDYEGYKKRMDELMEEIEKTLSEIPYIDKLMEINGIGIKTVSCFIAEVGDIGRFDNPKQVQKLAGYAIVADSSGKHNGESRISHRGRKRLRYALYESAISVIGKNKEFKEIHSYYRTREKNPLKKMQSVIAVACKLIRIFYTILTKGVDYDGQKMLNDIVRPEIQPAA

SEQ ID NO: 233228 - protein, 335 aa, unidentified
MTYLALDVHKTHSTVAYLDPSGKMQVRRIYTQRHDLARLLDELPRPWIVALEATRQSPAVCAWLRELDAEVHLVDPQKLSALAALRAARTDAKDAELMLDALLHDYLPEAYLASPEVAEDRDLTRCHNAVQRVSTYLRNLLRSLLARQGEEVSARDLCGLGAQAALDDLEQTLPAVPALVCQVYRRVLAKGEQALRVVDSQIKAKVAADPPAQRLLAQPGKGPLTTLGMLAEIGDPERFPSYKELISYAGLAPRVYQSGDSCATGHLPQRCSRRLRHWAVLAAQCAARSRKPSPARQAYRRVCIRHGPNAAKIAAAREMLRDVYFAAQRQRAEAL

SEQ ID NO: 233229 - protein, 438 aa, unidentified
MSNNVIFNFDELFISVGIDVGADFSWMSIVLPNQQFVGKPYKILHNSMDSLASAVSKIKEAEEMYSLESRIFLESTGIYHYPLFCYLRDKGFNCSVINPIITKNSTNINIRKVHNDRFDSKKAALVGLKPDLKVSLMPSDLALNCRNLCREYYDLMDSRNAYVNKLIDELRMVFPQYLGIFSKVTIDTSLILLETYTSPSAFINADKQEIIDLIRSTARFGLTYACNKYNAIIQAANDADEFGYILDSNIKRIRLYIGFICKYDEEINSILESMHELAAANEDTDFVKQIRLIETFKGAGFLSAMSLMGEIGDFSAFSKPKQLFAYFGLDPAVKQSGKFEGTKIQMSKRGSAIARRVIHTLTLQSISASRTGESKNPVLLDYYLKKCESKPKLVAMGAVSHKVCNMIFAILRDSKPFEIITPQEHIKKYNVAKCDVAA

SEQ ID NO: 233230 - protein, 370 aa, unidentified
MKKQTKTTPSVVHTSPAAVVSGFTLGLDLGDRSHHVCVLDATGQIVREGALSNTRPALAKLMAGFPRATVAMEAGTHSPWISRYLTELGAKVIVANPRKLHAISRNERKCDQRDAQMLARLARVDPALLHPIQHGTARAQHDLLGLKLRDALVRTRVNLINAVRFTLKSLGHSVRNPSSESFHKTVLADVPADCLPVIQPLLTVLVQVTEQIKGMERDLVQCSKKEYPATQRLQQISGVGPLTALCFVLKIGDPQRFGRSRDVGAYLGLCPRRDQSGGTDKQLRISKCGDGLMRRLLVSAAHYILGPFGPPCALREQGQRLAGTGSAREKKRAVVAVARKLAVLLLSLWKHGADYEPRATAGPALVLTPA

SEQ ID NO: 233231 - protein, 387 aa, unidentified
MPQPNDLSRSLVALDQDSTIIAVVEMSQSSWLVGGVLPGIERQPRKKLEPSPERLLALLHRWRDESVRAGRTITRIAVAFEAGRDGFWLARWLEARGVEAHVIHPSSVAVSREHRRAKTDRLDTELLKRGFLGWLRGERGHCSMVRIPTIAEEDAKRPNRERECLVKDRTRLVNRMKGTLARLGIRHFRPTLRNAAEHLAALSTPEGSPLPPNVAAELERDIARLRLVIGQIKQIEEARRQRLEEQPERGPHAMVRLLARVVGIGIETADMLVNEVLSRPLRDRRAVARYAGLTGAPDESGAKRREQGLAKAGNARVRRGMIQLAWRFLRFQKNSALAQWYQARTADRRGATRKTMIVALARKLLIALWRFVTIGEPLDGVTLRPAS

SEQ ID NO: 233232 - protein, 352 aa, unidentified
MQTQVKENALNGQNFYCGIDLHNKTWAVTMETDELCLRTFTQPADKHALVRFFEKNYPGVKIIAGYEAGYFGFELYRFLQDHGIECRVLHAADIPTTHKEKDQKRDPLDSKKIARALKTQGTRSIWVPPVSVQQDRQLLRTRRALSKDQTRIKNRIKAFLQTYDIAYPEAFADSKKHWSKKFIGWLKRIRLQQDAATESLQVLVRNLEFLRSELTGVSRHIRDLAASESYRDPYNKLIQITGVGLITAMTLLMEVGDIGRFKNTDQFRSFIGLVPSAHCSGEKDYHGGITSRANHHLRNLLVESAWTAARRDLYFLEVFTRYKKRMQGNRAIVRVAVKLANKMYYCLKHNSN

SEQ ID NO: 233233 - protein, 340 aa, unidentified
MEITTLGIDLAKSVFQLHGVDADGAVVLQKKLRRGAVLDFLGELPPCLVGMEACATSHHWAREIAALGHEVRLIPPAYVKPYVKRQKNDAADAEAICEAVTRPNMRFVPVKTEEQQGVLMLHRSRDLLMRQRTMILNAIRAHLAEFGIIAAQGPRKVAELVTRLREEDGLEVPTLARTALMALAAQLDGLAIQIRGIERQLMAWHRQSAASRRLETIPGVGLITATGLAASVPDPGVFRSGRQFAAWLGLVPRQSSSGGKERLGPVSKMGNGYLRRLLVVGATSVSRRAGTDDSRTGLWVRSLLERKPARLVTVAIANKTARTAWALLVKGESYRAAPAA

SEQ ID NO: 233234 - protein, 347 aa, unidentified
MRFYNNSHPYYCGIDLHARLLYVCIIDSKGEVVAHKKIGASKDDLLLILEPYIGNVIVGVECMHCWYWVSDWCAELGIDFILGHALYMKAIHGGKTKNDKVDSFKIATLLRGGNFPIAYDYPSEMRAARDLLRRRMKIVRHGAMLKGHVVNTNSQYNLPATELNLKNISARKKLREQYQDPIVQRNIDLDMALLDCYAKELAQVEWFIEKQAKNHNPVYLELLKTVPGIGKILSLTILYEIGDISRFESVQKFASYSRLVKCKAESAGKTYGTNGNKIGNAHLKWAFSEAAVLYLRGNDKARNYLNRLQKRMSKAKALSALAHKLGRCVYFMLKNKTVFDEQRFLKG

SEQ ID NO: 233235 - protein, 422 aa, unidentified
MDEIVEESVELVERVCAIDIAKADLVACVRVPHETKPGRRLQEIREYSTLTAALLALADWLRCQQVQLVAMEATSDYWKPVYYLLEAEGFECWLLNAKHVKNVPGRPKTDRLDAVWLAKVVERGMCRPSFVPPKPIRQLRDLTRYRRSLVRECSREKQRLEKLLEDAQIKLSSVIEDICGVSGRRMLEEMIGGHGDPKALAQLARGRMRAKVGVLEEALRGHFEDHHGFLCQKMLRRIDQLSADIDEVTTRIEELVAPFAETAQRLDEIVGVAVTSARELIAEIGVNIAVFPTAAHLVSWAKFAPVDNSSAGRKKGSSTGKGNPWLAATLGEVVAATARTDTFLGERYRRLVKRRGKKRAIVALGNSILTIVWHLLADPQARYRDLGADFHQSKINKARQEQTLIRQLERLTGKKVALRVVA

SEQ ID NO: 233236 - protein, 314 aa, unidentified
MIPSTIGVDVSKDWLDAYRLADGAARRFANDKTGRKAFIRWLTAAPVERVVFEPTGPYHRQLERALDTAGLPVAKVNPRQARRFAEAAGKLVKTDRVDAAMLARMGEALALPPRPCVTQTLAELKELHLARAALIKDRTAAKNRAKAITLRLLERQNKKRLAEIDVKLEEIDAAIEKLIKDDAPLARRFEILLSIPGVSKITAFALLIEMPELGGLEGKQAASLAGLAPVERQSGSWKGHAYIRGGRAFLRQALYMPALVACRFNRDSRDLYQRLVKAGKPAKVAITAVMRKLVVLANALLREDRPWAENAPCQ

SEQ ID NO: 233237 - protein, 344 aa, unidentified
MNAVGIDVSKGKSMVAIMRPFGEIVSAPFEIKHTASGINSLVELINSVEGESRIVMEHTGRYYEVLAHQLSEANLFVSAINPKLIKDFDNDSLRKVKSDKADAVKIARYTLDKWHNLKQYNVMDELRNQLKTMNRQFGFYMKHKTAMKNNLIGILDQTYPGVNTYFDSPARSDGSQKWVDFASTYWHVDCVRKMSLNSFIDHYQNWCKRKKYNFSQSKAEEIYGKAKELVPVLPKDSVTKLIIKQAVDQLNSASTTVESLRTLMNETASKLPEYPVVMAMKGVGTSLGPQLIAEIGDVSRFTHKSAITAFAGVDPGVNESGSYEQKSVPTSNEAPLILERLYFR

SEQ ID NO: 233238 - protein, 342 aa, unidentified
MQITTIGLDIAKNVFQVHGIDATEKVVVCKQLRRSQVLAFFKALPPCLIGLEACATAHYWARELTKLGHKVRLMPARDVKAYVKRNKNDAADAEAICEAVRRPTMRFVEVKSAEQQGRLMLHRTRDLLMRQRTQVINALRAHLAELGIAAAQGNAGLKELLAIITGVADERLPAEAHASLIVLAAELQAMQTLIASIEKRIIAQHRSDEASKRLRSIPGIGLVGATAIVATITDPKVFRSGRDFAAWIGLVPRQDSTGGKQKLGPISKQGDRYLRRILVVGAHSVLRRAKQNPEKYPWLTRLLTRRPFKVVAVALANKMARMAWALLAHGGTYRAPELAAIA

SEQ ID NO: 233239 - protein, 353 aa, unidentified
MIIVGVDAHKRTHTCVAVDNRGQRLGETTVPATSVGNASALKWALLKYGPELTWAIEDVRTVSGRLEHELMDSGQRVVRVPTKLMARTRASARSRGKSDSIDATEIARAALREPDLPVAQHDQVSRDLRLLTERRDVLVDQRTATTNRVQWRIHELDPVRSTNLKPLMYAKNRDPVAAWLAELPGLVAELACDELNDIARLTQEINMLEKRIVEQSRIHAKHLLALPGCGELTAAKIVAETANVSRFKSEAAYARYIGVAPLPHSSGSTAGHVRMTRSGNRQLNSAIHRIAVTQIRLDGPGRQYYDKRRKAGDSSPAALRNLKRRITRVVFSRLHADEADRRSQATADTPSHE

SEQ ID NO: 233240 - protein, 454 aa, unidentified
MRHGKKKQKPGQVQEDMPVINSNAAGIDVGSAEIWVSIPPDRDEEPIRRYATFTADLYALADWLKQRGIESVAMESTGVYWIPVFEILERKGLHVVLVNAKYAKNVAGRKSDWLDCQWLRLLHTFGLLPSSFRPAAAIATLRCYLRHRQMLIEYASAHIQHMQKALTQMNLQLANVVADITGDTGMRIIRAILGGERDPQRLAQMRDYRTKNDEATIAKALQGNYEPQHVFALKQAVELWDFYQQQRTTCDQEIAQYLHNLDSAVDVDSHPIPPPRAPKKRRNSPGFNCRLETYRILGVDLTQIDGISESSALTILSEIGTDWSRWKTEKHFASWLTLCPNNKISGGRILQRRTRKSSNRVHDVLCVCAQTLFNSRSALGAFARRMRSRLGPQKAIVATAHRLALWIYRLLRFGNTYVDIGQDAYEQQYQQRKLKTLTRQAKHFGFQLVALAES

SEQ ID NO: 233241 - protein, 378 aa, unidentified
MHVGLDVHKESIDIATADPGRSGEVRHVGSIGGDLASLDKALRKLTSKGHQLHVVYEAGPCGFVIWRHLTARGQACDVVAPSSIPKRAGERIKTDRRDAMMLARLDRSGDLTAVRVPGAADEAVRDLVRAREDGVRECRNARHRLKALLLRNGIAYAGKSSWTAAHLRWLATLKMEHAAQQIGFQEYLHSITEATARIQRLEQAMRDALADWTLKPLVQALMALRGVQLIAAMTLVAELQDFLRFESPRKLMAFVGLVPTEHSSGPKRRQGSITKAGNSAARRMLVEMAWHYQHSPRVSPIIAARQDELPKEVTDIAWKAQLRLNAKFKRLLARRVMKNKAVVAVARELTGFVWAIGCEVQASGWQGLAIEPASARVN

SEQ ID NO: 233242 - protein, 359 aa, unidentified
MRLYVGMDLHSTNCYTGILDEEDIPRLSRKLPNDRSKIVSALAPYRKEIVGIAVESTYNWYWLVDALMAEGYPVHLANPAAMKQYQGIKHLDDRHDAFWLAKLLKLGILPTGYIYPRESRGLRDLLRQRSRFVVQRTSMKHTLQQIYSNHTGGQLNNNAISRLDAAAIQAALVEDDPTYIGVRLLDAIGDLERQIKVIEQYVLKKVQGTPPYSTLTSVPGIGVVLGLTIALETGPIDRFASAGHYASYCRCVPTAYWSNAKQKGSGNPKNGNKYLSWAFAEAANFAIRYFKPAKAFYQRKGAQTNPPVAYRALSNKLAKACYFMMRDNVPFDVQRLFGGETPRVEAAEPAQGLVKSHQI

SEQ ID NO: 233243 - protein, 408 aa, unidentified
MLNIGLDWGSEKHAICLMSENRRSLARFEITNDLEGIHKVVSQVEALGFRPEECAVALEGRPELLILTLSSLGFTIYPLNPKAVHRYRDRHKASGATTDWEAAYLLADILVIDRHLHTPWQPSSPLAQEIAWITRDQYKLTQQQTRLSNQLTACLKPYYPVALDLFTKVAQPITLAFLEAYPTPGAAQAASYEELQEFFRSQSYPRLDLLPQIYAKLQGMALRAPPHVARARSRYMLVLARQLEVVVSAIKAYDREIQRLLDEHPDGQIFRSLPGAGDLTAARLLGLFGDQRSRFSNPDQIQPLAGTCPVTLSSGKRRAVVLRRACNKMFRDVMQQLARNSLSQSGWAAAYYGDQIRRHPGEESRCLRALANRWVGIIYKLWNDRLLYDEQTHLRNRLHQGHIPCDSP

SEQ ID NO: 233244 - protein, 355 aa, unidentified
MDSKKYIGMDVHQATISVAVRDSAGKLVMESILETKANTILEFIRGLGGSLWVTFEEGTSAAWLYDLLKPHVAHVVVCDPRKNALLKAGNKNDRVDPRKLTDLLRAGLLSPVYHGECGVRTLQELARSYLTVTKDLTRVMNRLKALYRSWAIACAGEKVYAPRHRSAWLEKLLQAGVRRRAEQLYQQLDNLVQIRREARQELLRESRKHPASQFLSQIPRLGPVRVALLIALLQTPHRFRTKRQLWAYCGLALQTRSSGEYRFTGGQLQRSKRLPAIRGLNVNHNHDLKNLFKSAATQASGSSDPWADFYQNLLTRGMKPAMARLTLARKMAAIVLRIWKKGERFDPEPWKRKSA

SEQ ID NO: 233245 - protein, 402 aa, unidentified
MGDFAGLDWGSTRHAACVVDEHGKVVDRLAVRHDAEGLDWLIAGLRRLGPAGTLPIAIERPSGIVVAALAAAGHPVVPIPPNAVKATRPRYRAALLKSDAGDAYSLADMLRTDGHRFRPLAASSDALKALRALVRGRDDLVAARVALANQLRGVLESFWPGAAAIFADIDSPIALAFLRRYPTPESAARLGERRLAGFLAQESYCGRRSAAELLARLRAAAPGRAGEAEAEIKGELVRALVGVLAELVARLAKLTARLEPLVADLPDGRILMSFPRAGRVCAAQMLAEIGDARERFPTEAQLAAEAGLCPLTKASGKSHAVTFRWACNKRLRSAVTCFADNSRHASRWAADIDARARARGCDHPHAIRILGRAWIRVLWRAWDDGLPYDPTRHRGAQAHAAA

SEQ ID NO: 233246 - protein, 351 aa, unidentified
METQTHESKEEIEMKLYGAIDLHSNNNVTVLIDEQDRVVYEKRLPNNLAMIAQQLSGYQESLQGIVVESTYNWYWLVDGLMDNGHRVHLANTAAIQQYEGLKYTDDSSDARWLAHILRLGVLPEGYIYPKQERGVRDLLRKRGQLVRQRTSNLLSIQNLVTRNTGSSISGNRIKTLDSEQVDQLLPDRDLALAVKANLSMMQCADEQIEILERTVRDRVKLRPEFSFLKSVPGIGPILALTIMLETGDIRRFPTVGDYASYCRCVGSQKLSNGKKKGRGNTKNGNKYLSWAFVEAANFAIRFSARIKGYYQRKKAKSHRVVAIKAVAHKLCRACYYIIKDQVAFDITKAFA

SEQ ID NO: 233247 - protein, 470 aa, unidentified
MGRKKKTTMPIINPNCAGIDVGSKSHYVAIGQSMSDVREFGVYAEDLTAMAQWLKDKNITSVAMESTGMYWQNLFIELVNTDIKVILTAGKFTKNINRKKTDVMDCQWIQKMHALGLLPSSFLPDETTERLRTLCRHRDNMVSQKVNCTHKMSKFLKWLNFRLDVVVRDITGLTGRTIIADICNGNLNPQSLAKHRHGNCRKSEEEIAKALVSNENPEYLFGLKQEFSRFNFVLKLIEECDAEIVKLLTVIINSDVNPIDDMPSKKPDKRVNKNTIKGIDLNITAYQYFGGVDLLTIPGVSFSTVLTFMSEIGRDGIKKFDTAKRFVSWLRLAPNNRISGGKTLSRHIPKGSNRLKIALRNAANAVGNLKESDLGRFFKKIAYRKGRQAAITATARKIAVILWHMLTKKEPYKPKTQYVFLDEKRRAIARLRKKMSKFGINPDELGIFTKPEYKLAFEKRVNKYNDLDKL

SEQ ID NO: 233248 - protein, 363 aa, unidentified
MNSKTNKTTICKEAHPCLKSYTAGIDLHSNNLTLAVVDESGKRINCRKLNCDLSLVLQALDAFKNELRSVAVESTFNWYWLVDGLIQHGYPVVLANPAAIEQYNGIKHADDKNDAFFLAEMLRLGILPTGYIYDAQLRPVRDLLRRRMNLVHQRTALTLSLKSLHHRTVGQTLALNKIKATGNADVAELFEHPANRLIATLQKQHIEALSQSIEIIEKEALKSAKSRSYYDRLKTLPGVGVILGMTIALEVGDVSRFKTPGDFASYCRTVDSRRLSNNKQKGSNNQKCGNKYLAWAFVEGANFAKQHHENCRRWFDRKAAKCGKIVATKALACKLAKAAWHVMSTGEDYDEKRMLPHLSGTKI

SEQ ID NO: 233249 - protein, 439 aa, unidentified
MTNRIPEMVLAIDFSLDRLDVSLRGDEREWRWAHQAYPNNWPGFQQLKQDLLTELNQVGPVRLTTVGESTGPYWWHAFYQFGHDEVLQPFSPQLALLNPARVKGYRKALAEQDKADPDDARLIDQYYRAVGVDHPYQFPDRYLRLRTFTRAYARVTHTLASEKAYLLSVLYLWGSEYQRREGKPFSNLFGATSLYVLDEFADIQAIAAIPLEELTTLLAQRSGHTFSDPQANASKLHQAALHSYPIPAPLADALHRVIQHTLAHIRFLSDNQKAYRQLIEQELATLPEAKRALDFKGLGPILVAGCLSEIQDTTRFVTGDKFDRRLKQRRPRTYHDGQASVAKLAGLWWPRHDSGHVQGLQPYLARERNPYLRYWLVQAAHTLQRYQPDYHRFYWKKYREALSHHHKRAIVLTARKAVRLVFALLHKGRQACLEEGLLT

SEQ ID NO: 233250 - protein, 344 aa, unidentified
MKKNLFFIGLDIAEADFAASIYKTPGESIITKEAIPNDRKGFKMLLLWLSDHHINKKNCRICMEATGVYSQAIAYYLLFQGFPVSVEPPLKVKRAFDPVGHKTDPVDSKQIAEYAYRFQDELTSWQPRDEILEKIRQLLSVREQFTKQKVALDNSLQAYSKQRVQVALIKKAQKETLNQLKKQIARIDKELEKLIKQDPQIFQRASNLDSIPGCGMLLAAHLLVITENFTKIQNSKRLASFVGIVPYQHQSGTSVYKRAKIRHFGPGPSRKLLRLAAQSVATHNATFRRYYLRKLDQGKPKPLVLNNIANKLLKIACTIIRNNTRYIKDYRSINPMYLKSLKSA

SEQ ID NO: 233251 - protein, 336 aa, unidentified
MTLYCGIDLHSNNHVVCVIDAKDQRVLEKKLDNEPELTIRTLSQYKRRLQAIAIESTFNWYWLADALMEAGYQVELVNTAKVVQYSGLKRTNDRYDAFHLAHLMRLGILPTGYIYPKSERGLRDLLRKRIQLVQERSSHLIRFKFQVQMHTGQSIRSDRIKARKFQLPVIGDSNVQMALQSHLVIIRSLTGQIKILEQSILSQVEPVACFNWLKTTPGIGDILAEAILLETGDITRFKAPGNFASYCRCVDSRRESNGKKKGENNRKNGNRYLAWAFIEAANFAIRHNEKARRFYLKKEKATNAIVARKALAHKLARGCYWVMRKQQAFNQDRVFG

SEQ ID NO: 233252 - protein, 392 aa, unidentified
MLFVGIDIAKRNHEASVIAQDGRVVRKAMRFANSQAGYNKFMDMVRSLSEPVVFGMEATGHYWLTLYTHLRNDGFTVHVINPIQSDALRGMYIRKTKTDSVDSVIIADVIRFGRYCETSVEPGDLQAMRELCRQRFYIIDMASDLKRKVIALLDQVFPEYEKLFSDSFGVSSMELLSQYTTPEEMLSVSSQQLAEVLEKASRGRLGAEKAVEIQDAARNSFGIVMASSSFSLIIRQYIEQIRSLESSVDIFDAEIARLLSGFDTQLTTITGIGPTLAAVILSEIGGDIRRFSSPAKLAAYAGVDPTVKQSGDFSGTRMKMSKRGSPYLRRAIWLASTVAAFKDPAIHALYEPKRAEGKDHMTVIGHICRKMISIIFAVLRDNTPYVPAGISD

SEQ ID NO: 233253 - protein, 404 aa, unidentified
MPCVGIRRYVGARVLRAGASLTQSRGLPSKALFGSAYMCWEAPVFIERTSVGLDVHARSVVAAAIDGVTGEVFRARLTPGNDVVVGWVRALPGPSAVVYEAGPTGFGLSRAFTTAGIRCEIVAPSKIQRPAGDRVKTDARDAMHLARLLRLDEIVSVTVPTVEREAARDLVRARDDVRGDLMRARHRVSKLLLRQGVVYYGGRAWSGVHLVWLQAQHFDAPGLQFAYDAAHEAVLQAEARRGRLDKAITAMAADSEFTPVVHRLGCLRGVSTLTAFGLAVEVGDWDRLTGATIGAYLGLVPTESSSGQSRSQGSITKTGNTHARRLLVEAAWHHRKPYRSPGVAMKARWELAPAAARARGHAGNQRLHQRWLTFTDRKKKPVIANVAIARELAGWCWSLAVMDG

SEQ ID NO: 233254 - protein, 338 aa, unidentified
MGTYAGIDLHSSNNYIGIMDQDHKRLFGRRLPNSLEKILMVLEPFKSDLKGVVVESTYNWYWLVDGLQEQGHRVHLANPSAIKRYEGIKHTDDKWDSFWLAHMKHLNILPEGYIYPKEQRAVRDLLRRRLFFVRHRTANILSLQSTITRNLAIKMSSNEIKKLDMDDACDLFDSANLVFMAQNNISTIKHLAKIIKGIEKEVKSQVKLRKEFVMLTTTPGIGLILGLTIMLEVGDIGRFFKVGNYSSYCRCVGSKRLSNGKKKGENNKKNGNKYLAWAYVEAAHFAKRHMPKAQRFYQQKMAKANGAVATKALANKLARASYFVMRDQVPFDEDMLFR

SEQ ID NO: 233255 - protein, 360 aa, unidentified
MQTKVNEKLFEGQSIYVGIDCHKKNWTVTILGEQYEHKTMSQNPDPDILAAYLRRNFPGADCHAVYEAGFNGFYSCRRLRELGINCNVIHSADVPTGHKEKIQKIDPVDSRKLARSLRSKEFESIHIPEPSLEADRALVRQRFRVMKDVTRTKSRIRSLLFQFNINVPDRFTTGQTRNWSRVYINWLNELQVEHESLKQTLDNYIRIGKLQREDLLSVNRQVRILSQTDAYRGNYNLLISIPGIGFLTAMTFLVQIGDIRRFRQLDDLCDYIGLVPMMKGSGPKLYTGKMINRGRKELKIMIIEAAWDAVRMDPALMAKFNELTRRMNKNKAIIRIARKLVSRMRYVLLSHEPYKLGITE

SEQ ID NO: 233256 - protein, 337 aa, unidentified
MNVSLIAIDLAKSTFQVCSVNRQGKELFNRAISRKKLTALIAQYPGIPVAMEACGGSNYWARTFQQNDHEVLLIPPPHVKPFVKGNKNDRNDAFAISEAARRPKMRVVTPRSLEQTDMILLHRIRERRVRARTALMNQMRGLLSEYGIVLPAGAATLRKALPLLLEDAENGLTMAARRYIQDLLNEWRDLDERIQADKHSVHVMARESPAACRLMKVRGVGDMIATAALAKLGRGDQFKNARQFSACLGLVPREHSSGGVQKLGGISKRGDDYLRRMLIQGAWSVIHYAEGRQDRLSRWAMEVKERRGKHKAVVAVANKLARIIWALVRHETTYCPA

SEQ ID NO: 233257 - protein, 361 aa, unidentified
MDKYIGFDISSKDVSVCVIQKNERERYTTIGPDAGSMRKFLINEKKDGSIVNVTFEISGQAGFIYDSLIDCVDSITVANPDKMTWIYRTAKKNDRMDARKMAVLLSIGEIPAVYMPTKEVRQWRMVICHRRKLLTAYVTAKNRIRAIFKSQGISKAANKGKWWNKNNRLWMRQVSAEGFDVNNLWKLQLGNLLDELDVAEKSIASVTEYLDGYLEKQAGGKLLMSIPGVGPRTAEAVLAYTDDVGRFAGGKEYCGYFGVTPKLDESGGTRRLGHISKKGPSVVRWVLCESSWKVIRYSPAMRAFYDRVRGSKKDYKKIAIVAVARKLLSIMRAMLLTGAMYNEEYVSSLEYGRIEKLRKSA

SEQ ID NO: 233258 - protein, 416 aa, unidentified
MNAAGIDVSSRKSTVAVLRPFGEVVRLPFDIVHSAEGFASLIRQLKSIEGETRIVMEHTGRYYEPVAQILHEAGFYVSTVNPLLIREYGGNSLRRVKTDKADAMKIARYALDNWSELRDYTPMDTIRYDLKTLNRQFQLASKQKTAASNNLIALLEQSFPGVRKCFDSPVRKDGTQKWVDFVYTFWHADCVRKNSLNAFTERYRKWCKRHGYFFKQSNAAEVYELARSVITLVPKGPVAKVLVQQAASQLTSISRSVETYRAEMNRLASMLPEYPVVMGLYGVGESFGPQLMAEIGDVRRFDRKQALVAFAGIDPMPNQSGEKNVRSNKSSKRGSPYLRKTLFSIMMCLLQSAPADEPVFQFLDRKRSEGKPYYVYMTAGANKFLRRYYAKVRDYLATLDNFPPVDMDSTGLNHLN

SEQ ID NO: 233259 - protein, 365 aa, unidentified
MERNWPVPMLADIVDAVVGVDTHRDTHQVEIALPNGAPLATTTISNDSSGYAELLAWIVDHAPGPRVALSIEGARSYGIGLTRAAAAAGLMVLESEQPSRTTRRGKGKSDPIDAHLAVLAALRLRADRLPTPRSDGDREALRILLTTRDELTTTSTAQTNRLRALLLSGDDADRRVARSKLTDSTLGALARRRQPRDASREQAVRQGEIRRLALALREAGRALKTNRAQMQTIVNDLAPGLLDRPGIGPVCAAQTIASFSHVGRCRNDAAFAALAGTSPLEASSGRTVRHRLNRSGDRQLNRAIHTIANTRMRSCATTRAYVARRTAEGKTTSEIRRCLKRYIARELYRSLTTAMTTTAEGPDQS

SEQ ID NO: 233260 - protein, 460 aa, unidentified
MTLLARLGKKLPERNYLGVDVGYKEHVAVVITLQSFTQEGERWKRTPCLHFPSTRAGLDKLQEYLDGFSTDREAFFGICEPTGGFYGATMFQYLLDNGYPMWLIENATTRHMREKIMGHIPKTDEIEARVMARIGYLHEAVGEEFTLRPLTLAEPEDADLLALCRDSWRLKTMISRARNQLSQLMAVVFPELKTFFTGSVSTTAPVRLIAVYPTPAELADAPNEEVRSVLWEAGAYHHAKRVDELQALARNSSGLLPDPQRAWRLGWVTDFLLANFKAQMALEKQVETLITQREDYHWIADVPYSGPATLGMILGATGDVHRFRNYRQYIAYTGYFAGLETSQTIDRTRMSRRGNRDLKRALFQIAAPLVWFDPGENPYKALFERKEAEGQPWYSAMPYVCAALARHIYHCLKFQEPYDVVKAFGEPVSSHACNQAIEDLRADLEDQFEVMEAHLIQEEG

SEQ ID NO: 233261 - protein, 360 aa, unidentified
MFTERTSVGLDVHARSVAAAAIDGVTGELFQSRLTPSYDHIRSWLADLPGPVAVAYEAGPTGFGLHRSLTAAGIRCEVAAPSKLQKPAGDRVKTDAKDAVHLARLLRLDEVTSVAIPTVEQEAARDLVRAREDCRNDMMRARHRLSKLLLRHGIVYSGGTAWTSRHDVWLRHQRFENPTTQVTFESDYDAVLATTARRDRLDTQIETMAANSEFTPIVRRLWCLRGISTLTAFALAVEIGDWHRFTGSTIGSFVGLVPSEHSSGSSRAQGPITKTGNGHARRLLVEAAWHHRPRYRVGKTMLGRWDMAPPAARARGDLGNRRLHARWVNYIDRKKKATVANTAIARELAGWCWSLALLEE

SEQ ID NO: 233262 - protein, 404 aa, unidentified
MNGPIVSVDVSKGKSDYQAFKDLNVKFTDVRSIKHTKEGFDEIVNLVKDMERKLETEVCVVYEATGVYHRVLKKVLEDNNIKQFIINPLLSAKTRKNDSLRSPKTDKLDPKSIAKTYYNQSLHSSYKPQTTYHELRELSRYYEDILVHIRKDKVAFRAQLDIVFPGYDTLFDDLYGAVSLTVIEKYPHPELLQKKSINTVSKIIQKKTHHRQAVSNKMASKAIEYSKTIYSGCGKDDIDVLILERLIKKLNEDLNEAERTINEMIRLVQELPDFIIIKSIPGIGDNLAARIIAELGDMTRFKKKNELVAYAGLDPRIYESGQKDGAHMHITKKGNKRLRCLLYLAVTCSIRLKRDDNSIKDFYIKKMQQSNPMCSKAAKTACASKLVRIIYSMCKTGELYQYNK

SEQ ID NO: 233263 - protein, 422 aa, unidentified
MLEETEDREVIIERVAALDIGKAEVMCCVRVPAEGGRGRRAQEVAAYPTMTGSLLRLADRLAALGVARVVMEATSDYWKPVFYLLEAAGLETWLVNAKDVKHLPGRPKTDKLDCIWLCKVAERQMIRPSFVPPPQIRRLRDVTRYRADLVGARTAEKQRAEKLLEDACIKLSVVASNIFGVSGRAMMAALIAGQRDPTVLAQLARGRMRVKIGALEEAFTGHFTDHHAFLLAKMLARVDAIDADIAALDAKIEEMIAPFAAAVVRLDEIPGINAVAACVILAEIGIDMDRFPTAGHLVSWAKFAPGIKESAGKKKGKNTTGHGDSYLARVLGNAAVSAGRTDTFLGERYRRIARRRGRKKAVVAIGRSILVIIWHLLADPHARYTDLGSDFYATRINPERRKRNHIRQLEALGYKVTLEPAA

SEQ ID NO: 233264 - protein, 356 aa, unidentified
MTELKHEESPVLWIGVDVSKKTFTAAARFPALEDVIRPEDSGTAENNRSGARWLCRWVDALEERFKCPAGIAMEATGTYSRRLYENLMKIRPELHVSICNPLSVSYYMLSLGTNKTDRADAVVIARFAEHRRPGRYKEPSRDQKELRRLSRDRDFLVESRTEYQNRMEDGMEPSSLRRMKKVVTAINAQIDEIDAEIGKYLSEDASPECREEIDLMQTVPGVGRLSAAIIYGELGSLACYTRKQLSAMSGVCPTTRQSGTSLHKGGLSRRGSKWLRRILYLDSSQTIRRSPAMAVFHQRMLAKPDSSKMSARVACMRKLLLILRGIVVSGKAYDPNHVSVRPDLQSKNLEKSEKTA

SEQ ID NO: 233265 - protein, 316 aa, unidentified
MSEHESFVGIDVSKAQLDIASRPSGERWQVRNDPAGCSSLVERLLRLRPSLIVLEATGGFEAAAVAALAAAGLPVVVVNPRQVHDFAKATGQLAKTDPISAAVLAHFGEAIRPPIRPLPDATTKELQHWLARRHQLVEMLTAEQNRLPGTLGAVQAQIRELITCLRRQLHSADRKLKDLIQQSPVWREQEQLLRSAPGVGPVLATTLLADLPELGQLNRKEIAALVGVAPFNRDSGTWRGQRTIWGGRAPVRAVLYMAALVATRANPVIRVFYQRLLAAGKPKKVALTACMRKLLTILNAMMKHRTAWKPAAEIAA

SEQ ID NO: 233266 - protein, 423 aa, unidentified
MSLFEEKGEGLERIVERCAGLDVHKASITACVRTSGEGGEPHQQIREFSATTRGLLQLRDWLASFGVTLVGMEATGVYWKPVYYILEDDFECWLLNARHLKNVPGKKTDVKDAEWICQLVEHGLVRPSFVPPKEIRELRNLTRYRKAQIEERTREVQRLEKVLQDAGIKLSSVATRALGVSGRAMLDALGSGTTDPEILAELARGKLRSKIPALKEALEGRFSAHHGLMVGRILAHIDYLDESIAELSLEIERVIAPFSEEVKLLDTIPGVDRRTAEVLIAEIGANMDQFPTHRHLASWAGMCPGNDQSAGKRRSGKTRKGSKWLRSALTEAAYAAARSKGTYLSAQYARLKGRRGPKKAAMAVGHSILVICYHILQRGEPYQELGEHYFNRRRSEEAYRKRLVRQLERLGHRVVLEALPQSA

SEQ ID NO: 233267 - protein, 421 aa, unidentified
MHEERRWFVGIDWASKEHVVSLCDDQGKKLGQRKFAHGGTGFSDMIAWLLKTSGGEPSEIHVAIETPHGPIVEALPERGFNVYSINPKQLDRFRDRFTVAGAKDDSLDAYVLADSLRTDMALFRKLGVAEPLIVELREWSRIDEELKVERLRLANRLRDQLWRYYPQMLELGDLDEDWMLDLWETAPTPEKAFRASKAAIARVLKKHRIRRFDAAQVLSELRKPALSVAQGTIEAATAHIRVAIERLRLVNRQLGDAERQLDRLCKKLAEPVAGADGENVPGQRQEHRDVTILDSLPGVGRVVLATMLAESPDALQRRDYHALRTLCGTAPVTRRSGKSCIVTRRHACNRRLRNAAFNWGNIAVRHDSISKAKYQALRARGHGHARALRSVVDRLLYVACTMLEKGTLFDPSFAETKNAAA

SEQ ID NO: 233268 - protein, 309 aa, unidentified
MPRYSTAFGMDVHLRSTTVCALDAETGEAVTRRFRGNPWGEVAEWMSGFPGPSLAAYESGYLGFAPQRELSGLGVDCVVAAVSKVPRSAADLSSKNDRNDAARMAKAILSHDVTPVWVPSPEIEGLRDLAAAHDAATARLAAAKQRLLAFLARRGYVYGGTTPAGNPRKYWTYGFLRWLDGIHPADDGGIRALAALRNEVEAADETRGALLAEYRAAVAAGPLSAEVEALQSIKGCGFALAAAFASEVGDFSRFRSGRQVTSYFGLAPKQRSSADSVRLGGISGAGNALVRKLAVEGPGATPRPATSRS

SEQ ID NO: 233269 - protein, 396 aa, unidentified
MLYLAIDQHRKQLTVNLRDEAGDVILKRQVSTEWKRVREFMEEMRNRSVPEGGFVAIVEVCGFNDWFLKLLTEYGCREIVLIQPEKRSKKKTDRRDANALGELLWTNRQRLLAGKNVQNVRRIVPPSERDAQDRQLTALRHRVTRLRTRTINKVQHLLLKHNMQQECPTKGLKTKGARKWLKELALGTIDRLELDHLLAQWELLDKQLEELERTIQERQAENKTAAIIASIPGAGAFGSLALACRIGSIDRFPHARSLANYWGLTPRSNNSGDATQRLGSITKEGSAIARFILAQIVVHVLRRDVGMKEWYRRIKKRRGAKIARVAVMRRLATIIWHMVKRQQPYQAGGSFVTGNGSECVVAPPDRNAFFEGMQGRSRAAKEKGCRSLETTAAARP

SEQ ID NO: 233270 - protein, 347 aa, unidentified
MLHAGLDLSRSRLDFCLLDADGQLVRRGVASPDRGGLTRLVEDMQTVGGPVVAAIESMNGARFVHDTLELAGWDVEIADAQKVKGLAPLACKTDRIDAWVLAELSRRDLVPAIWLPDPGVRTERERARFRLHLVKHRIMFKNRIHSTLIAFGKPCPVSDLFGPGGRQLLQELDIPEPWRAHINTALVMLDQLDEQVVVCEAQLRALGADHPYVPLLQTIPGVAWVLGFTIAAEIGDISRFASPKKLCGYTGLCPRVYQSGSKDHRGPLAKNGPKYLRWALIEATIHAAHHPAYATHYERTKQRLGRQRGKKIARIEVARKLAEAIWHMLTNGEPFAPARSHVSPLAA

SEQ ID NO: 233271 - protein, 408 aa, unidentified
MEVIHERCAGLDVHKETVVGCLRVRERGQVRREVRRWATTTAELLKLGDWLRQAGCTHVAMEATGVYWKPVWHMLEGEFELLLANPAHIRNVPGRKSDVNDATWIADLLAHGLIRASLVPPGPIQELRDLTRTRKQLMREIAQHKQRIQKVLEDANVKLASVVSDVFGESGRRMLKALSAGQTDAWQLAALRDGRLSASRETLAVALQGKVTTHHQFLLSQHLRMIDYLEQTIRDFEGQIEVVIAPFRAAVACLVTIPGISATAAHVIIAEIGVDMSRFATVAHLRSWAGLCPQLNESAGKIMSRRLRHGAPWLKTVLVQCAWAATRNKHNYLHAQFVRLRARRGPQKAIIAVAASILSIAYYLLRNQAPYRDLGALYFVRADQERIAQRLARRIKDLGYEVQIRKAA

SEQ ID NO: 233272 - protein, 411 aa, unidentified
MEVLYPRCAAIDVHKRTAVAAVGWTDEQGRRHRQVRTFSTMTADLERLRAWFAEHGVTHVALESTGVYWKPLFNLLEEQCVVILANAAHVKAVPGRKTDVRDSEWLLDLLQHGLIRGSFIPPAPIRELRDLTRYRTSLVEERVRQANRVQKVLEDANIKLAAVVSDVLGVSGRLMLRALADGESEPGALAALAKGTLQKKRAALVEALTGRVRAHHRLLLRELLAHIDYLDGAIGRVSAEIAERLRPFAADLDLLHSIAGVRGRSAEVILAELGADMGVWPDARHLCSWAALCPGNNQSGGRQRSGRTRHGNRWLKGALLQAAWAAIRVKDGYLGAQFRRLAKRRGEKRAIIAVAHSLLTIIYHVLKNATPYQDLGAAHFERLDAGKQARYHLRRLAELGYEVPAEPRPAA

SEQ ID NO: 233273 - protein, 346 aa, unidentified
MGKRSVAFSAVPSCAVLYCGIDVSACSLAVAVQPEASGSFEQREFANSAAGHRKLIAWLGGWRSPVRVSLEATGIYSLDVAMALDAADGIEVAVLNPRTVHRFAESLRRSKTDAADAVALAEYSRRMPFVAWARPSEAALELRAITRHIATLSEEHARLKNRHHAAGGSASTPRCVREDLRRSIAGIEKRLLRLRREARAAIGKDAGLAVRFAHLTGIKGIGEVSAIDLLGELAGLDPEMTVRQWVAQSGLDPVHQVSGTSVHKASRISRRGNRRLRRALYMPALSASRSDPYMKAFYTLLLTRNKTKMQALTAVARKLLHAIFGIFKTGTAWDGAKLFPHLILTS

SEQ ID NO: 233274 - protein, 317 aa, unidentified
MERMEFSRKTAGVDVGKHHLDVAVHGLEDLARVSNTAAGHEELTDWLKARGVGRVGLEATGGYERAARLALEAAGFEVVVHQPLEVRRFAQLKRRRAKSDRLDAQLIAAATAQVEAVRAAQDPRLAELAERMTAYEQITDQVVELKTFLEHVTLKDIGSALRTQVRALEALKLRLASQILTAIKAHPDLLARYRLLVSLPGVGPIVAATLLIRMPELGGMRRGQAASLIGVAPFDRDSGQWKGLRFISGGRARPRRMLYLAALVAKRFDPGLKAFGETLRARGKPPKIVTVAVMRKLIEAANLVLQRGQPWVKKMPA

SEQ ID NO: 233275 - protein, 394 aa, unidentified
MPELFVGIDVAKDRSSAQGIDRNGKGQFSLTFTMDAEGFMQLWKAITAHSKDLTEVMAAVESTACYHINLYSFLTAKGVSTVVINPLLIANFTKLSLRKTKTDAKDAMSIAQFLLVHRESISQLSLSQELQDFRDIARERESVGNLLTAHKVEIKRLLQSTFPELERIGNLATKVMQDFILEFPSARLVKTAKPKAIQKALQRKGVETRLTYTAEDLIRAAKQSVATISPAKELILQGKVRTLQHLQERYEGLTKILTEYCKASMMEDFEIMTSIDGINKRTATTFLAEIGCIGNYATHKKLIAFAGIDPTVYQSGKFEGKSRISKRGNRHLRRVIWLMTVNVIQHNNTFRTYFTRKKNEGQPFKKAVFATAHKLLRMIFAMLSHRTMYREACR

SEQ ID NO: 233276 - protein, 402 aa, unidentified
MRSIALDVHRDCCEVAIKEGGEVRPARRLKTSVEELELFARSLASDDQVALEATGPANAIARIVEPHVARVVVANTRRVRAIAEAKLKTDKVDARTLCELLDAGFLPSVWQPDAPTRALRGLLGRRERLVRSRARAKNALHAALQRNLKGRPPMTDIFGRAGRDWLARLELPGHEHRIVESCLREVDFLSLEIAALESELAKLALNSDEIRRLMSVPGVSLVSAATFVAVVGGVGRFRSPKKLVGYVGLDPKVRQSGEQAARHGRISKQGSSAARQMLCEAAWIAVRTPGPLRAFYERLRARRGAQIALVATARKLCALFWHLLTRGQDYAFGRPSLTRHKLRRLELMAGDPPRRGQRSGSPASKREQRHERELSEQVEQAYRRLVADWQQQPQTERCGCRT

SEQ ID NO: 233277 - protein, 351 aa, unidentified
MPRTTTLHAVTAIGIDMGKNTLHLIGLDARGAIMLREKVARGRIALRLANLPPCLIGIEAGMATHYVARELAALGHDVKQVPATYAKPFRQGQKNDFRDAHAVAEAVQRPTTRFVPAKTNEQLDLQALHRVRSRLVSERTAVINQIRGFLLERGIVVRQGPRFLRQQLPDILAKRTDVLSPRMARIVADLANDWRRLDERIETVTDEIGTLAKSDDSCRRVMTVPGIGPIISSAMVAAIGNGAAFARGRDFSAWLGLVPKQMSTGDRTILGRISKRGNGYLRTLFMQAARVILLRSANWPKHGFGLWLVRAAQRLHPNVLAAALANKLARIAWTVLAQERSYEARVTKAAA

SEQ ID NO: 233278 - protein, 420 aa, unidentified
MRGLRVKRVRTVKDGTLIATVDIGATTNTGYCTCADGRDTKVFKFGNTREGFEKFWHTVVAARNRFTCTEIVIGYESTGPYAEPLVHYLMDRPVNIVQVNPLHTKRLKEVNDNSPGKTDDKDPRVIADIIRLGRALSVVVPEGDAAYLRRLNNARERHVAERIALLNQMQQLVFLIFPEFKTVLQMGGKTVRLILKKYTTPEKIGSLDPHVLGEEMRKRSWGKLGVREADLLIKAAQSTVGIKEGLAGIALDIEHIIAQLEVVERFIAEIELEMALTLERIPCSARLLSIKGLGVISVAGLIGEVGDFSKFRTQSEIMKLAGLDLYEVSSGKRKGEKRITKRGRSLMRKILYFAALPMIGKNGIMHEYYERLTGRDMLRMRALVAVMRKLLGIIHAILRDDRDYVGVYCAPKRRLIKRAA

SEQ ID NO: 233279 - protein, 349 aa, unidentified
MHSTTVAVDLAKNVFELAVADAEGKIEERLRLNRARFSSFFVHRAPCRVLMEACGSAHYWARRIGEHGHEVQLLPAQYVRQYVRRNKTDRADAAALIEAARCTAIRTVPAKSLEQQQVLVLHRLRSQWMSTRQRYLNTLRGLLREFGIAVPLGARVARARIAHYLAQPPQELPAATRPLLSQMLSEVKELEHRIEQIERDLTALTRADPVVQQLRQIPGIGLLGSTAIRACVGDVERFTCGRSFASWLGLTPREYSSGERRRLGGISKRGDVYLRTLLVHGARSALLAAHRQQRTGHPLDHLRRWALQCERQRGHSVATVALANRLARIVWATWKHGRAFDGNWGRTPQ

SEQ ID NO: 233280 - protein, 310 aa, unidentified
MEKIVIGIDVSKDRLDVAVRPTGAAFVVARNAAGLGELVARLEGLAPHLVALEATGGFETVVAASLGAAGLPLAVINPAQIRAFAKALGRRAKTDPIDAAVIAHFAEATTPEPRPLPDEATQLLADLVARRRQIIAMIGAERQREMRARAKSLKKSIARLIRALEKELASVDTDIDEAMRASPAWREKEDLLASVPGIGPVIARSLIAELPELGRLTRRQIAALAGLAPWTRQSGQWRGKSFIGGGRTAVRTALFQGALVASRHNPVLKSFFHHLTSAGKPKMLALIAVARKLLTILNAILRDQKPWQTA

SEQ ID NO: 233281 - protein, 312 aa, unidentified
MTKFICGVDVSSEALDARIGRNGKSHQFERTLEGIQALGAFCEANGVTVVVMEATGGYERLPFGLLWQLGIPVAIVNPRSVRRFAEAMGFFEKTDKIDASVIAWYAEVKRVVPQEPLGADHERLRALVTRLRQLTDLQTSQSNQRRLVVEPVVLSAFDELTGLVRGQIKSLSAQIVELIDVDPLWAKLDETFRTIKGVADRTVAGIMADLPEIGTLSNKAIAKLVGAAPMAKDSGKTKGKRPIRGGRAGIRSLLYYVAGIVRKHEPDFKEFHERLLEAGKPPKVIRIALARKLLVRLNAKARDARKEFALAT

SEQ ID NO: 233282 - protein, 387 aa, unidentified
MKRAKKTSNTRTRSSSRKRLKALQIVHPNAAGIDVGASSHYVAVRPDAVPAGKPAVRSFGTFTVDLDALVEWLKECAVDTVAMEATGVYWKPVFEKIEAAGIEAILVNARHVKHVPGRKTDVKDCQWLQQLHSYGLLEGSFCPTQDICRLRTLVRHRANLVSDAAQAVLHMQKALTQMNVQLHHVINDLCGETGLRIVRAILNGQRDPEQLVKLRDCQITRSTPKEMEQALQGDWKEELLFVLRQSLKAFEFCHEQMDECDLEIEALLKSLPKATPVAKPEQAPAKDPLAAQDPKPKRPQSRKRNEPEQDLGPELARICGTDLTKAHGLRILSVLVIISEIGIDMNRWRSAKAFCSWLGLCPNNKISGGRILSSRTRQVVNRVADES

SEQ ID NO: 233283 - protein, 367 aa, unidentified
MKEVTTYVGIDAHKKDLFVAMIGTDALPVTWTIANEPNAVRRLMRKLERDAPGPVEVCYEAGPGGYALQRQMTTTRVRCQVIAPALVPRKPGDRIKTNRRDARKLVELLRAGLLTAVRPPTPEEEAVRDLCRARDDARVDLQRGQHRLSKLLLRRGLHYAGRNWTRVHRQWLASLTWTHAAERAVIDDYLLAIDHTEARLRELDARLAEVAAQDPYREPVGWLRCFRGIDTLTAMLILAELHDFRRFASAAALMAYLGLVPSEASTGEKHRRGRITRTGNALVRRLLVEAAWHYQHRTGIGVALARRRKGQPGRVIAIADKAQQRLCRRFRTLAAVHKPAPKIAVAIARELAGFVWAALQPVTVPAR

SEQ ID NO: 233284 - protein, 346 aa, unidentified
MRYSTTVGVDLAKNVIQVSVVNGRGKETLNRSLTRAKFAEFLGKQKPSLVAFESCATAHYWARAAQRHGHEARIIPAKAVAPFRQGHKTDSNDALAVAEAAGRPNIKEAPIKTVEQQGLQAVLRARDRLIQECIAQSNHLRGILLEFGIAIPQGFASLLRTLPEVLEDGDNELPDFYRPTLQRMYHRMLELREDIDAMTREVGELVKNHLVCSRLTALEGIGPIGAMSLYATLGSGQAFSKGREASAYVGLTPKQYSSGGRANIVGLSKKVGNRKLRSVLIQGALAYVYRMKEPRSCKDRWLKDLVERAGLRRAAVALANKNVRTAWALIAQGTEYQRRLQMEVAA

SEQ ID NO: 233285 - protein, 431 aa, unidentified
MTCEYKTKEIMGRYQPLNTRFMKGSVFMNQKTCITIDVSQGKSHIQGFLTQDKPISKAKRMRHSKQGYQQIIDLKQLIESKSGATPLVIFEFTGIYHKSLEKFLIGHCINYHAVAPLRAAKARNNEIRNQKTDPRDCSSLAKMFYNNNLGEFCSENKTYSQLRKLNRYYETNMKHIVKIKVNFRETLGIIYPNYKELFENVYSNDSITFLKCFPHPNIYLSKSKDEVIKLLCEKWDHKENWSLNKIEELYNFIEETIPGCDVDDADVSILLNYIDQLEYYFKQSDTTLVHINELAKSSPLYTLVHSLPGVQDNLTSRFIAELGDISRFKSYKSLIAYVGIDPMIRQSGDNDGLHLKKSKKGNKRLRTILYLMVDSMRKSNRKHNAIQDYYKKKTQQVNQLKPKAASIVCASKLVRIIYYMHNTGSIYEYKS

SEQ ID NO: 233286 - protein, 368 aa, unidentified
MQVLYQRCAGIDVHKDQITVAARLPGPGPGGRDTKVRKFAAFYGVLREMARWLASLGVTHVAMEATGIYTMPVFHALLEPGVFEQVLVCNAAHVKNVPGRKTDAVDAVWLAELLECGLLRGSFIPPQEIKAVRDVIRYRRKLVAQRSSETQRLGAVLQDAGIKLDSVASSIDTVSGLDMIRALIDGERRGPVLADLARGVMRAKVADLSLALEGRFDDHHALMCALHLEHIASLNQMIARLDAQVEEMMAPFRAQRDLLATIPGIGAKAAAAIISEIGTSPAEFFASDAHLASWAGLCPGNHESAGKRKHGRPRKGNQHLKPILVESAWIAVRADGRLKARMTAERAALMHWLDPRPATRAQCEAEGR

SEQ ID NO: 233287 - protein, 431 aa, unidentified
MLCLEHCSIRASLLSFGSVSTRATQEMPMVYVGVDWAEAHHDICVVDEEGLVLAKRRVPEGLEGVGKLHALVAEHAEDPAMVVVGIETDRGLLVGSLVAAGYQVYAINPFASSRYRDRHATSGAKSDAGDARVLADLVRTDRHKHRPLAGDSNLAEAVQILARAHQGLVWTRQRQVNQLRNALREFYPGALTAFDDLDAGDAMAVLERAPTPSLGRTLSQAKIISALRHGGRTRNLEAKAAQIQAKLRLPQLEVPALLAQAYGHSVVATVAVIKQLNLQIAVLEQELASNFEMHPDAEIYLSLPGLGLVLGARAMAEFGDDRTRFLNPKARKSYAGTAPITKASGTRKVVLARVARNRRLADACYLWAFSALTRSEGARHRYDLLRARGQTHHQALRALANRLVGILHGCLTNREAYSEHIAWSAHVPVAA

SEQ ID NO: 233288 - protein, 337 aa, unidentified
MSSIHILGIDLGKHSFHAVAHNYSGKEVLRRKYNRNQLLKFIVNLEPTTIAFEACGGAHWLARKCSEFGHRVRLIPPQYVKPYVKSNKNDFIDAAAIAEAASRPSMRFVAVKSEEAQVIAAIHRVRNAYVKERTACMSRIGAILLEFGLSFPRGHAKMKVLFQWLAEQNQPLPKSLMTELISIHEHYSYLNEKVKCQDQKLQAIVGNNYQAQLLKTVPGIGDLTATLCVADVSSANNFSNGRDMAAWLGLVPRQFSTGGKTKLLSMSKRGNKQLRTLFIHGARAVLSRLETAGKVFGDWLVNLRASKPFNVVVVALANKLARIAWAVLYHRQAFKAA

SEQ ID NO: 233289 - protein, 344 aa, unidentified
MDHFAGLDVSVKETSVCILDDAGKIVKEVKVASEPRALLKVLGNPSYRFKQIGLEAGPLSQWLFSALAEAELPVICVETRHMQAMLKAQINKTDRNDARGIAQMMRVGVFRPVHVKTVRSQKLRMLLTHRKLLQSKAIAIENDLRGTLRNFGLKVGMVGTVRFEARVQELIETIPDLVVLVEPMLVVRRALREQIVILHRRLLAIVRDDEVCRRLMTIPGVGPVVALTYRATVDVPARFRKSKSVGAVFGLTSSRYQSGEIDWSGRISRCGDEMMRTMLYEAAQSMLHSKKWSWLKAWAMQIARRRGMKRAIVALARRLAVIMHRIWIDGTEFRWTREPATAAA

SEQ ID NO: 233290 - protein, 378 aa, unidentified
MNQDTLHVGLDTDKKHIDVAVAEPLPAGEVRYWGQLANEPSALDRVIRRLQRGGRRLVVCYEAGPCGYGIYRRLSGKPGVSCQVVAPSMTPRRAGVRVKTNRRDCLSLAKLLRAQELTAVWVPEAAHEAMRDLVRARGAAVEDLLRCRQRIAGFLLRQEIGYAGKPWTGKHRAWLGRLELAEPSHRLMMGELVDALDQAQARRDRLREHILEQVPSWSLAWLVEALQALRGFALINAATVVAEIGDLRRFDSPRQLMAYLGLVPSEHSTGERVRRGGITKTGNARARKALVEAAWTYTRPAKAPKTGAADQPAALRAIADKARHRLSGRYRRLLARGKRPPVAVTAIARELAGFLWAIAHAAGRAEGSASAAGTQHQR

SEQ ID NO: 233291 - protein, 349 aa, unidentified
MKIVGCDLHARQQSIAMVDTETGEFTEKTLCHEGNAVRAFYASLEGPVVVGIEATGAMQWFLELLDELGIEGRVGHPAKIRAQETRKQKHDRRDARLLLQLLSEDRFPEIWMPSTEQRDLRTLLRDRDQWVRMRTRVQHRLQAIALNHALRQGRALWSATGQTALEALPLPPYTRQRRDELLALYAQLQKRIQELNKEVEAQARQRPPARRLLTHPGVGPVTALATDVFLGDPSRFASGNQVASYIGMIPSERTSGKRQRLGKMSKQGNALLRYLWTEAAMSTVRKDPELQRFYRRKLIQKGMGKARIAAARKLGIRLWIMMRDQIDYQEFCRRGKLRQTGETHAGMPA

SEQ ID NO: 233292 - protein, 349 aa, unidentified
MEMTLMADQPRFAALDVSLEKTTICVISLDGIIRREAVVPTEPDAIATWLAMDQGKLERIGLEAGPLSEWLVRGLADHGITAVLMETRQIRAALSAMIVKTDRKDARGMAHLLRMGWFRPVHVKTMDAREQRTMLSARATLMARLKDIENSVRGLLRGYGLRFPLLLRGRWDAGVREAVAGHSSLLQILDPLLTARRVLREQLAVLDKRVRNAARIDRICRRLMTTPGVGAIVAMTFRAAVDQPDRFRSSKKIGACFGLTPRKYQSGQTDRDGAISRAGDASVRVALFEAAHVIMTRVASWSTLKAWAMNVARRRGAKRAKVALARKLGVVLHAMWVKETDFRFASPAT

SEQ ID NO: 233293 - protein, 344 aa, unidentified
MKYFAGLDVSLQETAICVVDEDGIIATEGKAASDPDNLVRWLAATGLTITRVGLEAGPLSPWLHAGLREAGLPAICIETRRMKGATAAMAVKTDRNDARAIAHAMRVGWFTAVHVKTAESQELRLLLSNRRTLLEKRVAIDNEIRGTLKAFGLKIGAVTVAAFEARVLELLAKRSRLLAMVRPMLTARAALRQQCEVLHRMVLKAVRASAVCRRLLSVPGVGPIVALTYATGVDDPARFLRSRDIGPHFGLTPRKYASGEIDRNGSITKAGDGAVREVLVQAALTLLTRVHRWSALKAWGMAVAKRRGLRRAIVAVARKLAIIMHRVWADTTTFNWSREVVALA

SEQ ID NO: 233294 - protein, 427 aa, unidentified
MKKQSGTIVGIDWSADSHTCYDLKADKSFKIPDSVKGYERLLNDYPEAVFVIEEANNRIGDYLLINNREVYVLPPCRFKEARKYHFSSGAKSDSLDAKAIALTFKEHPSYCLKARYSGVGAKITKLVTMFNIVSKSHSQQCNRLYSVLLRYFPEYLHIMDRQYRSNTSLKVLSIYPTITELRKVSNEELRKILNKENHRMTSGLRKKLDRIRSEGISWGDTSCEGNLIMFLANQILTLREEEERLREEMGETLENSPYRIILSIPGVKAVIGSYIVKAYLTHDFKSYQEMQKYAGTIPFLFQSGRKSIMLMRKKCDNDLKNMIHMAAFASLKTCGWARNYYKRKRKEGKTYGHALRALGNIILKIAFSMLSKMNEYDETLFLNAKGIKTTQPNNTTIPEAFTNPEYSQDAHPSLAATKDVVDNLNAT

SEQ ID NO: 233295 - protein, 351 aa, unidentified
MAMLADTVELVIGVDTHKDTHTAAVVVAATGALVEQLTVSATPAGYQQLLRLAARQPGQRVWAVEGTGGYGAGLTRFLHGHAEQVVELDRPKRAARRHGAKSDPIDATRAAREALTRDRLAQPRAAGHRAALSVRLAARRSAVQATTDTQRQLHALVVAAPDALRGRLRGLTTHQLVTACGRLRLRADWDAETTATAASLRALARRIQFLDAETAQHTGAITTLVRAWRPDLLTRCGVGPIVAASVLCAWSHAGRCRSDAAFAMLGGAAPIPASSGQTVRYRLNRSGDRHLNQALHVVVMTRLRTDPATRAYAQRRRAQGKTNREIKRCLVRYVARQLYRLLETNPALDAT

SEQ ID NO: 233296 - protein, 317 aa, unidentified
MDDSAVFVGIDVAKAHLDVACRPAGDPWRVANDEAGIAQLVRALEQQHPTLVVVEATGGLEVPVAAALAAARLPVAVINPRQARDFARAVGQLAKTDALDAQLLARFAEVVRPTPRPLPDAQAQHLSALLARRCQLIAMLVAEQQRLPTTLAAIRPWVERHISWLRDERQAVDRELQQLLRASPVWQAREKRLRSVPGVGPVVATTLVAELPELGTLNRKQIAALVGVAPFNCESGILRGRRIIWGGRARVRAALYMSTLVAVRHNPILRPFYERLLAAGKPKKVALTAAMHKLLLILNAMLRQRVSWQPPAQAAAA

SEQ ID NO: 233297 - protein, 324 aa, unidentified
MASNENTPVFVGIDVSKANLDVSIRPTGESWQMSNELEGIGRLVEQLGQVSPALIILEATGGYEAACASALAVAGLPVAVINPRQARDFAKSLGRLAKTDRIDAAVLAHFGEAVRPEVRKLADEQTVQLQALIVRRRQLIEMLVAEKNRVALTHRTVRPHLLEHVNWLEKELDQIDKGLREQLQKSPIWRENDDLLRSVPGVGLVTSTTLLAELPELGKLNRKKIAALVGVAPYNCDSGQMHGKRAIWGGRATVRSALYMATLSGIRYNPVIRAHYQHLRHLGKSAKVALVACMRKLLTILNAIIFSKSTWKETLAAPKSMNTP

SEQ ID NO: 233298 - protein, 325 aa, unidentified
MSSAFLGIDIAKHSYQVTLLQAQRPQRAHFRNDPSAFAELRTWLQRQGVTELHACMEASGRYGDALAIYLHAQGYRVSVVNPARIKHYAKSQFRRNKTDKLDADVIAHFAQTQAPPAWIPPTPETRELAELVHQYDTLQAARQQEHNRLQAGVQSEQVRQLLTQHLAFLDSQLAEVRRLIGEHIDQHPDMKQRQALLTSIPGIGALTAAKLQAIALHRFEDARAASAFGGLHPQQFDSGSSVHRRARMSKMGHADLRKALYMPAVVAQRYNPCVRDLCLRLVEKGKHTMAILGAAMHKLLCLAYGVLRSGKPFDPNFSKIHAVTP

SEQ ID NO: 233299 - protein, 474 aa, unidentified
MAKQKDQTAAGAELTSLAVQHPKAAGIDVGDASHWVCVDADGGDAAVREFPAHTPGLRQLVSWLRAHAVTTVALEATGAYGHVLFLTLLEAGFHVVTTAPTFTRQIKGRPKTDRRDCQWIQRLHRHGLLPSVFQPDEATQTLRDLVRQRANHVRLSGQHIQRMQKALELMNLKLTQVLGDVTGVTGLKIIRAIVAGERDPVVLAKLRDRRCQHTAGAIATALDGQYRLEHVTELKLNLAMWEQYQRVIAELDQVIAKQLHAMRKQTVLPPLPPKPRVRGRKPHDPRFNVRTALYYLVGIDLTTIEGIDELHALTLLSELGTDFTKWPSVKHFTSWLGLCPNWKKTGGKVQSSKTRKGKNRAASALRLAAWSLMRSHSYLGAYLRRQRARLGAPKAITATAHKLARILYNLMRHGMAYMRKEEAAYAEQVRERLEKQLRRRAKELGYELQRIVEMVTMPDGEVLTVTPDGEIVNA

SEQ ID NO: 233300 - protein, 341 aa, unidentified
MEKATIIGIDLAKRVFQVHAAAKDGRPVLRKKLSRGQLLGFLAKQPRAVVAMEACATAHDWGRAISGLGHDVRLVPPIYVKPFVRRQKNDAADAEAIAEAASRPTMRFVALKSEEQQARSMIFRTRDLLVRQRTQLVNALRGHLAEHGIVAAHGLAQVKVLATAMRDTVSLHPLVRELGERYLDHIARLDAEIAELDKKLRRSCKDDETAKRLQTMPGMGPVTAAAIEAFAPPMATFRRGRDFAAWLGLVPRQHTTGGKPRLGRTSKMGQRDIRRLLIIGAMTVVRWAVRKGAAKGSWLARMLAEKPRLVVAIALANKMARSVWAMLSKGEDYRGSALAPA

SEQ ID NO: 233301 - protein, 386 aa, unidentified
MSQSSTILLRSINYDQTLVLAIELSNKSWVLAAQVPGLPQTKAQRTIEPNKNSLLAAIDGYRARAAVVGYAVERVITTYEAGWSGFWLARWLVSQGIEVHVVQPSSVPVDRRMRRAKSDGIDAELLLRTLLAWLRGEPRVCSMVPIPDEADEDARRCVRERTELLSDRVGLTNRIGAVLATLGVGDYNPLLQSRRRRLAELRTGLGEPIPPNALTKIERLLARLELVLAQIAELERERDEVAVADAPDRAGKMIQQLTSLRGIGVQSATVLVREAFVRHFSNGKALGSYAGLTSTPYSSGGIDREQGIGKAGNRRLRTAMVELAWLWQRYQPGAAQVAWFRDRVGSTGRRLRKVMVVALARKLLIALWRFVIDGVMPEGAVMKPSI

SEQ ID NO: 233302 - protein, 370 aa, unidentified
MAQPTPIFVGLDVHKDSIAVAHALGQSADPPVFVGAIGARQADLTKLIRRLQAKTSNLVFAYEAGPCGYGLHRYLTSQGFSCQVVAPSLIPKRPGDKVKTDRRDAVDLARLLRSGDLTRVYVPTVEDEALRDLCRARDAARLTLKNAKLRLKAFLLRLGLHYVGRADWTDAHRRYLAKVVCPTATQQIVFQESVRAVDEQVDRVHRLEAELLERAPAWRLYPVVQALQALRGVQWLVAITVVAELGDLTRFDSPRQLGAFVGLVPSEHSTGPSRRLGAITKTGNGRARRALIEGAWAYRHPAKVSAHIQRRIDTLPKPIQDIGWKAQVRLCTRFRRLTARGKHPNVAVTAIARELIAFMWAIAKEVPITT

SEQ ID NO: 233303 - protein, 450 aa, unidentified
MRMQPEEIPDDDHELVIERVCAIDVAKASGKVCVRTPHPNRPDRRTSRVWDVSATSRAVTELAEHLIGEGIERVTVESTSDYWRIWFYLLEAAGLDVQLVNAREVKNVPGRPKTDKLDAVWLAKLTEKGMLRPSFVPPVEVRQLRDYTRLRVDLTRERTRYWQRMEKLLEDALIKVSSVVSRLDSMSVRDMLEALIAGERDPRRLAELARGKMRPKRAALIEALTGRFDDHHAELARLLLSQIDALSSHIDTLTRRIDELLAILTDPRRGPDDGYRIGDDGAAPFVNGLQAAERLAEITGIGPVSAPVILAEIGIDMTRFPTAAHLVSWAKLSPRTIQSGATQRGGKTGKGNPYLKGVLGEAAAVAARTDTFLGERYRRIVKRRGKLKALVAVARSILVVVWNLLADPTARFHDLGADYHTRRADTDRRLRNHLAQLAALGYRVTVEPAA

SEQ ID NO: 233304 - protein, 344 aa, unidentified
MHIASIGIDLGKTVFHLVALGERNKVLLRRKFSRSQLLAYTANLPSSLIGVEACAGSHFLGAALREQGHQVRIIPGQFVKPYRKSNKNDFIDAEAIAEAVTKENMRFVPIKTEDQLDLQAMHRVRDRLVQRRTALINEIRGFLLDRGIVFAARPIRLRENLPSVIEDAEQNLTPRLRWLLQQMWQEWQQLEIDIRSISDQLDAISKQDGLCRRLRQVPGFGPLVATATVAAIGNGAAFRRGRDFAAWLGIVPRQYSTGGRLQLFGISKRGNIYLRRMLIHGARAVLLRVKYNTGGFGQWVKRLEERAPRNKVIVAIANKLARIAWAVLFSGNEYQHQPLQMNAA

SEQ ID NO: 233305 - protein, 335 aa, unidentified
MEMYGAIDIHKHVFQAAVFDVTSAEVVEARFPATREALADWASEWQGKLAAVAIEATSGWRWVVRELQRSGFVVQLADPGQAVALKGKRRQAKTDRLDAHWLAMLLAKQMLPTSWIPPEEIQRLRDLTRLRLALSQDRTRWAQRLHAFLGHEGWPCARSRLLTAKGRLWVASLALDPHAKAQTERLLRLIAALEEELAELDSELRRLARADARLRALETIWGVGPILACHLLAEIGDARRFRRARQLVRAAGLDPVVIESADNKRRGRLSKTGSPQLRWALVEAAQHACRSGSPDLELYQSVRERAGAQRATLTAARKIARRCYHTLNAAVPTPA

SEQ ID NO: 233306 - protein, 352 aa, unidentified
MNATTVAVDLAKNVFELAVADGGGRVVEHQRLTRAQFERWFANREVGRVVMEACGSAHHWARRFGARGIEVRLLPAQYVKAYVKRNKTDAADARALLEAARSGDIKSVAVKSVEQQALQALHRTRSAWMATRTRRINTLRGFCREFGLVVPEGAVRGLAQVARYLTDEHSGLPAILRGSMRLLLEEIQLMEARIGQLEQELCALAQQSPACQALQSVPGIGLLTSTAMVAAVGDPRSFDSGRRYASFLGLTPREFSSGNQRYLGRISKRGDRYIRMLLTHGARSILRAATVAHRAGRELDRLRSWALEVQARTNHNKATCALANKLARIAWAVWVKHEKYQSAPIPLDAPDL

SEQ ID NO: 233307 - protein, 362 aa, unidentified
MKPLRSRSLRELEQLHEARGVAPKRPRIQDRASARAPLGGFSMSGFIGIDVSKDELVVGSEGQVQLESYPNTERGHEHLIRDLLASSAPVEMIVVEATGGYERRLVTAMGSRGLPVVVVNPRQVRDFAKATGQLAKTDKIDAHVLADFAAKVKPEFRPLESEEQEELRDFLVRHEQLIQMLVAEKSRLLQAQGGSRHVLRKKIKSHIRFLERELELLDSDLDDTLRKSPMWKEKDDLLQSVPGIGKQTSLTLLAMVPELGTLNAGQIGALIGVAPFNRDSGKFRGKRHISGGRARVRAVLYMAALVATRFNPVIRAHYQRLVAAGKPKKVALVACMRKLLIVVNSMIKTKTQWQAQPAPTTA

SEQ ID NO: 233308 - protein, 397 aa, unidentified
MYIVGIDIAKRKHEAAVIDGEGTVIIKPFSFTNNCSGYNRLLAMLTKAKLPLDEVSFAMEATGHYWLALFTRLQKEGFRVQVINPVQTNSIRSFYIRQVKTDPRDALLIAEVIRFGHFSESTLHPENIYELRELCRGRHAIVSMQADVKRKVVALLDQVFPEYETAFTNLFGDTSMAILQTCPTPKELSETPLEELCHLIEVSSHKRFRMAKAQELQELARNSFGFAMAGDVFSTMIRLYAKHLVFLKQQVQEMDRKIAEIMDTLDTPITTITGIGPTLGAYILSEIGDISRFSSAAKLAAYAGIDPTMRQSGEYNGVRNRMSKRGSPYLRHAIWLAASSAVLHDPALKLYFQKKRDEGKPYMASVGHACRKMVSIIYAVMRDNKAYTPYIPNEISA

SEQ ID NO: 233309 - protein, 344 aa, unidentified
MSKLNRVGIDLAKNIFQLHGVNRTETSTWCRRLKRDNWIKVLLNKVEPGCVIGMEACTGAHHWARLLQASGFHVKLIAPQFVKPYVKSNKNDANDAEAICEAMSRPNMRFVTVKTVEQQEIQAVHRIRSELVGQRTAKGNQIRGLVAEYGLVAPQQIYHLRAALPEWLEDAGNGLSDRFRRLLNSLWGDLKRLEQRVTEMDKEIALIAEHDPVAKRLQQLRGVGPMVATALLACVGDGKQFRNGRQMAASLGLTPRQHSSGGKERLLGISKRGDSYLRSLLIHGARSAIYAARGKEDRLSQWVNNIVARRHPNVAAVALANKTVRIAWAMLCHDTDYDPELMAV

SEQ ID NO: 233310 - protein, 343 aa, unidentified
MERTDGVETFVGIDAHSKHCSIKAISRQGEDLLCRDVPTRPSALRKALSKLPGPVWVMVESSYLASYLQEHLEGAVDRLIVCETRENRWISRSENKGDQLDADRLCRLLRMGEFKAVHVPAGLCRDRREALRLYQKSQGDVSRTKNRIKVKYREHGVLLTGKAVYSESHRDQHLGLLERPQARFLVEVLYRKLVADEAARDELLSRLVTLMRGSREYTALKTIPGVGKVLAAVITAVIDDPDRFANKRKLWSYSALGVRSRWSSDPSKARVSGQKGGNRLLKYAALSAANAALRGENRFSRHYRKMIAAGSDPAMAKRTVARKILATALVLMKTGAAYEDDQV

SEQ ID NO: 233311 - protein, 425 aa, unidentified
MEVIHRRCSGLDVHKETVVACVRLVSDGKITREVRSFETTTCGLLLLLAWLTEMGCTHVAMEATGVYWKPVWNVLSDGDFELVLANAAHIKNVPGRKTDVSDAAWIADLLAHGLIRGSFVPEQEIQELRELLRTRKQLGRQQSNHIKRLQKTLESANVKLDSVITDIVGKSGRAMIQALIAGQTDPVKLAALADRRIKASPQQLREALHGRVTDHHRFLLHLHLQHIDFADAAIQDIDRNVTALIARMDQEVQAGQTRATFQSLILLLMTIPGIDVLSARIILSEIGRDMSRFPTAGHLLSWAGLCPRNDESAGKRRSTRLRKGDLWLKTLLVQCAWAARRKKGSYFNAQFLRLRGRRGPKKAACAVAASLLTTIYHMLKDGTQFQDLGADHFDRRSKDVRAKRLVAQLANLGFDAKLTPFAQAA

SEQ ID NO: 233312 - protein, 438 aa, unidentified
MKKFLEVCAGIDVGKREIAVTILSGSPAVEPTAETRTFDTTATALAGCLQWLLGKHCTTVVMESTGSYWIPVWNVLSESVAVIVANPDHVKARRGEKTDPADSRRLAERLRVGEVRGSFIPTKRIVELRDLTRRRKRLLTAASSERNRVQKLLEQGSVKIGNVVSDVFGMTGQRILDALLRRPELRPEELADLAQGSLRKKAPQLTEALRGHRLDEHFRWMIQNCMDHLVFLEKQITQIGEKIAESLKPLEREYELLQTIPGVSAETAAVILAETGGNMAQFPSDRHLTSWAGVCPGNNKSAGKQKSSSIKRGNRWLLAALVQAAWGAVRKRGSIFKKRFYRISQHRGRKRAVIAGARSILAVVWQVLSKMTPYEEPPSEIIEQREISKKVQHHLRRLRQLGVDTAGLELPQFVGAAQAWNGSPPRPRAMGVLGIHAR

SEQ ID NO: 233313 - protein, 416 aa, unidentified
MNAAGIDVSSRKSTVAVLRPFGEVVRLPFDVAHNTEGLASLAEQLKALDGETRVALEHTGRYYEPVAKALHEAGLYVSAVNPLLIKEYGANSLRRVKTDKADAVKITRYALDNWADLRDYTPMDTIRYDLKTLNRQFQLASKQRTASANNLIALLEQSFPGIRKCFDSPVRSDGTQKWVDFVHTFWHVECVRKQSLNAFSERYRKWCKRHGYIFKQGNAVEVYSLAKNAVVLVPKSEVTKVLVQEAANQLTSISRSVETYRAEMERLASTLPEYPVVMAMYGVGKSFGPQLMAEIGDVRRFERKQSLVAFAGIDPMPNQSGDKNVRSNKSSKRGSPYLRKTLFNIMGIYLKCSPQDEPVYQFLDHKRSEGKPFYVYMTAASNKFLRRYYAQVRDYLSTLDDLPPVDMDSTGLKTSD

SEQ ID NO: 233314 - protein, 438 aa, unidentified
MSNKVIFNLDELFISVGIDVGADFSWMSIALPNQQFVGKPYKILHNSIDSLTTAVSKIKEAEELYSLESRIFLESTGIYHYPLFCYLRDKGFNCSVINPIITKNSTNINIRKVHNDRFDSKKVALVGLKPDLKVSLMPSDLALNCRNLCRKYYYLMDNRSAYVNKLQGELRMAFPQYLGIFSKVTINTSLTLLETYTSPSAFIEADKQEIIDSIKSTARFGLTYAQNKYNAIIRAANEANEFGYIIDSNIKRIRLYISFIRKYDEEINSILEAMHELVNANEDTNFVKQIHLIETFKGAGFLSAVSLMGEIGDFSAFSKSKQLFAYFGLDPAVKQSGKFEGSKIQMSKRGSAVARRVIHTLTLQSIGTSHTGEAKNPVLRDYYRKKCESKPKLVAMGAVSHKVCNMIFAILRDNKPFEIITPQEHIQQYNAAKYDIAA

SEQ ID NO: 233315 - protein, 430 aa, unidentified
MKSNTQNAKIEAITEKTLVLGIDVGSEMHYARAFDYRGIEYSKKPFKFSNTEAGFATFKEWILDLKERHEKDKVVPGMEPTGHYWFNLGKFLQDNEMKPVLVNPHHVKKSKELDDNNPTKNDRKDPKVIAGLVREGRYMIPYLPEGVYADLRTATNIRFQLQAELTRIQNRISRWFNIYFPEYKTVYGKPDAKSGMLILKAAPLPEDILTLGIDGVNQIWRDAKLRAVGKARAKTLIEAAEHSVGSKEGAVSARMEIRMLLEDYESRNTRLQEVMVLIEELVRKIPMAEKLLEIKGVGIRTVSGFLAEVGDISRFNNPKELQKLAGLALVENSSGKHKGETTISRRGRKRLRYLLFEVAMSLVSKNQEFRELHNYYTTRRLNPLKKMQSLMAIAAKLIRVFYAMLTKGVDYDPKKMVSDIKRPAVYLQAA

SEQ ID NO: 233316 - protein, 339 aa, unidentified
MQVTTVGLDLAKNIFQVHGVTENGEVAFNQALRRAQLLAFFEKLPPCLVGMEACGSSHHWARELSKLGHDIRLIPAMYVKPYVKRGKSDAVDAAAICEAVTRPTMRFVAIKSEEQQGVLFLHRARDLIVRQRTQLSNILRGLLGEFGIVIAQGIGSAIKFAKGVLDGDKPSIPEVAIDVLANLSNQLVALHLRVRWYEMRMQLQAKQDPRVMLLRTIPGVGPVTASAIVATAGDASQFKNGREFAAWLGLTPLNRSSGGKEKLGRITKMGDRYIRRLLVTGMTSRLRQMKTHPERADPWAQALLERKPVRLATVAMANKTARIIWAVLTKNEYYRPYTA

SEQ ID NO: 233317 - protein, 324 aa, unidentified
MGSISKVLIGAVTIGLDPHPGSHTASAVDHSRGFLDELTVENSEEAYEELMRWAKRYRKRRWAIEGPGNRYVRDIVEKMLVAGETVYAITPSMTSQYRSKRTRGKDDEIDATNAARALLANEDLPEYEPMPYEAEMKELSRSYKRLSDQLKATKMSTKQVASTEIRKPLEKVIATLESAVAELEAKMRKIVRTLAPELLCERGVGTIVCSTVLAEAGRITRFPNESHFASYCGAAPIRWQSGAHEQMRVNPGGNRRLNWAAHIVALTRLRHDPRTQAYRDKKLAEGKTQREVLRLLKTHICRDFYRILKKIQTVSPLQVAETTS

SEQ ID NO: 233318 - protein, 414 aa, unidentified
MDVVHPRCAGLDVSKKDAKLCVRIQKPGQVRASSTVTTWGAMTAQILSLRDHLIAEEVTLVVMEATSDYWKPFFYVLDDGPFEVMLVNARHVKNLPGRKTDVSDATWLAQLGAHGLVRGSFVPPEPIRQLRDLTRTRTSITRERAREAQRLEKLLEDAGIKLSAVASDITGVSGRLMLEALVAGQRDPHVLADLAKRRMRSKIPELTEALTGRFGDHHAFLVKLHLDLIDQHTRAIDELNTRIEVMIAPFRAARDLMITIPGISALVADVVIAETGADMTRFPTAGHLASWAGTCPGSNESAGQVKSTRTRPGNPYLKGALGVAALSAARSKGTYFSAKYRRIASRRGPVKAVVALEHAMLIAIWNMLQTGALYTDPGDDFYTRRNPDKAKNRAVDQLRKMGYAVTLQPLAASG

SEQ ID NO: 233319 - protein, 390 aa, unidentified
MHKLFVGIDIAKLNHQATVIDKTGKVLGGSIRFPNTTKGGTTLLDHVTKFCDGDTPIVFGMEATGHYWLALYSFLVGKGHTVIVINPYQSESWRKVYMSAVKTDKEDAFLIADLLRFGSIKKSQVPSEVTIALRNLTRFRVSMSLQLSDTKRRILTVLDQVFPEFPALFSDAFGKTAISILEEYQTPEALETLSSRKLTNLVSKLSRGRFGKAMAQSLHAAASDSFGITFALDSFSLQLKLLLHQLELLVGQLNLLDEEIAKLFKTESKLLTIPGIGPTTAAAITAEIGDIQRFKTSAQLVSFAGINPTVRQSGNFIGNKNKMSKKGSPYLRLALWQASVVASRKNPILKAFYEQKVKEGKHKMTAIGAVSRKLTGIIFAIMRDNKPFMI

SEQ ID NO: 233320 - protein, 448 aa, unidentified
MKKKKEMMNIIHPNSAGIDIGSKSHFVAVGQKEDQIKEFGIYSSDYKRIVSYLKENKITTVAMESTGSYWQTLFFKLQESGFEVILVSGHQTKNLRAKTDVKDAQWIQKLHSLGLLRGCFLPNEQTNRLRIIHRHRSSLIEESSKMVNKMQKALRLMNLRLDVVLSDITGKSGMAIINAIVELGVRDGANLSKLADNRVKKSKKEIADALQGQWSEEYLYELKDCLEIYEILQDKIKKCDNQLEQLLLEFTKESNNSVEEIELTKKQTKGKNQPKFNLTELSYKLYGVDLFAIEGVSVGTVLTLITEIGTGIYKFNTAKQFASFLRLAPNNRVSGGKVISSRTPKGSNRLSLALRNAANTIDRKKEGNLMHFFKRIAYKKGRAAAITATARKLSIIIWNMIVKQVEYNPIPDEDYKLILKQRAIKSIQHRMKKLNITNTEISESYNIS

SEQ ID NO: 233321 - protein, 383 aa, unidentified
MRKEPVMKKVRFIGLDVHADTIAVAVAEPGGEVRSLGVIPNRPESVRKLIKKFGPPASLRVCYEAGPTGYVIYWQLTALGVQCEVVAPTLVPTKAGDRVKTDRRDAEKLARSYRAGDLTPVWVPDAAHEALRDLVRAREAAKKDQLRARHRLGKFLLRHGRRPPTAMTAWTQRHLTWIRQVQFEHPAQEATRLDYLHEVDHAVERIERLERAIDEAVTTAPANMRAVIEALQALRGIALVSAVTIVAEVGELSRFERAPQLMGYSGMGAREDSSGPRTRRGGITKTGNAHLRRIAIEAAWAYRHRPAVGGALRKRQATVSEEVKAIGWKAQLRLHARYRKLLGRGKSQQQVVTAVGRELLGFIWAIGVTVERQHRKTSSSIAA

SEQ ID NO: 233322 - protein, 342 aa, unidentified
MSTIQTIGVDLAKNVFSIHGVDAYGKCVLRKTVKRNKLLDTFAKLPPCLIGMEACSGAHHWARELLKLGHNPKIMASKFVIPYRQNEKNDANDAEAICEAVSRPKTRFVSIKSEEQQAVLCLHRIRQGLIKTRTATINQLRGLLSEFGIVMPQGRYSAQNTIGSVLEDAENGLPILARELLQDLSNKIQHLNLEVLHYDRRVSALVREMASAKALMDIPGVGEHSASAIVATVNDAKQFGSSRQFAAWIGLVPRQYSTGGHVHLGRISKRGEKHIRTLLIHGARAVIARCKEKTDRNSIWLNQLVERRGYKRAPVALAAKNARIIWALLTTGKEYKINYVNG

SEQ ID NO: 233323 - protein, 404 aa, unidentified
MYNAVGIDVSKGKSTIAVLQPGGVIVRKPFDVFHTSQSLKELSNYLASLEGDTRIVMECTGRYHESMANSLSNAGFFVTVVNPHLIKNFGNNTLRKVKSDPADAKKIARYTLDNWAELRQYSCMDNTRNQLKTLNSQFSFFMKQKVAAKANLIALLDNTYPGVNKLFNSPAREDGSEKWVDYAYSFWHVDCVRKTGFKAFTVRYEAFCRKHHYIYQPSKPEELFNASKELVAVFPKETSYKLLIQQSIQQLNLASAHIEQLRREMNALASTLPEYEVVMGMYGVGKTYGPQLIAEIGDVSRFTHREAITAFAGVDPGAEQSGQHNSKSNKASKCGTGRLRKTLFQVMTTLLQNAPENEPVYQFLNRKRSEGKPYYVYMTAGANKFLRIYYGKVKAHLRSLEQNE

SEQ ID NO: 233324 - protein, 410 aa, unidentified
MKGDSEMIFVGDDWSEEHHDIEIQDEAGMRLRRKRLPEGIAGIVELHAMVAGYASDPAEVVVGIETDRGLWVAALVAAGYQVYAVNPKAVARYRERYGGGSGAKSDAADAKVLADLVRTDRHNHRPVAGDSEAGQGIKVLARAHQRLVWSCQRQVNSLRSLLREYYPAALAAFDDLDHRDALAVLSGAPTPAAGRRLSRAAIATTLRRGGRQRSIDDRAAEIDTALRAPQPEPPTTLADAYGAAVAATVAVITEMTRQLATLEAELERAFGAHPDAAIIRSLPGLGTILGARVLGEFGDDPHRYTNDRARKNYAGTSPITVASGKRRVVKARYVGNRHLADACYLWAFCALTHSAGARRYYDQLRAKGLEHDGALRALANRLVGILHHCLAKRMTYEEAKAWPAAEAKAA

SEQ ID NO: 233325 - protein, 344 aa, unidentified
MDHFAGLDVSVKETSVCIVDDAGRIVREVKVASEPEALLPVLTSGAYHFKRIGLEAGPLSQWLFSALAEAGLPVICVETRHMRAVLQAQINKTDRNDARGIAQMMRVGLYRPVHVKTLRSQKLRMLLTHRKLLQSKAIAIDNDLRGTLRNFGLKVGMVGTVKFEARIQELVANLPDLAALVEPMLIVRRVLREQLGILHRRLLAIVRDDDVCRRLMTVPGVGPVVALTYRATVDVPARFKNSKAVGAVFGLTPSKYQSGEINRTGGISRCGDEMMRVMLYEAAQVMLTRTNKWSWLKAWAMKIARRRGMKKAIVALARRLAVIMHRIWVDGTEFRWTREETAAA

SEQ ID NO: 233326 - protein, 359 aa, unidentified
MAVIEGRERRIVGGVDTHKDLHVAAVVDEQDRVIETRCFATTRQGYRQMLAWMRSFGDLQRIGIESTGSYGAGLLRFMQQAGIAVLEVTTPDKQDRRRRGKNDDLDAQNAAHAAFAGQRTVTPRSRDGMIESLRVLMACRKTAVSARRVALQMIHNTIVCAPDGLRDQLRSLTRMQLVRTLAAWRPDLTAYRDLDSAYRIGLKSLARRYLELHDETADLDAMIAAIVDELAPNLVARNSIGHIGAAQLLLTAGDNPERLRSEASFASLCGVSPVPASSGKTVRHRLNRGGDRAANSALHIIAIGRLRTDQRTKDYVARRIAEGHSKLDAIRALKRYLAREVYTLITQRRREINATRIAA

SEQ ID NO: 233327 - protein, 367 aa, unidentified
MKKVSTRAAVQSRNISQQKLTIGLDLGDRNSWYCVLDEAGQIQREERVRTNAKALQEVFGAMARSRVAVEIGTHSPWISRLLSELGHEVIVANARKVRLITESRKKDDRLDAQTLARLARLDPKLLYPVKHRSVQAQADLTLIRARAGLVRARTGLANAARGLAKSYGERLRGCNVRNMNPEKAERLSPELQAALEPLLNAIESLSERIVEYNERIENLAEKSYPQVALLKQIKGVGTLIALTYMLTLEDPHRFRQSRDAGSYLGLQPGRRNSGRSEPQMHISKEGDPYLRTLLVQGAQHILGPFGVDCDLRRWGLKLAERGGKSGKKRAIIATARKLAVLLHHLWISGEAYDPLHNSQQKALPAAA

SEQ ID NO: 233328 - protein, 388 aa, unidentified
MFTVVKCDRGGRARPSPAPVRKETARSVRVVAPAFLKEREPEQLPGPSRERRARIRKNGPTTRKEGARAVSATTTKVYAGVDVSKGRLEVFVHPTAERFGVPNNDAGADELLARLEESSPALVVLEATGGFERPVAAALVASGLAVAVVNPRQARDFARATGRLAKTDRIDAQSLARFAEAVHPAPRAIPDEEALALGEILARRRQLVEMLTAEKNRLVTASTRQVKKRIEVHLLWLEKELARTERDLEEAIEESPVWRENEELLRSVPGVGPILAKTLLAELPELGELKNKQLAALVGVAPLNRDSGILRGKRAIWGGRSGVRAALYMGALVATRCNPTVKVFYERLLAAGKPKKVALVACMRKLLVILNAMLRKRTPWRPSHALTP

SEQ ID NO: 233329 - protein, 465 aa, unidentified
MAKKRNNKSKDSKRHRQSLKTIQPNSAGIDLGSREHWVAVPPSKDGTPNVERFGTTTPELLRLADWLKEQQIVTVAMESTGVYWIPIFEILDSRGFEVLLANARQISHVPGRKTDILDCQWLQLLHACGLVRGSFRPSDNICQLRALIRERNKMVQQRSDWIRRMQKNLDQMNVCVHHAVSDITGVTGMAIIRAIVDGERDPHALARLRDSRCRKSEKQIAEELTGNWRPEHLFNLRQALKVYDQLCAVITDYDSEILTYIAMLQPQDAADTSAPPPASKTKAKNISKRGQEPLRQALYDLSGFDLTSIDGIGVDTATVIVSELGLDFTAFPDESHFVSYLRLAPNLSISAGKKVPSKFKATTCTRVSTALRMAALTLRNSNTALGAFYRRVSWRKGASVAVFATARKLAQLIYRLVRYGQAYVDAGAQAYETRYNQRRLISYTKALNKMGYNVEPLSTGEAIPT

SEQ ID NO: 233330 - protein, 430 aa, unidentified
MTKRSPTPANAVLVAIDMSKHRQEVLIERPEGGRRRRMTVMATKADYDRLAADLGEIGRPIVVGFEATGNYHRTLAHRLLAAGFELRLISSVALARTREALHNGWDKNDSKDAQVILHMLRIGATQRYVDPLAAGINDLQEMSKTHEAISKAKTQTWHRILTHYLPLYFPEIERFAGNSRSDWFLALLERFPTPVSMTALGQEAFTREAWSLVGRKVSKARLINDIYETACASVALPVDEDSVAIAMFRMVIAQARSLVRQRDEIERTAHALLADNRDYQLLRMIPGIGPINALTILAEAGDLRRFAHHRQFLKFCGLDLATCQSGTFRGRTKLSKYGNARLRRTFWMATQVAIRQRDNSFRDKLGRYVAGHGNDPDRRRKAMTALTAKMARVAHAVIKTGAEYRPFVERADTRWKDPSLLCREGAAATL

SEQ ID NO: 233331 - protein, 345 aa, unidentified
MNIATMGIDLAKNVFQLHGVNSHGKVVLRRQIHRGQMRGLFVNLPPCLIGMEACASAHFWARRLESYGHTVRLIAPHFVKPYVKTHKTDATDAEAICEALSRPNMRFVPIKSIEQQSALSLHRVRQGFVRARTAQACQIRSLLAEFGLVMPPGIANIPKQVPKLLQVAARELPAPFCRLIERLLAHLKELDRQARELEAQIVDWHERSEPSRRLAKIPGIGPITASALVASISDVRSFKSGRQLAAWLGLVPRQHSSGGKPTLLGISKRGDRYLRTLLVHGARSVIVRARKRDDEKGSWLKKLLERRHVNIATVALAHKTVRTVWAMLAHDREYCANYQSPPVAA

SEQ ID NO: 233332 - protein, 342 aa, unidentified
MKIMTGIDLHSNNALCGLMDESGRRVLHKKLPCDLPAILQVLEPYKAQIAQVAVESTYNWYWLVDGLEDHGYPVVLANPARMHQYDGLKHTDDVSDAYFLCELMRLGILPTSHLYNRQTRPVRDLLRRRMLLVQLRTSLILSFKSLNERTLGQRVPLARVKAMSIEEAQARFTAPADQLLCGEQLGLMGQLRESITKIEKHIVEATKEWKTFQRVQDVPGIGKILGLTIALETGDPKRFADAGKFASYCRCVKSLRQSNSKKKGQNNRKCGNRYLAWAFVEAAHFACQHDERSRRFYDRKKQQTNPVVATKALACKLAKASWHVMHDDAAYDAQRVFGGGTP

SEQ ID NO: 233333 - protein, 341 aa, unidentified
MNHYVGIDVSLEASSLCVVDANGKIVREGKVASEPDALIAWLRGLKLELTRIGLEAGPLSQWLYAAMREAGLAVELLETRHVRTALETMPVKSDRNDARGIAQLMRLGWFRPVHCKSMAAQETRALLTARKLLQTKLHDLELSLRGVLRGFGLKVGPTTPACFEERIRELVAGHPSLEVIAEGLLAARVALRREFDRFEKQVRDAARCDTRARLLMSIPGVGAIVSLTFTAAIDDPARFKSSKQVGAYFGLTPTKYQSGETNIDGRISKIGDAWVRAALYEGAHIILTKPLKGCTALKSWAMKIARRSGMKKAKVALARKLAVIMHRMLADGTSFRNAAAI

SEQ ID NO: 233334 - protein, 482 aa, unidentified
MKKKTIYSNQSQELLRLFEEAGNNSKMMCVPIDYAKKDHIVMFCNGYGDILRKPFSVKNSPEGVKYLTEQVRRSCRHRGINSKHVFLGGEDVGSYAENFVNTLRAKGWLVAGVNAHDAKKQRANIQASTDRLDLMGIASMLLNRRANCSPAQSGIYRNLRTLVRHRRKLVVMSTEIRNQIHTVVDRLFPGFLDERKTGIVPFTNSSLYLMENRFSARQIHRRKRDRLIEILKRYGTSKPELTAAKLQEYARQVLITPKEYMSTLQLSLAQHVKHFRCLKENIKQVEREIALWLSQTQGAFLTTIRGIGIVLAAGVTAEIGDPSVQKPLNNLVSYAGIIPRVKQSGGVEGKTFTGKVAKRCNRILKDYVVKSGLHLGLHGPEDLMADYKRRDAAGQHADFGMARRYLRMAMCLMRTSQIYLPSRLRKKGVDMQQRSSYYLMTWPYIREKWYKLGALEATFEKDRPLGQWRYMVQELYEIKLKL

SEQ ID NO: 233335 - protein, 408 aa, unidentified
MKDSRKRFIGLDVHKHYLIAIGVDEELNVVLPARRVELAHLESWMKKTLTKQDNVVLEMTTNTWQLYDELCVHAGSVTVVHPPHVALITRSLVMNDKIAASILARLLAKGLLVGVWVPPQEIRELRGLVAQRKKMTGLATQAKNRLHAVLQRHHWIPPEGNPFRTSHNNWWLALHLGSLEKVNVQSDLETLQFAEKQLLRLTSLLEEIANQNEQVTRLLHLPGFGVVTAVTVWSAIGDIQRFADPQHLVGYAGLGTRVHNSGMTTRTGRITKAGRRDLRVVLIEAAQVAANSHPHWKAELARLQPRLGRNKAIVAIARKLLVAVWYILAQHKTDRFAQPEAIAQKLLKFAYQLGKENRPKGQSAAQFVRLHLDALSIGTELTSIAWGSRKPIPLPPSTNKVSDVPNTK

SEQ ID NO: 233336 - protein, 342 aa, unidentified
METIGLDLHKRESQLAIQAEDGTITERRIVTSRERFTAVLGHRPRARILLEASTESEWVACHLEALGHEVIVADPNYAPMYATRSRRVKTDKRDARTLMDACGQGTYRRAHRLSAPRRHLRAELAVRDALVRTRTRYVALAKALVRRDGLRVPSSTAERVGDRVQALALPAPLAAELAPLLTLLPSLNATIAAADHQLSALEQTDPIVALLMTAPGVGAVTASALVATLDDITRFPSAHQCEAYLGLVPGERSSGEQRRIGPITKAGNRRTRWLLVEAAWRILRAKDPESAALRAWTLRIAARRGKPIAVVALARRLAGIVYAMWRDGVPYDGRKIRVDRDD

SEQ ID NO: 233337 - protein, 347 aa, unidentified
MRFYTGQHRFFCGIDLHARSMFVCILDGQGNALVHKNIRATPEEFLNIVAPYRDNLAIAVECIFSWYWLADLCAREKIPFVLGHALYMKAIHGGKSKNDKIDALKIATLLRGGMIPQAYVYPARMRATRDLLRRRMHLMHKRAELLAHIQNTASQYNLPEFEKVLAYRKNRQGVAEVFPDPTVRTSIQADLELVDHYDDLLKRLELFILRCAREHDPNALSLLRSVPGIGKILALVILYETHDIRRFPSVQHFASYSRLVRCSHMSAGKRTGSGGRKIGNAHLKWAFSEVAVLFLRANPQAQAWLARTASKYGKPKALSILAHKLGRAVYHILTKERAFDMNRFLDE

SEQ ID NO: 233338 - protein, 392 aa, unidentified
MVCVGIDVAKDKHDCFILSSDGEVLADVFTIENNQEGFDTLLQRIRSCTGPADKIKVGLEATGHYSYNILGFLLDKGLATYVINPLHTNLYRKSLSLRQTKTDRIDARTIASMLMSDVDLKSYTNISYHNEELKSLTRYRFDKVSERAKLKQSVSRLVNILFPELEKLVSSLHMASVYAMLNEFPGAKQIAEAHLTHFKAVLSEASKGRYGREKAIEIRDAARRSIGSAMPAKSLELRHTIRLIQELDKEIEEVEAEIFAILDTMQSPITTIPGMGPRMGAMILAEVGDFSRFDSPDKLLAYAGLSPSTYQSGKLNATGAYAHMEKRGSRYLRYAIFNATKYVCLWEPTFKDYLARKRAEGKHYNVAISHAAKKLVRLICAMQKSGRPYQPA

SEQ ID NO: 233339 - protein, 379 aa, unidentified
MSLNVVGGSSCYVGIDWAAATHAICVLDPAGKRVAAFTVEHTAAGMAALTQRLARLGAPETMPIGIERPDGRLVDALLEAGHPIVPVKPNAIKAWRDGEVLSGAKSDAGDAEVIAEYLRLRQHRLSLVTPYSVETKALRTVVRTRSDLVDMRVAATNQLAALLDAHWPGAKAVFADVESPIALEFLTRYPTARHAAHLGAKRLTAFCAKHGYSGRRTGEQLLTRLRAAPTGVTDETLCEAIRDAVLALVAVLRAVVAALKDLGRSVVATLGEHPDAEIFTSLPRSGQINAAQMLAEWGDVRQAYDGPDSVAALAGVTPVTKESRARGHDHPHAIRVLARAWIRIIWRCWIDRTPYNPSRHGNAVRLNQSRQTELVAARG

SEQ ID NO: 233340 - protein, 335 aa, unidentified
MGIDLHRRRSVIVRMTTDGDPLECIRISNDAERLATVMARAGESPEVVLEATYGWYWAIDALREQGAQVHLAHPLGVKAFEYRRVKNDERDARDLADLLRMGRLPEAWIAPPATRELRELVRHRAKLVGMRSNCKAQIHAVLAKCGIQVSMTDLFGLAGTELLDRLELPKPYAARIASLRRIITALDFEIDAFAGHVRGWLARDSGFVAVQSIPGVGPILGAVFVAEVGDVHRFARAEELTCWAGLTPKHHESDKHVHRGRITKQGSRLVRWAAIESVQILPKTSVVGRIRDRVGDRRGRNIGVVAAARVQLEFVFYALRDHRVRALQGTRPVAA

SEQ ID NO: 233341 - protein, 352 aa, unidentified
MVIIAFDSHKRYTQACVEQANGQRICEQRIWHKRGSIKEFLSRYQAGSPVAIETIGNWYWLVDEIEASGMEARLVHARKAKLMIGAINKTDKLDARGLNMLQRCGTLPTVWIPPGELRDKRELPRVRMVLASQRTGLKNRILSVMAKYGLQGAFEEVSDCFGVGGRRILNECLKLLPEQTLFTTKCLLDELDAVEARMNSIEVRMREVFEETPAVKLLDTLPGVGFILSVVISQELGAVERFGGPEQFASYAGTCPRVHQSGDKTSYGKQRTDVNHYLKWAYSEAANIIAINRNRWCYKHAARLYGRLRQRRGHGKAIGAVARHLAEASYWMLSRNEEYKEPMVRCGLPTAV

SEQ ID NO: 233342 - protein, 364 aa, unidentified
MDYFAGLDISMDETRICVLDREGAVVYEGKSASTAEAIADELAKAPSCRRTVFETGRMAPILFHSLSQLGLPVVCVESRQAYQALKSLATHKTDRNDARGLAHLARTGFFKPVHVKSLSAHAVRSLIIARKKLVGQRVTLENQIRGLAVVFGVRLPRALTTAFIDQALKASEGVAGLSAAMRGLIAARTAVMTAVAAIDADIRRMTGASEACRRLMTIPGVGRLTALAFVAAIDDPSRIRRSRDVGAYLGLVPKRYQSGEVDYVGGISKRGDRRVRTLLYEAANVMLTRTKGQLKGLRHREAVKHAQGARRSGASPCDHHARHAAGRHGVRRGVGIPHHGDRRPHRAPARSDARGREQTTAWIL

SEQ ID NO: 233343 - protein, 391 aa, unidentified
MIYVGIDVAKDKHDCFISNSDGEVLFKAFTIPNNLDGFNNLYQKIESVMEDLSKVKVGLEATGHYSYNLLGFLLDKGLTTFVINPLHTNLYRKSLSLRQTKTDKVDARTIASMLMSDVNVKSYSDISYHNEELKSLTRYRFDKVKERAKLKSSVSRLVCILFPELEKLVPTLHMASVYAMLSEFPGAKYVANAHLTRLSNLLSEASKGHYGKETAITFREAARTSIGSNMPAKSLELKHTIKLIQELTSEIDEIENEIKIIMDEINSPILSIPGINYRMGAMIIAEIGDFSRFDSPDKILAYAGFSPSTYQSGQLDGAYSHMEKRGSRYLRYALYNAAKYVCHWDSTFAEYLAKKRAEGKHYNVAISHAVKKLVRVIYYLEQTNQQYSKTA

SEQ ID NO: 233344 - protein, 399 aa, unidentified
MSKPILAVGIDPAKRVHRAIGVLFPDEVVFDCELPNALDAIQSLDLRLAELAATHAAELVYGLEDHRRYGRLLCEVLTERGRDVRVVNPLWTNRQRAFYGQDKDDAIDGRSIAAVVLRRRDQLPLANDFGPVAQAIREAERAIEDLGKKRTELVNRLHLQLNDVYTSAYETYFGKLKSPIALRFFRRFPIPQDLGGQDAVQLSKVILGLANGRVGPHKGRDREKFLQAKAEGILKTSASLRQTPRTPALELKAELIRQLCDELLVNHDRVTRLERMLRKQLLPATGQTITTMPGIGTILAAAIIGETASVARFRSRAAYAVYNGTAPARHSTGGRERHKARRDCNHRLKRAFWLHTPGNPLVRYRLLSAEVRSRLRPNHCRAGDSEAPGTGGKRRRQPR

SEQ ID NO: 233345 - protein, 333 aa, unidentified
MDTDTGEFQEKRLGHREEAENFYGALAAIGQQVRIGMEASGHAHWFERLLAKLQFELWVGDAAKIHRKRDRKQKTDRQDAQLILHLLLKDDFPKIWVPSWENRDLRQLLWHRHRMVQARTRIMNQLQAVALKEGLRCKKRLWREHGRQQLESFQLAPWASRRRHDLLELLDRLNPTITELSRAIEQEVEKYPEAQRLMTHPGVGPLTALAFVLIIGETERFQCGKQVASYLGLVPLEDSSGSRRRLGHITKQGSSMLRFLLVEAAQVTARSLPEWRGQYFHLMMRRGRKIAKVALARKLAVRLYWMWRKQWDYEQLTKLGSHAGQPGHRDGVQ

SEQ ID NO: 233346 - protein, 444 aa, unidentified
MSRKQRKHIRGKRGEAFLQIVRGIDRARILCVSLDVSKYFHVVMMHNAYGEIVTPSFEIDIFRSGFEHLCHVIDETAAGIEAEVVLIGMEPTGHYFENIARHLHARYEHVYLVNSLAVKENRRQKMMHYEKTDEEDAAAIGDLLCRGEGTPYRPVEGIYLEMQHIDRVRIAKLKMRSALKNQIIGHLDRIFPGMIISDKEAQQRHPPLFTTPFWSCQMAQHLVRVCPDPRRLSQMTPHALIDAFHEQGYRMGPRWAAKIIAFARQTLHPDPEVSAVRNPLLQRDLALLEQVEGHINQLEERLCALLSLTPGYIWTRLKGVSSIQVASLVAAMGDPAHYDYAAQVFRRSGLVSGRNDSGTRQKKGKGKRVTKVGDVYLRRALINLVETLSLHQPILGDYRSRLKGVKPHPGVARVATVRKANGILFAIQRDQRINDLRVKKEPPM

SEQ ID NO: 233347 - protein, 312 aa, unidentified
MDATVVGIDVAKDRLDVCIRPSGESFVFDRTTASVVELAERLKAFAPRVVAVEATGGFETIVAAGLAGAGLPMLVVNPAQVRAFAQALGRRAKTDPIDAAVIAHFVEATKAEPRALPDETTRLLADLIARRRQIVEMMAAEGQRDRRLTEKRVKKSIARLRKALEKELAELDGEIDDHMRGSPVWAEKEDLLSSVPGVGSIVARTLIAELPELGSLDRRQIAALVGLAPWTRQSGQWRGKSFIGGGRKTVRGVLFMAAMVASRYNPPLKAFRDKLVAAGKPKRVALIAVARKLLTILNAILRDKRPWQPKTA

SEQ ID NO: 233348 - protein, 403 aa, unidentified
MNAVGIDVSKGKSMVTILRPFGEIVSSPFEIKHTSSDILSLIKLIHSIEGESRIVMEHTGHYYEVLAQQFSAAGLFVSAVNPKLVKNFNNDSLRKVKSDKADSIKIARYALDKWQNLKPYSIVDELRTQLKAMNRQFHFYVKQKTAMKNNLINLIDQTYPNANTYFNSPPRSDGSQKWVDFVYTYWHVDCVRKMSLNSFVKHYQNWCKQKKYIFNKSKAEEIYTKATELVPVFPKNEITKRIIRQAIAQLNSTSATVETIRILMNETASKLPEYPIVMQFKGIGPSFGPQLMAEIGDITRFTHKGALTAFAGVDPGVNESGSYAQKGVPTSKRGSSNLRKTLFQVMDVLIKTMPQDDPVYQFMDRKRAQGKPYYVYMTAGANKFLRIYYGRVKEYLCILSESS

SEQ ID NO: 233349 - protein, 392 aa, unidentified
MVYVGIDVAKDKHDCFIVNSDGEVLYDVFTIQNNMDGFEDLLFKIKTASKNPDKVKVGLEATGHYNCNLLGFLKSKGLPTIVINPLHTNAYRKSLSLRKTKTDKVDARAIASMIMSDVSLKPYSDTLYHNEDLKSLSRYRFGKVADRAKLRQSVSRLINILFPELEKLVSTIHAKAVYELLSEFPGAHQIASSNLKHLTSLLETASKGHFGRDKANEIREAARRSISTYLPAKSLELKHTINLIRELSAEIDEIEAEIKKIMDAIDSPILSVPGISYGLGSMIVSEIGDFSRFDNPDKILAFAGCSPTTYQSGQIYSSHAVMEKRGSKYLRWALINAARYVCIWEPTFAVYLEKKRSEGKHYYVALSHAAKKLVRLLYHLETTGEKYKPVSV

SEQ ID NO: 233350 - protein, 401 aa, unidentified
MQDTQQRDAVDVFVGVDVGKGHHHAVALDRNGKRLYNKALPNDEAKLRALIAELKTHGRLLFVVDQPSTIGALPVAVARAEGVLVAYLPGLAMRRIADLHAGEAKTDARDAAIIAEAARSMPHTLRSLRLADEQLAELTMLCGFDDDLAAQVTQTSNRIRGLLTQIHPALERVLGPRLDHPAVLDLLERYPSPAALAGTGEKTLANRLTKLAPRMGKGLAAEIVQALSEQAVTVPGTQAATIVMPRLAQQLTALRQQRDEVAVEVERLVLAHPLWPVLTSMPGVGVRTAARLLTEVAHKAFASAAHLAAYAGLAPVTRRSGSSIRGEHPSRRGNKVLKRALFLSAFAALRDPVSRAYYSLKIQQGKRHNQALIALARRRCDVLVAMLRDGTIYQPKSAPNA

SEQ ID NO: 233351 - protein, 381 aa, unidentified
MKVTKFSLKVIPCHRRILAKTIDTDLEYEAIGIDLAKNCVSAALLTTDGEVICIDRLDYSELEKSAQTLSPTTFAMEPCTEMNYLVQKLEAWGHRCLIIGGKNVRDYIESHFSGQKTDLNDAQALAFLTQDTQLRTITAKDLEQQKYASLTTLREQYIKQYRQTIVSLKGICQAWGLSISKGISGKARLKELIENQSNFPSELRAELINMVAHAQSAQRDLNNITKTLVELAKKDKACQLIQTVPGLGPICSCRLRATVGDIKRFKNPKDFPAYYGLVPISIATGHNEKKGKITHRGDKTMRSLMVQGAGCVVIMATKGTLGSKQLTKWILKKQKEKMPWGKLVCAVAAKLLRIVRAILISGKPYNSKIAGVARCSLPQAA

SEQ ID NO: 233352 - protein, 421 aa, unidentified
MRGFGLDVHRDFCEVAIAEDGEVRSAGRFATRVDAVELFAASLAPGDVVALEATTGTDKLVSILERHGTRAVVANTRKLRSISEAKAKTDRLDARTLARLLVSGLLDAVWTPDERTRMLRRLTNRRERIVRARTRAKNEAQAVLARNLCERSPVTDAFGKAGRRWLVTLELPVDERLTLDGCLRQIDFLDAEVAALDAEIAKQALAWPEVLRLMSVPGVNVQTAATFMASIGDVSRFSSPRKLVSYLGLDPRVHQSGNAPARHGRISKAGASEARHMLGEVAWKVMMTPGPLRAFFERIRARRGPQVAATATARKLAVLFWHMLTRGEDYAFTRPAMTRNKIRRLELLAGAPPQKGRKGIAGGMSARVFEAERELSRQAEHAYRRLVSDWRATGPKKAGAGATPGRASQRPSKGKAARQTP

SEQ ID NO: 233353 - protein, 330 aa, unidentified
MKNYKEVVGIDVSKKTIDAYCYQAQVHKEFVNDVSGYKSLIKWVLKVGLSKEVFYCFENTGYYSLKLALYLHSQEIVYVEESPLKIKRSSGVVKEKTDRIDACLIARYAWLYREELEPSTVKSNSQLELGRLLALRDQLVRNNAGLKGTLKEMKALLSSPTTDVGCISLKRSIDYLTKQVISIESRIKEIVSENASMKQNYELLTSVKGIGLVVACQLIYHTGNFTRFASWRTFSSYCGTAPFEHRSGTSIHRRKQCHYLGDRKMKSLLSMASVSAIQYDSELRLYYKRKLAEGKDKMVAVNNVRNKIIARAFAVVKRGTPYVVLQQHVA

SEQ ID NO: 233354 - protein, 351 aa, unidentified
MIIIGVDYHPSSQQIAFMDQETGECGERELNHSDGEAERFYRELKERGVGVRVGMEATGHARWFERLLAELGFELWIGDPAEIKTKRVRKQKTDREDARLMLRLLLENRFPRIWVPSPENRDLRQLLWHRHRLVQMRTRIMNQLQAVAMNEGYRWKKKLFGQQGRALLEKLSLAPWASRRRKELLELLDQLNPKIAELTAAVEREANKRPEVVRLMTHPGVGPITGVAYVLVIGTPDRFPCGKKIGSYTGLIPCEDSSAGRQRLGHISKQGNTLLRFLLVEAAQAAARCDADWRRRYMHLMMRREKGIAKVAMARKLAVRLYWMWRNNWQYSQLVEFGSNAGKLGIVHGMK

SEQ ID NO: 233355 - protein, 337 aa, unidentified
MTLYCGIDLHANNSVVSVLDDQDQVRYEKRLPNDLTLITDTLLPFHKDLLACVVESTYNWYWLVDGLMDAGFDVRLAHTGAIPQYAGIKYTDDETDARHLAHLLRLGILPECHIMPREQRAVRDLMRRRLLLVQQRTLHHLSLQSLIARYTGERLSANQIKTLDNDAIASKLDDPIRLGGQVTRLARDWLENAIDLLEQEVLKYLQPRHDYQLLTSIPGVGKILASTIVTETGDIKRFPNQGHYASYARCVNTEKLSNGKLKGRGNKKNGNKYLAWAFMEAAHHAAIWSPEIKRFYQKRQAHRHILVAKKTVANKLARACYHMLTKQEPFEVKRAFR

SEQ ID NO: 233356 - protein, 430 aa, unidentified
MKSNTQNAKIEAITEKTLVLGIDVGSETHYARAFDYRGIEYSKKPFKFSNTEAGFVTFKEWILDLKERHEKDKVVSGMESTGHYWFNLGKFLQDNEMKPVLVNPHHVKKSKELDDNHPTKNDRKDPKVIAGLVREGRYMIPYLPDGVYADLRTASNIRFQLQAELTRIQNRINRWFNIYFPEYKTVYGKPDAKSGILILKEAPLPEDILTLGIDGVNQIWRDAKLRAVGKARAKTLIEAAEHSVGSKEGAVSARMEIRMLLEDYESRNIRLQEVMGLIEGLVNQIPMAEKLLEIKGVGIKTVSGFLAEVGDIRRFNDPKELQKLAGLALVENSSGKHKGKTTISRRGRKRLRYLLFEVAMSLVAKNPEFRELHNYYTTRRLNPLKKMQSLMAIAAKLLRVFYAILTKGVGYDPKKMVNDIRRPAAYAQAA

SEQ ID NO: 233357 - protein, 615 aa, unidentified
MIIVRYADDLIVGFEHETDARRFLDEMRKRLQEFALSLHSEKTRLIEFGRFAAENRKRRGLGKPETFTFLGFTFICSKTRRGKFQIKRKSRRDRMQAKLQAIKQELRRSMHQPIPPAGKMVAAGRHRLLQLPRGADKQVDPDRIPIPRYQSLAAHATAAEPERLDDLGADQAVGRRLAPATANPSSVARESLRRQTPKVGEAMGRAAEVVATSSSIRTDGGCPVAQVNDLSRSLTAFDPISTLVVVVEMSKASWLVSGVVPGVERQPLKKLEPDATALLRLIERWRNEAVRAGRPISRIALAYEAGRDGFWLARWLIARGIEAHVIHSASVAVSRERKRAKTDRLDAAMLMRVFLGWLRGERGHCGMVAIPTMEEEDARRPSRERESLVDERSRITNRMKSALARLGIRGFKPHLRKAPERLAGLRTAEGTGLPANIIEEFRRDMARLALVREQISSIEKTRAERLERAPDTGPHAMVRLLARVIGIGIETADMLVREILSRKLRDRRAVARYAGLTGSPDESGLKRREKGLAKAGNARVRRGLIQLAWRFLMFQKDSALAQWYRTRTEGAERRAQDDDDRGTGAQAADRAVAPGHDRRGAGRCRAAAGGVSNTL

SEQ ID NO: 233358 - protein, 408 aa, unidentified
MDVLIERGAGLDVHQATVVATVRVPGEGGRQVVTETFGTMTPDLWALREWLQAYGVTHVALESTGVYWKPVYYMLEDAFTLLLINMQQLKRVPGRKTDVKDSEWLAQLLECGLLRSSFVPPPPIRELRDLTRYRVQQVRDRAQEVNRLCKVLEDSGLKLTSVLTDVMGVSGRAMLAAMVEGTTDPAILADLARGRLRKKLPELRRALQGHFRRHHAFLIEQILAKVDFLDETLDRLMGEIDARLVPFEPLLTALDTIPGIDRIGAISIVAETGGDMSRFPTAGHLCSWAAMCPGHNESAGKRRSGKTRKGNRYLRGTLIQAGLGAIHSKGTALQARYHRVKRHRGHKKAVVAVGHQILEIAYYVMRDGVTYQELGADYFAQRHAERAVRRHMRQLEALGYRVTIEKAA

SEQ ID NO: 233359 - protein, 451 aa, unidentified
MTGQQVSKVKLSTQPFGDGPTMTKRSSTPADAVLVAIDMSKHRQEVLIERPEGGGRRRMTIMATKADYDRLADELSSIGRPIVVGFEATGNYHRTLAHRLLSAGFALRLISSVALARTREALHNGWDKNDSKDAQVILHMLRIGATQRYVDPLAAGINDLQEMSKTHEAISKAKTQTWHRILTHYLPLYFPEIERFAGNSRSDWFLALLERFPTPTSMTALGPEDFTREAWSLVGRKVSKARLINDIYETACASVALPVDEDSVAIAMFRMVIAQARSLIRQRDEIERTAHALLSENRDYQLLRMIPGIGPINALTILAEAGDLRRFAHHRQFLKFCGLDLATCQSGTFRGRTKLSKYGNARLRRTFWMATQVAIRQRDNSFRDKLGRYVAGHGNDPDRRRKAMTALTAKMARVAHAVIKTGTEYRPFVERADTRWKDPSLSCREGATATL

SEQ ID NO: 233360 - protein, 333 aa, unidentified
MPSTPVTTLGIDLANASFDATLRLPDGRYHHHVFPNTADGHRALLAWVAPRVTTPIHACMEATNTYWEALALVLIQQGHTVSVVNPARIKGYAQTELQRNKTDKLDSALIADFCARHTPAPWTPLPPEHRQLRTLVRHRDDLVQTRMQLEQRQRESPDAFVRESFAACITTVRTQIASVEAELETLAAAHPQLAADLGLVTSIVGIGLITATKVLSELAPISSYTDAKAVATDAGVTPTTYESGTSVRRRSRMSKHGKAPLRSGLYMAALTCMRWCPGCQTFVDKLTTRGKPKKVIICAVMRKLLHIVYGVLKHRTPYDPEKAWGKPATEGTI

SEQ ID NO: 233361 - protein, 408 aa, unidentified
MTIFVGDDWAEDHHDVHLMDAEGARLASRRLPEGLAGIRGFHQLVAAHAEEPTQVVIGIETDRGLWVEALTAAGYQVFAVNPLAVARYRDRHQVSGAKSDAGDAKLLADLVRTDRHNHRPIAGDSAAVEAVKVLARGHQNLIWTRTRHTNALRSALREYYPAALEAFEDLAGRDALAVLGRAPTPVEAARLSLSKIRSTLKAAGRQRNLDTRALQIQEILRSEQLAAPGAVTAAFAATTRATVGIIAELNRQIGELEAELATHFEAHPDADIYLSLPGLGVILGARVLGEFGDDPNRYTTAKSRKNYAGTSPLTIASGKKRAVLARHVRNRRLYDAIDQWAFCALNRSPGARAFYDQHRAGGDTHHQALRALGNRLVGILHGCLCHHNAYDEHKAWAHRQPNPDTQAA

SEQ ID NO: 233362 - protein, 397 aa, unidentified
MYIVGIDIAKRKHEAAVIDGEGTVIIKPFSFTNNCSGYNRLLAMLAKAKLPLDEVSFAMEATGHYWLALFTRLQKEGFRVQVINPVQTNSIRSFYIRQAKTDPRDALLIAEVIRFGHFSESTLHPENIYELRELCRGRHAIVSMQADVKRKVVALLDQVFPEYETAFTNMFGDTSMAILQTCPTPKELSEMPFEELCHLIEASSHKRFRMAKAQELQELARNSFGFAMAGDVFSTMIRLYAKHLDFLKQQVREMDRKIAEIMDTLDTPITTITGIGPTLGAYILSEIGDISRFSSAAKLAAYAGIDPTMRQSGEYNGVRNRMSKRGSPYLRHAIWLAASSAVLHDPALKLYFQKKRDEGKPYMASVGHACRKMVSIIYAVMRDNKAYTPYIPNEISA

SEQ ID NO: 233363 - protein, 520 aa, unidentified
MHQTKYRGIITEAGSLTFSPWEPAGPLLAKPLRKSVSPFGGDLCFGWLGSPRLYLYEPLGCVSAFWKWMPARKDKNMQYQKVLKMLENIPYLSVGLDVGADFSWMSIMLPNGTLTGKPFKIVHSDPQSRELAVAKIKEAQEAYSLESRCFLESTGIYHIPLLCFLRDKGFDCSVINPIITKNSTNMNVRKLHNDKFDSKKAAKVGLDASLKTSIIPDDEVIDLRNLVRDYYYFKDLQSAVVLKLTAELKVSFPAYRNVFCKATTQTSLKLLDAYPLAQDLLAAPKELVVEMIHSTARFGEKYALAKYDALYAAAEDAAVFGRALHSNALRIRLYIKLYREYQEHLDGILEELHKAVDRLKGTPVHNRISLLQTLPGIGFLSAVVLLAEMGSFDLFSSPKKLYAYFGMDPGVNDSGKFHGDRVHMSKRGSSLARRILHMAAINNLKVDKAAKMPVNPVIYDYYVRKCAGKKKIVAVGAVMHKICNTIFAMLRDNKPFELITPEEHCQRYAAEHQGSVSTAA

SEQ ID NO: 233364 - protein, 423 aa, unidentified
MYFIDNQRRIFMKQQVTEDVNIMPQLDKACGLDMHKDKIVGFISWKDGSNQEFREFGTYTCELKQIRDWLQESHIHHCLMESTGIYWMSLYAILTEAGIEVIVANPVHIKQMPKRKTDRKDAKWLCTLLLHGLVRPSFMPDNTQRIIRDYCRNRLFYTWQLNRIRNRLLKILESNNIKLRSVISSIHTLSAMDMIRLLAKGVTDQEQLLSCARGKVVKKKEQLIKALDGTLQNYHHTQLQMLLEDYDHVQKQVDFLDKSITEIISEHYAQAFECLDSISGIGIKSAEIILSEAGKDMSRFPTADHFTAWCGIAPGNNESAGKRKNTAIKKGNSYLRVAIVGAAWAAVRMKDSYWHALFDKLRKRMKAQKAIVAVARRLLKVVYKTLETLTVYQEKGIAHFVDLQAKAALYHAAKPSWPQTDNI

SEQ ID NO: 233365 - protein, 344 aa, unidentified
MKHYAGLDVSVKETSICIVDETGKVCRELKVASHPEDLLRVLQDPAWNLVRVGLEAGPLSQWLFNGLAEAGIPALCIETRHAKAYLKAQINKTDRNDARGIAQMMRVNLFRPVHVKTLASQKRRALLTARKLLQEKAIAIENDIRGLLRNFGLKVGVASAVMFEQRIRELVEGMPELGELLEVLLDARRKLREQFSKLHRKLLSIVREDEVCRRLMSVPGVGAVSALAFRATIDVPSRFRNSKAVGAVLGLTPAQHQSGESNRIGRISLCGDGMMRTLLYEGAQSILTRSVKWSWLKAWAMKIAKNRGLKRAIVALARRLAVIMHRIWVDGTEFRWMKEEAVSA

SEQ ID NO: 233366 - protein, 344 aa, unidentified
MERHTAVSVDIAKTVFEVAVSDEPGRVAQRRRLSRAAFLEFFAQLPAATVIMEACGSAHFWARQLQGLGHEVVLLPPHQVRPYVTRNKTDRTDAKGILEAYRNADIRPVPVKSVPQQVLVSLHRFRSGWLAARTAHINTLRGLLRELGLVIPVGAEKVLPQVRCLIEDADSGIPDALRPVLAAACEEIQALTARIKMTERQIETLADQTPAVERLRSIPGIGLLIATAMVAFIGDIQRFPSGRHLASYLGLTPREYSSGLKRRRGRIAKRGDAYIRMLLIHGARSALCHAHKAKDHDRLRQWTLKLEKRVGHNKATVALANKLARIAWAVWRNDRNFESLAQAA

SEQ ID NO: 233367 - protein, 412 aa, unidentified
MEVMYPQCCGLDVHKSSITACVLLAQSGKPLKHIRRFGCTTRELRELVLWLQEFGVEHVAMESTGVYWKPVWNILEGHFHILLANAQHIKAVPGRKTDTKDCQWIAELLQHGLLRGSFIPPLVIRDLRDLTRARTSLSQEHSRIASRIQRVLEDANLKLACVASNTLGKSGRAILAAIIGGEQSPERLADLALGHLRAKIPQLQAALEGQVRDHHRFLLQSLLRQLYFIETEIELLDARLEQLGQQHEDLAEALNRWVTVPGVDRVAGWSFIAEMGADVNQFPTAAHLASWAGVCPGNKESAGKRISGKTRKGSPWLRRMACQSAWAAARTKNTYLSAQFKKLAARRGRKCAIIAVAHSILVIGYHLQRKRCAYTDLGGNYFDRLHADGLRRYLVKRLESLGHSVTLQPRIA

SEQ ID NO: 233368 - protein, 327 aa, unidentified
MIGADGGVLANRNVPNGVEPILKVIGGLPPGTPAAFEAAFGWGWLVELLEDYGFAPHLVHPLQCKAIASARLKNDKVDAAILAQLLRADLLPEAWIAPPEVRQLRALLRHRAQLVRLRTLLRNRIHAIVADHGYDRPSGCWTRPGRAWLASLELPAVSRQVIDDDLAVIDALEPTIGRLDWQVHQRARTDPRVKILTQLPGVGPFTALVILAEIGDIGRFGSARKLAAWAGLTPTVRGSDRTIRHGHISKQGSAWVRWVLCEAAQTAKRSPQFAATYQAIAKRRGRKIATTAIARKLLTRAWHLLTAAERQADGQPAAASVPAGSRP

SEQ ID NO: 233369 - protein, 378 aa, unidentified
MKEGLPGARDNGRLETQSETERRALVTEYVGIDWAYRKAAWCAKSVGGAISAEGFTSADEDGLARLVLRLGTDVKACVEMMSGAVWVRDRLRSAGWQVEVADARRVKGIAPLACKTDRVDARVLAELCRRDLVPALWIPSLEERELRERLRRRAHLVRLRTSAASRIYGLGTQWGLRLSADRLRRPDRRELLARSEMPAVWQRSVDEALAVVDLLDQRIAPLEQELAPIARADRDVALLVTIPGVGDLLALTLAAEIGDVSRFPSARKLVGYAGMAPGVNQSGERTTSGLPLSKAGSRTLRWAAVEAAQHAWRESNPWHDLYTDLCTRKTKNDAKSAVARKVLTAAWHMLSLQQPFKPSRPRGGLSTAPASSVSVLAA

SEQ ID NO: 233370 - protein, 361 aa, unidentified
MTASNIVGVDPHRRTFTATVLDSRGGELGHAHFPNTRQGHDAGLAWAAGLGPADRWGVEGASGLGRHLAEFLVAAGCDVRDVPPHKTAVRGRGRHEGKTDRLDSQRVAAETQTNPRLARAFKHAVSAAPDPVRDRIALWHNARTSLTKVRVQLLGELDALVHDLPEDLRTQLRPAKTVSARVNSLRRLDTTGVTDPTVALRLRLIGHRVAMLRDVLEQDKAATAELTTLVEETKSTLTELVGIAPRAAAEIIVETGDIRRFTEAGFARFNGTAPIPASSGEGENAPVRHRLSRGGNRRLNAAIYRIAMIQLRYEPRARQIHDQARAHGHTRREAMRVLKRHLSDAIYRTMLRDARRARDLT

SEQ ID NO: 233371 - protein, 353 aa, unidentified
MDGHAKQDEVILGVDTHLDTHVGVAISQSGKFLGTHAAPTTQSGYLSLLTWARSLGCVCRAGVEGTGTYGAGLARVLREQGIEVLEVNRPDRSKRRLKGKSDPTDAEGAARSVLSGVATAIPKTQSGAAEALRTISVARRSAVKAKTQAINQLRAILVSAPQDIRERLWKPKAEHCVAACARLRNLGPTLLLQTLTTALRLLAKRWLALAAELKELDASLETLTNVSAPHLRALFGIGPQTAAVLIATAGDNQERLRSEAALAALCGVNPLPASSGKTLRHRLNRGGDRQANNALWTIAMVRMRSEPRTRASVARRSAEGMSNKEIHRCLKRYIVRELYPLIMADLASVAEVS

SEQ ID NO: 233372 - protein, 409 aa, unidentified
MQTSSIDVFIGIDVGKSDHWATALDRDGERLFDKALPNDETRLRDLYERLSHHGRVLVVVDQPATIGALAVAVAQDMGITVGYLPGLSMRRIADLTPGNAKTDARDAAVIAQAARTMPHTLRAINGSDEDAAALSMLTGFDLDLARQVNQTSNRIRGMYTQIHPALEKVLGPRLEHDAVLEVIASWPTPAALRKAGRARINAKLKAHGARHHEAWADEIISALKTQSVVVAGTDAAGIVLPHLARQLIALHAQRSDVAAKVEALVEAHPLYQVLTSMPGIGVRTTAVLIAETLGRDFATGAHLASYAGLTPVTRHSGSSIREEYTSHAGNKRLKRAMFLSAFASLRSDPASRAYYDRKIAQGKRHNQAVIAPTHPPTPRRRLTHHIGAPPPARRPIPVASPPPLRRFRP

SEQ ID NO: 233373 - protein, 411 aa, unidentified
MEQIHDRVAGLDVHRDQVAACVRTPGPRGGVQTEKARFDTTTGGLAALAEWLAGHAVALAAMEATGVYWKPVYYALEGRFLVWLCNAHHVKNVPGRKTDMSDAEWLADVAAHGMVRPSFVPPPPIRELRELTRYRKTQIDVRAAEIARLEKVLQDAGIKLTSVASKVLTQSGRAIIEALIAGQRDPAALAGLAKGKLRPKIPQLTAALRGHFGAHHAIVAARILAHLDFLDETIGALDAQIAARVAERYQSAARLLADVPGLERRSIEVIIAETGADMSRFPSPAHLASWAGLCPGNHESAGKRRRVATTPGNQWLRRTMIVSARAAARTKGSYFGAQYRQIARRRGPNKAAVAVAHSLLDVIWHILTTGEVFTDLGADYFTSRQDKEHQARRLIGQLEKLGYTVQLTAAA

SEQ ID NO: 233374 - protein, 344 aa, unidentified
MAILFCLGVDVSKSSLAVTLIDQQEKIIWSNRSIPNTQGGFKKLIEHILRHAVKKSDGQDFAIAAGMEATGVYGEQLAHFLHDNNHEGRIIPYVLNPAAVRSYSKACMEANKNDPTDARVIASFLSVAIAREQISPWKAPSEEERTLRALSRRREELVHLLTSERNRLEKLSNMASPSEEVVKSVQEHIQYLEAAITNIAEDIDEHIKTCPTLKRNAELLRSIPGIGEVSTATVLGEAGDISKFERIKQFTSFVGIAPMEYTSGSSVNKRSRISRRGNTRIRRCLYMASLIAVRVNPVLRAFYKRLLDRGKGKKVALIASMRKLLHLIWGVLKNQRMFEPQYCS

SEQ ID NO: 233375 - protein, 339 aa, unidentified
MMNNAKQTKTNVVNKPNDPIYCGIDVGKKVFVVSLSCKDKTKTFSNTGGDIKQAMAYLNTYAGTNLALVVLESTGGLEIPLAKALHQSGFNVVIANPNKTSQFAKSCSNAKTDNQDAKMLAFDAKFLSLDEDKLSHLLYVPPSEEQERLEALVVRRHQLVAMRVQEKNRIWQIQDSQKLSVERIIAYLDKEIKDLEQDIDTLSKHFDDTTKKFKDIKGIGGVTVATLMSMLLKLGTLSNKEIASLVGVAPHPKESGTLKYKSHCKGGRQSVRNVLYNATNVARQYEPKFKQFYERLIGKGKPFKVAINACMRKLLTVINAIVRNDSVWQADYHLNLNVK

SEQ ID NO: 233376 - protein, 323 aa, unidentified
MQWVGIDVSQANLDVALMADSGAVQTTQVDNTLAGYARLDGWLRKRGAARSAVTLEATGRYSAGVAQALYAAGYTVSVVNPARIKGYATAQLRRNKTDKLDARLIADFCRTQQPQAWRPAPEHVTHLQALVRHLAVLETAKQAVDNRLRERAALPALVVEQLQHQRDLLKDQIQQLKRAIQDHIDQHPDLKQPRDLMASIPGIGRLTAAKLLAECRPLTDFDDVRQLVAFAGLNPAHHQSGSSIRQKTVISKTGNSAIRAALYMPAVVAKRCNPILRVFAQRLLARGLCQMAVIAAVMRKLLHLVYGVLKSGKPFDPNFALAH

SEQ ID NO: 233377 - protein, 367 aa, unidentified
MEATERRGRWPSAPALGDVARPPSGYNRGRARDLRQRHARPNSRWIPIVRTRQVTVTKTICGVDVSKRRLDAHVVPSGAFASFDNDAVGIAKLGDFCRRHGVELVAMEATGGYERTAFLLLWEAGVACGMTNPKSVRHYAKAMGILEKTDRIDAAVIARFAVAKDLKPTEPPTASQQRLKALVARLRQVTDDLTVQKQRRSSAVNDEMTASIDQVIALLKRQTRTLEGQIASMIDDDPLWGHLNAALRSSKGVASRSVAWLLADLPEIGIYSNKAVVKLAGLAPLADDSGERTGLRHIRGGRRGIRSILFLVARIACRFDKSLADFHRKLIDAGKPKMVARIALARKFLVRLNAKARQAREQYALAT

SEQ ID NO: 233378 - protein, 424 aa, unidentified
MNLTQNDRLKQVTSDTLIVGVDVGSKTHFCRAFDWRGFELSRRVFKFSNTGMGFLTFLRWTEELMNKTEMKKVIVGCEPTGCYWLTFQKFLQDHDILLVTVNPFTVNRSMELDDNSPEKSDLKDPKTIALLVKDGRFSTSYLPSGVYAEIREASVCRDQIMKQHVRLSNQIQGWIQKFFPEYFECYADWDSTSGLMLLREAPLPQDILKIGAGGINQIWRNAKVRAAGIKRAQTLVEAAQNSVGLEAGEAARLEIWVLVNDYILKAEQLKRLDEYLEEKVKEVPNVEKLLAIKGVGMSTVIGFIAEVGDIGRFTDPKQIQKLAGMEIVKKSSGKKKGQPRISKRGRRKLRRTMYESVRALMTWSPAFQDVFLYYRNRTKNPLGGMQAKIAVACKAIRIFYVVLKTGCDFDEEKFRKDIIRPEAA

SEQ ID NO: 233379 - protein, 379 aa, unidentified
MLVYHNSGLLRPSAPLKTLGERNEKSRNQIRRNRLWKKTLEVIRIGDNSLHQRQQFSTTEIGISKLINWLNPNDVVGLEAGSQSFRIAKSILNKGVQVIVLNPGNLATIYQSLKKTDKEDSLKIARLIQRHPIEELPTVPIPNDEEEDNRRLCSEHENWTKQLTQGKNRLHSLFTQAGLTQITKKHLRTKANREISVALLPSRYQKEAERILKVLDLVEQNLKLIEEEIKEALKKNKAYAQTIMSMPGVGMITSLAIMSYMGNCKRFSSAKQAAYYVGLVPRVDISGDSAYYGRIVNRGCHSIRRVIVQAAWSLVRCQYGGKIKEFYQRLYPKKGAKKSIIATSRKMIEILYTMIKTGELFDSMPEKVLNRKLTQYGLM

SEQ ID NO: 233380 - protein, 367 aa, unidentified
MKKGSTRAAAQSRNISQQKLTIGLDLGDRNSWYCVVDESGQIQREQRVRTNGKALCEVFGAMPRSRIALEIGTHSPWISRRLSELGHEVIVANARKVRLIGESRTKDDRLDAQTLARLARIDPALLYPVKHRSVQAQADLTLIRARAGLVRARTGLVNTARGLAKSYGERLRSCNVRNLNPEKAESLSPGLQAALEPLLNAIESLSERIVEYNERLENLAQQSYPQVALLKQIKGVGTLIALTFLLTLEDPHRFRKSRDVGCYLGLQPGRRNSGQSEPQLHISKEGDPYLRTLLVQGAHHILGPFGVDCDLRRWGLKLAERGGGNGKKRAIVATARKLAVLLHHLWVSGEVYEPLHHSSRTTVAAAA

SEQ ID NO: 233381 - protein, 388 aa, unidentified
MEPVIGLDVSKGTSMLQAFTDRNTPCGGLISITHTQEGYERLGNLLEELKRITESEPVVVLEATGHYHRSLVAYLEREGYRHYIVNPLQSKRAKGMQLRKVKTDAVDAWHLAEMFYRGDVQPHRVWAEEMAELQHLTRQHEFMTSLLVQAKLNARSLLDQVCPAYERVFYNLFSSTSLRVLRQRLSGGTITVETIRETAGSSHGKAWLQEKAEQIQALPPLSQSSKAQQTALLCMVETILAQQEQLYQLENAIEKTALTLPEVELLKTIPGVGDKLAAAIAAEIGDAAQFEDPKQLVAYAGLDPGVHSSGKFTASSSRISKRGSKRLRRALYVAVQCGLRNGINERLKAYYDKKRKEGKPYKVVVIACANKLLHHVHAILVKGEPYKT

SEQ ID NO: 233382 - protein, 350 aa, unidentified
MSSRKTGQIAVIGIDIGKNSFHIVGLDKRGAIILRQKWSRSQVEARFANMPPCVIGMEACVGAHHFSRKLNRLGHDARLMPAKYVRAYSKGQKNDFRDAEAIAEAVQRPTMKFVATKTSEQLDLQALHRVRERLVSQRTGIINQIRAFLLERGIAVRQGQHFLRAELPRILGAPSAHLSPRMAQTIEDLAGDWRRLDGRIDGLSDDIEALARRDAGCARLMSVPGIGPIISSAMVAAIGAGEVFTKGRDFAAWLGLVPKQISTGDRTILGKISKRGNRYLRVLFVQAAWVVLVKPKIWERHGLKPWIEAAKKRLHHNVLAIALANKLARIAWSVLARDRNFEAGSIAVNA

SEQ ID NO: 233383 - protein, 351 aa, unidentified
MPMVVLGIDAHKRTHTVVAVDEVGRQLGVRVTKTTSTAAHLELVVWADRFGRERRWAVEDCRHLSRRLEADLLAAGEQIVRVPPKLMAHARDSARTYGKSDPIDALAVARAALREPGLPTARLDGPERELRLLTDHREDLVAERTRAINRLRWHLHELDPGWDPKPRSLASVKNITAVAVRLAAMEGMVAQIAADLTARISALTADITALAKQITARVRTLAPSLLELPGVAELTAAKIVAETAGVRRFKSKDAYARHNGTAPLPAWSGNPARHRLSRTGNRQLNCAIHRIAITQKRCHPPAQAYLTNRTANGDTPTEALRALKRRISDAVYRNLNTDAQSTPAAPLGQAA

SEQ ID NO: 233384 - protein, 480 aa, unidentified
MRIRETCRAGGVRLESELYMATIIRKKGKPRSNQSGFPGLRPNVAGIDVSSHQLHVCGPAETDDKRRLAVFETTTAGIEECAKWLHSLGVESIAMESTGVYWIAPFEILESHGFEVLLVDTRPLSRVPGRKTDVSDCEWIQSLHRCGLLQGCFRPAEAINRLRSVIRMKAVVNSSQADWQRRMQKCLDQMNVRVHHAVSDINGTTGMAIVRAIVEGQRDPHKLAELRDPRCRKSKDQIAAHLTGHWEEAHLFHLAACLRMFDTLAAELARYEKEISRRLCELTPPEAENKTAPPLPNPGKMKAMRTRGELEKRQELFRMAGADLTTIDGIGVETAEAIVSEYGIDLSKFATERQFVAHLQLAPRMAVSGGKPLPKGRRKTTGTRAGRALRMAATGLRRSPTALGAYYRRISRHKGGNVAVFSTARKLAVLVYRLLRWGHAYVDEGQQAYEARYQASRLRSLVATAEQFGMHLLPNNQLSD

SEQ ID NO: 233385 - protein, 552 aa, unidentified
MFSRSSGGFVRTTLFIRRSVMSEVIAIGGDVSKGRVDVVFLNQSGTVLSGSGAYDDTHAGHERLRTHLRALEEAHPAAEIRVAVESTGGYERNWLALFRDERRRGKRIDFWRLNPLAVKKWLDSDLHRSVTDAHAARGIAAYLLARRPSFSEAEPTPHQMLYRLVRSARADRGVLEQQLQLSLGQVHPELVQYCRRGCPQWLLTLLVTYPTAAKVAHATPERLAKIPYLTAERASALKARAITSVASFVGEAAELSVGLLVERITAVDATIERYTKPLLAALANDPRVAHLDSITGIGAWTATCLLLEIGDVTRFASCRQLIAWAGLDAHDDLSGDGVIRRGISKRGNAYVRALLYMPTVSATASNPVIKTFYQRLCARGKRSDVALVAAMAKILRIAYALLVRGVDFDPAYETNRAERNQRVRQPAPDQTIPSQTTPPATTDNDLTAPISSREAARRRRARTDQQKAAAPITPYTGSKSQKATGTDRNHSLPTDHERATDQSAPRLAGGRHADAIPPTKDASEGPLKGPKRCRPPASRGADDHTRKAGFVT

SEQ ID NO: 233386 - protein, 311 aa, unidentified
MNDTIGIDISKDTLDTYWLSKRKHKQFANNKSGLKELIRWVRQAEASLAVFEATGVYHRMLEVSLAAHDFPFARVNPRQARRFAEGTGTLAKTDRVDAAMLARMGSVLELPADKPKSEMLHNLKGMTTARQALIKDRTAARARLATATYPLLRKQATLRLHQVERDIAQIDAAIETIITSDKTLCEKAAILISIPGIAKVTAFAMLIEMPELGSLSGKQAASLAGLAPISRQSGKWQGKERIQCGRACLRRAIYLPAVVAARFNPDMKAKYHELIAKGKCKKLAITAVMRKLVVMANALLRDSRKWTETRA

SEQ ID NO: 233387 - protein, 317 aa, unidentified
MHSNPLIGIDVSKRWLDACSSGQANVERIDNSSKAITSWIGRAKPSLVALEPTGGYENVLCAILRRHGIRYVKLHPNAVLAFRKSRGVRAKTDRIDARLIAEYAADQQARGALRESVTQDETLRALIVRRRQLADSLKAERCRLEHADDKWVKRSLGAVIKALVKSFDGIETAIARHIEDNPQIRALARQLQTIHGIGPVTAATLLGDLPELGRLTGKQIASLVGLAPQTRESGQRKYRAAIGHGRPQVRQVPFNAARAAISHPSAMKEVFDRLIVRNGRPGKVALCAVMRKLLVIANAVARDHFSSLKSVESMPPS

SEQ ID NO: 233388 - protein, 369 aa, unidentified
MNAITYVGLDVHKTTVCAAIAESGRGGEVREVGVFENRPDVLRKMVARIGKHRRRLNFCYEAGPCGYGLHRLLTGLGHDCVVVAPSLIPMKVGDRVKTDRRDALMLAKLHRAGELTPIWIPDAAHEAMRDLVRARATAVRALSKARQHLQSFLLRHDRIYRGARAWTLAYRRWLTTVRFDHPAQQIVLQDYIHAVEDAESRRDRLTRQIEELLPNWSMAPVAAAVQAMRGVALVAAVTVVAEVGDFRRFTNARQLMAYLGLVPSEHSSGNTVRRAGITKAGNALARRVLIEGAWTYRMSARVSRKLHDRLEPLSAAIRDIAWKAQVRLCARYRRLVAIGKPKVVVTTAIAREMVGFIWAIARVAQPELI

SEQ ID NO: 233389 - protein, 382 aa, unidentified
MCVLGDDGAVLDRFDVEHRSRSLRQMCDRLHRWGVRRVAIERPDGPVVRALLEADLEVVVISPRQVRAFRLRHGTAGNKDDRFDAYVLADALRTDGHRIASLTADRDETRALRALVRARKDLIGHRIALANQLLANLQQAFPGAVGLFAQLDTQISLTFLGRFPTAEKASWLSERRLGAWLRSVGYSGRQTPAELMKHLSEAAVGLTGEAGRGCGIVTTQLVGSLREVRARIEELDRRIAEALALHPDGEIFRSLPRAGVNRAALLLAEIGDCRSRYPDESSLAAAAGVAPSMRASGKRRSVSFRRGCDKQLRAALTDFAQDSVLASPWARDIYDRARARGCRHPHAVRVLARAWVRVIWRCWTDGVPYDPALHGGLNRLAA

SEQ ID NO: 233390 - protein, 409 aa, unidentified
MERQIERGCGLDVHRDTVAACVRVPGAGGEREQHVRTFGTTAAELLRLRDWLGAHGVTHVAMESTGVYWKPVFYVLEDACTCLLVNAAHIKQVPGRKTDVLDCIWIAQLLEHGLLRGSFVPPVEIRELRDLTRHRKVLIQERQRAANRLHKQLQDAGIKLASVATDILGVSGRAMLEALVQGTTDPEVLADLARGKLRKKLADLRQVLAGRFRPHHAFLIGQLLAHVDYLDEAITTVSGEVAAHLAPFARHVTQLDTVPGIARRTAEVILAEIGVDMTRFPSDRHLASWAGLCPGNHESAGKHKTGKTRKGNQWLRMALIEAALAAIRTKDSALAARYRRVMRHRGHKKAVVAVAHAILRAIYHILRDDTPYRELGLDYYDRRHAHRVTRRAVELLERQGDRVVLEPAA

SEQ ID NO: 233391 - protein, 412 aa, unidentified
MQDILTCAMGLDIHRDVIVACLAKGELGTDPEIEIRSFSTLIPEMRKLRDWVLEAECRYVAMESTGIYWQPIYEMLEPCFDGQISILVVNARHMKNVPGRKTDMRDAQWIATLLRAGLLKGSFIPDKTFRELRHLTQYRKSIVRDITAQKNRIDKFLQSSGFRFTAFLSDAFGASGRNIIRHLMEYGNISREALGRCLKTQTRKRIDEILIALNGSLSEHQRGFLRMIFGHLEALEQHRHTVEDAITKEITKHEEALSLLCSIPGIDVTAAAAIIAEIGTDMSAFPDSQHICSWAGLSPGNNESAGKRKSAHINKGNPYLKSMLCEVGWVISGKRSLYLSGWYWRIKQRKGAKRATIALARKLLALIYTMLKTGSPYNEDCFEIRRKQSERKRASRMVNELQKLGYFVVAPG

SEQ ID NO: 233392 - protein, 354 aa, unidentified
MIIIGVDFHPEFQQIASVDTDTGEFQEKRLTHCEEAEKFYRAVAASGQKVRVGMEASGHARWFERLLAELQIELWIGDAAEIRAKRVRKQKTDRQDAQLILRLLLEDRFPQIWVPSWKNRDLRQLLWHRHRMVQARTRIMNQLQAVALNEGLRCKKRLWRERGRQQLESFRLAPWASRRRRDLLELLDRLNPTIAELSLTIEQEVEKCPEAQRLMTHPGVGPLTALAFVLIIGEANRFQCGKQVASYLGLGPLEDSSGNRRRLGHITKQGSSMLRFLLVEAAQVTARSLPQWRSKYLHLMMRRGRKTAKVAMARRLAVRLYWMMRQGWDYQQWSKFGSHAGQPGNRDGVPSNTE

SEQ ID NO: 233393 - protein, 415 aa, unidentified
MEVLFSRCCGLDVHKSTITACVRIQDVGAKPRKIVRRFGAMTGDLRALANWLIEQGVTHVAMESTGVYWKPVWNILEGQFTLVLANAQHVKNVPGRKTDTKDSEWLAELLQHGLLAGSFVPPRLIRDLRDLTRTRAVLTQESSRLASRIQKVLEDANIKLASVASDTLGKSGQAMLEALIAGQDDPEQLADLALGTLRGKIPQLRRALEGLIREHHRFLLKRLLAQWRFVESETELIDQRLEQIGREEAPIAEAVARWDTVPGVDRIAAWGLVAEMGIDMEQFPSAKHAASWGGVCPGNHESAGKRLGGRTRKGNPWLRRILGQSAWAAARTKNTYVAVQFRRLAAKRGRKRAIVAVGHNLLVSGYYLLRKQCFYQDLGADYFDRLNAEGLKRYLVKRLESLGEKVTLEPRERIA

SEQ ID NO: 233394 - protein, 412 aa, unidentified
MEPIYTSCCGLDVHKKSIQACVRRVGKDGKIQQELRPFGTMTQDIRDLADWLSQEEVTHVAMESTGIYWKPIYNILEGRFNILLVNARHIKNVPGRKTDVKDCQWIAHLLQSGLLKGSFIPDRVQREFRDLTRHRAKLVDQRAAVVNRVHKVLEDANIKLGAVATDIMGKSGKDMIRALIRGENDSIEIAELARRQLRGKIPQLRLALEGHVTDHHRFMLDKLMDQLDYLDRQIDEFSQRIDEVSRPFAEAIEEVGRLPGFEKRAAENTIAEIGCNMDQFPSADHLSSWAGICPGSNESAGKRKSGKTTKGSKWLRATLAQAAWAASKKKNSYFRAQYGRLSGRRGKKRAVIAVAHSLLTAIYYVLRDHIDYKDLGQDYFDKLNSKRLVPYLVNRLKNLGYQVILAPLESAA

SEQ ID NO: 233395 - protein, 342 aa, unidentified
MIASTIGLDLAKHNFHVHAVGVDGAVIKTATLRRSEMIKFFMAARPCLVGIEACATAHYWARELKKLGHEVRLIPPSYVKPFVRRGAKNDAADAAAICEAVRRPDMRFVPIKSEANQSFLMLHRARGLLVRQRTMTVCAIRAHLAEFGIIFGQGRQRIETILPMIDGIAASLPEHARFALNALIASVGELNKQIDGIETKLTEIGRSDLISSVLSSIPGVGPITSTAIAATIPDARMFRSGREFAAWLGLTPRQSSSGGTTRLGGITKQGDAYLRHLLVIGARNIVRYPKARAKVGGAWIDALLQRRRPMIVAVAVANKLARIIWAMMTSGEMFREAEARTA

SEQ ID NO: 233396 - protein, 352 aa, unidentified
MLKYSLGMDASKKDIHVCLSVIDSKQQVKVKASSKFANSSRGFKDLLVWLNRHKKETDIPLVNVIEATGVYYEACALFLFKAGLDVAVVLPNKAKKYLQALGLRSKNDQIDAAGLARMGAEQCLELWQPMDEFFFTLRAMTRHHQTLQELRTSIHNQIHADEHSIYSIKSITKQHKKLKATIEKQLEEIEQSIHDHLYSDAEVAEKINHITDIKGLGYMTVAAVLAETNGFVLFKSIAQLIKYAGYDVIEDQSGDRTGKTKISKKGNRRIRRALHMPAFNMIRYEVGNFKPFFERILEKHHLKMKAYVAVQKKLLVLIYTLWKKNEAFRPNAKADTSGNEDTVSSFALAKMK

SEQ ID NO: 233397 - protein, 302 aa, unidentified
MRQSTDRLQVDNTAAGHAELWRWLRQHGVKRVGIEASGGYEQEVVRELRRKGIVVVVFQPAQVRAYAKFLLQLAKNDNIDAALIAECTAAVKKIHPPPDPRLAPFAEHQTMIEQLSEDVACRKTRLESCREQYIRCLWKAEIARLQKLQRLELKQLVAAIRQHPDLAERLDLIASVGSVGLPTAVAILVRVPEIGQLTRQQVAALAGLAPFDDDSGDHSNQRHIRGGRERLRKALYCATLPAIFRGWNPQLTALYKRLTAKGKLHKVARIACARKLLIYVNTVVARGTPWLQAPTPAALSRR

SEQ ID NO: 233398 - protein, 335 aa, unidentified
MQIYGIDLAKEKFDVSFFDLTSKKVSNQPSHKVVKNNFKSIGRFLETLPSDAVLVAEHTGVYGDTLLKCCMDSNVKIAFVGGYVIHRYRATPDRAKTDVLDCALLRDFGERYPDKLKYKTFPEEALYELRQLARHREMLVEQRKQLITADKSEDCRPIRSLAVKRSMDRIKEMLDTEIAETEKEMLKVINGHESIHHNYELVKSVDGVGLITAVELLVKTENFTKITTARQYAAYAGTAPYEKSSGKMDKGAHISKIGNRRSKTLLYICAESARLHNKEIKLYYERRTLIDKKPRHYVLNAIANKLLRIIFTLVEKGEYYDANFIRQDPRVVKYN

SEQ ID NO: 233399 - protein, 347 aa, unidentified
MLHAGLDLSRKKLDVCLLSDDGEHLDQLAVPPDVDSLRTLARRIEEVHREPVCAVIESMTGARIVHDTLEACGWSVEIADAQKVKGLAPLACKTDKIDSKVLAILSHRDLVPAIWLPDPRVREERELARFRLHLVKHKSALKNRIHSTLINFGKPCPVTDLFGVAGRRLLERLQVPEPWRGNVTASVELIDDLERQIDEINTRLKDGHADHPYIPLLMSAPGIGWVLAFTIAAEIGEIERFPSPEKLTGYTGLCPRVNQSGDKDRRGPLTKHGPTYLRWAMLEATMHALKHPVYSKRYQRNKKRLGKQRGAKVAQIDIARRLTHAIWHMLSRKQQFAPRGAAFRLAA

SEQ ID NO: 233400 - protein, 337 aa, unidentified
MFYLGVDVSKAKLDCCLLKEGTPEKRKSKVVANSVSGVADLLRWLSKQGAQADQTHALLEGTGVYHETSATALHDSGVSVSILNPAQVRDFGKGLGLRTKTDAVDSWLLARFGLLQQPAPWQPPPAHVRQLRALLARRQALLEDLQREHNRQEKAQATETPQRIHQSLQESIAFLERQLAQLQKDIDHHIDKHPDLKQDLNLLQSIPAVGPQVGSHLLCVMRSSSFRCAEQLAAYLGVVPVERQSGTSVLGRARLSKAGPARIRALLYMSAVVGIRYNRHVKALYERLLAKGKCKMAALGAAMRKIVHLCFGVLKNRAPYRENFVPNASGVFRPERT

SEQ ID NO: 233401 - protein, 341 aa, unidentified
MKNLFIGVDFSKEKVDVAIIFADGLTETAPRVFNEFKTTVSGYKQLVKWVEQNSCGIDSSLWLFCGENTGDYSKGLCNFIYGKGYDMWLENAKSIKDASGLRRLKSDRADASMIAEYAMRNYDKSIMYEPLSESLAQLRELFLYRQMVVRHRCSFQVRRGEKRLTMEKSPIKTMISQSGRHIVSELNKEIEKIDKRIAELIKSDEELTEVFTIVTSVPGIGTQNAVCLMVYTDNFRRFNYDSRKIACYYGIAPFGKDSGTSVHSDPHVHYMANRQIKAMLTQAALAAVNFNPVMARYYMRLVERGKKKQVALNNVKNKLVHLVTAMVRNRQTFTPEYKISA

SEQ ID NO: 233402 - protein, 348 aa, unidentified
MDIIKQAVGIDVSQKELVVCLGRMDAEFNLELYAFKVFKNTEHGQKSLLIWVKKHTLESVNLRFVMEATGVYHESFAYFLDEKGYDLSVVLPNKISNYIRSLNLNTKTDKSDSKAIAMFGLERKLDKWHRPKKIFREMKQLTRERDQVINERTMVKNQTHAEKTEARPNKSSLERLKERLLLLNKQEKEIKKEIEELIKEDKELNEIVKKICTTPGIGLITVSVVLAETNGFELVKNKKQIVSYAGFDVRERQSGTSIKGKARISKRGNKNIRKAMYFPGWTAIRHDERFKTIFSRHISKHGIKMKAGVVIQRKLLEMIYTIYKTGIPYDKDYLQKQELEIKEEIENI

SEQ ID NO: 233403 - protein, 340 aa, unidentified
MKLIRVGVDLAKSVFQVHGVDRSERTTWRRRLRREDWIDMLRERLEPGGEVGREACGGAHHWARELQKLGYRVKLIAPQFVKPYVKSNKHDAADAEAICEAMGRPGMRFVPVKTVEQQDIQAIHRVRASLVEQRSAKANQIRGLVAEYGLVAPRELLHLRRALRRWLEDEGNGLTMRFRRLLRGLQDELISLDERIAELDREIEEIAKSEPAAKRLMQLRGVGPIIATAMLATVGDARQFRNGRQMSASIGLTPKQHSSGGKERMLGISKRGDAYLRSLLIHGARAVIRTARTKDDPLSKWLIRIADRRHPNVAAAALANKTTRVAWAMLSRGTNYQPAT

SEQ ID NO: 233404 - protein, 400 aa, unidentified
MISVGIDVSKGKSTVCILKPYGEIVSKPFNITHTQKDLSELSSMLFRLNDEVKIVMEATGIYHLPVLTYLQEKGFFVSVINPYLMKSYRNESLRKAKTDKIDSRIIANYGIDHWFKMKEFQTSGEIYEELKLLGQQYRHYMKLHLLSLAELTHLLDLTMPGIKNLLASWNETNRKDKRSDFVERFWHYDVITSMSEQKFTEEYILWAKEKKYVPSQEKAKVIYTLAQESIPTLPSETSSVKILVTEAVRVLKEVDATLGLILSRMQEIAKTLPEYSVVREMGGVGNTLAPKLIAEIGDVRRFRNGNALVAFAGIDPPPYESGQFVGCNRKISKRGSASLRKVGYETMRSLKMRSRPEDPVYRYVVKKESEGKSKKSAKIAGLNKFLRIYYARVTELYKNI

SEQ ID NO: 233405 - protein, 316 aa, unidentified
MTASLLFAGIDVAKATLDIAVRPSAQTWQVIYDDVHVEALVTQLNDLSPTLIVVEATGGLERPLVVALLTAGLPVVVINPRLARDFAKATGHLAKTDRIDAQVLAHYGEAIRPSCRPLPDADTQQLRAMVDRRRQLVDMMTAEQSRLSTAPARIHDAIVSHLTWLRQQLASLDNDLDEMLQASPIWRERDDILQSTPGVGPVLSRTLMSQLPELGDLNRKEIAALVGVAPFNCDSGAWQGRRTIWGGRAAVRSVLYMSTLVATRHNPVIREFYERLLAAGKAKKVALTACMRKLLTILNAMVKNQQRWQPKVAKSM

SEQ ID NO: 233406 - protein, 316 aa, unidentified
MGHAARFVGIDVAKDRVDVKVRPSGEQWSVATDPAGLAELQERLAAVAPMCIALEATGGYEVPVVAALGSVSLPVVVLNPRQVRDFAKAVGRLAKTDRLDADVLAHFAEVVRPPQRPLPDELTQTLHAWLTRRRQLVEMLTAEDNRRRLAARPIQEHIAAHVRWLRTQLATLDRDLGQLVRQSPVWREKEDLLRSVPGVGPVLTVTLLADLPELGRLNRRQIAALVGVAPLNRDSGRYRGRRAVWGGRAPVRATLYMATLVATRANPVIRAFYARLLAAGKPKKLALTACMRKLLTILNAMLTQRTSWIAPATARA

SEQ ID NO: 233407 - protein, 386 aa, unidentified
MQKLNDLSRSLTAFEPDGTLIAVIEMSLSSWLIGGILPGVERQPLKKLAVDESALLKLLHRWREEAEKAGHRIERIVVAFEAGRDGFWLARWLKARSIEAYVIHAASVAVSREHRRAKTDRLDSELLKRAFLGWLRGERDHCKMVAIPSIMDEDAKRPNRERESLIGEQSRIVNRMKAALIRLGIRGFNPKLKRAAGRLDGLHTPEGEPIPPNTLAELRRDMERRRLVSNQIRRIEQARLQRLEQEPDDGPHAMVRLLARVIGVGIETADMLVREVLSRNMRDRRAVARYAGLTGSPDESGRKCREKGLARSGNARVRRGMIQLAWRLLMFQKNSALAQWFRARTENARGTRKTMIVALARKLLIALWRLVHEGVVPDGIVLRPAQ

SEQ ID NO: 233408 - protein, 337 aa, unidentified
MDYFAGLDISMDETHICVVDRDGSVVYEDKSASTAEAIANELAKAPSCCRIVFETGRMAPILFHGLSELGLPVVCVESRQAYQALKSLATHKTDRNDARGLAHLSRTGFFKPVHVKSLSAHAVRSLIIARKKLVGQRVTLENQIRGLAVVFGVRLPRALTAAFIDQALKASEGVAGLSAAMRGLSAARTAVMTAVAAIDADIRRMTKASEACRRLMTIPGVGQLTALAFVAAIDDPYRIRRSRDVGAYLGLVPKRHQSGEVDYVGGISKCGDRRVRTLLYEAANVMLTRYKGQLKLKDWAFGIAKRLSMRKVRIALARRLAIIMHSMLRDGTEFVAA

SEQ ID NO: 233409 - protein, 343 aa, unidentified
MEYYVGLDVSLKQTSICIVDQAGLVVREGVVDSDPEAISVYVKSKAPDAVRIGLETGPTSTWLWTELKRLGLPVICIDARHAKAVLKMQINKSDRNDAIGIARIMQTGWFKEVHVKDIDSHSVRALLASRALLVKIKRDLENHVRGLLKNLGLVIGRAKFNVFAVRVDELIEGRPELVAAVRPLLEARNAVEQQVSELDRKVMRLARHDAHVRRFMTVPGVGPITALAFKATIDDPARFARSRSVGAYVGLTSRRHASGEVDWSGRISKCGDAMLRSYLFEAAGVLLTRVPKWSAVKAWGVRLAKRNGLRKAKVAVARKLAVILHRMWIDGTEFNWSKKEIAA

SEQ ID NO: 233410 - protein, 426 aa, unidentified
MDQISAKLVKEQPSYAFSVGIDWADESHALCQRRWADGQRQDFKIPADPVSVQAWLTELKVQAGPQGRVLVGFEQSRSALFEMLRAQGDWLELYPLNPLTVSRYRKALFTSGAKDDPLDGQLIEELIYHHRDRFRPYEAPEPELRKLELLCQQRRKAVDMTTACENELRSTLKVFYPLALELHEELGCTLTLHFLKRWPTLQLLKKAKPESLRSFYYQHQSRSRTLIQQRLEKIASAQAVTEDAALIEPMVLTLRRLVKQLLDLQASVRTFDKAIKELFSRHPAHHLFESLPGAGAQLAPRILAAFGCQSQADCSQMQKKTGIAPIVDRSGQSSQVRRRYCRNKFLGQTFFEFAGCSIPHCSWAKAFYTQARARGKTHNVAVRALAFKWIRVIAALWRQQIPYDENRYLEALRSRRSPLGKIIPFS

SEQ ID NO: 233411 - protein, 371 aa, unidentified
MDAPTCDGIYVPEWKCQQPLKPEGTSTMQITTIGIDLAKNVFQIHGADQNGKAVLRKQLRRDQVAPFFANLQPCLIGIEACSSAHHWARKLQAFGHTVRLMAPQFVKPYVKSNKNDVADAEAICEAVGRPTMRFVPIKNAEQQSVLSLHRVRQAFVKARTAQANQIRGLLAEYGMVVPKGIGFIASRVPDLIEDASNELPGLFRRLVDRLLEHLKLLDKQIDEIEAQIKAWHRDDETSQKLQKVPGIGPITASALAATVGDAKNFDNGRQLAAWLGLVPRQNSSGGKQTLLGMSKRGDAYLRTLLIHGARSVLYRASQKNDPESWLVKLTTRRNANIAAVALANKTARIVWALLAHDREFRPDYTAAAAAA

SEQ ID NO: 233412 - protein, 388 aa, unidentified
MNVGADKSQPSTAIHTDLGAIFVSLELSRSSWLITSLSPGGGEKMSKHSVRGGDFAGLMERFAQLQEKARLRTGQSFRIIVVQEAGLDGFWIHRALQNEGIESHVVDAASIATSRRRRRAKTDKIDGETLVRALLAYKRGEPRVCAMVKAPTPGEEDRRHLCRERKALTAERVRHVNRIKGLLFSQGISGYQPLRRDRRQRLEELQTGDGRAFPQHLKALVNRELDRLELLLKQIKTVEAARDALLAVGQTAKPAPAAMLLDIRGIGPEFAAILWSEGLFRHFENRRQIAAYAGLAPTPWQSGAVDREQGVSKAGNPRLRTTLIQLAWLWLRNQPRSALSVWFHERVSRNGGRLRKTTIVALARKLLVALWKYVTAGVVIEGVTMKVA

SEQ ID NO: 233413 - protein, 366 aa, unidentified
MAITHVALDDSKRVIVAGILRADASEPDVREIPNDPRQIRRLFERLLREGPVRACYEAGVSGYDLYRQLVALGVDCVVIAPALTPRRPGERVKTDRRDAIKLVRLFRAGELTAIHVPTEAEESVRDLTRCRDDIRAEIVRWRHRVLKFLARHGRVYQAGRNWSQRHWDWIRAQQFVDPTLAYTLSVSLDALEQALRRRSDLDRAIEALAETTPYQPAVGALRCFRGLNTLSAMILIAEVVDFQRFGRPRQLMGYLGLVPSEYSSGDHHRRGSLTKAGNTHARRVLIEAAWHYRHRPAVSARLAQCTAGQPAAIVAEAWRAQQRLHRRYRHLVGHGKRPTVAVTAVARELAGFVWAAMTRTPPGMAA

SEQ ID NO: 233414 - protein, 451 aa, unidentified
MSQGNNGLSRGDRNRNARLAALRAAVPRDHAVLGIDLAQSRQAAVLADHDSRVIARWRPRCSPWKLGELLERALRKALAAGFSGVTVACEPTGHRWMVIAQLAAERNIAMVCVQPLVVARAREAEDYTRGKSDDRDAVLIARLAGQLHCYLPEQADQGWARLRHLGARRARLTEDSTACRQQLRDLLEVAWPAVLATAADPLESATWLACVQVALARCDGDLAAVHALGQDAFTAAARAALGAFGAKRICPRIAAAVYAALAGPAGVAAQRHGALERGFQVLGDWQATRGELAEVNARMLGCLGAMGLAEVAGSIPGVSALQVAAILAESGDPSRFRTSRAMVKHAGLAPCENSSGNHAGEACISRRGRPALRLAAWRAVWAALRHNPVYAARHAELTGRANDPLTDQQARAAIAAALIRQIHAIITRRVPWDAGIAAGRRRPGQEVTAAA

SEQ ID NO: 233415 - protein, 341 aa, unidentified
MDKISTIGLDLAKGVFQIHCIDPAGEVVARRQLRRGEVLRYFSKLGPCVVGMEACASSHYWARELTALGHDVRLIPPAYVKPYVKRGRKNDVTDAAAICEAMASKGMTFVPIKTVEQQAALMLHRARRLLVTQRTMLSNALRSHFAEFGIIDAQGMAGLNRLIVLALDAPDASLPQAAREALAMLASHLRDIETKITALDREILAQHKADKDSQRVASIPGIGPMTASALVAAIGDPKRFKTGRDFAAWLGLVPSQHSSGGKTQLGSITKMGDRYLRSLLVLGATGTLRRQTAGSGPWAKALLDRMSARQATVAIANKMARIAWAILAHGGIYKEPVAQTA

SEQ ID NO: 233416 - protein, 339 aa, unidentified
MNEVSTVGVDLAKNVIQIHGVDCDGNVVVRRQLRRGQFLTFFEERPACLIGIEACSGSHHWGRQRQEMGHAVRLMPPSYVKPYVKRNKTDAADAEAICEAVTRPSMRFVPVKSEADSAALVLHRARDFLVGQVTQTGNAIRAHMAEFGIVTAKGSKRVASLAEELDALPEAARLPLRVLFDQLAETQSRIEQLTDEIKEVHRHNEVSRRLASIPGVGVLTATAIAATTPDVSNFGSARDYAAWLGLTPKQHSTGGKPRSGGISKMGNRYIRRLLYLGAMAQIMVRRRSRHMGTDWLSRKLATKETRVVAIALARRMARTIFALLRDGTSYRPQVGEVPG

SEQ ID NO: 233417 - protein, 345 aa, unidentified
MEEKMKHFVGLDVSMKETAVCVVDDHGQRIWEGSVASSADAIAMIIRQKAPDLVRAGMETGPQAVWLWHALRERGVAVDCIHARRAAAALKLQANKTDRNDAFGLARLVHSGWYEPVAIKSFDRYRMRAVLTARERIVRMSTTMINQIRGLAKTFGLTLSAGKGQVFEQSVRRALPSDAVLRDLFESLLTVLSGLKDQRRAFDRQLARFAREDEACRVVSSAPGVGNLTAIAFVTSVDDPARFRSSCDVGAYLGLTPRRYQSGEVDIGGRISKAGDRLTRKLLFEAATVILYRASPSIALKQWGLRISARSGSWKARVALARKLAVTLLTMWKTNTMFENRSFAG

SEQ ID NO: 233418 - protein, 442 aa, unidentified
MQTLNDLSRSLTALEPDGTLIAVIEMSLSSWLVAGIVPGVERQPLKKLAVDESTLLKLLYRWREEAEQAGRRIERIVVAFEAGRDGFWLARWLKACGIEAYVIHASSIAVSREHRRAKTDRLDTELLKRSFLGWLRGERDHCKMVAIPTIKDEDAKRPNRERDSLIRERSRIVNRMKAALVRLGIRGFNPKLKRASTRLDGLRTPEGEPIPPNALAELRRDMERRRLVNNQIRQIEEERLKRIDQAPCDGPNIMVRLLARVMGVGIETADMLVHEVLSRNMRDRRAVARYAGLTGSPDESGRKRREKGLARSGNTRVRRGMIQLAWRFLLHQKNSALTKWYRSRTENARGTRKPMIVGSSTALTALKSDFRSTPKTEHRRAGRPCGFRAMSGNERPREQSRSLPTIPPLLTCIAVRSSDHIRLRRTAHFCPIGPTTRSRKSQ

SEQ ID NO: 233419 - protein, 329 aa, unidentified
MQSEVHVGIDVSKFTLDVFILEVRSHRRFKNNSNDFPTILQWIEKCTKRQSAFICFEHTGVYSMALAAFLESQHIVFAMVSPLEIKRSMGIVRGKNDVVDSKRIAEYASRFRDKIVVTKLPAKDITRLHFLLTLRDKTARTLSGYIMAVNEVQRGIGHEELPELFASYDAIITALKSEIKKIEAAIKHIINTNPDLKTSFKLITSLKGVSLIVGTYMIVYTCNFTKFATWRKFACYCGIAPFGHQSGTSVKGPAQVSPIANKQLKRLLHLAAVSAASHDPELREYYIRRQSEGKSKMSTLNIIRNKIVARAFAIVKRGTPYVNVRQYAA

SEQ ID NO: 233420 - protein, 392 aa, unidentified
MSQHCHFDASRSLTALEQDSTIIAVIEMSQTKWLVAALIPGVERQPLKKFDAHEETLLKLLHRWRREAGHAGRNIKRIVVAFEAGRDGFWLARWLRARDIEVYVIHPTSIAVSREHRRAKTDRLDTELLMRVFLGWLRGERRHCSMVAIPTIEEEDARRPNRERQTLVTEQTRIINQMKAIFARFGIRTLRPTMRKVAEKLEDLRTAEGTPLPQNTLAELRRHLARLRIVRDQIRAVEQERLRKLAVAPAAEKKSPHAMVRLIARVLGVGVETADMLVNEIFSRHWRDRKAVARYAGLTGSPDESGSRRRERGLARAGNVRVRSGMIQLAWRFVRFQKNSALAQWFAARTADGRASTRKTMIVALARKLLIALWRLVTRGEVPQGVALRPAS

SEQ ID NO: 233421 - protein, 411 aa, unidentified
MHHRQNYLYVGVDLHKEHHTAVMINCWQEKLGEIQFENKPSAFSKFLLEVETYVSDGLSVVFGLEDVGGYGRALAKYLVDHERVVKEVNPALSFLERKSQVMIQKNDSWDAECVARILVNKFEQLPDAKPNDLFWSIQQLVSRRNALVKAQSALKNQLHIQLSHHYPNYKKFFSELDGKTALAFWQQYPSPSCLEGTNIKQLTAFLLDVSNNTCSVKKASDILKLVKEDGQTMKEYQEMRNFLVRSIVREIEFKKKEMKYIERELKQLVNLLDYQLETMPGIELVTASALIAEIGDVRQFPNANKLARFAGIAPVYFGSGGKGKTHKSKQGNRALHALFYNLAVQQMQVAKGSKMPRNPVFHAYYQKKLKEGKTKGQALVCIMRRLVNIVYGMMKYKTAYELPIVEEKEVV

SEQ ID NO: 233422 - protein, 325 aa, unidentified
MTKASVGIDVSKNKLDVALLLSTMKVRKKTFPNDLTGFQNLYLWVQHHHKGGFHFCTEFTGVYDEAVSEFLYDKGQLVSRVNVMVIKSFARLMLARTKTDKKDAFVIAQYCKTHDPKPWKPDPAHLKILRDLSRTLESLKEVRQDLLNRLEKYQNQESPAKRAWQDCVKDMDKRIKEVEKQLKDHIKNHPDLKEKVSLLETIPGIGETTARTLLAEIPDIENFKSARQLAAFAGLNPCQRQSGSSVNGRSRLSKVGSKRLRKALYMPAIVATSYNPIIMKFTNTLLNRGKCKMSAIGAAMRKLLHIVFGVLKSQQTFCEKKCLKI

SEQ ID NO: 233423 - protein, 463 aa, unidentified
MERHARPRPPRRARPSLARRYPDAAGLDCGAAAHVVAVPPDRDAESVRTFATFTGDLHRLAAWLTACRITHVAMESTGVYWIPVFDILEAHGFQVLLVNARHIRHVPGRKSDVADCEWLRDLHIHGLLRGSFRPSAAIVALRTYLRHRATLIELAATQVQRMQKALVQMNLLLPRVVSDIAGATGLRILRAIVAGERDPATLARHRDYRCHATEAEIVAALTGHYRPELVFTLQQHLELFDSCQRQLAGCDHAIEAQLAQLAATVPVPAAPLPAPRGRVTPRDNDPRFDVRTPLYRLTGTDLSQLDGIGPANALRLIAEIGTDMTRWPTAGHFTSWLALAPHNKISGGRLLSSRTVPSANRAAATLRLAAVNLGRTQTALGAFYRRLAYRVGKAKAVTATARKLAILVYRTLKEGLVYRDPGADAYDRAHRAAVVRRLRQRAVSLGFELVNTTTGEVTGGTVS

SEQ ID NO: 233424 - protein, 337 aa, unidentified
MTEITTVGVDLAKSVFQVHAVDGEGAVVLRRQFRRSQMLEFFQRLAPCLIGMEACAGAHHWGRELGRLGHNVRLMPPSYVKPYVRRGKTDHADAEAICEAVTRPSMRFVPVKSEEIQALLMTHKAREFLVRQLTQVTNAIRAHLGEFGIVAPKGIHNVSRLLEAGERAKLPACARAPLRLLADQFFETRDRIDQLTKIIRLEAASSDTAKRLQTIPGIGPITATALAATLPDVTGFRSSRDLSAWLGLTPKPHSSGGREKLGRISKMGNRYLRRLLYLGAMGVITSRRRGQPGEDWLWRLLQRKTAKQAAIALANRMARIVWALLRNGTEYRGARAA

SEQ ID NO: 233425 - protein, 488 aa, unidentified
MAAGKKKDTDVTGSAAGGPAAVAAVAAGDGGDGAEVSEDQVRVIERAAAIDVAKGSGMVCTRVPGSRPDRRRQKVWPVTATYREVIALMDHLRCEGIQRLVLESTSDYWRLWYYLAEAAGLEVWLVNARDVKHLPGRGKSDRADCVWLCKLNERGMLRRSFVPPQAVRDLRALTRTRARLAQDQARHQARVEKILEDALLKISVVISDLFGASGRRFLDALVAGERSPAALAALGDPRLKATRRELEEALTGKFRDIHAFEIKTHLRILDVINEETARLDQAIGEQLALVPRTAPACTACGVADGGHAPGCAAAGTPLLSLAERIDEITGVGECNARVFIAELGTDPSQFPTPGHAAAWARLTARTLQSGQSARPGRTGKGNPYLRGALGQCAMAAAHTDTRLGAMYRRIARKRGKQKAIVAVARVICEITWILICDPGARFEELGPDYYTPRSPARRTRDKIREIERLNPGKKVILAPIDAGADTAA

SEQ ID NO: 233426 - protein, 325 aa, unidentified
MLVSGGSWVGIDVSKHWLDVCVTSQGSPFRVTNDHTGVTRILQELCKQPVAGIVFEHTGQYSEPLWRWLRDAHVHPSLVHPNHISNYRKSGFGRAKTDRSDARLLAVFGEERHPRITLCRTATEQALHDLLHARRGVVNARIAAKHRMRASWSPALMQIHRDFMVSVTRQIQLLEHEIARTIASDPRTQYRDELLQSVKGIGLIRSALLIADLPELGTIDRKKIAMLVGLAPIAKDSGQASKPRYTAGGRSLIRSELVMVARTPRAELAIRAHRAPLLLRHEQKVKSDTATARWLLTALNAMIRDGLRWEELECTRNAAEEVQTT

SEQ ID NO: 233427 - protein, 409 aa, unidentified
MKTNQEVLYLGLDVHAENIAVALAEAGRDGEVRNYGEIPNTFHSVEKLLRKLGHPDKELRVCYEAGPCGFVLARFLKKKGIACDVIAPSLTPKGSGDKIKTDRRDARMLARLHRAGELTAVHVPDERDEAIRDLCRARTDAVQDQRSARHQLKAFLLRNGYRYGEKSSWTAAHMRYLRELILPHPAMKIVLEEYLQCIDATAERIDRLEVHMQALLDEWHLKPVVLALMGFKGYQIVAAMITVSEIGDIHRFPHPRQLMAYLGLVPSESSSGGSRAQGTITKCGNGHLRWIFNECAQHYRLPPKVSQELTTRQEAIPKTHRRQVIEISWRCQNRLHERGRKLAARGKTRQKAQIAMARELAAFVWEVMRAVMPKADGTQATSTARPAKATENAKPAVKKKGREYILKTK

SEQ ID NO: 233428 - protein, 399 aa, unidentified
MDVLHPKCAGLDVHQQTVVACARTGAGKAVTYDVRTFGTTTAELLALSDWLTAHGCTHVAMESSGVYWKPVWHVLEGHFELVLANARHIRNIPGRKSDVNDAPWIADLLAHGLIRGSFVPPEPIQELRDLTRTRQQLVREIAQHTLRIQKTLENANINLTAVLADVLGSSGRAILRALARGERDPERLAELASDRVKASRAELVAALHGRVTPHHRFMLTLHLTQIEALEAAVREVEARLGDALAPFRAALDRLITMPGVSETVARVIVAEIGFDMTRFPSAGHLVSWAGLCPRLHESAGKRLSNRTRSSNPWLTAAARKKDSYCRAQFLRIKSRRGPKKAVLAVAASMLTAAYYMLKHGVDYRDLGADHFDRRDKAKLAKRLIARLHDLGLTVEVRAA

SEQ ID NO: 233429 - protein, 434 aa, unidentified
MTDSHSTATPRILVAIDVAKAKHDILVELPDGRRKKMIVRNRREEFQQLAAYLKSLDGTCEIALEPTADYHRCLAYFLGTQGFEVRLVSSIAVARTREALHNSWDKNDPKDAQVILHLLRNRTTQRFYDPVLEQTNDLQELSKTHHQVSLRKTRLQHSLMNHYLPLYFPEAERFLCTTRAGWFARLLIAFPTPASIIALPEAEFVVTAAKMLRTKHSKESVLRSFYAKAKESVGIPVILESQAVTTFRLLLGDHLELCHKREELERTAHELLKGRADYQILRSVPGIGPIIALTVLAEAGDLRRFGHERQFLKFCGLDLSTAQSGAYRGRSQLSKRGNARLRAALWMAATVASRMTENTVRQKFDRYVASDPTNADLKRKAYTACTAKMARTIYGLIKHQQLYRAYHEDAVPEPGGRTRSHGPLRHAAPAAMTS

SEQ ID NO: 233430 - protein, 347 aa, unidentified
MKFYNKSHPYYCGIDLHARSLYVCIIDQNGEVCLHKEIPASPDRLNALLEPYLGQVVVGVECMHCWYWVSDFCEETGVDFILGHALYMKAIHGGKAKNDRIDSFKIANLIRGGNFPLAYVYPKAMRATRDLLRRRIKMVRLGANLKAHVSNTTSQYNLPANNVNLKNVCAREQVRKAFPDPVVQKNIDLDLAMIESYASELDKVERYIEKQAREHNPTALHLLRTVSGIGKILALTILYEIGDIRRFETVQDFASYSRLVKCKAESAGKSYGTSGNKIGNAHLKWAFSEAAVLYLRGNDKAKRYLQKLQRRMSKAKALSALAHKLGRCVYFMLKNETVFDESRFLKG

SEQ ID NO: 233431 - protein, 343 aa, unidentified
MDHFAGLDVSVKETSICIVDDTGKIVREVKVASEPEALLAVLKNPAYHFKRIGLEAGPLSQWLFSALAEAELPVICVETRHMQAVLKAQINKTDRNDARGIAQMMRVGLYRPVHVKTFRSQKLRMLLTHRKLLQSKAIAIENDLRGTLRNFGLKVGTVGKVKFEARIKELVENLPDLAVLVEPLLIVRRALREQIVVLHRRLLTIVRDDAVCRRLMTTPGVGPVVALTYRAPVDVPARFRKSKAVGAVFGLTCSKYQSGEIDRSGRISRCGDEMMRVMLYEAAQSMLRSKKWSWLKAWAMQIARRRGMKKAIVALARRLAVIMHRIWVDGTEFRWTREQAAAA

SEQ ID NO: 233432 - protein, 397 aa, unidentified
MYIVGIDIAKRKHEAAVIDGEGTVIIKPFSFTNNCSGYNRLLAMLTKAKLPLDEVSFAMEATGHYWLALFTRLQKEGFRVQVINPVQTNSIRSFYIRQAKTDPRDALLIAEVIRFGHFSESTLHPENIYELRELCRGRHAIVSMQADVKRKVVALLDQVFPEYETAFTNLFGDTSMAILQTCPTPKELSEMRLEELCHLIEVSSHKRFRMAKAQELQALARNSFGFAMAGDVFSTMIRLYAKHLDFLKQQVREMDRKIAEIMETLDTPITTITGIGPTLGAYILSEIGDINRFSSAAKLATYAGIDPTMRQSGEYNGVRNRMSKRGSPYLRHAIWLAASSAVLHDPALKFYFQKKRDEGKPYMASVGHACRKMVSIIYAVMRDNKAYTPCIPNEISA

SEQ ID NO: 233433 - protein, 421 aa, unidentified
MLRRIAAIDIHKKVLMVVVVKVIGEAKDAIGQALKFECIRFGTPASERARLVEWLKQQGVTEVVMESTAQYWKPIWMDLEPHFAKLHLAQAESNKAPKGRKNDFRDAKRLARRLLCEELRLSFVPGPEQRMWRTLTRSKHQLVRDRVRLQNQVESLLEEMRIKLSSVISDLFGVSGRRILTAISKGETDPVKLAGLGDQRLQCNRQELADALTGSPSQMQVEVLKLFLARLELLDQQIQSLDKLAAERLKIHEDAVIRLAEIPGFGADSAQQIIAEVGADAQVFPSSSGFSSWVGFCPGSNISAGENHSSQCPKGNRFVRRLLTEAAQAAVKKKGSHFQAIFRRFLPKLQYNGAICVVAHRLACVVWKILHDGVRYIEQGMETTPQARKRRAQKLVKALRNLGYRTTITPLVETPTPEPAG

SEQ ID NO: 233434 - protein, 407 aa, unidentified
MSHYKQYHIYVGLDLHKAHHTAVIINCWNERLGEIQIENKPSAFDDLMKFVKKHTAKGLTPVYGLEDTGGNGRALAVHLVEKKQIVKEVNSALSYSERMSHATTQKSNSWDAFCIAKVLLARLDELPDANPQDLYWTLGQLVARRNAIVKYASGLKNQMHQQLSYHYPSYKKFFCDIDGKAALAFWEKHPAPHQALTVGVDELAEYLRQASHNTCSTRKAEEILELIKQDGETKRNFQEYRDFLIVNMVKDMRRSRELINQIEEQLRVVLAQTDYRLESMDGISTVTAAELIAEIGDIRRFSNADKLARFAGIAPVRFSSGGKGKDQASGQGNRVLNAIFHNLAVQQIQVAKGKNKRQRNPLFYEFYQRKLAEGKTKKQAFICVMRRLVNIIYGMMKNKTEYRAASP

SEQ ID NO: 233435 - protein, 445 aa, unidentified
MSEPIPSTKSEPEWAAFAAIDWADQKHFWRLVPADSRQQEQGELENTPEAVEVWAASLQQRFDGRPIAVCLEQARGALIYMLSKYAHLVLFPVHPTTAARYRETFCTSGAKDDPNDTASLLDLLLRHRERLRQLQPDTEETRLLQFLVEERRRAVNEKTRQSNRLTDCLKLYFPQILRWFDDVGTPLVGDLLERWPRLEELRRAHPGTLRKFFNEHNCRSAERNQERIDAVYAAVSATNDPAVLEAGALTARGLVALIRTLRDNVARLDQRIEQLVATHPEGALFASLPGAGPVLVPRLIVAFGTRRERYGRAYEVQCYSGIAPVKEASGKTSWVHFRRACPKFLRQTFHEFALHSIGQSEWAKAYYEHLRKDEKKTHHAAVRSLAYKWIRIIFRCWKDGKPYDEEVYLNSLRRRGSQLGAALASATGLGWQTVAGFQKLSENNA

SEQ ID NO: 233436 - protein, 338 aa, unidentified
MPLYGGIDLHANNSVVVLLNAQDQVVSQKRLANHLPTILELLAPYHAEITGLVVESTSNWYWLVDGLMDAGYWVHLANPAAIQQYSGLKYTDDHSDARWLAHLLRLGVLPEGYIYPKAQRPVRDLLRKRSHLVEQRTANVLSIQNIIVRNTGSRLSAHRIKQLSRNDVEGLLPDADQALAVTSALAVVRCLTEQIKAVEKRVSARMQSTPLYELLQTVAGIGPILAQTILLETGDIGRFPHVGDYASYCRCVDSTKVSNGKRKGQGNVKNGTPYLAWAYAEAAHFAIRLHPSVQRYYQRKQTKTTVPVAHKTVAHKLARACYHMMRHQVPFDAAKAFG

SEQ ID NO: 233437 - protein, 391 aa, unidentified
MPQPNDLSRSLTALDQDSTLIAVVEMSQSSWLVGAIIPGVERRPAKKLDASEGMLLALLHRWRDEAAKAGCTIDRITVAFEAGRDGFWLARWLRQRGIEAHVIHATSIAVSREHRRAKTDRLDAALLQRAFLGWLRGERGHCTMVAIASLAEEDAKRPSREREALVGERTRIGNRMKSTLARLGIRGIRPGLRKAAERLEQLRTPEGAPLPPNTLAELRRDLARLRLINDQIGEIEAARLERLRQQPDEARHPMILLLARVVGIGIETADMLVQEVLSRKLRDRRAVARYGGLTGSPEESGARRREKGLARAGNARVRRGMLQLAWRFLMFQKDSALAQWYRARTADARGATRKTMIVALARKLLVALWKLVTTGELPNGVVLRPAIQAVL

SEQ ID NO: 233438 - protein, 382 aa, unidentified
MLGKGRKGNFQPDGYEFFVGLDTDKRSMAVTILDCAGRHRSFRMAHDADQLLGYMNKRYGGRKVVFCYEAGPTGYGLRDRLVEVGHPCVVTPASMVPRAPGLRVKTNRLDSVKLAECLKGGQLHSIHIPGMVYRQLRHLVSLRDTHIGQMKGFKYRIKALLLFEGLAFPEAPAGSQWSRRVIRELRQMFCSGAVGFKLNQLLKSVEFHRQQALESLRAIRKLCQEDPELGESIGYIMSIPGIGWITASHLVARIGDWRHLDHVGQLAGFFGLAGSEHSTGERVNRGPITRMGDSRLRSKLIQAAWSAIRQDWELGSFYQRIYQRHPRDRASRKAIVAVARKLTTRIYVVLKERRNYQAFDPKKGDQLAPGRDSTLRRIKPQA

SEQ ID NO: 233439 - protein, 310 aa, unidentified
MEITVGIDVSKARLDVHVHPAGESFAVGNDEAAVQALGERLGQLDGLVRIGIEATGRHERLAVAEFAAAGLPVVVVNPAQVRAYAHAIGQRAKTDPIDARLIALFVEAVRPEVRPMPDTQTLELAALMARRRQIVNMLAAEKARRQQADAGPARVSIARSVTFLTDELKSLDLEIDKTVRGTPVWRDKEDLLSSVPGIGKTIARTLLAELPELGTLTPKQAAALVGLAPYTRQSGRWRGKSFIGGGRTAPRGALYMGAMVAARFNPTLKAFRDKLVAAGKPKLVALIAVARKLIIILNAILRDAKPWRTA

SEQ ID NO: 233440 - protein, 408 aa, unidentified
MRVIGMDIHRTFAEAVMIDGDRLIRLGRIKMSRDHLAAFAAKLTSEDHLVIEATGNAHAVVEAVAPFVGRVIIANPRQVHLIAKARIKTDVIDATVLARLYASGFLPEVWVPDQSTLRLRRQVTRRNQIVRQRVRLKTMIQAILHAHLVPQCPHADILGPKGRAWLLMQLLPDDESAAIERHIREYDRLTDDLRVVERELARDALDSAETKRLMTIPGIDMVVAVGLLAAIGPIDRFTSPGRLVAFLGLNPSVHQSGNNPARHGRITKQGPCHARTMLVEAAWQAVRSPGPLRAFYERVRGRRGTHVAAVAVARKIAVIVWHLLTRGEDYAWVRPALHARKLRDLELRSGFPARRGQRGAGYAYNLARSRREERQRGEKAEAAYKRFTQGWTKRGRRVSADASTEERQ

SEQ ID NO: 233441 - protein, 461 aa, unidentified
MKRKKRCKKAPAEPAGSVGLPKIRLLVAGIDVGSENHYVCAPSSDGGTEVRVFGASTPQLLGIAEWLEQAQVESVAMESTGVYWIPLFEVLESRGIEVLLVDARQLSRVPGRKTDVQDCQWIQILHSCGLLQGCFRPEDAICHLRSLVRGKAVLTSERSDWLRRMQKCLDQMNVRVHRAVSDVDGTTGMAILRAIVGGERDPAQLAKFRDPRCHKSEAAMAEQLAGNWREDHLFNLGQALRMYDIVEERMADYQREIQRKMEQLHCGQADLHPLQPVKRKQKAKAIKRRGQEPMRNVLHGMTGVDLTTIDGIGVETAEVVVTEYGRDLSRFPNERQFVKHLRLAPRQAITGGKPMRKGKGRKNSTRAGRALRMAATTLQHSQTALGAYYRRFAANKGADIAVFATARKLATLIYRMLRWGQTYVDDGAAAYEKRYQATRIRRMNAAANQLGYQLVPKVEVA

SEQ ID NO: 233442 - protein, 371 aa, unidentified
MKSIIYIGMDVHKKTYSLCALLKETGEIIGETKIPADVSLIIKFIENAKKSVDSDDVQIKTGYEAGCLGYSLYWQLAAKDIECDILAPSTMHRSAKNKVVKNDRRDAKNIAANLANGTYKSVYVPTDEDVEIKEYIRMMHDFKIELKKVKQHINAFLLRFGHQYPGKSKWVPAHIKWLKELELSDMHREILDEYLSQLEILSEKIERFKHRLEELSQKETYNEKIGQLRCIKGIDTTAAMTMHAETSDFDRFPTANAFASYCGLTPGEDSSGDSYHRLGITKQGNSMIRTTLVEAAQVLVRGTIGKKGKKVKSKQKDQDVKVIDYADKAVIRLQKKYHRMIFRGIKRNIAITAVARELACFVWGIETGHIS

SEQ ID NO: 233443 - protein, 396 aa, unidentified
MKTVCGLDVHKSIILMCIMKANGQKIVQEFTTLTRDIESMRETMKSHDVKVVGMESTGVYWIPIWRILQGHFDLKLINPYFIKQVPGRKTDVKDSEWIATVIQKDLVRGSYIPGKLIQELRQYERRYVRLCEQSTRIEQELDRQLHRCNIQITNYATKIGSASVIKVVKAIISGESTAEQLEKHVHGRIKNKHKETIKASLQGVISNADRFIFEQNLNEYELIQKQQQACQIEMSEICEVHFKNEIALLCTIPGIQKLSAMIIIAELGVDLKSFITAASLTGWAGLRPRNDESAKKIKSHKITKGNKYLRRILVQCAWAASRTKNCWLKAKYEQLCIRKSSKKALIAISRKLLVIIWNVLTKNEVYKEFTPKIDPKLKQKKIEYHRNKIFALEQVQ

SEQ ID NO: 233444 - protein, 371 aa, unidentified
MSVYVGIDVHRKRSQVAVVTEDGQVQLNKNVVNGSEPMLRLIGGLPSGTPVAFEAAFGWGWLAQLLEDYGFEAHLVHPLRCKAIASARLKNDKVDAAILAQLLRADLLPEAWIAPPAVRQLRGLLRHRASLVRLGTQQRNRIHAVAADHGYDRSASYWTGPGRGWLAELDLPPASREIVTDCLAVIDGLAPVIERIDGELHQQAKADPRVKVLRTLPGVGEFTALMMLAEIGDITRFPSARKLASWAGLTPTVRGSDLTVRHGHISKQGSAWLRWVLNQAAQTAKRSPDFAAPYAAIAKRRGKKIATIAIARKLLTRAWHLLASMQDTTATTPAAGAASVAAAPQDREVAKLRARSPLRHEPGRQSPRSIF

SEQ ID NO: 233445 - protein, 355 aa, unidentified
MCAKKAGSLEDLAVVGVDIGKDTFHLVGFDRSGQVVLRKQIKRLALNATFETLPRCVVGMEACLSAHFVSRSLRGLGFEPRIIPAIYVKPFNKGQKNDYNDAEAIAEAAMRPNLRTVSEKDQDQLDLQALHRVRARLVSRRTATINQIRAFLIEQGITVRAGLRALKNSFEAILDQRRDEISPRMRGILIGLYGDWLWLDKRIEDVSEEIAEISRTEANCANIMTIPGIGPMISTAMVAAVGKGEAFDRGRDFAAWVGLVPRQFSTGGRTILGRITKRGSRYLRMLFVQAAKVIMMRQNRWSAFSFGPWLTDAVARMPRNKAAIALANKLARTAWSILRHGTRFDAPRDLTMDAI

SEQ ID NO: 233446 - protein, 388 aa, unidentified
MYLVGIDISKYKHNCFIATDSGVPLKEFVFENNSEGFKLFHKVLSELDQDQEIRIGLESTGHYGTNLKQFIVTSGYTYLEFNPYLTHQFSKAMSLRRTKTDKVDAKTISNMLGSVDYKTLHTQFYHINELKQLVRDRDDILTNRSKTLVKLTNLLDIIFPEFKPFFNNKLGATAFFILKKYKSPVRISKLTMKDFDELKSKSKGKLTYPKFSRLKSLAKDTVGVQSDIYNKRIQALIKDYEYFDQSLDEIDQEIIHLFKETKTMLTTIPGLGIIQAATIYAEIGDIHLFSNPQKLIAYVGFDVSINQSGISEYRGKIVKRGSPLLRKAIWTYALPSLRFIPALNDYYHKKKAEGKHHKVALTHVCRKLIRMIYHIEYNHIVFDDREIK

SEQ ID NO: 233447 - protein, 355 aa, unidentified
MTFVGFDLHKRYITACALDAGGAIIAEIRQLSTALDAVLTWLGALPGPVTVGLEATLSWEWLATRLTEQGYTVRVAHAHAVKLIWQARAKTDPIDARKLAELLRVDLFPAIWIPDLQTRRRRQLLRGRAFLVRERTRLKNRIHGHLLSENLVPPGADLYGKGGRAWLTAAPLSPVLRAQTERLLTLHDALSVEIQGLDGDVKRAAKGNPLVKQLTTMPGVGVFSALFVQAEIGSIDRFRSSHELAAYAGLVPTTRSSGGKTTHGGLGKASNRWLKWILVEIVVTLKLAPGPVGTYYRRLLRAKGKPKAQTAAARKLCCYLYWMLKEGWTYDEWLQQHVNSQRSEVRPVQRMGAMA

SEQ ID NO: 233448 - protein, 393 aa, unidentified
MFIVGIDIAQRSHEASVLEDSGKVAHKAFSFKNDVSGFQRLLDILLSLSADPNDFLIGMESTGHYWLALYSALRKHGFSVCVLNPIQSNALRNLYIRQVKTDQRDCLIIADVLRFGRYQQGNVPPSELYELRELCRARSFLVDTTADLKHKVIALLDQAFPEYETLFTNIFGLTSSELLLNCSTPEEILAIDTDKLAKILETPSRKRFGRAKAEQIKETAANSFGVILEFGSAGFLIKQYMEHIRYTESQIAQLEEKIAELFSHFDTQLTTIPGIGPTLGATIFSEIGDISRFPSPAKLAAFAGIDPSVKQSGEFQSSHAHMSKRGSPYLRRAIWQASVIAAMHDPAIRAYFEKKRSQGKSYMVAIGHVTRKMNNIIFAVLRDNKPYYPSLDS

SEQ ID NO: 233449 - protein, 402 aa, unidentified
MPVPKVAWVGIDAGKNNHHAVAVDSDGQVLWSQQVVNDQAVIEKLITKAAATAEDIHWAIDLTSAAAALLLALLIAAEQQVVYVPGTMVNRMSSAFSGEGKTDARDAKVIAETARLRRDLHQISTPDELIVELALLVGRRADLMADWVRGVNRLRDLLTRVFPALERALDYTTRGPLLLLTGFCTAEAIRRAGEQGLSAHLHDAGAQRVSIPGIVHKALDAAHAQSVALPGEQTTAALVTRLARQLLDLHREIKDLDKLLATKFRSHPQAAIIESMPGMGPVLGAEFLAITAGDLDAFGSPARLATYAGLAPVPNDSGRRSGVLHRPRRYHRRLRHVFYMAAFSSLQRDGPSRTFYQRKRAERQRHNRAMIALARRLVDVLWALLRDNRPWEPSAPAGAATA

SEQ ID NO: 233450 - protein, 254 aa, unidentified
MSLDATSVCIVDADGALVRELKVASEPEAIGSALRETGCPYKRVGLETGPLCQWLYGGLRAQGLPAICVDARQMKASLSAMRNKTDKHDARGIAQMMRVGLFRAVHVKSRESHELRLLLTNRSLLRRKCLDIENEIRGTLKVFGLKVGRVTKLTFDRRVRELVDGDTRLNAAFAPMLRARAVLFEEFNHLHRLVLDAVRHDETCRRFLTVPGVGPITALAFKTPVEVPERFAKSKTVGAHFGLTPRRFSSGQID

SEQ ID NO: 233451 - protein, 371 aa, unidentified
MEESSKSLYVGLDVHRESIAVAYAPEERGTEVVSLGAIGTRQCDIDKLIRKLQAKGAPLVFVYEAGPCGYWLYRYLTRQGLSCHVVAPSLIPRKPGDRVKTDRRDAVLLARLMRSGDLTAIYVPTVEDEAIRDLSRGREDALRDLKATKYRLKAFLLRQDIRYEGRANWNAAHLRWLSAVVCPTPVQQIVFQEYVRAVTEQHERVQRLETELHEHVKTWRLYPVVEAIQALRGVELTGAVILVAELGDLTRFDTPRQLMSYLGLTPSEYSSGERRRQGGITKAGNTHARRALVEGAWAYRYPAKVSRHLQLRLEKLPAEVQAIGWKAQVRLCKRYRRLIARGKHANQVVVAIAREMAAFAWAIARLVPLAP

SEQ ID NO: 233452 - protein, 309 aa, unidentified
MQHTLGIDVSKDRLDAHALSLGEARSFANDRAGLARLLRWTRRLDMPLVVYEATGPYHRLLERTLAGAGIGFHKVNPLRARRFAEGCGRLAKTDRIDAEMLARMGAALALEAQVPAPQNLCELKDLLTARRALARDLARERTRTPRSALLRRLAAARERLLLGQMAVLDAEIAARIAADPGLARRAEILRSIPGIGPVTTAELLIDMPELGSIGAGEAASLAGVAPVPRQSGKFRGQAHIRGGRPGLRRALYMPALVAMRCNAGLKAKAQRMATRDKPPKVVITAVMRNLLVLGNALLAADRHWQPERP

SEQ ID NO: 233453 - protein, 350 aa, unidentified
MKIVGCDFHPSYQQVAVLDTLTGEVAKFQLMHGNGEAERYYRKLEAPALIGMEATGNSLWFEQLVESLGHELRHGNAAEIRASYVRKQKTDKRDAGHILKLLLEERFPQIWVPNQQQRDARQLLMHRHKLVQVRTRLKTELQHLALNQGVQKKRQLWNEKGRTDLENLPLQGWTKQRREDLLQLLRVVEPQVEQLDKAVEKAAAANPQALLLMSQPGVGPITALAFVMTIGEVARFQRSKQVSSYLGLIPSEHSSGNRRRLGSITKQGNVFLRTLLVEAAQSAVRHDPQFKKEYQHRCHHKAKGIAKVATARKLAVRLYWMLKTGKPYPEVLLIEGSPRHPVAAKANPSA

SEQ ID NO: 233454 - protein, 337 aa, unidentified
MDYFAGLDISMDETHVCVLDREGVVVRESKTESTAQAIAGELAKAPSCHRIVFETGRMAPILFHGLNQLGLPVVCVESRQAYQALKSLATHKTDRNDARGLAHLARTGFFKPVHVKSLQAHALRSLIIARKKLVGQRVTLENQIRGLAVVFGIRLPRALAAAFIDQALKASEGIAGLSAAMRGLITARTAVMTAVAAIDADMRRMTRASAACRRLMTIPGVGQLTALAFVAAIDDPSRIRRSRDVGAYLGLVPRRYQSGEVDYVGSISKCGDRRVRTLLYEAANVMLTRYKGQLKLKDWAFAIARRSTMRKARVALARRLGIIMHAMLRDETEFVLA

SEQ ID NO: 233455 - protein, 298 aa, unidentified
MSCNQLCSQRFPYTDEGIEQLLEQAPAEAVFVMEATGTYHARLAVKLFEAGCKVSVVNPLVIKRYAQMKLLRVKSDRADAALIMQYGRHETPALWAPASEEVQELQQAHGWLNDLITERTRLFNRQQAHAHRAKPSVFVIKQMNLQRQLQQRIEACEQHLETLVKKSFAELRERLLTIPSIGDKTALELIIVTNGFTRFEDVKALCAYIGVSPTTFRSGSSVRGKGGIAKMGQGRVRQLLYLCTWTARTCNLACKKLYQRLRAAGKPPKVIGIAIAHKLLRQAFAIATKNATFSPEFA

SEQ ID NO: 233456 - protein, 342 aa, unidentified
MEHYAGIDVSLERSSVCVVDGMGRIVREAKVPSEPEALVGFFGQLGVSLTRVGLEAGPLSQWLHASLAEAGFEAVLLETRHVKAALSAMVVKTDRKDARGIAQLLRMGWYRPVHRKSPPAQEVRALLVGRRLLQGKLRDVELSIRGILRGFGLKVGEVSKGRFAARIEELVAGHEMLEAVIGAMLQARDGLRAEFMRLHRRMLAIVRGDAVCRRLMTVPGVGALVAVTFKAAVDDPGRFRTAKAVGAHFGLTPKRYQSGETDVTGGISKAGDAAVRTVLYEAANVMLTRTTRVSALKRWAMKVAKRRGAKRAKVALARKLAGVLHRLWANATDFHWGEEAAA

SEQ ID NO: 233457 - protein, 389 aa, unidentified
MKIFVGIDIAKLNHFAAAISSDGEILLEPFKFTNDADGFQLLVSKLESFDKNSIIIGLESTAHYGDNLVRYLVAEFYQVCVLNPIKTCQMRKNNVRKTKTDKVDTFVIAKTLMMQDDLRFITFFDLDMMDLKALGRFRQKTIKQRTRLKIQLTTYVDQVFPEIQYFFKSGLHQHAVYALLKEAPSPKEIASMHMTHLANLLKVNSHGHFTKELAKELRVLAQKSVGANDSAISIQITQTIQQIELLDSQLEKIEAEMTDIMKFNDSVIMTIPGIGYINGGMILGEIGDIHRFSNPNKLLAFAGLDPSVYQSGNFQAKTTRMSKRGSRVLRYALVNAAWNVVRNNATFKAYYDAKRAEGRSHYNALGHCSGKLVRVIWKMLTDNVEFNLK

SEQ ID NO: 233458 - protein, 355 aa, unidentified
MDNTKYIGMDVHTETISITVLNSAGKLVMESVIETKGLTVIQFVQGLRGDLHVTLEEGTWAAWLYDLLGPHVNEVLVCDPRRNALLKVGNKSDRMDARKLAELLYLDKLNAVYHGEHGVRTLKELTRSYAAISGDLARVMTRLKAVYRSWAIACAGKQVYAPRYRAEWLGKLSEAGVRRRAEIYYEQFDTLRSLRQQVRRELLAESAKHKASKLLCQIPSIGPIRAAQLIAILQTPYRFRTKRQLWAYGGLAIETHSSADHRYVGGQLRASKKHVSLRGLNRNHNHELKNIFKGAAIIAATKPGPLQEFYAALVAKGMRPEMARLTLARKIAAITLIVWKKGVRFDAQHLNPQTA

SEQ ID NO: 233459 - protein, 363 aa, unidentified
MNTLYVGIDVSSKSNVVYLMLPNGDKHSNFSVANFHVGSTQLVKRILSALTSYSLDNVLIGLEATNVYGDNLVYFLREDATLASFNRKIHVLNPKQVKKFHDAYNDLPKNDYMDSFVIADCLRFGRINKEVYMGDYRYKALQNLTRARFYAVQNLTKEKQRFINVLFKKYSTMTQEKVFCDTFSATALAVYDEFDSAEALANMDLHELTDFIIKKGKNRFTDPDAVTKAIQKAGRSSYRLPKTINDSVNQVLSISITSMKALESQIKEFDKAIKAQMELLPNVLISIPGIGPVYSAGIMAEIGDINRFNNQAALAKYAGLAWKQHQSGGFESEVTRLIPSGNRFLRYYLCEAAFSLVRCHSKI

SEQ ID NO: 233460 - protein, 315 aa, unidentified
MAPPLLFVGIDVAKAECVVALRPPGTTWSVPQTEAGWAALATRLQALAPTLVLCEATGGLELPLASVLAAAGLPLAVVNPRQVRDFAKAKGLLAKTDALDAAVLAHFAEAIRPLPRPVPDATTQTLAALVTRRRQLVEMCTAEENRLGSAPPSLRAGLRAHIRWLQRQLASLHTDLNQTIRTHPGWRVQDDLLRSTPGVGPILSSTLLGGLPELGTLSRRAIAALVGVAPWARDSGRHRGARRCWGGRADVRAVLYMATLAAVRCNPVLRAFYQRLLAAGKLKKVALVACMRKLLTILNAMVKTQTPWTPQVRET

SEQ ID NO: 233461 - protein, 338 aa, unidentified
MSVYAGIDLHSNNNVLVVLDEHDRVLRQRRLPNELPTVLRELEPFRDELSGIVVESTYNWYWLVDGLMAHGYRLHLANTAAVPQYAGLKHSNDESDARHLAHLLRLGILPEGYIYPRSERAVRDLLRRRFQLVRTSVRLIQSVQSAWARYTGKKLSANAFRQLTDVAIESTFVDPVARLSVLSQLKVWRAVEEQVQQLEKWVAQFAGRDAERKALRSVAGIGAILSLTIALETGAVTRFASVGDYVSYCRMVKSERLSNGKKKGEGNRKCGNRYLAWAYIEAATFALRHSAPIKAWYERKCRKRHKILALKAVAHKLARACYCLMRDGGVFDVSRAFG

SEQ ID NO: 233462 - protein, 421 aa, unidentified
METENIDYAAWIGLDWGSQKHAICLKATDSEVVEHYTLEQKPQALHGWFMDLISRFGSRQIAIAIEQTRGAVIHFLLGLACVHIFTIHPKSLKNYRDAIHPSGAKDDPTDAELLLQFLTLHRHRLKPWIPDRPEVRLLVRLVEFRRKMVGKRVRLTNELTQLLKEYFPAALDCAGDLDKVMACDFLSKWPTLEKLQKSQPETIRKFYQEHGSRSRSVIEGRLKQIRSALPLTTDAPVIEPSVALVQSIAPQLRSVIDAIAQFDQRIKEIFEKHPDAEVFSSFPGAGAALAPRLLAAMGSDRSRFASSLEVAEYAGIAPVTERSGKKIWVHRRFACARFVKQSFHEFAAQSILFCDWARCYYDQKKKEGKSYHSAIRALAYRWIRIIYRCWKDRIPYEEGKYMKALWQRKPDWLQSSPLNES

SEQ ID NO: 233463 - protein, 407 aa, unidentified
MEVVYPQCAGLDVHQHTVVACARVGAGSAVTRDVRTFGTTTQELLALSDWLTAHGCTHVAMESTGVYWKPVWHVLEESVELILANAMHIRHIPGRKSDVNDATWIADLLAHGLIRGSFVPPAPIQELRDLTRTRKQLVREITQHTLRIQKTLETANLKLTGVLTDILGVSGRAILQALVAGETNPDRLAELARGRLKASRADLAAALHGRVTAHHRFLLQLHLAQIDALEGAVRAVEARLGDALAPFRAAVDRLITMPGVSETVARVLVAEIGVDMTRFPTAGHLVSWAGLCPRLDESAGKRHSTRTRPSNPWLKTTLVQAAWAAARKHDSYLRAQFLRLKSRRGPKKAIIAVAASMLTAAYYMLRDGVDYRDLGAAHFDRRDKAKLAKRLLARLHDLGFNVELRAA

SEQ ID NO: 233464 - protein, 415 aa, unidentified
MALKIVYKICCGIDVHKTFVVACIASTDKHGVTSYERHRFSTYTKGLKNLLQWLLEHNCKDVCMESTGKYWIPVYNILEKDCSIVLAHPKYVKAIRGKKTDKKDAKWIADLFKHDLVSGSFMPPADIRQLRDLMRYRFKLTCFKSSEKNRLQNCLTVSNIQLGNVVSDTFGKSAQAILDKILENPEDTSFDLEPLVFKSLKKKLPELRDAIDGYITPEQAGKLKIIKAHYESLESRKAELEELILALAAPYQQEFAILQTAPGISSDFTAIGIISEIGTNMEAFPSAKHLCSWAGLTPTNNESAGKKKSVRVSKAGCYIKPLLVQCANAVVKSSKHPEMRNRYLRLKKRRGHKKAIIAIARMLLTALYHMLKNGENYNPELYQKTDLPPVDREIIIEQALMLIRNQGYKIKSATT

SEQ ID NO: 233465 - protein, 341 aa, unidentified
MSATPDAVTTYVGIDVAAQTLAVAWLVPGVPAAPAQTVENAAAGWRQLARLLRQHGVAPAGALLVLEATGSYWIGAATALHAAGWAVSVVSPASARYYARARLRRAKTDAVDAQVLAQYGRDLRPGRWTPPPAEVQQLQLLLRQRDDLVAMRVQTTNRLHALAQWPDLPADLAAPLRAVLAVLGEQIAALEARLAERAAAGGLAAEVRRLEAVVGVGALTAMLVLTELWVLGPGATPAQAVAYAGLDPAPHQSGTSVRGQGGISKTGSARLRQALYMAAGSASQHNPVLAPFYQRLLARGKLKQVARVAVARKLLVLLVTLWRGQRTYDPAWPARRAQPPT

SEQ ID NO: 233466 - protein, 386 aa, unidentified
MQKAITYVGLDVHKDSIVVSLAEAGLRGRLREVREYGKVLNTPAALKAMATKLAAGGNELRFCYEAGPCGYGVQRQLSAMGHHCAVVAPSLVPRKPGERIKTDRRDAAKLAKLHRASELTPVWVPDPAHEAMRDLVRARLAAVRNIREARQQLSGFLLRNGYHYHRHPWTLMHRRWMADLKFDQPLHYIVLQDCIAAVEASEQRRDRLEAGIIAALPEWSLAPLVEPLQALRGIALVSATTLVAELGDIARFSNPRQLMAYLGLVPSEHSSGRSRRQGGITKAGNAAARRMLIEAAWSYRFPARISRYQLSQQKRLPKLIRDIAWKAQERLCRRHRKLMRAGKPKTVVCAAIARELTGFVWAIATETSPAIGKKGTGKPATMVAVS

SEQ ID NO: 233467 - protein, 331 aa, unidentified
MFPVGIDVSKNTLDLCMLYDGIKGRIKTRNIQNNRHSVENILRWLRLQHCGPEDVHVVMEATGVYHERLATELHDAGFRVSLANPHRSREFARGMGIMTKTDKVDAYMLACYAFLKKPHCWEPPAPEIRYLGALLRRRDVLLGDALREENRLEKYLSTDTPADIISSCRRMAQLLREEVSNIERQIKAHIKASPALRRDYTLLTSIKSVGPQLGMHMLVVLRSHNFVSAEQAAAFLGVVPIEKRSGTSVRSRPRMSKIGPPQLRAKLYMSALCGKIYNKRMRNIYDEMCLRGKPKMVAIGALMRKLVHWCYGVLKTGTVFNDEDLKPVLST

SEQ ID NO: 233468 - protein, 414 aa, unidentified
MFASVEAISSRSIGVRLEDLVAVPIDVGKHTAMAKVIDFSGVELATPFEFVLDRAGVGDLIERVRGVVPPTTMLVRAGLEAAGHYHLPLAGGVLPSEWELRVINPGHVAKQRQVNGSRGVKTDKIDLAAIADLLLAGRGTIAPPFADPVMTLTGWVAHRRRRSLLRRRTIQQLTTHVDRCFPGLGATMWSVVLSKAGRMIISEIAEPSRVARLGPTRLRTFAANRGVRMTTPLAERIVEAARQALPVPGAEVSRQLLTADLELLDDIEAQIAIADQQIATLLPSTPFGVLTSTPGWGAVRVAHYGAAVGDPERWPGHRQLYRASGLTPRLYESAGHRRDGRITREGSVLLRVALVDLGMGLWHQEPASRRYGTELRARGKPGGIIMCAMAHRANKIAHAMVRNQQPWEPTRWAA

SEQ ID NO: 233469 - protein, 428 aa, unidentified
MNSTQNERINQITSSTLIVGVDIAKFEHVARAQDYRGVELGRPITFENNREGFELFVSWFRKIATEQGFKDAIVGMEPTGHYWLNLAYYLGEQQVLCGVVNLLHVKKSKELDDNSPTKNDIKDAKVIAQLVKDGRYAIPNLLQGKYAELREAMKIRDHLSTDLRVVQGRVHNWLDRYFPEFLTVFKDWECKSARQMLSLCLLPHELVTQSEEVLLRHLREVAKRGLGMERMRCLKAAAGRSVGIREGTELAKLELKLLLTQYELLESKFAELEAKLDELLEQTPHVKQLMAIKGIGRDSIAGLLAEVGDIERYRHPKQIIKLAGLNLKENTSGKHKGQTKITKRGRKRLRALLFRVMMPLVAKNRAFKALHQYYTKRPTNPLKKMQSLIALCGKLIRILFGVLKKGHRFSEEKMLQDIPRFTEVSLAA

SEQ ID NO: 233470 - protein, 392 aa, unidentified
MQPVIGVDVAKGCSVIQGFLSRGEPWGKAETISHDTSGFRRLSALLDELQGHTGIAPVVVLEATGHYHRGMVQYLERNGVQHFILNPLQSKRAKGTKLRKVKTDAADAWHLAEMVYRGDVKPHRTREETYTELQHITRQHEFVTGLFVQAKLNARALLEQVFPAYVGLFVDLFSVTSLRVLQRCLEGNMGGIGNLITEAAGKSHAKRWIQEKTQHLHKLLSAWGEQPKSDSQTKALAGMVPLLLGFAEQLHELEKQMLHLAEALPEVALVKSIPGIGDKLAAAIVAEIGDAGQFQDAKQLVAYAGLDPGIFSSGKFTATSSRITKRGSKRLRRSLYLAVQCGMRRSANHKLKQFYDRKRKEGKPYKVAVIACANKLLHHVYAILRKGEPYKV

SEQ ID NO: 233471 - protein, 446 aa, unidentified
MGKGSGVTRGDQRRNARMARLREMVPATSAVAGLDLGERKQALAVTGADGRVLARRSPRVSVHGLGGHLDWAVARARSAGLGGVTVACEPTGSRWMVVQDLCEQRGLPLVCVQPLVTHIAREQQDLAGDKTDEGDCVLIARLARELHCYAPERLAGAWAELRAAGRDRAVQITRATAARQLIRDQLGLAAPALLEVVCEPLESATWLASLEVVLERGILAGTAGMGYEAFAAAVRGRLGGWGGQRLGPAASRVFAGLAAAGGVARMLRAAVRRISGALEDLQHARARRGRLEARMTVLLDELGIDHARICQIPGLTVAGLAAILAETGDLRQYLSSSSVVKHAGMSPARNQSAAFCGKTKMSRRGRPALRLAVWRATWAVLRHCGVLAARHTTLTSRDNGRLTGAQARVACAASLLRWIYALTVHGTRWNPAIAAGDLSHHHAMAA

SEQ ID NO: 233472 - protein, 343 aa, unidentified
MKLHVVGIDLGKTVFHLVGLDTTGRAVIRKKCSRTQLLAFTANLEVELIGMESCSGSHFLGRALREQGHQVRLMPAQYVKPYVQTNKSDFLDAEAIAEAVQRPRMRFVPIKTEEQLDLQALHRVRERWVMRRTAVVNQIRSLLLERGLTLPKGRGYVDRQLPRILEDGELRLSGSFRVLLAQLKIELEQLTARIEEMDRVIQQTAKENEACQRLTEIPGVGPVTATALIAAVGNGSTFQKGRNLAAWMGIVPGEYSTGGKQKLLGISKRGNKYLRTLFIQGARSVLQQRDKQAPGLSSWLAQLLTRAHQNVVIVALANKLVRMAWAVLCKNERYRAPVLAVTT

SEQ ID NO: 233473 - protein, 317 aa, unidentified
MRVANDPAGWAQLLARVGSADPPLIALEASGGYEAGVVLALDAAGRTPVVANPVATRRFAQSLGRRAKTDRIDAAMLAEYAARMRPTPRPVPNATARQLRALLARREAVVRMLVEEQNRAQEASALVRPQAEAVVALLTAQRRELDHLLASAVASDPAWQARVDLLDSVPGIGPLTATVLAVGLPDLGQGSAKAQAALLGVAPHPHESGRSRGRRCIGGGRAWVRHVVYEAVLTTVRCEPTFRGALPAAPGAREDAQAGDGGLHAPARRHPPRHAPRRAHLAGNPDRPRPILARCLLTPNTVTPGLSPDAAETVKRP

SEQ ID NO: 233474 - protein, 348 aa, unidentified
MNHYAGIDVSLKCSSVCVVDASGKIVREDKIASEPEAFIAWFGSLGLEVTRIGLEAGPTSQWLYAAMRDAGLAVELLETRHVHDAFQAMPVKTDRKDARGIAQLMRLGWFRPVHCKSMEAQETRAMLTARKLVQSKLHDIEMSLRGILRGFGLKVGRTTPKLFEGRIKELVSGHPSLQVIADALLAVRAVLLREFNTFEKRVRTMARANSQAKLLMSTPSVGPIVALTYATAIDDPTRFKSSKTTGAYFGLTPKKYQSGETDYSGRISKIGDAAVREALYQAAHIMLTKPLKGCSQLKSWAMRLAKRAGMNKAKVALARKLAVIMHRMLADGKSFNPTVRIKPVAAAA

SEQ ID NO: 233475 - protein, 456 aa, unidentified
MQVVYDRCCGCDVHKKMIVACVLITLASGEVQRHIRTFSTMTAGLLALSDWLESLQVSVVAMESTGVYWQPVFNLLEDGRQIILVNAQHMKAVPGRKTDVKDSEWIAQLLRHGLLSASFIAPAPVRELRQLTRYRKTVVQERARHVNRVHKLLETANLKLGAVATDVLGKSGRSMLDAIANGEQDPEVLAQMACGRLRKKLPELRLALDGRVQPSHRFLLKRLLSHVDFLDRSIETVQQEIDEHVKGFAEAMTLIRTLPVQLQAGAATVIAEIGVDMTRFPSPEHIASWAGLCPGSCESAGKRIAGKTTKGNPYLRSVLCEMALIVTRMKDTYLSAFYHRIARRRGHKRAVVAVAHKLLVIIYSMLKNKTPYQELGADHFDQIDPAKVERRAIARLQQLGYKVTLTRPEEDSDQGATQVTDQHVTTPAKRTSRKTVTKARKAVLRKVPTKQALEKV

SEQ ID NO: 233476 - protein, 362 aa, unidentified
MNAVGIDVSKGKSMVAILRSYGEIISKPFEVKHTVSGIRSLIEQIQSIDGESRIVMEHTGRYYEPLVRELSKADLFVSAINPKLIKDFGDNSLRKVKSDKADAVKIARYTLDSWTELRQYSLMDEIRNQLKTMNRQFDFYMKHKTAMKNNLISILDQTYPGANTYFDSPAREDGSQKWVDFSATYWHVDCVRKLSLNAFIDHYQKWCKRRKYNFSRSKAVEIYEASKELVSILPKDDLTKLIIKQAVEQLNTASQTVEQLRTMMNEAASKLPEYPVVMAMKGVGKSLGPQLMAEIGDVSRFTHKGAITAFAGVDPGVNESGSYEQKSVPASKRGSSTLRKTLFQVMDVLIKTKPQDLSLIHI

SEQ ID NO: 233477 - protein, 386 aa, unidentified
MPDPSTTQQTVPAPFAAFIGIDWADQQHAICLCPVGSDRVEHATLSHTPEALAEWKAKLIERFGGRPVAVALEQRRGPLLHALMGSEWLVLYPIHSTTLENYRGAFLPSGAKDDPGDAFWAADLLRHHHAQLRPWRPDDAATRTLARLVEDRRQAVNLRTRLVQKLTAALKEYYPQALEWAGPKLSAPLAWDFLERWPTLAAVQAAVPGTVREFYQQHPCRDGEAIEARCQQIAQGQALTADAAVVEAGAMKTAMLVGQLRAMGPAIERYEERIAELFGSHADAKLFASVPGAGPALAPRLLVAFGSDRDRFQKAAELQCFSGAAPVTVCSGQSRWVHWRWACPKFLRQSFVEFADQSLSRSEWAGAFYEQQREAGKSHQAVLRAV

SEQ ID NO: 233478 - protein, 419 aa, unidentified
MYSSWLEVTEGREEEVIFVGIDWSGHHHDVCVIDDEGMVLAKSRVPDGVVGVRELHEMLATHAEEPDEVIIGIETDRGLLVAALVADGYRVFAINPLSVDRYRDRHRASGAKSDPGDAKVLADIVRTDRGNHRPIAGDSELADGVKLLARTHQNFVWERQRHVNRLRSALREFYPAALVAFGTQLASPDAVAILSIAPTPELGRRLSRSKIAAALRRAGRRRNIEARTERIQAELRSEQLRVGAHLEETYGVITASLVRLITGLNDQVAGLEQDLHGAFEQHPDAEIILSLPGLGSTLGARVLGEFGDDRTRYPDARARRNYAGTSPITKASGTHRVVLARFARNERLYDACHLWAFASLSASPGARGHYDAKRARGKTHSQALRALANRLVGILHGCLMRGELYQEHLAWPVRETDAA

SEQ ID NO: 233479 - protein, 338 aa, unidentified
MSLYAAIDLHSSNSVLAVMDGDGKPVLQCRRPNALPRLLADLAPYREDLVGVAVESTYNWYWLVDGLMDHGYTVHLVNTTAIPQYDGLKHGDDHSDALHLAQLMRLGLLPEGYIYPREQRATRDLLRRRFALVRQAVRLMLSIQSSFSRNTGKQLSGSAMRQLTPVQLEALFPDLTTRYGVLIQFKLWLTLQDQITALERWVRKDLLRPDLLMRLQSVPGIGPILGMTILLESGAIERFASVSDYASYCRMVESVRLSNGKRKGHGNRKCGNRYLCWAFMEAATYAVRFHPSIRRWYERKRARKHRVVAIKAVAHKLARACYHMLHEGTSFDPTRAFG

SEQ ID NO: 233480 - protein, 343 aa, unidentified
MSIATIGIDIGKSKFHVCGLDERGHVTLRKMFSRTALIRFLANTPPARVATEACAGAHFIGRKAESFGHEARLLPAQYVKAYVKSQKNDYADAEAIAEAATRPTMRSVPVKPADRQALQLLHRQRSGWVAERTALANRIRAMLLEFGITIPKNLSQLRKQLPLVIEDAENELPDRLRQLLMELWDDMMRLDERLTSLNAELDTYAHTDPQTKLLLSIPGVGPIVATALISGIGNAGAFRKGRDLAAWLGLVPRQYSTGGKTRLLGIGKRGNRHLRMLLIHGARSVLRVVSNRREDDGLRRWVERVTARKHPNVVAVALANKIARVVHAVLRHQTPFEARLMSH

SEQ ID NO: 233481 - protein, 499 aa, unidentified
MKIIFVFGRLSHTRNGEIDKPVEKSRPINWMIRRVRVERISGRRRVCGEPDDSLRPCVTYLWHALRSVQEMTMPYRIAGIDVHKRMLAVVIADVAVEGDYEFESRQVGTSPGELRKLAEWLVEKEVEEAVMESTAQYWRPVWSELEETWMPRRREQEDASPMSGTLHLAQAQSNRGAAGRKRDFPDAERLVKRYTSGELTLSFVPEGEQRLWRTVMRRKYQVTCDRVQLHNRLECLLEEARIKLSSLVSDLLGQSARRMLHALAEGETDPSRLAALGDWRLKATPEQFRDALGACSNLHPVYRQLLRLMLEELQLIEKQIKELDKQMARLLSAHQDAVTRLAEVPGLGVDSAQQIIAEVGAKAETFPSAKHLASWVGVCPGSSESAGVNYSHRSPKGNRQMRRVLNQAANAAVKTKGSIFELLFQRLVVRLGYAQAICAIAHRLCRLIWKILHQGVRYEERGLAVILKRKQQRAAKMVRDLRSLGYRVEFVGSKSECPA

SEQ ID NO: 233482 - protein, 440 aa, unidentified
MNESNEPNPTNVPAPSEYGAFVGVDWGDEEHAVSLRAANGTGIERRSLQQTPEALAQWLNTLRTRFANQKIAIALEQSRGPLLAGLTQYEHVVIFPVNPKSLARFREALYPSRSKDDLGDADLLLEFLLKHRDHLRPWHADTVQTRQLTLLNEQRRNFVDSRTELTNRLLAHLKMIFPQAIDLVGGDFASLMAGDFLKKWPSLQALQKVSPSNLRKFYYGHNSRSKDLIAQRLELVKNAVALTTDAALVAAHSLAIQTIASQLAGLHPFIEKYDAQIAELFAAHPDAYIFDGLPGAGPSLAPRLLTSLGTDRARFPSAVDVSCYTGIAPVTEQSGKSKWVHIRWSCPKFLRQSWHEFANCSIRFCPWACHCYNEYRKRNIDHQEAIRKLAFKWQRIVWRMWQDRQPYDEARYEAALFKKRGPKTSATTSQADSLSGEQKK

SEQ ID NO: 233483 - protein, 396 aa, unidentified
MENVYVGIDVSQRKCDASIKDRSHNELVEPIVFEPNMEGIDKLLKVVTEVCKRLKAEPIFGMESTGIYHLPIYAELTALDYTVKVYNPTQINAFSKKSLRKTQTDKIAARTIADALSYEGVPRERHVDKETMKLREYCRIRHRLNKKASNAKRQIARDMDLIFRDYRRVFKDIRGKASRTLLKEYTTSQAICDLGEKELTKVLRMNSGGVLGQERAKKLLEACDKNIRSNLEEPCVEEIRYLLQLIELMEEQISDLDKKITKCFDQDSELMTISGIGEVNGAIIYSELGNIDDFEDGSDIVAFSGLDPSIKESGKFKGTKHHISKRGSPYLRSALYSSAVVASRCNPVCKRFYERLLARGVPKKAALCAVARKLCYIIFSVMKNKRPFYVPEDLKK

SEQ ID NO: 233484 - protein, 339 aa, unidentified
MNITMIGLDIAKNVFQVHGVDAQGRVQVSKALRRAKVEPFFATLPPCVVGIEACGTAYHWARVLRALGHDVRLIAPAHVKAYVRRNKTDAADAAAICEAVSRPTTRFVPLREVEDQAAMSLHRARAMLVKQRTMLINALRGHLAEFGVVAPRGREGADALCAIVADEEERRIPELLRPALMIFAGQIDTLDAQVAMIETQLKSWRAQDAASRRLETIPGVGLLAATSIAAKVRNPERFANGRCFAAWLGLTPRQHSSGGKVRLGPISKAGDGYIRRLLVSGAQSLLTANARRRQPDPWLAKIAAHKPRMVAAVAVANKLARIAWAVMMRQTNFRTAAPV

SEQ ID NO: 233485 - protein, 406 aa, unidentified
MKLTCGVDWAEAHYDVALVDGDGVVVARARIDTGATGFNKLLALIVEHEGSAQDTPVSIETDKNLLVVALVEAGFTVYPINPRAVARYRERYGQAGGKSDPGDAAVLAHILRTDRHLHRQMPAVSEQGRAVKALARQHQEAIWALHQTVSRLRSVLLEFYPQALQAFPNLTHKAALTVLAAAPTPASSRQLTRRRVVTLLQRSGRGNHPTLVEQILTDLHTAALRQPPQVEQALGHTVVGLVGIVVAMQRAVDDLELELAREFDQHPQTAILGSAPGLGPILAARILAEIGDDPQRFANPNSLRAFAGTAPVTIASGRSHYVKARKVRNKRLADACHWWAFTALTKSAGAREHYDKRRAAGDHHNAALRNLANKLLGRLWWCLANNQTWDDTAAWPHRLKPDSVAA

SEQ ID NO: 233486 - protein, 343 aa, unidentified
MKLNRIGIDLAKNVFQLHGVDEHNQVVFKRRLNRDKWLRVLCESVEPGCEVGMEACGGAHHWARQLQARGFVVKVIAPQFVTPYVKSNKNDANDAEAICEAMSRPNMRFVKPKTVMQQDIQAVHRIRQELMTHRTAKANQIRGLVTEYGIVAPLGLVALRSAIPCWLEDAENGLTVLFRSLLHGLWGDLRRFDERIATMDAEVDRIAKSDPVAQRLQQLRGVGPLIATALIASVGNGEQFSQGRQMAAALGLTPKQHSSGGKARLLGISKRGDPYLRSILIHGARAVAAAAKNKDDRLSRWVTELAQRRHLNVAAVALANKTVRMAWAMMRNEADYDPNFVAA

SEQ ID NO: 233487 - protein, 433 aa, unidentified
MSKFFNSPTVGIDVSADFSFVAILAPNGDVFKKPFRIKHDVSGFNHLLKEIKKVEEEFNMKTAIFMESTGVYHLSLFHFLNKNFDNTFVINPLVTKCNKNVDIRKVKNDKKDALSIAQIGKFQNIKLSQSVSMDIFQLKSLVREYYKLTDNCSTYKKKLSTDLRVIFPGYKNVFSNVTSNSSIAILNEFPTPQAILSAPKDLIINILMEKSKKGLIWSEKVYSNLINYANEANIIGLPLHGFSIKITSTINIIKALESEVKNLLEQIESLINSPNFSEQIRKNIEFIDSIPGIGRLTAVTLISEIGDINGFLRPKHLVAFFGIDSSVNESGKFKGNQNKISKRGTRIGRRALYAAALACIRTNRNGVPINKVLLHYYQINLNGKKPKVALVAIMHKIINYIFAVLRNQTPFEVRDPRIHKQMYLENKNKNTAA

SEQ ID NO: 233488 - protein, 480 aa, unidentified
MSQSKTRKSPSRKRHRQIRKAQGRIRKVGLEATAAAAKPVPAPQVIHPHAAAIDVHSDNHVVCVGPGQVRTFGAYTIDLHAIVDHLREHGVTTVVLESTGVYWVALFELLESRGFEVFLIEPSQARHCGARPKTDVADCQWLQRLHTYGLLRPSFRPPESVLTLRGYWRQRQMQVRYAASHVQHIQKALEQMNVKLTEVAADIMGLTGTRIIEAILHGERGAEQLASLRDPSCKKSAKEYAKALVGTWRPEHLFALKQAYALYRFHHQQITECDQCLAEELARLPNRAAGKPFQPRPRRNGRKNNDVRFHAAEPLFKALGVDLTLIDGIEVNTALVIVAEIGVDVSRFPTEKHFASWLRLSPQLEESNQTRKKRSPRRGKNRLAQALRMAAQAVSRTKTPLAVFYHRIKGRLGGKGAITATAHKLALLVYRLLKYGVEYVRQSLDEYAAKVKEQMERSLRRKAAQLGYDLVPKPAAAQPS

SEQ ID NO: 233489 - protein, 344 aa, unidentified
MVTTIGIDPHKATHTAVAIDGSENVLGEITIRADKDQTRKLVDWAGSVDGDGRLWAVEAATGLGYLLSQQLIASGETVVDVPPVLASRIRVLSSGKSQKNDENDARSVAIAALRRDGLAEVHREDEAAVLRMLAKRHRELTALRTQAVCRLHAMLAVLRPGGMGHRLSAKQASRMLGGIRGLDAVGEQRRLMAKTHLVDIRRLDRDLDANKARIRQAVAAAETSVTDIYGVGPVVAAFPIGYTPPIERFTTPDKYAAYNGTAPIEVSSGGKTRHRLSRRGNRTLNHAIHTAAVTQISHHTEGRVYYDKKLDEGKTTKEALRALKRRISNAVYRRLITDAQRHSS

SEQ ID NO: 233490 - protein, 415 aa, unidentified
MELVERVAALDIGKATLMACIRVPHEDKPGRRLQEVGEHATTTRALLDLADKLRCQGVTLVAMEATSDYWKPVFYLLEAEGFECWLVNAKHVKNVPGRPKTDKLDAVWLAKVVERGMCRPSFVPPKPIRQLRDLTRYRRTLVRERSSEKQRLEKTLEDAQIKLTSIISSLFTISGREMLQALIDGERSPKALAQMARGKMRNKIGALEEALTGHFSDHHAFICTMMLERIDGLTDRIEQLSVKIDDVMAPCTTQIEQLVEVTGVGRTSAQEIIAEIGVDMSRFPSSDHLVAWARYSPQAKQSAGKSKSASTGRGNPWLSGALGEIGIGVARTETFLGSRYRRIAKRRGKRRALVAVGNSVLTIAWHLLSDPDARFHDLGADFYESRLNKDRRTRTLMRQLEQLTGQRVTLGAAAA

SEQ ID NO: 233491 - protein, 463 aa, unidentified
MKKFYLGGDVSKGYADWIILSENKKPMSDNFQLDDTYDGHCKLYAILKSYFDKYPDLEMYSAVESTGGYENNWFNSLKSYQKMLNIKVARLNPLGINFNQKARMSRNVTDAVSAYSIAEYIINHPENVQYDQDENWKALRRHWNFVEMQKMQRTQNINQLETILYSANPTLMRFKNDKFPNWLLELIILCPTAKKLAKAKPERLAKIPYLTLGKAKELVAETKQSIASTVDENTEMLVKQIAMQIKNNSMNIKIQMALIEKEFKCPKIDILKSFIGIDTTSAIGLLLEIGSIERFPKVKSICCFYGLHPKFKQSGDKIIGVKMSKQGSKNMRKTLFNIAKGAIVNNPLIKELYEKKVSQGMKKMAAIGVCMHKILRIIYGMLKHNKPFNPDIDKQNRKRSKQKLQEDKLQNFAYVEKNRKHQEFDSKAPISKKQSKKRKEHVLSQCEITTHSAGSTRPFHIPS

SEQ ID NO: 233492 - protein, 316 aa, unidentified
MSEIVVEQFVGIDVSKGTLDVHIAPSGKSLHVTHDDWGIGQILELLKETCPVLIVMEATGGLEIRLASELAGAGLPVAVINPRQARDFAKATGQLAKTDQVDAAMLAAFAQAIRPQARPLKDADTRALDDLVSRRRQLITMRVQETLRLGTATSKPMQKSLNKHIAWLDKQIGQIDSDLTKRLRQSDLWRAKDDLLQGIPGVGSVTSMTMLAKCPELGTLSRREIAALTGVAPLANDSGKHRGKRFIWGGRAEVRAVLYMAAVAAMRCNPAIKVFAARLKLAGKPAKVVIVACMRKLLTIMNAMLKNNTAWNPQNT

SEQ ID NO: 233493 - protein, 346 aa, unidentified
MIPVASDVHKGRCWMAMIPPGGELKMLEPIECTREAWRERLAELPPEAEIALEVSTSGYFVMSVLEEAGWRERAHWVHTAGIDSLRKQKSDRLDTRRLVKKLAVHDVEPLPEAWFPPPPIRALRLLARQRCGIARLRAQTKNRVNSLLEMHGLRPERCVFTVKGRAWVQQQALSQAAQLCFERFFRLYDFLTAERQSSEEELETAAAAFPQVALLQTIPGIGHMLAAVVWSEIGDLARFASADALLNYTGLVPSSYASGEVARQGPITRQGPAWLRWALVTAANALTRSKSPLGERYWHLRRCHKLPNVAKTAVAGSVARCAYGVLKHGAPFQAERWGRRAGKLGQ

SEQ ID NO: 233494 - protein, 342 aa, unidentified
MEYYAGIDVSLEQSSVCVVDATGKVVREAKVASEPEALVIFFQQLGMPMTRIGLEAGPLSQWLHAGLSKAGFEVVLLETRQVKAALSAMIVKTDRKDARGIAQLLRMGWFRPVHCKSPPAQEIRALLVGRKLLQSKLQDVELSIRGILRGFGLKVGEVSKGRFTVRIRELIVGQPMLERVIEPMLRAREALRAEFHTLHRAMLGIVRADVTCRRLMTVPGVGALVAVTFASAVDDPARFRRSCAVGAHFGLTPKKYQSGETDVTGGISKVGDAMVRTALYEAANVMLTRAGKFSTLKRWALEVAKRRGMKRAKVALARKLSTVLHRMWVDGSDFRFGKEAAA

SEQ ID NO: 233495 - protein, 351 aa, unidentified
MYYIGLDVHKKTISYCVKDVSGQVHTEGAILATRAELDRWMTTLPQPWTAAMEATIFTGWIYDHVLPQAAGLKVAHPLMLRAIAASKKKNDRIDASKIADCLRCDFLPECYMASSETRERRRTLRYRNLLVRQSVQLKNKIAGLLMESGVSYNKRRLHKVGYFQELLTTSPDISEGLRPLLRLCRETLVRQQKIEGALVRALVRDPLLADRVQRLMTIPAVGPITALTWALEVDDVKRFRSVKHAISYCGLCGAEKSSADVVKRTPLSKQRNKHLQSVLVEAAKLAPRRNPDLAVVYDKEKQKGNANRATLAVARKLVAYLLAIDRGQRDFVVAEEQNPTAAQSAAAGRKK

SEQ ID NO: 233496 - protein, 370 aa, unidentified
MAQPTPIFVGLDVHKDSIAVAHAQGQCADPPVFVGAIGPGQAALDKLIRRLQAKTSDLVFAYEAGPCGYGLHRYLTGQGFTCQVVAPSLIPKKPGDKVKTDRRDAVELARLLRSGDLTRVYVPTVDDEAIRDLCRARDAARLTLKNAKLRLQAFLLRLGRHYVGRADWTDAHRRYLAKVVCPTAAQQVVFQESVRAVDEQVDRLRRLEAELLERAPAWRLYPVVQALQALRGVQWLVAITVVAELGDLTRFDSPRQLAAFVGLIPSEYSSGPARRQGGITKAGNGRARRALIEGAWAYRYPAKVSEHIQRRIDGLPKSIQDIGWKAQVRLCKRFRRLTARGKHPNVAVTAIARELIAFMWAIAKEVSVPA

SEQ ID NO: 233497 - protein, 380 aa, unidentified
MPEDAPRPAQAAIRTDLGAIFVSWLVTSLSPGGGEKMSKHSVQAGDIAGLLRRFAQLKEKARARTGRDFPVITIQEAGLDGFWIHRVLQSEGIESHVVDAASILTSRRRRRAKTDKIDGETLVRTLLAYKRGEPRVCSMVKSPTPEEEDRRRICRERRALVAERVQHTNRIKGLLFAQGAFDYEPLKRNRRAHLEDLKTGDGRPLPVNLKAQISRELDRLEVVLQQLQTVDAERDALLEPASEASPAPAAMLSQLKGIGPEFATILYTEGLFRGFDNRRQVAAYAGLAPTPWQSGSVDHEQGVSKAGNPRLRTTMIQLAWLWLRHQPDSALSRWFQDRVQRNGGRMRKTTIVALARKLLVALWKYATSGVVIEGAVLKAA

SEQ ID NO: 233498 - protein, 391 aa, unidentified
MIYVGIDVAKDKHDCFITNSEGEVFFEVFTISNNLDGFKELYQKIESVMEAVSKVKVGLEATGHYSYNLLGYLLDKGFPTYVINPLHTNLYRKSLSLRQTKTDKVDARTIASMLMSDVNLKSYSDTSYHNEELKSLTRYRFDKVKERAQLKQSISRLVCILFPELEKLVPTLHQNSVYELLYEFPGAKQVASAHLTRLSNLVETASKGHYTKDTAIKFREAARTSIGSNMPAKSLELKHTIKLIRELDSEIEEIENEIKIIMDKINSPILSIPGISYRMGAMIIAEIGDFSQFDSPDKILAFAGMSPSTYQSGQLDNCYARMEKRGSRYLRYALFNATVYVCTWDPTFKAYLSKKRSEGKHYYVAISHAAKKLVRVIYHLERSGQQYKKAI

SEQ ID NO: 233499 - protein, 349 aa, unidentified
MKYVGIDFHKNYSFITEMDEVGTVMYQRKLSNDRNTLTNYLNLLPSNTKIAIEATCNWYYFYELVEEHDLDISLAHPLKTKAIASARLMNDKVSSETLAHLLRADLLPTAYIPDQTTRDIREVLRMHAFLTAQRTRLKNRVHAILLKNGLSCPYADIFGRTSLIWLNELKLRPCYQDAITSYTRLTESFNEEMKLLKQKIKTLAFDHPYAWILDTHPGISYYSGLLIAVEIGDIKRFPNAGKLCSYAGLVPTMHASGGKVRMGSITKQGSKWLRWILVECAIHAIRKSDHYQDLYTRVAQKHGNGTARVAVARSMLRAIYAILRFNRPYQERQLRPAPWGHNLIKGSKI

SEQ ID NO: 233500 - protein, 341 aa, unidentified
MSESALIGIDLGKHNFHLLGQDKSGREVFRKKLSRAQMMRFFGNLPSCVVVTEACAGSHFIARQLAAMGHTTKLISPQFVRPFVKGNKNDFIDAEAICEAASRPSMRFVTPKTESQQTLSVLHRMRESLVHDRTKTANQMHGFLLEFGISLPKGSAIMKRLAAVLAEHELPVRLTVLLQRLHDHFVYLDEQIKELDKQLACQLADDDLGSRLLSMPCVGPITASLLAVEMGDGKQYRCSRDFAASVGLVPRQYSTGGKANLLGISKRGDKHLRQLLVQCSRVYMQRLDHQKGALADWVRALLRRRHSNVVACALANKLARIAWAIAAHHAQYEAGPDALNA

SEQ ID NO: 233501 - protein, 366 aa, unidentified
MDKDTTYVALDDSKRKLAVAILRPGQTELEQREMAKEPHLIQRVFRRLAREGAVAACYEAGVSGYDLYRQITACGVACHVIAPALTPRRPGQRIKTDRRDAAKLVRLFRAGELTAIHVPAEAEEAVRDLTRCREDVRRDVLRWRHRLLKFLDRHGRLYVTGKNWSQRHWAWIRQQRFDLPPLQRTFEATLFALEQARAHQAELDQEIAALAEQAPYREPVGWLRCFRGIDTLSAMILRAEIVDFQRFTHPRELMAYLGLVPSEYSSGDRERRGALTKAGNTHARRVLVEAAWHYRHRPTLGRALAARAQGQSPACRAQAWRAQQRLYRRYRQLVGHRTRPPVAVAAIARELVGFIWAVMTQRAPAA

SEQ ID NO: 233502 - protein, 353 aa, unidentified
MQCIAFDSHKHYTWALVEDETGKVLREQRIDHARGALQGFLEEFEPGSPVAVETIGNWYWITDEIEAAGMVPQLVNARRAKLMSGSINKTDRLDARGLNRLQRSGTLPTVWIPPRELRDARELPRTRMVLVRQRTRLKNRIHANLAKYGLKTAEVSDLFGVRGRMILDDLLNEFPTETRYATEALIEELDHLQAKIKELEGRTAELFGGIEALQLIQTLPGVALILGVVILTEVGDVNRFPSASHLASYAGKTPRVHASGGHVRHGKTRPDVNHYLKWAYAEAANTVMMHRRRHPRRHVSRLYERVQRRRDHQKAIGAVGRHLAEVTYWMLKKKEAYRDPATDRAEVESKRET

SEQ ID NO: 233503 - protein, 393 aa, unidentified
MVVSVGIDVSKDKHDCIIVNSEGEVLADVFTIPNTMDGFECLSQRIRGCTTPQDRIKVGLEATGHYSYNLLGFLVDNGLLTYVLNPLRTNLYRKSLSLRKTKTDRVDARTIAAMLLSDTGLKPYTDTAYHNEELKSLTRYRFDKVKERAKLKSSISRLVCILFPELEKLVPTLHMASVYALLEEFPSAKQVAGAHLTRLKSLLETASKGRYKRDIALAIRGAAQNSIGSRMPAKSLELQHTIRLIRELDTEIAEIEEQIQSLMDELNSPITTIPGLGFRMAAMILAEVGDFSRFDSPDKLLAYAGMSPSTYQSGQLKNCYPHMEKRGSRYLRYALFNATKYVCHWDPAFAAYLAKKRAEGKHYNVAVSHASKKLVRLIFAMEKSRQPYCPLAA

SEQ ID NO: 233504 - protein, 368 aa, unidentified
MSDIIRIGVDTSKSVFQLHGVDAAEQPVLRKKLRRRDFLSFFAQLPPTKVGLEACGGSNYWARELMALEHEPKLLPAQHVRPYVRRNKNDKQDADAICEAMSRPRMSFVRIKSAEEQAAQMLMTTRQRLIDYRTQLINTIRGHAAEFGLTAAKGPAHVQPLLARVAKDVTVPALAKELFAIHGQEYDRLKIELREIEAKLKAWHRGNEMSRRLAEVDAIGPIGGCLLAIKAADPQAFHCARDFAAWIGLTPKDHSTAGKMRLGVITRAGDEALRRTLVVGATSVIKQVRNGKAHPSPWLRDLVARKPPKLAAVALANKVARIAWKLMVSGERYDAARAGIVSPTARVAPCSRRQGRCAPPAAVACGQP

SEQ ID NO: 233505 - protein, 370 aa, unidentified
MDSITYVGLDVHKTTIAVAVADGARSSEVRQLGVFANRADVVRKMVERLERPGRRLRFCYEAGPCGYGLHRFLTGLGHSCTVVAPSLIPIKAGDRIKTDRRDAVMLARLHRAGELTGVWVPDAAHEAMRDLVRARATAIKVLSKARQHLGGFLLRHGRIYSGVRTWTQAYRRWLTTVRFDHPAQQIVLQDYIDAVTDAERRVDRLTLQITDHLPSWSMAPVATAIQAMRGVALINAVTIVAEVGDFSRFGNPRQLMAYLGLVPSEHSSGGAVRRGGITKAGNLHARRALIEGAWTYRMQARVSRKLYDRLEALPQNVRDIAWKAQVRLCNRWRRLAASGKPKVVVTTAIAREMAGFIWAIARQVQPQAVG

SEQ ID NO: 233506 - protein, 399 aa, unidentified
MRKVAGIDVHKDFLEVAYRLPSGRIETKQVEYTLEGISRLIRLLRRHGITDVYMESTGDYYLPLYYALKGAGIRPHVMNAYKIRRPEPNKTDKKDAIWLLEIGESELFSDSYVPDEDIQALRFLIRKRMKLVDRISDIKREINSILWRLGLQAAHYAKKLRSKKKRMLLLALLEGRLRPDSISDSDVRHLYDILSRPEFRAYVFVLRSRLADLAHLESQLEEFDREIAALARKFEDAIRILMSAPGISFILAVGILAEIGDISRFPSPAHLASYAGLVPTARNSGGKRRSGRPSKKSNKYLRRYMFLAGMAAVRSNSRVVREFFMRLLGRGKHYKVAVVAVARKLLCVIWYLLRRGEFWCEDGYFKRPRRLPRGRRVRISVREAIAILVRAGYEVRRKV

SEQ ID NO: 233507 - protein, 368 aa, unidentified
MLFIGMDVHKDATVFCLFDPAAEPKAQYRHATVPTTREGLESILAPLNRNCRVAFEVGLQAQWVAEIVRPLTTDLQVANPSKMPWLFRDGRKNDKLDARKLATLLYLDQLPRVHLPRAEVSIWRSLINHRRARIKRRTMVKNQIRALLRARALRCPCKSLWTRKGQAWLRTLVFDPVCVHMMQGLLEELALIEGHIDGVEVQLDGIAKTQPAIALLRTIPGIGPRSAEAIVAYTDDVRRFGNRKQFASYFGLTPTQDASGRVDRHGHISKRGPSVVRWVLVEATHQVVLRCPAFRAFFERIVRGKPDRRKRAIVAVARKLLTIAFAMWRDGTPFDPARVSPPAENKKPAPQAANDPKEKPEMTHKPAA

SEQ ID NO: 233508 - protein, 350 aa, unidentified
MPKRNVPRPAAVYGIDIGKNIFHVVGLGSDGAPVQKVRFRRDTLLQFFGRAAPAIVGMESCAGSQWIARKIQALGHKVRLIPAQFVKPYVKSNKSDIIDAEAIAEAATRPTMRLAAIKSEEQADLQALHRVRDQMIGTRTRLINQMRAFCLEFGIALRQGAGLFKLDLPHVIEDASNDLSLAMRKLLANLFADLRQLEHRIGDVTREIEAIASREDAARRLMTIPGIGALGATALLAAVGSGRQFDKARDLAAWLGLVPREYSTGGKHKLLGISKRGNRYVRKLLVHGARSCFRHLDRTKDRLGSWLDGLQSRMHPNKAVVALAAKMASIVWVVLTRPGALYERRDPAFA

SEQ ID NO: 233509 - protein, 466 aa, unidentified
MSANKPTGAKKKSVPKKVDWKALEVVHPDAAGIDVGGSEHWVAVSPDRDPEPVRRFGCFTADLREMACWLVEKGVRSVAMQSTGVYWMPVFEILEQQGLEVYLVNAQHTKNVPGRKSDIQECQWLLKLHAFGLLNNSFQPNDEIRIARTLWRHRGNLVAEASSVVQRMQKVLTERNVQLSNVLSDISGVSGMKIIKAILDRVRDPWELAALVEPGVKATPEDIVKSLEGNWREELLFVLRQHVEFYQIYQKKIRACDLQLRKHLQSLGSKLDLQAQPLGPRPKGKKLSRNAPTFDLRTELYRITGIDWSQINGIDVLTAQTVISEAGADLSAFPSEKQFASWLGLCPTNQQSGKKILNRRTRKVVNRATVAFRNAAMTLVRSQSYLGAQYRRLRTRLGAPKAITAMARKLACLFYRLIKTANSTWTKAPNTTRPDIANSRSERWQNERKSLAFNWLSRRLHESSSH

SEQ ID NO: 233510 - protein, 345 aa, unidentified
MDHFAGLDVSVKETSICIVDDTGRIVREVKVSSEPEALLKVLGNPIYRFKRMGLEAGPLSQWLFSGLAEAGLPVVCVETRHMQAVLKAQINKTDRNDARGIAQMMRVGLYRPVHVKTLRSQKLRMLLTHRKLLQSKAIDIENDLRGTLRNFGLKVGMVGRVRFEARIQELVENQPDLAILIEPLLIVRRALREQFVILHRRLLAIVRDDEVCRRLMTTPGVGPVVALTYRATVDVPARFRKSKSVGAVFGLTSARHQSGEVDWSGEISRCGDEMMRTMLYEAAQSMMHSKKWSWLKAWAMQVARRRGMKKAIVALARRLAVIMHRIWVDGTEFRWTREQAAAAAA

SEQ ID NO: 233511 - protein, 363 aa, unidentified
MKIMTGIDLHSNNALCGLMDESGQRLVHKQLPCDLPAILQLLDPYKERIATVAIESTYNWYWLADGLRDHGYNVVLANPARMKPYDGLKHTDDVSDAYFLTELLRLKILPTGHLYDRKTRPVRDLLRRRLLLVHQRISLILSFKSLNERTLGQRVALSRVKAMKADEARALFTDPADQLLSGTEIELMGHLTQAINKIEAHVLNVAGKWSTYQRLQELPGIGKILGLTIALETGDAKRFADAGNFASYCRCVKSLRTSNGKKKGENNRKCGNTYLAWAFVEAAHFACRYDDQCRRFYDRKKQQTNPIIATKALACKLAKAAWHVMVEDVPYDAERVFGPGKKTDFGETGREPAKGSGPTSQTD

SEQ ID NO: 233512 - protein, 405 aa, unidentified
MMNAVGIDVSKNKSTVTIRRPGDEVVLTPRDIIHTRSAIDDLIKTINDLDGETKVCMECTGRYYEPMASWLSDAGIFVSTVNPLLIKSFGGDSIRPVKTDKADSQKIARFTLDHWANLKQYGLMDETRNQLKTMNRQFAFYMVQKTAMKNNLISLLDQTFPGANNLFSSAVRPDGSQKWVDFAYTYWHVDCVAGKSLDAFTEHYRNWCHRKDYDFSAAKAKAIYDISKDLIAVLPKDDMTKMLIHQAVDQLNVASKTVESLRIKMNEVASTLPEYPVVMAMNGVGPTLGPQLMAEIGDVTRFEKRGSLTAFAGVDPGKNDSGDHCQKSVPTSKKGSPHLRRALFQIMDGLIKRSQVGDEVYDFMDKKRSQGKPYYVYMTAGANKFLRIYYGRVKEYLASLEEQEQ

SEQ ID NO: 233513 - protein, 339 aa, unidentified
MKEVSTIGLDLAKNVFQVHGVDGVGGVVLRRALRRSQVLVWFAKLPRCLVGMEACATAHYWARELEKLGHEVRLIAPAYAKAYVRRNKNDPADAAAICEAVGRPSMRFVAIKSTAQQAAAGIHRVRDLLMKQHTMLRNQLRGLMAEFGLVAAKGQRGLSELIAILVDPEDRRLPSPLREGLVAIVETLRGIDRKLEAIDRQLVQAGRENATYRHLITAPGYGPILASAMVAMVVDPGAFRRGDDFAAALGLVPRQEGTGGKTWLGPISKRGNGYLRRLLVNGATAVLKSKRAKEDPWLAKLLTSKPRKLVAVALANKMARIGWALMTRQEDFRGSLAVA

SEQ ID NO: 233514 - protein, 399 aa, unidentified
MISVGIDISKEKSTACVLKPYGEVVCSPFEINHTEKDLSELSAMLLRFNEDVKVVIEATGIYHLPVLSYLQDRGIFVAVINPFEMKQYRSQGLRSVKTDKKDSIAIANYGIDHWFRLKNYEISEGIYQELKILGRQYSHYMCMRIESVQALTHLLDYTMPGIKNLLKGWQDSTEKDKLSDFVEEYWHFENITKLSLEEFAESYKLWAKIKGYHQSQNKAVKIYSLAQDGIPTLPAEMESTQIMIQQSVSVLRQINTTLKTILTRMQELAKKLPEYPVVRAMGGVGDILAPKLIAEIGDIRRFHSSKALIAYAGIDAPPYQSGQFIGTNRKISKRGSSTLRKIGYEVMRVLKTHNAPEDSAVYWYILKKESEGKSKKVSKIAGLNKFLRIYYARVKEVYQ

SEQ ID NO: 233515 - protein, 384 aa, unidentified
MYKHNIFFIGLDTHKVSTEVANIEDQHGTKPIHYGKIKTTKAAITKLARQYQSKYPQATLHFVYEAGPCGYWIYRLLTSLGHCCYVVAPSLIPKKPGERIKTDKRDALKLAKLLKSEDLTPIYVPESEDEAVRDLSRARETAMKDLKDAKYQLKALFLRNNITCKVNDNWSNQHLRWLTELVLPHPSQHIVLQEMIQIITERLAREKRLANELFHQAKQWRFYPVVKALQAVRGIKLLIATGIVAELGDLRRFDHPRKLMAYLGLVPSEHSSSDKRRLGSITKCGNGRARRLLVQGAHTYKHKAKVSTELQKRQESLPKEITDIAWRAQLRLCRRYNRLMSRGKHRNVVVIAIAREMAAYIWAIAREVVISPVNPRLRVSRVPA

SEQ ID NO: 233516 - protein, 345 aa, unidentified
MEHVAIDLGRPNSVMSEYGKDGRKVRRTFRLNRPSLDRWFKDRPCCRVLIESCTESEWVALHLESLGNEVIVADPNYAAMYGERNRRVKTDGRDADALLEANRLGVYHRAHRRSPEQRNVIGVLGTRDSLVRSRTRVINLTRALLRREGYRVRSGAANSFWLRVAELDPPSELRDLVRPLLEMMEPLNDQLTTLDRQLSDLSSQDLRIRLLQTAPMIGPVTSAAFVALIDDVTRFPTAHRVESYLGLVPSEWSSSERRLRMGITKRGDSRVRWLLVEACWSILRSRRLDCRELRRWAEGIATRRGRKIAVVALARRLAGILYAMLRDNKPYDPTRIGTHTRRKAA

SEQ ID NO: 233517 - protein, 374 aa, unidentified
MSTEYFIALDVHVSFCEMAVVTKLGKLAKRLTCPTSIPALVEALEEVRRPRRLTFEEGPLADWLTRNLRQRVDELVVCEPRRNRLIAKDSDKDDPLDAEKLAQLYRGGYLKGVHQAGTLERSLLKQHVGFYHDRVRERVRQGNQLVAQLRRHGVFVKVADLLDAQERRAAWSRLPPNRILHADLDRLLQVYDVLLRQEMEIHQDLLRGARREEPVRRFAELPGIGWIRAVTFYVYLDTPWRFQSKSALWRYCGIGLKRRHSGSGPMNSRLDHAGHRRLKDVLLGAAKSAAASADSPFADKFHYWTQEEGLHPSIARRNVARSLAATLWSLWKTGNKYDPALVHGVGVKALSRNRTTIEPGRSSLGGTGQKSPRA

SEQ ID NO: 233518 - protein, 346 aa, unidentified
MGVDLGEQWSHYCILGLEGETLAEGQLRTTQEDFASFFQGWNAARVVIEVGTHSAWVQEVIRGCGHEVLVANPRLMEGSKRRKRKNDRIDANKLARLGRVDPESLYPIQHRSREVRQDLVMLRARDALVAARTEIINTTRGLVKSMGTRLAKCSSRSFAQKGEEAVAVEMREALLPLVRLAATLSADIKEYDKKIEELGREKYGHTALLRQVKGVGPITALAYVLTLENPQRFVKSRDVGPYLGLVPKQEDSGESQPQLGISKAGDTMVRKLLMGSAQYILGPFGPDTDLRRYGLRLCERGGKNAKKRAAVAVARKLAVLLHRLWVSGEVYEPLHNAMSAPIAAAA

SEQ ID NO: 233519 - protein, 340 aa, unidentified
MDVEYAGKRYVGIDLHRRRSVIVAMSPQGEVLDTTRIDNDPFTLAELVASWGESPEVVLEATYGWYWAADVLAQAGATVHLAHPLGVKGFAYRRVTNDERDAADLADLLRMGRLPQAWIAPPDVRGLREAVRHRCKLVALRSGLKAQVHSVLAKQGVHVAMSDLFGAGGQRLLDELALDAPFNARVVSLRRLIDAFTFEIDILAKRTAADLAADRGYRAVQTIPGVGPVLAAVFVAEIGDVTRFHRPEQLCSWAGMTPRHRESDTKVHRGRITKQGSHLVRWAAVEAVQRLHGGPIGSARARLTERRGANIAKVAAARKLLTLVYWGLRDGHIRCLASAA

SEQ ID NO: 233520 - protein, 403 aa, unidentified
MSRAIAREEQMGVVIGIDPHKGSHTAVAIDGCEQQLGRIQVRSGARQLEQLLGWAAEFEERVWAVESAGGLGYLLAQQLVGAGERVLDVPATLASRVRVLATSKSQKTDRHDALSIAIAALRARDLQPVQRADHAVVLRLLAKRHRDLGRARNRSACRLHALLIELVAGGISKEITVNAAQELLDRIEPSDPVAQIRHDLACEHLDDLRHLDTQMRVSKRRLEAAVRASGTTVTDIFGVGPVVAAMVIGHTRNVDRFANRDHFAAYAGTAPIEFESGGRSIRRLSLRGNRQLNHAIHIAAVTQIRHRHSPGRAFYDRKVAQGKTKKEALRALKRRITDTLYRQLRADAERNQAGPGGQAGTTHQSSVTGFEPRTPALRKNHSRTQPNARTRPSRTPQPTRTTT

SEQ ID NO: 233521 - protein, 320 aa, unidentified
MIYIGIDVSKDSFVAAYPAQSGYTTKTFKNTSNGVHEFITSLPADSHCVMEATGNYSMLLLYLLQTAGKPVSMENSQKIKHFSRAMLSVTKTDEIDAKMIALYGEKMNPKPYKIPAESILFLKQKRTVLRQLKKQLTATRNLQEALSVLPMQDPKSKTTVEQTIQFLKDQIAAMEKEITNLSNQEYRRQMEVLTSLKGIGETVAAALITATGGFTYFRNAKQISRYLGLCPTYQQSGTSINIKGHINRNGDSYLRSQLYVAAIASIRCNDQCKETYKKLRERGKAGKVAIIAVANKLIRIAFALVTKNQKYNMEHTPVLA

SEQ ID NO: 233522 - protein, 408 aa, unidentified
MQVTFGIDVSKSTSTVCELIGESKNELTITNNRPGFIQLLHELTAFSKHPQIIFEATGVYSRTLQSFLEDYGYDYVILNPLKAKKEMDMGLRHNKTDKTDAYHLALIQRLYHHPINQLQSQTYKQLNALSRFYDQLTADLVMAKNRLHQALQSTFPEIENLFSSAKGKNYWQIVVRYPHCDLVRREDKKQLINWLMSLKGIAFKHAQRTTDKLIELARLAYPVVSCSDIEVQQAQYYARRLLNLSDQRENLIARMVKLAKSLPNHDLENLESIPGFAQTTAVRVLAELGDLRRFSNPNKINAFIGIDPGRYQSGEMDSNLSITKHGNAVARKLLYRAIGQIDNAAKTNPCHIADYYESKKLSSQTKGFKKIAIASIHKLIRTIYALIINDQPYDYNVATHNQKDFSRN

SEQ ID NO: 233523 - protein, 485 aa, unidentified
MAKRKESTFERLQRGQPLNRRERREVANGLNSPDPGWEIVHPHAAGIDIGNESHYVAVALGEDEHPTREFGSWTADLERMADWLQACGIQSVVMQSTGVRMAVYDVLQRRGFDVHLVDARGTRNLPGRKSDVQECQWLLKLHTYGLLRRCFLPGEEIRRVRTVWRLRDQHVKEAGRAVQHMQKALTEMNVQVHNTISDLSGVTGQAIVRAILEGERDAARLAALRDSRIQASEPELVQSLRGNWQEDALFELRQAVEAYDFYRQQMKQCDAQLEQYLAALPSREPVAAPPTAETPEASRKRPVRRGFRKPRKAPGNQPALDLRTELQRILGVDATSIDGIEVMTVQTVVAEVGADLSAWKTERHWASWLNLAPKREVSGGRVIRHTREHRTNRVGNAFRMAAQSLIRSESYLGARFRYLRAKLGGIKAVKAMARTLACLYYRLVTRGQAWVDRGAAEFERRRQEREFAMLQRKAGDFAMKLVPAV

SEQ ID NO: 233524 - protein, 457 aa, unidentified
MSNKLRIKKKSKKFKAADLPVELKHVNLNAAGIDIGSDRHMVAVPGGRDEVTVREFGAFTTDLHALADWLEKCGVTTIAMESTGVYWIPLFEILEQRGFEVKLVDARKSKNVSGRKSDVLDCQWLQTLHTYGLLTGAFRPADEICVLRGYMRQKEMLVQSSSMHIQHMQKALQQMNLLLHNVVTDITGVTGMTILKAIIAGERDAKVLARHRDPRCRNSVQTIAKSLVGNYREEHVFALTQAVEIYEIYQAKITDCEVAIARFLASQAQQTEDEPPPSSKSIPPRQRIRAGVDLRSRLFKLTGVDLFSIPGLGADTLLTILAEVGFDMAPWKSEKHFASWLALCSGTKISGGKVLDRKTKRSTNRAAQAFRLAASSLARSNTALGAFYRRIRARIGAPQAITATAHKIAVTFYSLLKHRTTYMEIGENAYQQKFRERRFKAMQKQALAMGYQLIPAT

SEQ ID NO: 233525 - protein, 482 aa, unidentified
MSYRNIGVDLGVTAKHKAQVLDEQGKKIVPNFSFHISKENLDALCQKALEGASQGTKLRFICEPTEMSWFPLTIYAKSNDHEIIRIKSHKAHDLRKYFARHKKDDKLDANVLSVMPMIDEKATEEIYLPDAKTFALERCNRQKEKITNDIAAIKNRLSSLYHWVMPGLLDCFECHFDSRAREFYRHFTNPFRAKEAGVDGINRILEPAGRQKMKPDLPEKLYSVACSACKLYANASSWIDFKEIQNEVHIELQLLEAQEESLAQVKDRVESLYEEVHPSKIIETIKGIGENLGPSFVSMIGNSQRFSSQSKLRSFAGMIPKQDESGENNKKGLPMTQEGPSRFRRDLFLAAEISRQWDPQLAKIYYEEMVNKGHCHTEVICAVIPNLLNRILCVLKENRPYELRDTDGNPISTKEAEQTIKQQFTVPEEIRQRTRSRRSRKNRKEERIRNLFKRQLEASQDSYNIPPKDMLQKFEKYFNNAS

SEQ ID NO: 233526 - protein, 339 aa, unidentified
MKITTVGLDLAKAVFQFHGADSSGHAVLRKQIRRGQLAQFFAQLPPCLVGMEACGSAHYWGRKLQELGHEVRLIPPQYVKAYVKTNKTDAADAEAICEALGRPNMHFVPIKTMEQQSILAVHRVRTGFMKARVAIGNQIRGLLAEFGIVLPVGTLKPSKVREAMMDQELPDTFERLMELELDHLREVEDRLSDLERQIEGWHRASEASQRLASIPGVGVLTATAVVASVGDAGQFRNGRQMAAWMGLVPKQHSTGGKPKLLGISKRGDTYLRTLLIHGGRSVLRHSTAPGAWHNRLVQRRHQNVAAVAMANKNARTMWALLAKEQRYDPLQRRSQLQAA

SEQ ID NO: 233527 - protein, 327 aa, unidentified
MLHFGIDVSRDKLDCAVLDEQGRRVKRARTFTNDGPGVAELIHWARGVEVEQSRHFVLEATAAYHELAATRLHGAGLVVSVVNPAQVRALARGLGMLSKTDLIDALLLAQYARLAEPRQWHPTTPYLQQFNAMLMRLDCLEADLRREQNRREQATVRGSAQCVLASIDGCIEFLRGQCKAMGKAINEHVLAHDSLSQRITRLRTIPAVGDKTAKRMAAVLGANDFASAKQVAAFLGLIPVKSESGSSVRGRAHLSKAGNPRVRASLYMAAVVAKKINPDVKALYDRLCAQGKTKMSALGACMRMLVHICYGVLKSERDYMPPEARHS

SEQ ID NO: 233528 - protein, 317 aa, unidentified
MNARGVVVRQEKVATDRASLEGFIARLPKRGKIAMEATGNWYSFYELLEDRRAGQQMALAHPLKTRAIAEAKIKTDKVDSQILAHLLRADLLPTAYIPPRETRDVREVLRYRASLVSYQTSLKNKVHAILSKNGIILEVADLFGKKARRLVAELPLRDCYRLELDGYLCWAAALREIVATVDAHIRTLVTDSPAATLLMTIPGIGYYSALLIISEIGDVHRFPSAKKLCSYAGLVPSVYSSGGKTRHGAITKQGSRWLRWILVELSHHFYKQDPRLAAMHARIARTHGANSAKVAIARHMLAIIYAMLRDNRPYRTG

SEQ ID NO: 233529 - protein, 408 aa, unidentified
MEVVHPRCAGLDVHKKTVVACVLVPERKEVRTFGTVTDELLRLADWLASEQVTHVAMESTGVYWKPIYNVLESTGMELLVVNAQHIKAVPGRKTDVKDAEWIADLLKHGLVRASFIPSRPQRELRELVRYRKGLTEQRGHVVQRIQKLLEGANIKLSDVASDVVGVSGLTMLRALAAGEQDAERLAEMAKSQLRNKREELKLALRGSFGEHQRFMLKNQLGLLEFLDEQIAELNQEVERRLRPFETLLERLRAIPGIGPRNSEQILVEVGTDMNRFPTDSHFASWAKLCPGNDESAGKRMSGRTGQGSRWLRATMVEAAWSATRVSNSYFAAQYHRLVPRRGKRRAAVAVAHSMLIVVYHLIKDGTVYQDLGPRHFDELDRKRIARRAVQRLQSLGFDVSLKKVATVS

SEQ ID NO: 233530 - protein, 354 aa, unidentified
MHKAGRRRCRVGGPGGKIHPEETKVKQPIHAGIDVSAATLDVAIERGRGAVWTGSFENTAAGHQRLIRALSKQGRVVRVCLEATGVYHLDAALAMRERGIEVMVANPRATKDFARAQMQRSKTDQTDARSLLEFVRRMEFQVWEPPPRELLELRALSRHLAALATMRAQEKNRRHAIDQVAGLGDPVREAIEEHIEYLDGAIRELQAKALEVVASSPVLEVAFAHLVSVKGIAAASAVAILAELAVLPQDMSAREWVAHAGLDPRRHESGTSVKGPVRISKVGNRHLRRALYMPTIVAVQHEPRIKALYEKLLLRGKKPMQANVAVMRKLLHAIHGMLRNDQHFDGERFFATEA

SEQ ID NO: 233531 - protein, 266 aa, unidentified
MENFYFIGVNVSKKKLDFCVMFEGKVVHEEETANHQSAIMSLLHHFEEDYGIDNTRMLVCAEHTGQYTFPLACACKTVECKLWLENAAEIKYSSGVQRGKNDKVDARRIAIYASRFQDKVRYYEHPTEDIERLKQLESERTLYVTDLVKYKGQMKDQKDYMPKALYERKMKRLQALMDDLKEAIQAITDEMDEVIASCPVLFRQQELLMSIDGVGRVVATNMIIATEAFTRFDDPRKFNCYAGVAPFSYSSGSSQHSKGKSVASGR

SEQ ID NO: 233532 - protein, 348 aa, unidentified
MKHYAGLDVSVKETNVCIVDESGKLFRERKVASHPEDLVAMLSDPEFGLERVGVEAGPLSQWLFEGLAKADLPVFCIETRHTKAFLDALQQNKSDRNDARGIAHMMRVGLFKDVHVKTLTSQKRRALLTARSLLQEKAIDLENEMRGLLRNFGLKVGHASGGTFERRILELVENDADLREIMEPLLAGRRKLREGLARLEKRVLAEAKQDEVCRRLMTVPGVGPIVSLAYVSTIDIPSRFRHSRSVGAILGLTPVLKQSGEMSRVGHVSLRGDAMMRRLLYEAAQSMMTRVVKWRWLKAWAMNIAKRHGSKKAKVALARRLAVVMHRMWIDGSEFRWSREDTVSTVAA

SEQ ID NO: 233533 - protein, 386 aa, unidentified
MRTSDVSTPIAGRISTIFVAIELSQKSWLVTMHCPDKDKISHHKLEGGDHGGLLALIDRMRARVARALGAVPRVVSCYEAGYDGYWLHRLLMAAGITNHVFDPASIAVDQRARRVKTDRIDGEKMLRTLMAYLRGEPRVVRIVRVPTAEMEDARRASRERARLTKEQTAHTSRIKALLRLLGMAVGNPRRRDFPSWLSAQRDWQGQAVPPRMLAEIRHEHARLMLVRERLDALMEPQPTVDLPPAAAQMAERGALLLGLKCLGPAFATTLSSEVFYKDFRNRREVASYFGLTPSPWKSGGIDREQGISKAGNPRARGAAIELAWLWLRHQPNSKLTQEYRRRTLDASKRIKRVAIVALARKLMIALWRYLTTGLVPEGAVLKAVQM

SEQ ID NO: 233534 - protein, 411 aa, unidentified
MDLLYARCAGLDVHKATVVACVRRPGPQPDARHAETATFATTLRGLEALAAWLTAHEVTHVAMESTGVYWRPVFAVLEGTVEVLLVNARHVKMLPGRKTDVRDCEWLAQLLECGLLRGSFIPPAAVRDLRDLTRLRKTLIRERGHHVNRIAKTLELANIKLGTVVTDIMGKTGRAILQALSTGVEDPAQLAACAQGSIRKKQAALREAVEGRLTPHYAFLLQQHLALIDTLDAHIATLDTRIEAAMVPFAETAALVQTMPGVAARAAPAILAETGMDMAPFPTAAHFASWARLCPGNHESAGKRRPTTTGKGATWLRATLQETAWAAVHTKKSYYRALYYRLKARGGPKKAIVAVQHAMLVALWHMLTRRVPHQDLGAEYFAQRNTERTRRHHVRRLEQLGYQVLLAKEAA

SEQ ID NO: 233535 - protein, 333 aa, unidentified
MGEPGSCKAGLGPASAEVIKVQQQVFVGIDVSKVQLEVALSTGEGFAIGNDKGGIAELVRRLRTAAPELVVLEASDYERAAWIALWEAGLAVARVNPRDSYHFAQARRRLAKTDRIDARGLCEFAARVRPAPNVPPEAANEELRALVDRRRQLVGMLVAERNRRQQMPKSICKSIERTIRALKHELGTIDQAIELKLSESAELGSSRALLRAVPGVGPVACATLLARLPELGRLNRREIAALAGVAPFDRQSGAWRGPSAIFGGRAEVRAALYMATLTAVRHQPALRAFYQRLRERGKPAKVALVAAMRKLLAILNAVLKHHTPWNPLCHTAG

SEQ ID NO: 233536 - protein, 361 aa, unidentified
MDATGQEVGAPLRFAHNRAGLQLLQARLHALPEPATVAMEASGHYWLGVERYLRDANVPVQVINPLQVSAFRTTGVRRTKTDRRDAFVVADLLRIGRTRPNYVPDDTILQLRLLVRFRWSLADRIGDTKRSLLAVLDRVFPEFADQFNDPFGTSARALLARASSAAEFAELDLAELTAVLERASRKRFGEEKAAAVRDSAVDSLGVAALGPVGTMQVQALIGQLNLFEGQTRESDAVIAELLAERAQHLTSIPGIGPVLAGTILAEIGDVHRFPRLEALVAYAGIDPSVFESGQFHATRQHISKRGSPHLRRALFLAAHSAQLRNPELHAYLERKMAEGKLYKVALIAVAREEQRPYEPRQ

SEQ ID NO: 233537 - protein, 420 aa, unidentified
MAFKIFRFNCCGLDVHKTWIYACIGITDSNGRTDYKQARFSSFSKGLKELCDWLAKYNCSEVCMESTGKYWIPVFNVLEKADISVILAHPKYTKPQKGNKTDRKDAKWICNLFMCEMIKPSFIPPADIRHLRDLVRYRFKLTCMITGEKNRAQNCLTVSNLKLDDVFSDVFGKSSRSITEYMLAHPGEIFDVAPFVDGRCKTPVEEIQAAVDGAISPEQAVKLRQCLSHIDELEKHLKEIEREILRLSDKYEAALDLIRTVPGFGKRPMTAIQILSEIGGDMSVFPTAKHLVSWAGCCPRNDQSNKKIKSTRISRAGNYIKPILVQIANGLLRSKKHPEITDRYKRIKSHRGHKKAIIAICRMLLTAIWHILSDLKPYTPEGYLEPRPVKESKVLTKSQALHLLKQRGYIIKDDAEPALN

SEQ ID NO: 233538 - protein, 375 aa, unidentified
MEAVSFEQVVSRGCGLDVHKKTVVATIDGEGLKRSTREFGTFTRSLTELKDWLLENGITHVAMESTGVYWKPVYHVLEPSGIKVWIVNARHVKNVPGHKTDKKDSAWLCKLLLAGLLKPSYIPPREQRELRDLTHYRKKLVQDIASNKNRIIRILEDCNVKLSSVLSDTGGVTATRLIDKLCEGKSVTMQDIDAVYHKKIEATREELWEACNGIVSEHHVYLLQTIRANTRHIETLIEELNQKIKKVLSPYENALERLREIPGLSRKTVEDLIAEIGLDMEVFPTAEHLCSWVGVSPGNNESAGKKKRTDHARKQAGQIHTDGGIVGCHPYQGHFLQGPLSPLSRPTGQKTSRGSRGTLHSQVGLPHPQRRCPLP

SEQ ID NO: 233539 - protein, 353 aa, unidentified
MDKVTRIGVDLAKNIIQVHGVDSMERVVLRKAISREKFLEWFANLEPCLVAMEACSAAHYWGRKLRALGHEVRQIAPQLAAPYRKGGKHVKNDRLDAEAICEAAGRPHMRFVPVKTVEQQNVLLLHRMRDGFVEERTALVNRLRGELVEFGVFLPQGINAFRAHFVEALEDGATELNGVARTALLRGWEHLQGLDQQIAWCDAQVATHVKHDSNAQRVMAVIGIGPLTASATVATVGDARLFKNGRQFAAWIGTVPKQKSSGGKTRLGRITKQGNTYLRTLLFQGARSAVTSAHRRTDRLSRWIVQLQARVGWYRTLVAVANKHARILWAILAKGERFDPSYVSTPSTPGQPR

SEQ ID NO: 233540 - protein, 402 aa, unidentified
MNCVGIDVSKGKSMIAVMRPFGEMVVSPFEVRHTASELSELARLLKSLDGETRVVMESTGNYHAPVARLLHDAGLYVSVVNAMLVHDYGNNSLRRAKTDKKDAVKLANYGLDHWLTLPRYVPDEDTRLMLKTCYRQYQQYSKVQTMLKNNLISLLDTAFPDVNRLFTSPPRADGSEKWVDFVATFWHCECVCGLSEKAFTAKYQRWCRKHRYNFSEEKALDIYASACGHFGVIPKTDTAKLLVEQAIFQLRATSAALAALKQEMQSLAASLPEYPVVMEMFGVGPTLGPQLMAEIGDVRRFHSKKALVAFAGIDAPPYQSGQIDVRSRSISKRGSASLRRALFLVMGVILQCAPGDEPVYQFMNKKRSEGKPYRVYMMASANKFLRIYYASVKAYLDSLEHA

SEQ ID NO: 233541 - protein, 409 aa, unidentified
MNVIYPRCAAIDLGKDILVAAVRIQDGARVDRECRTYGTTSEQLQDLSGYLSDHGVTQVVMEATGSYWKSVWRSLEPDFELLLAHPASVRNLPGRKSDMNDATWMADLLAHGLIRGSFVPPAEITAIRELTRTRKQFVREVARHTQRIQKILDVANLKITGLITDVLGTSGRAMVRALVAGESDPERLADFAHPRLRVKRERLVEALRGQLTDQQRHLMAMHLKLVETLESSIAELDREIESAVEPFRPIVDRLTVMPGISEVSAPALLGEIGVDMTRFKTHRHLVSWARLCPRLDESAGKVHSTRTLKGAAWTKTLMTQAAWAAIRTNHSYFQAQFLRLRARRGAKKAIVAVAASMLTAIYYMIRDQTDYRDLGRDYFQKRDRAKSARRFVSQLQRLGYTVQITEATA

SEQ ID NO: 233542 - protein, 345 aa, unidentified
MKITAIGIDLAKNLFQVHGVDERGKAVLRTQLKRKDVASFFANLEPCLIGMEACGSAHYWARKLSEGGHTVRLMAPQFVKPYVKTNKSDRNDAEAICEAVTRPNMRFVPVKTAEMQAVLALHRARQGLVKARTAQANQIRGLLAEFGVVIPKGICHIAKRLPEILEDGENALPGMMRQLLQRLGEQLKTLGQQVAEMEQQIKLWHRDNEQSRKLEDLAGIGPITASAFVATVGDAKSFKNARQVPAWLGIVPRHEGTGGKLRPGRISKRGDAYLRMLLIHGARAVIAQLERKPHATDGWLNKLIARRNKNIAAVALAAKNARTAWALLAHERRYRCDYVTPAAAV

SEQ ID NO: 233543 - protein, 389 aa, unidentified
MDLVYARCAGLDVHKKTVVAGVRVPGPQRGERRGEVQTFPTTMSGLMALADWLVAHEVTHVAMESTGVYWRPVYAVLEGLMTVLLVNPRHVKMVPGRKTDVKDCEWLAQLLECGLLRSSFVPPRPIRDLRDLTRLRKTLIRERGHHVNRIEKTLELANIKLGSVVTDLMGNTGRAILEALSLGIDDPDKLAACAQGLLRKKQAALREALVGRLTPHYAFLLQQHLSLIDALDVHIATLDARIAEAMAPFADAAALAQTMPGVATRAAQAILAETGVDMAAFPTADNFASWARLCPGNNERAWAAVKTKKSYYRALFHRLKARSDSKTAIVAVQHAMLVALWHMLKHRVPHQDLGADYFTRRDTERTRRHHVRRLEKLGYQVLLVKEEAA

SEQ ID NO: 233544 - protein, 387 aa, unidentified
MFYCGIDVAKHTHTVVVLDEQGQVVKAAFAVSNDRAGFDGLLGQLAEYAGQVQIGLEATGHYWLALYDTLTHRGYPVAVINPLQIRAYRKLDLRKRKTDRVDARHIAAFLRFAQPRCTDPTLPVIMRLRELTRFRFNLVQQKGDAKRRVLCVLDRVFPEYEQLFSDVFLRSSRALLAEAVTPDEFAAFDLSELEQLLHRVSRGRFGQERAEAIQRAACQSVGVSFLTDAAQIEMRCLLAQIDLLEQQVADVEAAIEQVMAEIPQYITTIDGIGPVTGAALVAEIGDVQRFDTLEKLVAFAGIDATVFKTGQFEGNQRHMSKRGSPYLRCALWQAAGASLQHNPELKTYYDKKRAEGKIHGVALGAVCRKLLARVYVILREQRPYVNH

SEQ ID NO: 233545 - protein, 363 aa, unidentified
MSGRETAITTIAQSEPIRVTVGVDTHGDVHVAYATDQLGRHLATTRIATTPRGYRALGDWARGLGQVAAFGVEGTGWDGAGLARFLGAQGQVVVEVNRPDRQARRRRGKSDPVDAEAAARAVLAGQATAIPKTGDSMVEMVRCLRVARATAMKARTQAANALRALLVTAPVELREQLRDLDPSKLAATAARLRPGAIVTPTAATKLALRTVAERQLALTAELTTLDAELDRLTARAAPALRELCGVGAEVAGALLVTAGDDPARLRSDAAFSMLCGASPIEASSGKTVRHRLNRGGDRQANTALYRIVVVRLRWHEPTRKYMARRTTQGLSKKEIIRCLKRYVAREVFAALMKTNPNGLAQAP

SEQ ID NO: 233546 - protein, 287 aa, unidentified
MTALRSVMLSLEYVGVDIHKKFCQVVELDENGSLIDEYRVDLCTEGLTQFKTRMGKDDRLVMEAGGNAFFIASHLKSHVRDVKVVHPAKTRSIGAARIKTDKTSAKTLAQLLALQFVFPVWVPDIDIQTERALLCHRATLVKERASCKNRVHAILHRRGIIYSGSDLFCKKGREFLVSSLPLCEELEKIQMQSLLRLIDALSAEIESIDCHLVNRFKDNVDLHLLLTIPGVSFNAALVILTEIGDIRRFPTPDHLSSYAGLVPRVHQSGMTLRTGGITHAGRSQLRI

SEQ ID NO: 233547 - protein, 371 aa, unidentified
MSLLGIDLHSNRITVARLAVKNEAFETIMRTYTFERDSFQRFLDSLSENDYVLVENTFNAFWFHDQIADRVKKCLVYNTNEARREGNKSDKIDARKLVKKLGYYLMMGERREDLPTVYVVAAKIREIRSLFTTYQLYKKMKVQLKNRIHSILKQNGICIERGKIDRKDFEGRIDGFEISEIWKFQIRSALKTLRSVHEEQKEIKDQIYFLGYKLFKEEIELLMSIRGFSAFTATALMSDVVDVNRFSGARKFCSYLRATPKVKSSNRSIQIGHVNRQSRPLTCSLLTQSILQLSEAGEHMSEFYGRVKVGKSAGKSRIALIRKILVSAYHMLNRKQTYHWVEAELYSKKLEELQKKIRKLELLAEEEKKPA

SEQ ID NO: 233548 - protein, 334 aa, unidentified
MKTRYFLGIDIGKNSFHAALTVEGQNFYDQEVSNNTTAIKKYFQELKTKFGFKSDQLIVCMEHTGIYCYPLIDHLTKQRVKVCIEPALRIKQSQGMQRGKNDKIDSIRIAKYGYKNVDELRFWQPKREVLQKLRALLVVRERLIRAKTQFEVPIKESREFIEESIRFLAIKNCKATISAIKKDIKKVDAEISKVIKEDNQLQAQVKIATSVTGIGTIIAANMILTTNEFNDISNHKKFACYAGIAPFDNTSGTSPRRSHVSHMANKRIKTLLHMGARSAIQYSPELKQYYQRKLAEGKKPFSVLNAVCNKLISRVFVCIKNQRMYQKNYQLALA

SEQ ID NO: 233549 - protein, 370 aa, unidentified
MPDVSSTAPAHVRLWVSLDVHKLSIVAATLPPSGGQPELHRIETTERAIRRFVDRLGGPAGLAVCYEAGPGGFDLLRLLERIGVACDVVAPSLIPVRAGDRVKTDRRDAKKLVRLYRAGELVFVQPPTPETEGLRDLMRCRDDLRRARTAARHRVAKQLLRHGRVYREGVTSWTKMHRAWVARQRLDDSLGQRALDQMLLHLDGIDRQLDQLDRDLEQIAQQERWAAQVRILTCFHGISTRTALALIAEIGDFHRFSHPRELASWLGITPSEHSSGDQQHRGHITKAGNEHARRLLIETAWHYRHRPRPRAHQPADPRAWHAQTRLHRRYRHLTDHGKRSTVATVAVARELTGFLWAAMTDQPLRQETTA

SEQ ID NO: 233550 - protein, 337 aa, unidentified
MLFCGIDLHSNNSVVVISDDSDKVVYSRRHSNNLDEICAALSPYQSELAGVVVESTFNWYWLVDGLQERGFKVHLANTTAIKQYDGLKHRGDESDARHLAHVFRLGLLPTGYIMPKAVRGIRDLARKRMQLVQQRSVQILSIETQMDQQHGAHLSSNLIKKMSIDDVDAMPIGAMEKLALKANLTIMQSLDTQIDLIEKALAKECRSHPGFPLLKSVAGIGDVLATVILLETGEVDRFKDVGNYVSYCRCVGSIHTSNGKKKGEGNTKNGNRFLAWAYVEAANFAIRYCEVAKKFYQRKKAKRNGIVAIKAVAHKLARACFHMLKTGEVFSVERCFT

SEQ ID NO: 233551 - protein, 361 aa, unidentified
MMTDDPNATRRVIGGVDTHKDIHVAVVIDDLGRRLDTASFATTTAGYRDCYRWLGDYGEILAVGVEGTGSWGAGLSRYLRGRGVNVVEVNRTNRQTRRRKGKTDIVDAEAAARAVLAGEASVTPKAGDGPIEALRQLRLARNGAIKARTAAANQLHSLTDTAADELRTKLRGLTTLQRAKTCARLRAGDVFTPAGAAKRALRSVATRWLGLHAEISELDHAIRQILDRIAARLLERYGVGYETAGALLCAAGDNPERLATEGSFAALCGSTPVPISTGKTDRLRLNRAGDRTANSALWTIVMTRIAAKHPPTIAYMNRRTTEGRSKRAAIRCLKRYVARQLYNDIRAITTTNTNETTQLAA

SEQ ID NO: 233552 - protein, 343 aa, unidentified
MEHFAGLDVSVKETSVCVVDDTGKIIREVKVASEPGTLLAVLKNPAYHLKRIGLEAGPLSQWLFSALAEAGLPAICVETRHMRAALKAQINKTDRNDARGIAQMMRAGLYRPVHVKTVRSQKLRMLLTHRTLLQSKAIAIENDLRATLRNFGLKVGMVGTVKFEARIKELVENLPDLTVLVEPLLIVRRVLREQIGILHRRLMAIVRDDDVCRRLMTVPGVGPVVALTYRATVDVPARFRNSKAVGAVFGLTPSRYQSGEINLTGAISRCGDEMMRAVLYEAAQVMLTRTIKWSWLKAWAMQIARRRGMKKAIVALARRLAVIMHRIWVDGSEFRWTREAAAA

SEQ ID NO: 233553 - protein, 344 aa, unidentified
MLKFNVIGIDLAKNVLQICVISKYGELVSNKIVGRQKLKEILAKSSPSIVGIEGCGSSHYWGRLAESFGHDVRIISPKKVKAFLTGHKTDANDALAIANAAMQIGLKYSKPKNEEQQSLQSLEASRVFLSRNITSLSNHIRAMLYEYGIVSAKGAAGLRKVVQDTLEENNALPTCLISTLHQLWAQYLNLKEEFTKLEKNKNSIVRQVKPCKQLMALEGVAEVCAGMLYSSIGNGKQFKNGREASAFVGLTPKQYSSGGKVFMMGIDKKGGIKELRAALYQGAISIVTHLPDVPKTVKQAWLIQLVKRVGIKRTCIALANKTVRTAWAMLRYESEYEQQQLIAA

SEQ ID NO: 233554 - protein, 398 aa, unidentified
MENKSVFYLGVDIGKYHHQATLIDERRNQIGESLRFDNSLTGFELLTQTIKKRLPKNATVEIGMEATGHYYWHLKNYIADIGFGSLQIFNPIETQKLSKTRIRKVKNDKVDSLIIAQLVSQKTNNHPAIKENFELRQLKDLTRFCEKLKAQKRFYQQELSVLMERLCPEFSAYFSNIFLATPLMIIKKHFLGNIKSKQLVEAIMKTSRGRTSKAKAREIINMLENSIGKEYRCSNAKLQLKMLLESLDLSCKQIAKIKKQVEKASQQFEEIKYLNSIKGVSNYLASVILCEIGNINRFSNKGQLTAFAGLDASVKESGEYRRKQGNHISKRGSKHLRRQLYYAAKTAIMFDPELTAYYQKKKEQGKHYNVIMIAVARKILMRCYAVLKQKRLYKLRNS

SEQ ID NO: 233555 - protein, 295 aa, unidentified
MNHTFSVDNTDDGIARLVETLKRHTVVLTLLEATGRHERRVASELLEAGFTVAVVNPRQARDFARALGKLAKTDTIDAKVLAQFAQLGHARPCEKMPENRLLLDDLVARRRQVTAMLASEKVRWQVPQDKSTRAMIARVIRVLEQQREDLDRRIAQLIESDDDWRNKRELLSSVPGVGETTASQLIADLPELGKLNRQQIAALVGVAPINRDSGMMRGKRSIFGGRASARCTLYMAAFTAVRCNPVIRRFADRLRAKGKPFKVIVVAAMRKLLTILNVMVKENQSWNPRPALQSA

SEQ ID NO: 233556 - protein, 458 aa, unidentified
MAPRKRKKAAVSHALPPQLATVNLHAAGIDVGAEEHWAAVPACDDPQPVRRFGANTADLDALADWLWACDITTVALESTGVYWIPLFEMLEARGFQVLLVDPGKMPRNGRPKTDVHDCQWLQRLHTYGLLSACFRPEDQVVVLRSYLRQRAALLADAARDIQHLQKALTQMNVKLQHVVSDITGVTGLAIIRAILAGERNPQTLAQLRDHRCKQDAASIAQALYGNWREEHLFALQQALERYEFQHRQIAACDSRIETQLQTFADRSQGELLPPKRGQRRRHRNRPAFDPREPLHRMTGVDLTRIEGIDETTALMVISEIGLDMSKWPSEKHFTSWLGLSPHQRVSGGKVLSSRTRPTTNRAAAALRLAAASLHHSTSALGAYFRRMKSRLGTPKAVTATAHKLARLIYSMLKHGTAYVAQGMDDYEQQYRDRVVKHLHRRAKELGYELHPASAGTPA

SEQ ID NO: 233557 - protein, 335 aa, unidentified
MQIKHFIGIDVSRDTLDLSVVVDGRTLQHYCITNRTTDIESTINKIMKSLRATVDDTIFCMEHTGIYNLPLVKWLQNHQGKIWMESGVHIRKTLGLVRGKNDKVDSIRIAMYAYINRHQIKLWKAPRKLIERIAALLSQRLRLNKAKKQLNTANREQRLFMDKDIMRSLNRYTQKTVVVINKQIEAIENEILGLIKEDEKLNRMYQIITSVYGVGFVTATYILVTTNEFININNPKKYACYSGVVPFEHSSGSSVRGRTRVSQMANKNIKTLLHLAALSTIRKQGELQEYYNRKVAEGKNKMSVLNAIRNKLILRVFACVNQNRKYEKIYCYKFV

SEQ ID NO: 233558 - protein, 360 aa, unidentified
MRYCTTIGIDTHVKKNEVCALNTQTGEKATATLSGDPNQLISWIEKSGFSEPVCCCYEAGPLGFGLARDLSAVGIDCVVVATSKLPQRIDRKKNDRVDAEWLSRMLAAGSVRSVYVPSKEEESLCHLSRLRGEVASDLRRAKQRVGAFLLLTKTSYTLTKKRFTKTFYRWAESYEFELPADTFVFRHKINAVLRIEERLLQIENEIEHLIGKNPVLAARMARFRCIHGVGLVTAFTLVCEVYDFGRFRNGSAFASFVGLVPSENSSGQRVANGRLTKTGNSHLRRILIEAANCYSKPFKIAKTENVLVPEIVRIKAEKCANRLRKRRVALKERGIMPNKAKVAIARELCEWIYHIAVMST

SEQ ID NO: 233559 - protein, 344 aa, unidentified
MPSIVGGLDIHRKQITFDYLDLVTGEVKCGHIAPADREHFRGWLARLEDPAGVAFAVEACTGWRYVTEELRRAGIQAHLAEPADTAAARGRKKRAKTDRADARLQRDLLAQGRLPECWIAPEHVLECRALLELYHDLRAEHTAWVQRAHAVLFHQGAPAVHDLSRTDAPAELAALAREQLSPAGQLQIGACLRMGDALEAELAAVRCRLIAAARQLRGAKVLAESIYGVGPVTALALTCWLGGAGRFTSARKAVRFAGLDITVHSSDSKRSPGHLSRQGPPVLRWAVYEAGKTHARPGAPDHGYYAAVKDRKDGKRAALSEARKIIRRACHILAELGDDALTTV

SEQ ID NO: 233560 - protein, 397 aa, unidentified
MSELKGSFSGFVGIDISKDKFDACGITREETKLFQISATMDRKGFEKLKGHLAGTSVLIGMESTATYHINLFSYLVSEGYNVVLINPLLVSNYVKMQLRKTKTDKKDAAVIASFLLANGNTLMQRVPSSLIVDLRDLSRQRESLTDEMTALKMNIKRLLNITFPELEHISDVFTKSMLKLLQQYPSAFVLRDVDIGKLSQTLIADSYGHKRESFASELIKAARTSVGTSSPVKEMILKQETNLLLHLEDSLQEITVMLIEMSRKLMEDDINIMTSIKGIGDTTAANFLIEMGGDINQFEYSGKIIAMAGLDPAIYQSGKHEGKGKITKRGNRHLRKIIWNMTTKVIQYTDTFHAYYSKRRKEGLPYKKAVLATAHKLIRVIYAMLTKRTTFCPQPNS

SEQ ID NO: 233561 - protein, 424 aa, unidentified
MKRTQNEKILQIKFETLVVGIDIGKDTHYARAFDCRGIELSKLLRFSNTNQGYEALEDWMQEIMKDKGKTEAIVGFEPTGHYWFTLGDHLQRKGHRLAIVNPFHVKCTRELDDNSQTKNDKKDPKTIAMLVKDGRFRDVYIPEDVYQELREAVSERERLVEQMISLSNQVIRWLDIRFPEFNQVFKNWRGEAAWLTLRYFPTPAKVAAAGALSIVSTWRKKMKKPSLKKAEKLVNLAISSIGRTAGNEASEAALQNLLTQYEMVMQQKQDIEQLMQELLIKVPNASKLVGIKGMGMVAAAVIASEIGDISRFNDPRQIQKMAGLSLRENSSGKHKGKTTISKRGRRRLREGLFRAMITMLATNSEFRQIHQRNLSREQNPLNKMESIVALCGKLIRVIFAILTKGNDYDADRMLNDMKRSMKAA

SEQ ID NO: 233562 - protein, 321 aa, unidentified
MTYVGIDVSKVTFVVAYSSVKTNKTRTFKNTVNGVHEFVQTISASEHNCVLEATGNYSALLVYLLSEAGITISLENPLKIKNFARVMLTVTKTDEIDARLIALYGEKMQPAPYKLRSDAILVLKQKRTVLRQLKKQLVATRNLKGSMEVLPFFDPKCKKTIEKTITFLEKQIKEMEEELASLAQGEYKKQMDLLTSIKGIGVTLAAALIVATGRFSYFDNAKQLTRYLGLSPTYQQSGTSVNVKGHNNRNGDSNLRSQLYAAAFSSLRCNTGCKACFNRLKSNGKPGKVVVIAVANKLVRQAFAVVTHGKNYVDGFKSIKP

SEQ ID NO: 233563 - protein, 341 aa, unidentified
MVIHYIGADVHSNNTELCIERNGRIVQRYSLPTTVRAIRQVLDGLAGVKHLTFEEGPLAGWLYRGLKDQVDSLVVCDPRRNKLIASEGDKDDRIDAAKLARLLRGGYLRPIYHSDDLSRVALKRWVALYYDRVKDATRSINKLRGCCRIYGQRVPRRALRDPVVRQAWLASLETDLAEQVRVLLMGYDTHARQVRLARGQLARRARAFPIIAYWSALPGIGPIRATTLFAYLDTPWRFQRKNQLWKYCGVGLQRSSSGQDRKGRERPARLRLAWPMNTRLKNVVIGAALSAIRSRDNLFRQQYERMMADGALASNARHTVARKKLTVMWGMWKSQRPFEAR

SEQ ID NO: 233564 - protein, 384 aa, unidentified
MKKNSSRSVEMKATAYERNSGVRNAAGRTVIQPSDYMAVVGLDVGDRKTHYCILDLGGDLVVEGEVATREASLRVQFAGKGRMRIALEAGAHSPWISRLLVELGHDVIVANPRNVRMISRSDSKNDPADARLLARLAHVGPELLSPIQTRSQQTQVDLALVRARDVAVQSRTKLINTVRGIVKSTGHRVPKSSTLTFARKAKDACPEALQPALLPLLRVIEELTREIELYEKLVVHKAEAEYPETKAIRTIHGVGHLTSLALVLLLNNDRSRFRKSRDVGCYIGLRPKQRESGLRAPQLGITKAGDPLLRRLATQSAQYILGPFGKDSALRRWGLSLALRGGKNAKKRAVIAVARKLVILMHRIWITQEVYEPLRGVTLKSTAA

SEQ ID NO: 233565 - protein, 392 aa, unidentified
MSEPITTYVGLDAHKVELHVALLAPGATEPVTWRVRNEAVPVERLRRKLEKVAPDPVACCYEAGPCGYALQRQLDRGRVGCEVIAPALVPRKPGERIKNDRRDARKLAELHRAGLLTVVRVPTLAEEAVRDLCRARDDAREDRQRCRHRLDKLLLRRGLHYVGGRHWTKKHREWVYGLSWSHPAEQAAVDDYLLAIEHADARLVELDAQLAAVADSDPYREPVGWLRCFRGIDTLSAMLLLAELHDVQRFPTARALMAYLGLVPGEHSSGDRRRRGAITKTGSALARRVVVEAAWHYRHRAGVGVTLARRRLGQPPRVIALADRAQHRLCRRFRRLVEHKPGQVVAVAVARELVGFVTRALRAATSGANLAKTRKAGPFGSRPRFQVSNATF

SEQ ID NO: 233566 - protein, 368 aa, unidentified
MLFKAFTITNNLDGFNELHQKIASVMDEVTKVKVGLEATGHYSYNLLGYLIDKGLPTYVINPLHTNLYRKSLSLRQTKTDKVDARTIASMLMSDVNLKSYSDISYHNEELKSLTRYRFDKVKERAKLKTSVSRLVCILFPELEKLVPTLHITSVYALLSEFPGAKHIATAHLTRLTNLLSEASKGRYGKDTAITFRDAARASIGSNMPAKSLELKHTIKLIQELDSEIDEIENEIKLIMDEINSPILSIPGINYRMGAMIIAEIGDFNRFDSPDKILAYAGFSPSTYQSGQLDGAYAHMEKRGSRYLRYALYNATKYVCHWDPTFTAYLAKKRAEGKHYNVAISHAVKKLVRVIYHLEKTKQQYIKAA

SEQ ID NO: 233567 - protein, 347 aa, unidentified
MDQIIRIGIDTSKHVFQLHGVNAAEEPVLRKKLRRQDLITFFGKLPPTVVALEACGGSHHWARLLQSLGHQVKLIAPQLAKPYVKRGKNDAADAEAICEAMSRPTMRFVPVKTPEQQAALMLVGVRDRLIRQRTQLVNAIRGYAAEFGLIAPKGLRRIEPLLERVKTEETLPALARELFEMQATEYARLQVQLEEVEDRLMAWHRAHEGSRRLARIPGVGPIGAAMLVMKTPAPEAFRSARHFAAWLGLTPKDHSTAGKVRHGVITRAGDEILRSVLVVGATAVIRQLRRGQCAPASPWLVALLKRKPPKLVAVALANKIARIAWKLMVTGESYKGPSARPASACVV

SEQ ID NO: 233568 - protein, 363 aa, unidentified
MIMIGADSHKRTHTVVAVDDVGRRVGEKTVRANTDGHLDLLAWSRRLVDEAALGTSVTFALEDCRHLTRRLEADLLAGGGRVMRVQTRLMAEARKVSREPGKSDPIDAQAVALAALRHPELPVAELEGPAREVKLLSDHRRDLVGQRTRICCQVRWFLHELDPDLEVASRGLRRQSLVADLLAQLNRFDGVVARLTGELLLRCQDLNRQITALEHELRDLVRQLAPSLLAIPGCGVLSAALIVGETAGVHRFRDKDAFARFTGTAPVPVWSGSSNGKVRLNRGGNRAMNYALHMIAVTQARGIGPGRAYLDKQTARGKDRVAALRLLRRRLSDVVFASLRADDLASRPGARVNQAPVDLPAAA

SEQ ID NO: 233569 - protein, 347 aa, unidentified
MRFYNRQHRHYCGIDLHVKTMYVCILDTTGQVLVHRNVKSNPEAFLETIAPYRDDLVVATECMFTWYWLADLCAAEDIPFVLGHALAMKAIHGGKAKNDRIDSQKIAALLRGGLVPQAYVYPAAMRSTRDLLRRRLHLVRKRGQLLAHIQNTRAQYQLPEFGRRLAYPANRAGVAEHFTDPSVRKSIDVDLALIDQYDTLIGDLELTIVREAKRHDADAFHRLRSVPGIGKVLALTILYEIHDVTRFERVQEFASYARLVKCVHQSAGKKLGTGGAKMGNVHLKWAFSEAAVLFLRHTKDGKKMLAGIEKKHGKGKALSILAHKIGRAVFYMLSRGTVFSMEKFRAA

SEQ ID NO: 233570 - protein, 410 aa, unidentified
MQVLYPRCCALDVHKATVVACLRLVIDGKVVKEVRTFETTTASLMALSDWLADNKCTHIAMEATGVYWKPVWHIFAAGEFELVLANAAHVKNVPGRKTDVSDAEWLADLLAHGLIRASFVPDTPTQELRALLRTRKQLVREQSSHVLRVQKTLEDANIKLDSVISDVMGKSGRAMLKALIAGVTDPAKLALLADGRLKASPAQLREALRGRVTKNHRFLLRLHLRQIDALDDAIAAIDRQVEADIEPFRAAVKRLITAPGVKALGAQVILSEIGLDMSRFPSAAHLISWACICPRSDESAGKRRSTRIRKGSPWLKTTLVQAAWAAVNKKDSYLRAQFHRIKARRGAKKAIIAVAASILTAIYHMLKNGTTYQDLGPQHFDRRSKAQQADRLLKRLADLGYAVPLQPRTA

SEQ ID NO: 233571 - protein, 325 aa, unidentified
MTDTAYLGIDIAKRKFDVALGRPDGKSRAKAFANTPVGHQELLAWVARQHDGAVHACLEATGTYGDALAEALADAGYTVSVVNPASIEAYARSRLTRTKTDRTDARLIAQFCATQQPPPWVPLPREVRTLQAIVRRLDALEGMRTQERNRLAAEPTDAVIRASIQHVIDLLEDEMAVLRARIHDHFDQHPDLRTQRDLLTSIPGIGEATAAILLAEFGPLTRFRQAAACAAFAGLVPRLGESGSSVRRHPVLSKLGAPALRKALFYPAIVALRHNPIIAAFGHRLRAKGKHKMVVIGAAMRKLVHLAYGVIKTGQPFNANYVVQR

SEQ ID NO: 233572 - protein, 355 aa, unidentified
MNDAKYIGMDVHTATISAAVRDSSGNLVMEATLETKAETILEFVHGLRGSLRVSFEEGTCAAWLHDLLKPHVTEVLVCDSRKNALLRVGNKNDREDARKLSELLFLNKLHPVYHGETGIRTLKELARSYLTITRDLTRVMNRLKAIYRGWGIACAGQQVYAPRYRAEWLAKITEAGVRRRAEIYYQQFDALAALRQEVRRELLAEARKHPAMRLLRQIPSIGPIRAALLIALMQTPHRFRTKRQLWAYCGLALRTYDSGEYRFVGGQLKRSKKAVTIRGLNKNHNHDLKNIFKGAATRAAATAGPLQNFYEARIANGMKPPMARLTLARKIAAITLLVWKKGVRFDAEQLKQQAA

SEQ ID NO: 233573 - protein, 393 aa, unidentified
MQTPIYVGIDVSKDKFDYAAIDTQNTTIKKGSLQMNRDGFQELEKLIQSYPNAVVGFESTGTYHINIMSFLLSITNHVHLLNPALVKKFAEADSLRKTKTDAVDALVIARFLIHRQHNISATTEIDSAYLTQLARLRESITRDVAKTKTHLKQMLNIAFPELLKSANLFTDTLLHILIQFPSAKAIRKATKKGIRKTFYNLTKSRGKNPNLNPDQLYELAKKSIGTADESLEMAIQFDIKHLEFLQKQLDEVTSKLIDNVNKRFANELEILKSIKGIGDTTASHFLSEVKNIHRFSSAKQLIAYSGTDPSVKQSGNMIKKGKISKRGVSSLRRVGYLITCSVIRHDGVFRDYYLRKRAEGMVYRKAVIATWNKLLRVIFAILTKQVKFDHNHG

SEQ ID NO: 233574 - protein, 338 aa, unidentified
MSVTIIGLDIAKSVFQVHGADDAGNPLIRRKLRRRDVVRFFVNIERCLIGIEACHSSHYWARELIALGHDVRLIPTQYVRPFRRGGKNDANDAEAICDALSRPSINTVAVKSAEQQSVQSLHRSRERLIHQRTSTANQIRSLIAEEGVVCSRGITQLRRCLHEVIADPDGITPLLRSLIGQSLEQLAALDQWIGELDLKIHELARQSTVCRQLTRLPGVGPVIATAILGTVGSAHAFRNGRQFAASLGLVPGQRSSGGRTLLLGITKRGDAYLRKLLVQGARAIMRVVDRHDDRQSQWVRQLLERRHKHVVAVALANKLARTIWALLVKGEQFEMVRR

SEQ ID NO: 233575 - protein, 352 aa, unidentified
MKKTLFVGIDFAKANFVASALLGEDPDPVCLPKSFSNDDKGAKALISWIVKLLPETCSLSDVLVCGEHTGSYSLLLPRRLFDAGIDCWLENAVCIKNGSGRIVREKSDSADATMIAEYARTFYQKRVRLFVPESPVLSELRECNDIRRRLVKEQAGLMCKRHDAEVRLKAKPGSKAIVMNIKILDRQLAYIKEQIAKVDRQMCSLIRADKKLTRINDIIVSINGVGPVTAIALIVLTSGFTTFGSKRSLACFLGIAPFRSESGTSIQNGSRRSRQADSYYSGLLYMVAVSAMSWNPEIALYKERLLKKGKPKLVIINNIKNKLITIIWAMVKNDTLYDPDHHLKVAQQNQTA

SEQ ID NO: 233576 - protein, 413 aa, unidentified
METMVERCAGLDVHKDTVVACVRTPGLKGERQVELREFGTKTREVLALRDWLVEQGVTLVGMEATGVYWKPIYYVLEDTLECWLLNARHLRNVPGRKTDMQDAAWIAQLIEHGLVKPSFVPPPAIRELRNLVRYRKAQIEERTRESQRLDKILQDAGIKLSSVASDIRGVSGRTILAALVAGERDGQQLAELAKGQLRKKLPELEAALQGRFSRHHALIVSEILAKLDYLDELIERLSVEVGEAIAQFAQQVQLLDTIPGVDKRMAEALIAEIGVDMSRFGSSARLASWAGLCPGQHESAGRSRGGKTRKGSKWLRAHLTQAAKVAARGKGTYLAAQYARLRGRRGAAVATIAVAHSILVAAYHILDQLVPYHDLGGDWFVRRHSPEQHARRLVRQLAVLGYQVDLQELEEAA

SEQ ID NO: 233577 - protein, 343 aa, unidentified
MTFKQIGIDIGKNSFHVVGLGADGDIVLRKQFTRSRLLAFFGDRRSECLRVAFEACSGAHWLAHQLIAMGHDVKLLTPESVRPFAKAQKNDWNDALAIAEAAQRPGRHAVGIKSDEQLDMQALHRVRQRLVTARTSIINQLRGLLRERGLVIPSGRARFERYIQTELMEVGKVDLSAVSRALFETLIAEYTMIDARLSKIDDELEAFAKSNSVCRALLPIPGIGVIVATALYSAVANISDFRTGRDLAAFLGLVPRQRSTGGKTILLGISKRGNTYVRTLMIHGMRSAFYNRRKRESRMAEFMERLCARGMHTNKIVVASANKVARIVWAVLSRNEPFQPVAA

SEQ ID NO: 233578 - protein, 347 aa, unidentified
MRFYTNQHKYYCGIDLHTRKMYICILDEKGEIREHRNMKTDSDAFLKAIAPFREDIVVAVECIFTWYWVADLCHKEGIPFVLGHALYMKAIHGGKAKNDKIDSQKIAVLLRGGMMPMAYVYPAKMRATRDLMRRRNHLMRKRSELYAHIQNTNSQYNLPDPFGPISRHRNRDGIAGQFEQPSVQKSIAVDLEMIKTYDGVLSQLEKSIIKLANNHDPVSYALLQTIHGVGKIIALIILYEIENIRRFASVQDFASYSRLVKCAKESNGKKCGSGGSKIGNVHLKWAFSEAAVFFLNGNDPAKKYLDRLTKKHGKSKALSILAHKLGRAVYFMLKNKETFDQKKFLNI

SEQ ID NO: 233579 - protein, 368 aa, unidentified
MKEVTTRYVGLDVHKATISIAVADDGVAPVLFGTIANDAVAVRKAVSQLKRGGKLVAAYEAGPTGYGLHRQLTQLGVDCVVVAPALIPRRAGDRVKTDKRDAIALARLLRSGDLTPVWVPGQQDEALRDLVRSRFDAKDDLRRAMHRLAKFLLRQSIQAPPGIKPWSARHLQWLETLRLDHPTSQLVFQDYRVAVHAARERVRRLEADLERCAEQSPRLGTILALQVLRGVAFLSAVTIVAEVGDFRRFPNAPRFMSFTGLTVSEHSSGQSRRQGRITRAGNRYLRHILVQAAHNARFAPSLEGELKRRLKHVPADLVALSVTAQNRLHRRYRHLDRRIGRPKAVTAVGRELAGFVWAIGQRMEASAA

SEQ ID NO: 233580 - protein, 385 aa, unidentified
MDKIYDKCCGIDVHKKLIVACFRCDKKQEVREFGATTRELLELADWLKEGGCEMVAMESTASYWKPLYNILESSDLNAMVVNARHMKAVPGRKTDVKDAEWIADLLQHGLLQPSYIPDKDQRELRELVRYRKSLVGERTRELNRLQKMLEGANIKLSGTVSDINGKSARSILEYLLTGKAIDGAKYDEMYEQKIIAHNLKATKEQIVDDLNGVMSPLQRRMMKELLVHLDELNIHIKNLDDEIDNFMKPEEKQASQAIQDVTGIGNTSAQAIISVIGSDMNRFPTDRHISSWAGLCPGDNESAKKRKSGKTRKGNTLLRTTLITCAHAAVKNKKSYFYAQYMRISAHRGPKRAYVAVAHSMLISIYHILKDGVVFKDVGGYYYNQ

SEQ ID NO: 233581 - protein, 388 aa, unidentified
MTQAPVPHSVPTAPDYDRTLVLAIELSNKSWVLAAQVPGLPRVKAKRTIEPTADALLAAIQGYRERAHAAGRDIERMVATYEAGWSGFWLARWLATHGIETHVVQPSSVPVDRRARRAKSDGIDAELLLRTLLAWLRGEPRVCSMVPVPAEADEDARRCVREREELVAERVALVNRIGAVLATLGVGEYNPLLRNRRERLDALRTALGTSLPPHAHAKISRMLDRLDLVRAQIADLEQERDAVLEDEVPDRAGKMIQQLATLRGIGVQSATVLVREAFVREFANGKALGSYAGLCATPYSSGGTEREQGISKAGNRRLRTVMVELAWLWQRYQPGSAEVTWFRARASGTGARMRKVMVVALARKLLLALWQFATQGVVPGGAVMKPAS

SEQ ID NO: 233582 - protein, 376 aa, unidentified
MNRIVYIGMDVHKDTYSLCSFDSHENYMFSETTIKSETTAVLAYIKTIENRFKDDDVMVVCGYEAGPTGFSLCRELQKKNISCVVMAPSSLPKSTDDKKKKTDKIDARQLALHLAHNTYKSVNVLTPEMETIKELTRTRATALKAQKRAKQILLSFLLRKGMVYPYGNRSKYWTQKFYAWLKTLEFTNDIERYSFEEYLSEVNHQMSRVSRLDDKIAEIAETPLIKDDVKKLCCFSGISILTAVTLISEVEDFNRFEKATYFASYLGLCPGIHASGLSSQNRGITKAGNKHLRCLLIEAAQSMSHSQLCGKKSLRLLARQKDMNPLIVFYADKATERIKRKRNSMIFRGVNPNKATTAAAREMACFIWGMMTNNIA

SEQ ID NO: 233583 - protein, 338 aa, unidentified
MKTYAGIDLHSSNNYTAVIDEHDQRLYKKRLPNRVDTVVSALDPFKETLEGVVVESTYNWYWLVDGLQDNGYSVHLANPSAIKQYEGLKHTDDQWDSFWLAHMLRLHILPEGYIYPKDTRPVRDLLRRRLLFVRHRTAHILSLQSMITRNSGTQMSSGAIKRLEQRDAEMLFNHPHLVLAAHNSIAAIRFLKEKIVNIEKEVKSVITLCKEFTSLLTVPGIGDILGLTIMLEVGDITRFPTVGNYSSYCRCVKSERLSNGKKKDENNRKNGNKYLAWAYVEAAHFANRFSPHAQAFYQKKRAKKNGIVAIKALSNKLARASYYIMRDQVPYDADKLFR

SEQ ID NO: 233584 - protein, 340 aa, unidentified
MINCYVGVDLHRNNFTYCMRSGNGAKEKVGKCPIRELNGFASLLGPRTALAVEATGNTLMFCSELKGKVGRLVVVNPTQFKVISQSTKKTDKHDAKILAEFLEKDLLPEVRMKDDLQAKIASLTQTREKLVQLRTVLKNKVNNLLAARFVEIKREELSSEKGLLKALSYHFDPITDIEMGVIVGQIRSLNKSVAELDKAIEDNGSKMDGFDNLRSIKGVGAKGAAIMLSVIGNIADFRSAKQLAAYVGIVPRVSNSNDTVCHGRITKKGSKTARTALVQCSLIAMRYSPYLRQFHDAVKNRRGGAKANIALARKFLEIIYKTLKNKWVFEDFTQFKLVKN

SEQ ID NO: 233585 - protein, 341 aa, unidentified
MLKFTIGADISKNKINFALRFLNDYVLEKEVENTTSALNKFIKEVQSLVKSIAKEKKSEYILEFIMEHTGIYGNLLIECLAGHKLTMYVIAGLEIKNSTGISRGKNDKIDAKRIADYGVRFADKLKPYTLCDQTLSELKGLNTLRTQMVRIKAQLTQANDDIKKFQSKELQKKSDKLKKPVVNELDQAIEKIEAQMLELIKSDESIYENYKIAQSVPGVGKIVAVAFICATNNFTKFESAKALGSYCGVVPFGKESGKYKGKNKVSPIANKALKTLLHLGAVASIGGNSPFAVYYKRKVMEDKKNKMLALNNVRNKIVKTMFACIKNKTKYQADYTFSFAA

SEQ ID NO: 233586 - protein, 348 aa, unidentified
MQNDTIGVDISKGHLDAHRLSDGATRRFTNDKSGHRAFVKWLAHGSVERVVFEPTGPYHRAFERALGVAGVPFAKVNPRQARRFAEAIGRLAKTDRVDAAMLARMGAMLELKRRPPRSDALLVLKELHLAREALVKDRTAAKNRRKVLTESLLKRQNTQRLEQINRQIAAIEAAILEQIRADPDLAQRFAILTSIPGVSAVTAFALLIEMPELGTLEAGQAASLAGLAPVARQSGRWTGRAFIRGGRAAVRQAVYMPALVAARFNPDMKAKYRQLIDAGKPAKVALTAVMRKLIVLANALLKPDLDTPSASQSRATGQTERCFAMKPNFMSTPSRSRPRPFLGCRAPP

SEQ ID NO: 233587 - protein, 338 aa, unidentified
MDNYIGLDVSKSTINIHIPKDSLDLEIENSKKDIQSLFLKLKKIYKKDVKNLVFIYEPTGSYSYLLTQFCARKEIRVFMVNPKQSHNFAKAIGQRGKCDKVDAKMLSLCNSIARKGEIKVPIINKAEQEIKELIGYYKFTTKQRVQANNRLESLKIKDGSLYAIKGLEKEIKNFSLKEKAIIIKIKEIIENDISLYSKFNNIKSIIGIGDVAAIALIHLFIKYPKANQREIISLAGLDPIERTSGSSIRGKSRISKAGSKLYRGSLFMCAMVAVRYNGEIKQFYERLKDNGKHTTVAQVAVMKKLIVVAHSLYKNNCNYDAIFYKKQCGYGEKVTMAA

SEQ ID NO: 233588 - protein, 350 aa, unidentified
MQVITIGIDLAKHVFQVHGVDANDKVVFNKPLRRSQVLPFFAKLAPCLIGMEACASAHYWARELKKLGHDVRLMPAKDVKAYVKRNKNDSVDAAACCAAVRRPTVRSVPVKTPEQQAQLMQHRVRDLLVRQRTQAINGLRSHLAELGIVAAQGYDGLKMLLAIIADNSDARLPENARASLSALVAQIASCQAEIGAIEKRLLTQHRKNADSKRLETIPGIGVLGASAIVATVPDASIFKTGRDFAAWIGIVSREDSTGGKQRLGPISKQGDRYLRRILVVGAFAVIKQARAHPQKYPWLTQLLTRKPAKVAAVALANKMARIAWAVLTKKEIYRVRPTAETCASAPAMGR

SEQ ID NO: 233589 - protein, 358 aa, unidentified
MQTQVKKLDFTGQNIYTGIDVHKKSWQVSVFSEALFHKTFNQPPKPEVLHGYLTKHFPNGTYHSVYEAGFCGFWIHDKLQSLGINNIVVNPADVPTTDKEKKRKTDKVDSNKLARQLRNGDLDAIYTHKRSMLEDRSLLRMRRTLVKDLTRNKNRVKSDLHFFGIEIPEQFTKNPSYWSKRFINWLEELEFQQWTGTFSLRILMSQVKMLREQLLEVNRKVRTLSREDYYQKRVALLGSIFGVGLITSMTILTEIDDIHRFANLEKLRSYVGLTPTSHSSGDKNLHGEMIHRGNKFLKSAIFESAWIAARLDPVLHMDYVNFCKRMKPNKAIVRIACKLLDRVHYVLKNEVPYKSGIP

SEQ ID NO: 233590 - protein, 457 aa, unidentified
MSGRKTRRIPKPVPPQHLPVIDPHAAAVDVGSAEHWVAVPPGADPQPVRRFGAYTADLIALADWLKACGVTSVALESTGVYWIPLFELLETRGFAVRVVDPRQASRLKGRPKSDVHDCQWLQRLHACGLLAAAFRPEDQIIVLRGYLRQRQMLLSCASHHIQHMQKALELMNLKLTEVVSDITGKTGLAIIQAILGGQRDPACLARLRDPRCRHDEVTIAKALQGNWRAEHLFALRQAVELYEFYHGQIDACDRQIEAYLATLPARGDGAALPQRARRARTRHANAPSFDARAALARACGVDLTAIEGIESRTALILYSEIGSDMSRWPTEKHFCSWLGLCPHHRITGGKLLSSRIRPGPNRAAQALRLAARSLHASKSALGAYFRRLKSRLGTAQAIVATAHKLARLVYSLLKHGTAYVQQGLDAYERQYRQRSAAALARRARELGYELVPATSLS

SEQ ID NO: 233591 - protein, 358 aa, unidentified
MVMLPEIVDAVIGADTHRDTNQLEIAHPSGAVIATRSFSNDSTGYAKALGWVLEHAPGPRLVLSIEGTRSYGIGLARAAAATGIPVIEAEQPTRKTRRGKGKSDPINAHLAVLFALSLDAAKLPTPRADGDREALRILLCARQELTTTSTGQTNRLKALLRDGDDTDRRLARGKMTLTTLSTLAKRHQPKDATRAQAVRHAEIRRLAVALRDAGRVLKANRAELAAIVHDLAPGLTDRHGIGPVSAAQAIVSFSHAGRCRNDAAFAKLAGTSPIEASSGQTTRHRLNRGGDRALNNAIHTIARTRMRCDPATRAYVARRIAEGKPKREIRRCIKRYVARQLYRALTAAMTPPAIMANA

SEQ ID NO: 233592 - protein, 347 aa, unidentified
MGEVSVIGLDLAKQVFQLHGVDAHGRVVLRRRLRRSQMESFFATLPPCLVGMESCPGAHHWARVLQRLGHRARIMPADYVRPYRKGGKNDASDAEAICEAVQRPGMRFVAVKTAEQQGVLALHRARALLVRQEVAQVNAMRAVLAEQGVVLGRGRREAVRAVARLLEEGEGAEALPESVRVALAVLLEAHRQLEAQVRALDAALRAWHRSCEASRRLATIPGIGVLTATALVATVGEGAAPFRSGRHLAAWLGLVPRQHSSGERQRLGRISKRGNGYLRRLLVLGAQALLRHVRRRMAAGRPSGLPWAERLLRRRPPNVVAVALANKLARQAWAVLHHGEPWRAQTA

SEQ ID NO: 233593 - protein, 369 aa, unidentified
MKEHITHVAMDDSKRTIGLGILRPRATEPELRSIPNEPRHVRRCFERLQRDGRVVACYEAGPAGYDLYRQLTALAVPCQVIAPALTPRKPGDRIKTDRRDAAKLVRLFRAGELTPIRVPEEAGEAVRDLVRCREAVQEDLRRWRHRLGKVLARHGRVYRDGRNWSQRHWTWLRGQHFQLPALDRTYAEYRGTVEHLLAQLADLDREIGAAADTEPYRRPVGWLRCFRGIDTLAAMLLLAEIGDFQRFATPRTLMAYLGLVPSEASSGAREQRGSITKAGNTHARRILIEACWHYRHPPRLGPALARRSQGQPPAVRAQAWKAQQRLHRRYRHLVGHGKRPPVAVVACARELLGFLWAALIQATPLRNAA

SEQ ID NO: 233594 - protein, 352 aa, unidentified
MKITTIGIDLAKEVFQIHGVDEYGKAVLRKQLRRGQMTEFFANLGPCLIGLEACGSSHHWARKLGGFGHTVKLMSPQFVKPYVKTNKHDMADAEAICEAVTRPNMRFVPIKTVEQQAILSVHRARQGFVKARTSQANQIRGLLSEFGIVIPQGIQSIGKRMPDILEDAENGLPGTMRRLLERLNDHLKELDRQVKELELQIKLWHKESEASQRLEAIPGVGPITASAIVATVGNATEFKSSRQLAAWLGLVPKQHSSGGKQLLLGISKRGDTYLRTLLIHGARAVIRFAEKKAEPESWLRKLITRRNKNVAAVALANKNARIIWALLTQKATFHPDHTMATYCCGSLIVRVE

SEQ ID NO: 233595 - protein, 396 aa, unidentified
MTQPYAVFCGVDVGKGEHHAVGLDPAGKRLFDKALPNDESRLRAVFDKLATRGRLLIVVDQPNTIGALPVTVARACGHDVAYLPGLSMRRIADLYPGQAKTDARDAHIIADAAHTMPHTLRRVDVGDETLTELAVLAGFDDDLAGEATRTSNRIRGLLTGVHPALERVLGPRIAHPTVLEILSRCGGPEGIRAAGRRKLTAIATKHAPRMGARLVDEILAALPTQSVTVPGTKAAETVLPKLADSLKAVLLQRRQIAENIEEMFADHPLAEVLTSMPGIGVRTGTRILLEVGDATAFASAGHLASYAGIAPITHRSGSSIRGEHPARSGNHKLKRALFLSAFAALHDPASRAYYDRKRAEGKKHNAALICLARRRCDVLFAMLRTKQSYRAPQTAA

SEQ ID NO: 233596 - protein, 344 aa, unidentified
MKYMGIDYHKQYFIVTTMDEKGKVVNKEKVSTDRNSIKRYFRKARSEGNLKAVMEACYGWEYFYDEVDELVDELIMAHPLKTRLIAEARIKTDSIDSEILAHLLRADLIPQAYAPSAETRDKKNLLRYRSSLTAMKVRIKNMIHSVLTRNHIEDKRFQELSDKFGKMGKAYMRAITLKGNDTAILHEYLDLLEETEKRIKSAESRIRAVCRQDEICRLLDSIPGIGDILAVTIRYEIDDIERFISSGKLCSYAGLVPSTYSSGNRTYQGKITKQGNKWLRWAMIEAAQRAPLKDMWLSAFFERVSIKKGRKIARVAVARKLLEIVYRLWTERRAYYKKPVTVAL

SEQ ID NO: 233597 - protein, 365 aa, unidentified
MKKISTAAAPRIEKIEGQKLTIGLDLGDRSSWYCVLNAAGEVLLEQKLATTPKAMKEVFGGMPRSRIALETGMHSPWVSRLLSDLGHEVIVAHARNVRLIGESRRKDDRFDARTLARLARIDPELLGPVQHRSRKAQADLTVIRARAGLVRARTSLINTARGLTKSYGERLRGCSPRKMNRELAEGLSPELQSALQPLLDEIESLSERIQEYNHRVQQIAQESYPEVARLEQVKGVGTLIALTYVLTLEDPRRFRKSRDVGCYLGLRPGRRNSGQSEPQLHISKEGDPYLRTMMVQSAHHILGPFGADSDLRRWGLKLAERGGKNAKKRAVVAVARKLSILLHRLWVSGDAYEPLRHQRALTLAA

SEQ ID NO: 233598 - protein, 380 aa, unidentified
MRIIDERCCGLDVYNKSILAGLLTPDERGGTRQQVRRFGTMTRDLLELSDWLTGNGVTHVAMESTGVYWKPVWNILEAVCTILLVNAQHVKAVGGRKTDAKDCQWIADLLQHGLLRGSFVAPNPIRELRDLTRTRASLRQDHTAVANRMQKILEDANVKIASVATDWLGVSGRKILHQMLEGEQNSKKPADLCRGRLREKIPQMELALEGRMTSHHRWMLRLQREQLESLERQIAKLDVCIQDHLRVYQQAVDLCLTIPGIEKVAAANLIAEIGVNMDQFPSAQHLASWSGLCPGNNESAGKRLSGKARNGNVWLRRNLCQAAWAASHTKNTLGYSNNGTLLALAGGSGETLPTNRENRRSRRRLRQERRATIVSSASEC

SEQ ID NO: 233599 - protein, 430 aa, unidentified
MKFKMQDKQNQLIERISDKHLVVGVDSAQQTHVARAVNFRGIVVGDPLPFENNEEGFDRLLKWINHLKSIKGLDTEIIGMEPTGHYWLNLSQWLYDQDIDVVTVNPHLVKKNKENRDNTQSKSDKKDALVIADMVKNGYYSFIRPTTEAFEKLRVLMSNRDGIVKRFVSAANQINRWVDVVFPELKQVFKDLKGKGAIATLRLFPTPKELRSMEAQDIVKGWRTVMKRQPGIKKAEALIHLAKHSIGNDKAHDAYKLHLTQLIEEFDLATSQLAIVEKEVDEILESISFADKLLSIKGLTPTMVGRILGETGDLSQFAHGNSLLRHSGLHLVEASSGKWKGQIIISKRGRSRLRRFLYLATMCLVMNNPEFKEIHAYNVKVKKMKKMKSIMKLIGKFARIVVGIAQRNETYCPESTNRYTFSCIDELLSN

SEQ ID NO: 233600 - protein, 354 aa, unidentified
MPSKVTKPYTSAQPKLMSIGIDIGKDVFHIVGFDHNGKVVLRRKFRRLELDAVFEKLPRCVVGMEACLSAHFVSRRLRALGFEPRIIPAIYVKPFLKGQKNDYNDAEAIAEAALRPNLKLVKEKTQEQLDLQACHRVRSRLVSRRTATINQIRAFLIEHGIAIRTGANSLRRSLPEILLQRADELSPRMRVLIEELHGDWLRLDARIEALNEEIEEISRQEKSCQNLMTIPGVGPLISTATVAAIGNGEAFERGRDFGAWLGLVPRQYSTGGKPILGRISKRGSKYLRTLFIQAANVILMRPQNWPRYSFGGWLVTAATRLHRNKLATALANKLARIAWSVLRYNERFDDAQTI

SEQ ID NO: 233601 - protein, 409 aa, unidentified
MEPMLESCCGIDVHKSMIKVSIARGPLDKPAKFFTRTFSTMTSDLLKLKDWLRENEVEAVAMESTGVYWKPIFNILEDEFQIVLANPQYLKKVPGKKSDVKDCEWIASLLRCGLIPASFIPPRQIRELRELNRTRRKLVGMMASEKNRIQKVLEDANIKLASVVSKIDGVSSMDMIQALLNKDKLSKEEIAGMARGRLKNKVDQLVEALNGRMTNHHRFLLRLHLNNIAFLADQIEEIDGQIQKCMIPFRKEETLIQTIPGINKTSASAIISEIGTNMSQFPTEAHLASWAGMSPGNNESAGVKKSGKIRKGDRYLKAILTEVAWAASRTKGSAFSAIYNNIAKRRGKKRALIAVGHRILIAVYRALKTGQPFVDEGAEAVHRRNSKARRQSAIRFLEQSGYVVTKASA

SEQ ID NO: 233602 - protein, 348 aa, unidentified
MEQQSHYVGLDVSLETTSICVVDHAGAPIWRGKCSSDPDTITAMVRQHAPGAVRVGLETGQLSNWLTLSLRRRGLPVVCMDARHAKAALSLQINKTDANDAFGLAQVVRTGWYREVAVKSMDAHTLRMLLVARSHLVSQRQATANTVRGLLKTFGLVVARGSKGLFPVRVREQIAGNPALIAIIEPLLAVWYAIREQVTMLDRQILARARNDQVARRLMTIPGVGVVTALAYTAVIDDPARFRRSVSVGAYLGLTPRRYQSGEVDTTGHISKCGDSLLRGYLYEAAAVLLYRDGRASILKSWGLGLAKRIGMRRAKVAVARKLAVIMHRIWSDHSEYRWTAAIPPAAA

SEQ ID NO: 233603 - protein, 580 aa, unidentified
MKKIQNKHKGKSRTSIQKPKGSRFTEEVKQLGPENVGVIPIDVHKDKHCIVICDYYGKILRDEFQIPNTLTGFQTLLAHTLEVIDKFKLKKVYAVMEYTGNYHKNLANRLREAKIPVTFVLPNSTYHLRKGQLNWSKTDSIDLCAIGQAFVNGWVSSSPPLSNSYENWQTLTRAKRNEIDLQTQAKNRITDLLHELMPGFQELFGSFWEHNAPPVILQLAHSPKQLINLNRKSLIQKLTQAKVQRPGDLADKVLIWAKTSITTSQDFPSKIQQLNVEWQRFLTSKENIRSYHISIAQYLAQNPALLFLSIPWINVPSASEYAAEIGPFDNFSSPKQITAFLGIASKKFQTGKVSFENGPITKKGKNHGRYAVMNIANNLVQGNDYYLSTYLNLLSRGKAKQLAKVAIANKFIRNSFRMVENGSLFEPPTWTGQILKNDPISKLKDFLHQNTNDKGLVEEIVKQAEQTLKTILKKQPSHREKEIDSQPEQDTKKTQTMELSRNLNDTAEPEQDIKKTQTPKVIYQRPKLESVGTNVVFTRTRLSNSKEPVHIRNILENMVASRKLQDWVLTGKGPDYAQLG

SEQ ID NO: 233604 - protein, 416 aa, unidentified
MSTESSLPIERYLGIDLHKHYLVIGGVNAKQEIVLPPRRLDLDDWPKWAKAHLTKSDLVVVEATTNAWDFYDVTCPFVQRVVVANAAKIALIAKTRVKTDQKDVMVLARLLAAGLIPEVWVPPMEVRELRALISHRRRVIDVRTAIKNRLQSVLHRHHLVLPSGHPFAAIHRAWWDTLAVSPTKRLHLKHDLATVAQLDTQIAEIEVELQRLSCVAPWSERVTYLIQLPGVGLITAMTILSAIGDLTRFEHAQEVVGYAGLGASIHDSGQTHHTGRITKQGRKELRTVLVEAAWSAVEYSAFWKAEFERLGRRLDQMKAIVAIARKLLVVVWHVLTEQAADKHAEVKLLATKLMRWSWELTDAQRGGLTTRQFVRVQLMRLKLGEDLTHFIYGGMPRRIASVEEVLALKPELRRDA

SEQ ID NO: 233605 - protein, 337 aa, unidentified
MSLYIGVDGSRDTLAVALFRAGQDSSPQYLGSFPNRLEKFETLFRQVQQQSRGEEVIWVIEPCGGYERPLMYWLYEHRQCILYPNPRQVRQWQQGRGYRAKTDPLDSQMLALYGAEHRQDLHPWKPWPEPAGRLLRLAERWRELEVERQREQNRLEAYLSQGISPDAPEVRDLQEHIQFLEGLIRRTKKHIGRLYRDFPDLDGLRRPLLSVPGVGEKTVHALVALLIRWAQLGRRDAKGLVAYLGLDPRIHQSGKRPPRGRISKQGDTRWRSLLVAAARGGLKGTSSPLARFYRRLRQRGKPHMVALVAAARKIVVWAWAVYCCGEPFDLRRHIARV

SEQ ID NO: 233606 - protein, 343 aa, unidentified
MNNFVGLDVSQNITSICVVDDAGKRIWRGQCASRPDDIERVVRKQAGEEARIGIETGPMTPWLVHELRRLGLDLICLDARHAKAALRMQLNKTDESDAEGLAHIVRTGWYRSVHVKSYAAHRARALLGARAQLVGMTTRLSNHIRGVLKIFGLLPGGMHGLPFAARVETLLADRPDVMPIVSPMLIAWRQLRAQITSFDKAVHALVKNNPDCRLLMTVPGIGALSVLAYVSAVEDPERFRRSRSVGAHLGLTPRQYQSGEIDRSGRISRCGDALTRTLLYEAAVVVLCRVKRSSPLKDWALAIAKRSGAGKARIALARKLSAILHSVWRSRVPFCWVKEAASA

SEQ ID NO: 233607 - protein, 424 aa, unidentified
MDKYDDSRLEEFRQLKREIRGSTQHMVVGIDIAKERHHAFFGTPAGKVLLHRLVFDNTREGFEKLCFQADILKTQHGLAHVVFGMEPTGDYHKPLGEYLIEHAHSVVLVAGTAVKKNRELLDNRWDKNDTKDAANVADLITQGKCLFYEFPSLSVRELRSLLSLKRRLKKSEQGCKVRIRNHLIAQYFPEMDVYFNYAEGPDIVRWCLDPQKLAGLQFREFVRMVPLGNGKQEERLGEIYAKAASSIGCAAHPSVAFEASTLLDGLKGLHLMILETDRKIAEVCRRFPEYVCLLSIPGFGPDVSAKVLGALGNPHRFENHRQVLKMAGLDLSADRSGKRTDVTPVVSKKGKADLRYGLYQAALIASTANKEFMTYFTNKLKGREREKGIGTKMRVKLSAKMLVIAWTLMKKKEVFNPGCIEHSP

SEQ ID NO: 233608 - protein, 406 aa, unidentified
MQTVYERCCGIDVHKKLIVACFRNGKKSELRKFDTLTCNIKELGIWLLDNDCEMVAMESTGAYWKPIYNILELFGLDVIVVNAHHMKNVPGRKTDAKDAEWIADLLQHGLLKASYIPTKEQRELRDVVRYRKSLIEERSREINRLEKTLEGANIKLSSYVSDLTGVSSRKLLNQAIVDEVTPDNIGDLVHSSMQKKIPVLLQAMDGVLTPIQKVLVKAILDHIDDMTRRINDFDDIINNEMKHYEDAINKIDELPGIGKRSAEVILAEIGTDMSRFPTAAHLASWAGLCPGNNESAGKRKSGKTNKGSKHLKSILIQCAKSAKTNKESFFYAQYQRLVVRRGANRAAVAVAHSMLIAIYHMLKDNVPYKNLGSDYYTKFNTEKKVNYYYKKLQELGESVPVSLATA

SEQ ID NO: 233609 - protein, 347 aa, unidentified
MTVYCGVDFHARVQTVSWLDTQDGEIHQKDLNHRADDVRGFYQQFAGEVIVGIEASGYSSWFEDMLDGIGHQVWIGDASEIRRLARRRQKNDKRDADHILDLMVKGEFPRVHRQCRESREILGQLRYRHRLVKMRTMAANCLKAIAIGAGLSEKTRLVTSKGRSKLDALGLSAVLNEQSKRWLELIDDLTTKIETVERWLEEQAQADQRVERLRTHPGIGLLTGLALVHTLEPVERFASTRKVAAYVGLDPMEDSSAERKRYGSVSKAGSTLVRFLLVEAGQTAAKRDPQLRSFYQRLRDKRKTAKAKVAVARKLAVRGFIMLRDQIDYSEFLRRGVEARSSRTGSR

SEQ ID NO: 233610 - protein, 370 aa, unidentified
MTVFMGADLHKTQITVHVRAGDKVESLSEIKQYPTTQGGYAELLARIAEYKSAGHEVKVGVESTGNTRFFKNQVEKAGAEVTVINTLKFKVINESTKKTDKHDASTISEFLEKDMLPESYVCNQETENLRRLLKSRERLVHSIVGQKNEVHALLVSMGLNDELRSLQSKKGRQKVLDTLLSHSDLVLEAQSVRLMLQIIDQMSESVKVIEKQLAELTKDDEMVNRLMTIRGCGKITAWIIRAYTEDIGRFANAKKYAAFCGLVPWVQDSNETIHHGKITKRGPQELRTAFVQLVLGIRRCGDTSEWRIVQRLDYMKKNKGSGKSIVAAARKMAEITWALLTEKQDFDSKKMMGKYKPMNLVGQALTAINK

SEQ ID NO: 233611 - protein, 343 aa, unidentified
MKLSRVGIDLAKNVYQLHGVDRSGKTVWKRRLKRHQWFKALLDRTEPGCVIGMEACASAHHWGRELQSRGYTVKLIPPQFVKPYVKSNKSDAKDAEAICEAMSRPNMRFVTVKTVEQQDIQATHRIRAELITQRTAKANQIRGLVAEYGLVAPKHMSSLRAAIPCWLEDAENGLTGDFRTLLHGVWNDLLGLDDRVGEMDQVIKRLAENHEDCVRLQQLRGVGPMISTAMIATVGDARQYRTSRQMAAAIGITPKQHSSGDRDRLLGISKRGDVYLRTLMIHGARAVVARAKHKDDPLSRWVTGIATKRHPNVAAVALANKTARMAWAMLRHETDYDPDFAIR

SEQ ID NO: 233612 - protein, 453 aa, unidentified
MNRQRPGWIQQPQEIPDEDHEQLLTRVCAIDVGKQSGKVCTRIPHPQRPHRRLCQVWDVAATTGEVSELAEHLVRLQVEKVTLESTSDYWRIWFYLLEARGLDVQLVNARDVKNSPGRPKTDKLDAIWLAKLTEKGLMRPSFVPPQPIRELRDYTRTRADLTRDRGRYWQRLEKLLEDALIKVSAVVSSLDTLSARAMIEALIAGERDPRVLAGLARGRMRSKNAALVEALTGQFDTHHGELARMLLDQIDAFTRQIDQLTTRIDGLIPAHTIVGSDEPDPGNNTGSDAPGPLSPVQRLIEIPGIGLTGAQTILAEIGLDMTRFPTAAHLVSWAKLAPRTIQSGTRQAAGRTGKGNPYLKAVLGTAAAAAARTDTFLGARYRRLVTRRGKLKALVAVARSTLVAIWHLLTNPDSRFHDLGADHHTHHINTERQTRNHVQHLQALGYTVTLTTA

SEQ ID NO: 233613 - protein, 392 aa, unidentified
MRSIAVVPMDIHKKFSVATPMTGEGKVVKKTKIAHGDKDQMREFFRQFPEGTDVVMEATFNWPWIADLAKEAGLSPHLAHCGRVREMAKGMGKSDKKDAIFQGRLWLAGGDVFPEVYLAPPQVRDMRAVFRARLLLVKMRTMVKNNIHGQLFRLGVLIEEEEEVSDLCSQKGRRILEGLELPDRERYLLDEKLGVIDDLSKHIAELEQEIKKDLKYDARAEILESLPGVGEILAHTILGEIGEVERFANGRALAAYAGVLPLENQSADKDFGRKTSKMSNRFLRLAAIEAVTGAIRKSARMKSLHSRVKARNKKRAGKARVAVAREIMELVYLLLTRKEKYREERPQRPGSKKHRKGNDELIKEFLSRETHRPLRASPDCLCAGSRSESQAD

SEQ ID NO: 233614 - protein, 425 aa, unidentified
MNYKQNEKINQVKESTLVVGIDIGSTTQYARAFDWRGIELGKVFTFSNSREGFESFKAWMQHLQDKYRKSDVIVGIEPTGHYWFDLGAYLEDEGILLVMVNPYAVKQTKELDDNSQSKNDRKDPKVIAKLVTEGRYSAPYTPDGVYADLRIMVANRKRLIREMTQIKNRFARWFAIYFPEYTDVFGDYEAQSSMLLLKKVCTPEAIVELGAEKINQIWRDAKLRAVGMKRATTLCETAKRSIGLKKGSSAARYEMKLLLEDYEYKKAQLDAVMEEIEKLCRKIPESEQMLAIKGIGVITVAGFLAEVGDVRRFESPRQIQKLAGLSLRENSSGKHKGQTTISKRGRSKLRAVLFNAAIPLIAKNPEFKSLHEYYTTRANNPLKKKQSVIAISCKLIRVFYAILANGVTYDAQKLISDIHRQPQAA

SEQ ID NO: 233615 - protein, 354 aa, unidentified
MQIIGAFDVHRKQITYKWLDTETGEIQRGRIMPGVRKAVREFLVPFEGLDAHFALEATTGWRFVAEELSRVGLVAHLAEPADTAALRGSKRRAKTDRRDCDHMMDLLGTGRLPESWLPPAHVLEIRTLVRLRKALTDTRREWQQRVQAQLFHQGVPRIPAITTQGRAQLAAVDLSAAGRQVVTTGLAVIDHLDYQFAPLDTYLVRFAKVQPGCRALKQRLFGVGDLTAVFIWAELGDCVRFSSSDDAVRYAGLDITVYESADKRPPGHLSRQGPEALRWALYEVAQSAARSSSPDYAYYLAVKRRLNHKRACLSVARKVCRRAHHLLRSFGDDAFAPVKGSVLPSFDRPAMATA

SEQ ID NO: 233616 - protein, 391 aa, unidentified
MTKRKTETVNDLSRCLDALDMDATLIAVIEMSQSSWLVAGIVPGVERQPLKKLAIDEGALLNLLRRWRAEAEKEGHRITRIAVAFEAGHDGFWLARWLAAQGVETHVIHASSVAVTREHRRAKTDRLDTELLKRGFLGWLRGERGHCKMVTVPTLADEDAKRPSRERETLVGEASRIITRVKAAFVRLGIRGFNPKLKTAAARLETLRTPAGEPIPPNTLAALKRDLERHRIVKQQIHEIEQTRLELLEQAPAEGRHAMVLLLARVIGIGVETADMLVQEVLSRNMRDRRAVARYAGLTGSPDESGAKRREKGLARSGNARVRRGMIQLAWRFLMFQKDSALAEWYRQRTANAPSARKTLVVALARKLLIALWRLARDGVVAEGVRLRPAA

SEQ ID NO: 233617 - protein, 426 aa, unidentified
MNATTHFAATIGLDWADQKHDLWIHPADGSKAQHLRLEQTPEALHEWVAKLRERLGNRPVAIGIETSRGPVISALLAYDFLVLFPVNPKALKDYRAAFSVSGAKDDRTDAQLLEEFVRLHRHKLKALEPDTELTRTLAGLVENRRRLVDERTRLVNQLHGILKTYYPLAETLLGKQMTKPLAADFLARWPDLGSLQKAEVKTLRAFFYQHNSRSAQKMEERLAAVQKAKALTTDPAIITPARLLVLALTGMLKPLHQAVARLDREIQQAMDQHPDAAIFGSFPGAGPALAPRLLVAFGTQRDRFESAQEVAQFYGVAPVVIQSGNSKTTHMRYRCPKFGRQTFHENAGCTLNDEPWARAYYDQHKKRHDDKHHQACRALAYKLIRIYFVCWRDRKAYDPNLYLRALKSHGSPLHKSLEILTPKPGE

SEQ ID NO: 233618 - protein, 319 aa, unidentified
MTDSKTNNGVIGIDVSKGALDVHLLPLETHARFDNSPEGHERLIAWAGPHHPQRIVLEASGGYEMPVVAALARAGLPVIVVNPKQVRRFAQALGVLAKTDRIDARILAQFAQAVRPEIRPLKDELTTDLDALVSRRRQLQDMLVAERNRTSRAKGLVRKNIDAHIAWLERQIDNVDGDIAKLIQSSPVWREKEDILDSIQGVGRVTIATVLGALPELGTLSRQAIAALVGLAPFARDSGSWRGKRFVRGGRPDVRRALYMAVPVASQRNPALRKFYQGLVARGKPKKLALTATMRKLLVIMNSMLRTKTRWDTRRFSST

SEQ ID NO: 233619 - protein, 400 aa, unidentified
MRAVFGIDVSKTSSEVAILVNGEKVHGYTILNDAIGFNRLLGDLKTVHNPEIIFEATGVYSRRLQAFLEEYSYAYTRLNPLEAKKQLDSLRVRKTDKIDAEKLAKSQLVHNRKPTYVQEEVYQHLRDLSRFYQNMTEDLVRTKNRLHKVLQVTFPELENLLSTPTGEQYWNLVMAFPCKEFVLSLSQSNLCEIIRQSTSKRISEKRVTYLVDKLIKLANQSYCAVKKTSPMLEEVRYYAQELLRLSERRQVVLSDMVALAQPLPEYDILRSIPGIAETTATSIIGELGNIRRFQSTNQINAFIGIDLKHYESGNFLAKEHITKRGNPYARKILFKCIHNIASASHTNPCHIADFYEKRKRQSTIASTKPHTIASIHRLIRTMYYLITHNKLYDYSLTQNR

SEQ ID NO: 233620 - protein, 419 aa, unidentified
MTRTDDSRIIEIVNPICCGLDVHKKRISACIVFPKNSVTDHCEVKEFGTFTDELQRLKSWLLEHECPVVAMESTGIYWRPVHNVLEGIVHVILVNARDIKNVPGRKTDIGDSKWLAGLLQHGLLRGSFIPPKSVRQWRDLTRLRRKYVQTLADYKKRTQKLFESSNIKIDSVVSDLFGVTGRNLMNLLLSDVQRLSLLDIEGCVRGKLKGKEHELFRSIQGFFSSHQRFILKRLLNTVAMLEEEIAGFNHQIQQMMEDQKELLDRMKKAAGISDVSARDILAEIGPDMSSFPTGASIVSWSGLCPGNNESAGKRKNGRSRVRKHYLKTIMVEVAWAAIKKKDSYFKDKYYRLKARRGAKRAIVAVAHRILLGIYHVIKDGVEFRDLGADYLTERKKSQKISYLRKQAQLMGFNLVAQTT

SEQ ID NO: 233621 - protein, 336 aa, unidentified
MQGTTIGLDVAKRVFQVHGVSAAGAVFCRRLGRAGVESFFAQLAPSVVGMEACASAHYWARRLGALGHSVRLVPPRYVKAYVRRNKTDAADAAAICEALGRRDMQFVPVKSEAQQAVLALHRTRALLVRQRTMTANALRGQLAEFGLVAAQGQAGLGQLLALVDDPATALPDEARAAFAVLAGQWRGLCAQIAALERRIVAWHRQDAASRRLATIPGIGPITASALAASVGDARAFRTGRHFAAWLGLTPREWSSGMKRRQGKISKRGDGYLRRLLILGAHAVMRHHKRSAADWLTALRARRPAAVAAVALANKTARIAWAVMARGEVYRQPATAS

SEQ ID NO: 233622 - protein, 323 aa, unidentified
MFLGIDLSKRYFDATLQAEGQSCYRRFSNDAVGIQALLRWLEQQQVTGLHACMEATNLYWEEVAQALYEQEYTVSVVNPARIKGFAMSQMRRNKSDKQDSVVIAAFCAAVRPQAWQPPSAVQRKLRTLERYADDLKQTLTQQKNRLLSSKDPDVQRSLQRLIGQIEQELQQLEAQIAQQIAEQESLQTQQALLTSIIGIGEQVAHKLLAEFYDLPTYASARSAAADAGLTPAHHESGDSVRRKPRLSKVGKAAVRSILFLPAISAMRFNPVVKALADRLKARGKPKKVIMAAAMRKLMHLAYGVLKNQRPFDPNYGPVTPVPT

SEQ ID NO: 233623 - protein, 379 aa, unidentified
MGHHSEAFVGIDTSKLRNAVAIAEAGRRGELRYLGEVDTRETATRKLVAGLAAKYRKLTFCYEAGPTGYGLQRLIESLGHTCIVAAPSLIPKKAGERVKTNRRDAEGLSRLLRAGELTAVWVPDERHEAMRELTRARDASRQDLTRKRQQVSSMLLRLGRHYPGIRTWGARHRAWLANQKFVHPEQRLAIEELLLAERQAGERIARLEQAIRSAVADWSLAPVVPALQAMRGIDLVSAVTILAEIGDLSRFASPRQLMAYLGLVPSERSTGESVKRGSITKAGNGRARRVLVEAAWAYRHPPRVGYEKQAQVAAAPVRAREIAWKAQVRLCKRFRTLSRKGKKSTVVATAIARELAAFIWAINREVSGQIKTAETSRRA

SEQ ID NO: 233624 - protein, 361 aa, unidentified
MPTQKNDLNFEGQNIYVGFDVHLKSWQVTILTDGLNLKTFVMPPKPEVLSDYLRNNYPGATYHSAYEAGFSGLWAHYRLCNLGIHNIVANAADIPGTQKDRLQKEDRRDSRKIASALRSGTLTPIYTPSESTLNDRSLIRSRRALVRDLVRFKLRIKSFLNFYGIEYPEDIKTSSKYWTNRFLDWLGELPMQELSGRQALDMLVNEAKTQKRLLKDVTFQIKQLSESDRYCRRAKLLRTVPGIALINAMAILTEVEDINRFPNAERFASFIGLIPMSKSSGEKEKVGEITFRSHDFLRCMFVESAWVGIRLDPALLMAYQKLVRRMEPNNAIIRIAKKLANRAYSVLKYDKPYELCKTDNL

SEQ ID NO: 233625 - protein, 342 aa, unidentified
MSYKLYFGVDVSKHWLDIAYYDGEDVDWQHGHIRVDNDEKGFKELGKWLTRLGVGKGTAIFCMEYTGLYCHEFRQWLERQGIVYGMVVPRKMHRFEPDLGAGERALDRVKTDEMDSFRIAIYCKEHAMKIRRKPSRLPSPAYFKLKRLMAERRQYVKQSMLYKQQLHDIGIYDSDSSRCRKQSELDNLTEKVRQTMAEMQTVISEDERIRRNYDLLLSIKGIGPVVAVDTIVLTENFTAIDCPRRFACYVGIAPARKESGVSIQKGDHISKKGFTQAKADLSMAALQGIQNDSGIRAYWQRKKAEGKHSGVVLNAVKFKLVLRMFAVIKRQKPYVEIDTYKK

SEQ ID NO: 233626 - protein, 356 aa, unidentified
MIVIGIDPHKQSHTAVAVEQATAELRGERSVRARQRGHEQLLAWARRLDGQRLWALEDCRHVSGSLERFRGEQVVRVPPRLMGEARKGGREQGKSDAIDALAVARAALRERELPAARLAGREREIRLVHDHRADLVCERTRIQNRLRWHLHDLDPEFELPRGALDRRLWLDRLGRRLARGEQSAQVRICRELVARCRELSRRANELERELQTLLRAEAPELLRLPGCGTLTAAQLVGEVAGIERFRSDAKLAKHAGAAPLPASSGQKQRHRLNRRGNRQLNCALHRLALNQGRHHQPARAYLARQEAGGKSRREALRCLKRHLARVVFRLLKAIAARRASPSTTTPTTPIAAVVLT

SEQ ID NO: 233627 - protein, 402 aa, unidentified
MNAVGIDVSKGKSMVAIMRPFGEIVSTPFEIKHTSSDINSLVKLIKSIEGESRIVMEHTGRYYEVLAHQLSEANLFVSAINPKLIKDFDNDSLRKVKTDKADSVKIARYALDKWQNLKQYSVMDELRNQLKTMNRQFGFYMKHKTAMKNNLIGILDQTYPGVNTYFDSPARSDGSQKWVDFASTYWHVDCVRKMSINAFIDHYENWCKRKKYNFSKSKAEEIYGKAKELVPVLPKDDITKLIIKQAVDQLNSASITVESLRTLMNETASKLPEYPVVMAMKGVGTSLGPQLMAEIGDVSRFSHTFSMSSFADTSSCFNESGSYEQKSVPTSKRGSSDLRKTLFQVMDVLIKTHPQDDPVYQFLDKKRAQKKPYYVYMTAGANKFLRIYYGRVKEYLASLPES

SEQ ID NO: 233628 - protein, 403 aa, unidentified
MFSVQGEVMNRKLSSGAAGRRQAAPSGDLSGDSLSVMRAKPVRPRSLELVGEQTVNAQRTLSSNRVTRTVANVMNVHPQGRETVVAPRANAGIDVSKDWLDVALADRTERFANDATGMESLTVLLGQQEVDLIVLEATGGYEKAAAAALQAAGLAVAVVNPRQARDFAKAMGVLAKTDKVDARVLRSFADVLARHERRSQFLHEVPDEKRAELAALVTRRRQLVEMRTMESQRMAMTRSKKARKSLTNVILFLDQQLAEIDRDLDQFTKEHFQDLRKLLSSAKGIGPVATSTLLAALPEIGQLDRRAIGALVGVVPLARDSGKKHGKRRCWGGRSQVRHVLYMATVTAITHNPVIRAFHQRLIGKGKPPKVALIACLRKLLTILNAMVRDGTAWNPELHVKTA

SEQ ID NO: 233629 - protein, 310 aa, unidentified
MAKSIVGIDVAKNKVDVCFLPSEERAGFTEEEYDSLIEKLGALSPDLIVLEATGGYEQPIVVRLADAGLPFFVANPARVRNYAKALNFLAKTDAIDAYVIARFGLDTDLKPRQLDEQKDAEMQAFLTRRRQLINMRIAERNRFKQARVAEIRAEIKDTIQYLDEKLKSVDNNIDGFIKQNPVWTEKKDIVTSVPGVGDQTARVLITELPELGHLNRGQIARLAGVAPINQDSGQFRGQRHIAGGRMYVRCALYMACLTGVRANPVIRAYYKHLIANGKKKKEALVACMRKLLIILNTMVKNKTHFSPIFA

SEQ ID NO: 233630 - protein, 338 aa, unidentified
MGTITTIGLDLAKNVFQVHGIDGEGKIIVRRRLRRAEVMPFFEQLPPCLVGMEACASAHHWARAISASGHAVKLMPPAYVKPYVKRGKTDAADAEAICEAVTRPTMRFVAIKTEDQQAALMLHKSRELLVRQRTMLTNALRAHLAEYGIVSARGFGGVGAAIKALHERQDTLPSLARLALHGLVTQLRGVEAEIERIEAQILKWHQDSDASRRLATIPGIGPITASAIAASVPDASLFRSGRQFAAWLGLTPRAHSSGGTERQVGISKQGDGYLRRLLVVGATAVLRFARQGNASKAWASRLLERKRPKVVAVALANKTARIAWVLLARGGSYAAPSA

SEQ ID NO: 233631 - protein, 326 aa, unidentified
MSTTSHLGVDVSKHTLEICILDGSRAVHASFPNNREGFLDIARWLHERTFRVAMEATGRYHERFALFCIAQGWSTYVLDPKGFHNWCKDRHPRGHKTDRIDARMLAECLQETHHRRSPWVAPAAVRRQLRELTRRLSQLTEMMTQEKNRAGHLPFAGEVEESHSRVLALLEQEYDQVKAALDELIEGSEVLSRQLSRLMEIPSCGEVLARTVLAELGDVTRFEKAKDVTAWVGLVPRQHQSGTSVRKSERIPRGGNPRLRQMLYMGALSAMHPRSKWAAWVEPRKERGKEGKVLLVAMMDKLLRVMWGVLKNDEAFELEKALGGQG

SEQ ID NO: 233632 - protein, 327 aa, unidentified
MDKVTSKQVFGIDVSKDTFDVYGENMGHAQFSNDGKGFKSFSKLLKGEPHCVMESTGSYHQRLALFLFDQGFMVSIVNPLSIRRYVEMKLIHVKTDRSDAYWIFSYCKEQGNDLRVWQPSKDYVEQCGALISVSMLLHKQSTAVKNKLHSLESRGHTKGIAVRTLKIQLKRTKSELRKLEGEMEDLIRDHEGEMYTHITSIPGIGRKTAMFLIAVTQGFEGFESHRQVVSYLGLSPTERSSGSSVRGSRRISKAGNPVVRNRLFMCSFTACQCNPQCKALYERLVAKGKSKKLALIAVCNKLLKQAFAVARSGMPYDPEYRSTRPGM

SEQ ID NO: 233633 - protein, 317 aa, unidentified
MKTKTEAKPSPAYVGVDIGKAGLDVSFAGQSPCRHVNSAAGIAELVKALKKLPEPAQVICEPSGGYECELLEALWAAGIAVSLVHAARIRAFARAQGRLAKTDPIDAAVLREFGERLQPETLAAPSPQRQRLAALVQRREQLVNILAMEDQRLAQTRDAVVRKMSKPLIQELQKQVEQMETLIAAQIDADATLKSQSERLQQVKSIGPVTASTLLAELPELGTLSRNESGALAGVTPYNCDSGEHRGRRTIRGGRVKVRRVLYMAAVVAARYNPILKAFYERLVAAGKPKKVALTAVMRKLVVLLNHLLKKPDFKLA

SEQ ID NO: 233634 - protein, 403 aa, unidentified
MKHVIAFDISMGKSYMVIYNAHKQCIFEQELKHSKPAFEELQKKILKLTNETGEPPAIVFEATGIYSRQLERFMQNNQYSYCLLNPLEAKLQCDSLRIHKTDRSDAHRLALTHFTVTRRVSHKTDNVYLQLRSLSRFYSELDGELSILRGRMHKVIQLTFPELEKMFTSKSDLFLNFVQLFPHPDYVVPLSKTVIKNRIRANTNKKISTTLAEKKALQILELAKHSYPAVSQDDVLCNQLKVYAKRYQELLHQKQCCINKMVDMAEQRPEYRIILSIPGIGPNTAVRLMAEIGDMTRFENNKQLNAYAGIDIRRFQSGKTFYKDKINKRGNKHLRKLLYLIIQNMIKIRRYGRNHLVEYYDKLKTQPHNKCHKVAYIACVNKLLKLLLHLITHNIHYDYRLTA

SEQ ID NO: 233635 - protein, 307 aa, unidentified
MLIIGVDFHSRFQQIAMVNTETGEVVERRLEHSNGEAEKFYTELQKPVRVGMEATGYAQWFERMLAKLGHELWIGDAAEIRAAMVRKQKTDVRDAQHILDLLLANRFPRIWIPSPGERDLRQLLRHRHKMVCLRTSVRNQLHALAMGQGVCRKRKLWTAGGRSELEAMRLDPWASRRRQELLDILDRLDPSLGELDRAVAKEAEQRLAARCLMEQPGVGPVTALMFVLTIGPVERFRRSKQVVSYLGLNPRESSSGGRQRLGAISKQGNTMSRRPLAQSASPRMQTATPTTTKVRTRCLVIVPALFA

SEQ ID NO: 233636 - protein, 402 aa, unidentified
MNAVGIDVSKGKSMVAIMRPFGEIVSTPFEIKHTSSDINSLVKLIKSIEGESRIVMEHTGRYYEVLAHQLSEANLFVSAINPKLIKDFDNDSLRKVKTDKADSVKIARYALDKWQNLKQYSVMDELRNQLKTMNRQFGFYMKHKTAMKNNLIGILDQTYPGVNTYFDSPARSDGSQKWVDFASTYWHVDCVRKMSINAFIDHYENWCKRKKYNFSKSKAEEIYGKAKELVPVLPKDDITKLIIKQAVDQLNSASITVESLRTLMNETASKLPEYPVVMAMKGVGTSLGPQLMAEIGDVSRFTHKGAITAFAGVDPGVNESGSYEQKSVPTSKRGSSDLRKTLFQVMDVLIKTHPQDDPVYQFLDKKRAQKKPYYVYMTAGANKFLRIYYGRVKEYLSSLPES

SEQ ID NO: 233637 - protein, 422 aa, unidentified
MTTQQKQSCMFVGIDVHKDTHTAVGISPYGEKLFEITVGNYPKDFETLDQKVKEHSGVLSPYIGLEDVRGYGERLSEYLYQRYPVYHVPSILVDRARQNATHPEKSDSLDALGVAKVMIQSIDTLLPYTISKESEKAKQLKEISIDREDLVLGRTRLKNQVYTLLYRIYNIEYEQKFKDPFALKALRFWRNAKPKCDPYLLKTMKRKVRRLLDIHVEVVDLEKDMEQLLKDNYTIQTASGCGVVLASTIIGEIRDINRFTSPGALSKYAGCSPRERSSGKKVRHVKSGSGNRRLNCAFHRMALAQISRMGNDRAKTYFKRKISEGKSKSQALVCLRRQMVNTENLSDTLKFFLSGLKTTRGIERNLFTKRFLSNIFYSPESIKIRFISRQSDGEAVAKARPSPACGGAGRANPLIFKIRVRI

SEQ ID NO: 233638 - protein, 345 aa, unidentified
MIHVGIDPHKASLAACAVDEVGRPLAERTFDNDPAGHAALAAWLDELAPVARVGLEGSASFGAAAARHLLASGLVVREVPAALTHRERRHGRQAGKSDPGDALAIARVVARGEDLPPIRAAGVSHDIDLLVTARDQVVAEATRVRNRAHALLREEVPGYGQRASALTRPKHRAIVRSSLRGHGSVAAGLIRDALDDLARLERRAARLEAGIGRLVGDHALLRHPGIGLLTAAKLIGRVGDPGRFRDDAGFARLAGVAPIPASSGQVQRMRYARGGDRQLNRALYVIALAQAWHHPPAQAYLARKRAEGKSWREAVRCLKRRIARPVLALLVEGYPALEARAMIET

SEQ ID NO: 233639 - protein, 410 aa, unidentified
MDLLRREVPASSLVVAIDPGKAFNRVWLTSGERGLIGEPVSLPVLRDGVDELERLLASSGVAGPPVIGLEATGSLHRAWAAEIERRWPGSLRLFAPSETTAARAQLGSRRFKTDDRDCAALVWLLRQGAGRPAEPQALEALLGTVRHRSQLVDARRVLQQRLHEQLNALCPGLSAPAGHGRALKLESPTGQAVLACAAAFAGRAPSKRSLLARAPGRTSDATATFWAERWRRLLAPPVDAELRAQRLAADLRRWQRLQQDIALTEQQLGVLLAQTPGQILTTLPGVAIVRAAAFSAYALPIERWATPEHLYSATGLAPASYQSSTLTRRGRISRQGLAEHRDALMGIAWGLSQRSDAFRERDAELRARGFRPIQARVALARNACRLCWRLLHSQHPYDDRRYARTRRRGR

SEQ ID NO: 233640 - protein, 421 aa, unidentified
MEQPTTIIAGVDTHTGIHTLALLDMNGRVLSTNTFGADPDGYGHLITMLGDPARCAGIGVEGTNSFGAALARRLQAAGFPVYEVLRPKRGVRRKDGKSDPIDAIAAARSVLAGDGTSLPKSSDGWVEALRHLNAERSQPVTAMTTPANSTGGLPAAAPEPIREKYRGLRTETRMNRLASCRPSGGLVAHSVLTALKGAAKAWRALKEQADPLEERMRSILDTNARPLLDIYRAGTITAATIAIVAGDNPERIRDEAAFAKLCGACPIPASSGKTNRHRLNRGGNRQGNMALHRIAIVRLGYHQPTRDYVAKKTREGKSKLEIIRCLKRHIAREAYKALIAIRNGGAGRQTPQERGALLRRLRTSHGITQQQIGEALAVPSSRISEIERGTRDLPELEQRATQWIHSITTPTTRHSQPLDDE

SEQ ID NO: 233641 - protein, 327 aa, unidentified
MIYIGVDIAKNKFDFCMLNGDAKKYGSLDNNNSGFKKLLALLSKYEDDAHVCLEATGSYGFDLAEFFFAKNIKVSIVNPAKVKAFAGSELSRNKTDKLDSFLIARFAKEKSPKLWQAPTKQDQDLKAMYRRWEVLKHSRAQEKNRLSSERNQLSLSSIESHLAYLNEQIEAVEAVLNNIKNEDENLKQRYDLLTSIPGIGKVTAFMFMTEISFELFEDVRQVVAFAGLNPKLNQSGLFRGKSRISKTGSAAIRKTLYLPAVKAKQVNPLIIPLAQRMEAKGHCQMSIIVASMRKLIHLAFGVIKSKRPFDPYYRHSIATNELIETMT

SEQ ID NO: 233642 - protein, 433 aa, unidentified
MKVLHERVAGIDVHKDMIKVAIRSPGDKAWTRKTEVLTFRTFYGVLQEMARELRRRGVTHVVMEASGVYTEPVYYALCEQDFTEVAVINPAHAKALRGHKTDAKDCARLAELFECGLLRGSYIPPAELKEVRDLVRYRIKTVQARASEIQRLAKALESAGIKLGSVASDLTGKSATAMIESLIDGERRGPVLADLAKGRMRAAGKLADLSMALAGRFTGHHALLCRLHRDRIAGFDAAIAGLDDRIAGGAAPWQREAALLKTIPGFGDVVAWAWLAEIGPEPDKWFSRAEKLASWVSLCPGNNISAGKRKHGRTGDAGTYIKPLLIQAAWAAIQGRGRLQARYRRLVRRFGGDKNPGAKKKAITAIAHTLLKIAYQVLKAGTPYVEPGADFYTRRESPEHKQAYLERQLQRLHPGCTVTITISPPQAALPSGA

SEQ ID NO: 233643 - protein, 409 aa, unidentified
MRYYVGVDWADQTHAVWVVDESGTKITARTVPHTAEGFVEWGRELDEWRVQGIERWAAIERPDGRVVDFLLDHGVVVYPVNPKALNRARDRFRQSGAKSDPFDARVLADFLRTDHLHLQALQPSSDAAQELKLLTEDCQRHIRQQTRLVNQLTTTLKAYYPRALEVAELTTALAREFLHAYPTPEALTVLTARQWQRWARGRRVSEARIGALWAVLQQPQLPVPAHVVRAKARLMQSLVEQLTPVVAAVAQYRKAIDDFFARMPAAQWARTLPIGKHGITAPTLWARLGDAPGRWESFRHLQAQAGTVPVTKRSGKQRVVHFRFACDKSLRHVVDQVAFLSLLSSDWARAYYDQQRARGHAHHQALRALGAKWLTIIFVMWHRQVPYDEQYHLATMTRQQLRQRQKKIA

SEQ ID NO: 233644 - protein, 430 aa, unidentified
MGLIVPSIMPPAQADQPIPYEWFVGIDWGSQPHQVCILDRDRRLGGERTVDHDGASLAQLAAWLWTVAAGHPQRVAVAIEVPRGAMVEGLVERGFHVLAMNPKQLDRFRDRHSVAGAKDDRRDAFVRADSVRTARPSLRRLHLDAPPLLLVRERSRVEETLLEEFRRSANRLREQLHRLYPQMRQLCSAAEEPWLWDLRHLAPPPAHARRLSEEQVQRVLKAQRLRRLKAPAVLACLQAPALPVAPGTAEAAQVHCGFLLPCLRVLAEQLQACSQQVSALLRTLAEEPGAGESPSDVAMVLSVPGVGRTMTAWLLAEAAQPLAERDSQVLRTHGGVAPVTQQRGKRRQVVMRHGCNPRLRHALYHMARVAMQRDAHCSSVYAALRAKGQRHGQALRTIGDRLLRLLMAMLRHRTCYEASRMRCEPVVQMG

SEQ ID NO: 233645 - protein, 432 aa, unidentified
MKYKMKQKQNQRITRISEKTLVVGADIAKKIHVARAVDFRGIELGKDCVFHNDREGLTKLATWMKGLQETHQKADIVFGIEPTGHYWFPLAAFLEAQDINVVIVNPHHVNKSKELEDNSPTKSDYKDAKVIADLIRNGKYSEPKLPTKEYAELRILMNFREKVMVSLNQVKARVHNWFDRYFPEYLSVFKDWEGKASLMTMRQFPTPEEIVSTGARDVLAHWKTEVKRGVGIKRAEKLLATAETSIGISEGLRAARIELKGLLDQLELFSKQVETTMNQVMDLLDEIPGTEQMLNIPGVGAVTVAGFLAEVGDLSSYDHGQQIIRLAGLNLKENSSGKRKGKTGITKRGRSRLRALLFRCVMPMVAKNKEFKALHKYFTTRSQNPLKKKQSLIALCGKLIRVLHTLGTKQREYNANDVLGPVRQAQLQQFAA

SEQ ID NO: 233646 - protein, 389 aa, unidentified
MIYVGIDVAKDKHDCCILESEADKLYPVFTIPNNKAGFDELYEKIFTVTDDKTKIKVGLEATGHYSLNLLGSLIDKGLPTCVINPLHTNLYRKGLSLRKTKTDKVDARSIAMMLMTNKTLKPYSDTSYHSEELKSLTRYRFDKVQERAKLKSSVARLVNILFPELEKLVPSLHMASMYALLSQLPGASYITECHLTHLKNLLETASKGHYGRDMAITLRNTARDSIGSVIPAKSMELKHTIHLIEVMTEEIDEIEDSIKSIMDTCNSPIMTIPGISYRMGAMILAEIGDFTRFNYADQILAFAGLSPSTYQSGQLDSSYSHMEKRGSRYLRYALFNAAKFVCKWDENFGAYLSKKIGEGKHYNVAIGHATKKLVRTIYQMELTGEAYRR

SEQ ID NO: 233647 - protein, 417 aa, unidentified
MTEYAALVAIDWADQQHAVCLLDPSTGERQQAIVKHTPQALQEWALSLRQRFAGGPIAVCLEQSRGPLLYALLQYDFFVLYPINPATLAKYRQAFSTARGKDDPSDADYLLDLLEHHRDRLRPWHPDDQKTRTLRLLVEQRRRLTGDRTRISNRLTALLKGYFPQVLDWFEDIRTRLVCDFLERWPQLSLLQQARPATIDRFLRSHHSTSNSTNQRRLQEIKTAIPLTNDAAVMTSSVLNVKVLVAQMRTVIEAISEYDRQLEALCLTHDDYHLFAALPGAGPVHAARLTAALGSDRSRWTSADELLRFSGIAPVIERSGKQFRIRWRYFCPKFFRQTFHEFAAQSIQDSFWARAYYSSQRAKGKDHHAAVRALAFKWIRIIWKCWHTRTPYNEVIYLESLRKKGSSLLKFAADYQQ

SEQ ID NO: 233648 - protein, 412 aa, unidentified
MSKNTASWTYVGLDVHADTITVAVAEGSSRGRGRGVGTIPNQPDAIRKAMKKLGRAKALRVCYEAGPTGYALYWQLHKMGLACEVIAPTLVPVRAGDRVKTDKRDALKLAQAYRAGELTPIFVPDAEHQALRDLVRAREAAKKDQLRARHRLGKFLLRLGRRRDTQSNAWGQAHWRWLDSQVFDHAAQEEAFVDYKNEVQHATERVARLDKAIDRAVELAPPRMQELVLALQSLRGVAMLTAVTVVSEVGSFERFPSAQKFMAYLGLVPSEHSSGRSRHQGGITKTGNAHLRRVLGESAFCGRLRPRRSPSLKRRQQGQSQAIVDMAWEAQKRLYRKHGRMRIRAKSHQVTVTAMSRELAGFVWAVGRQREAEMNTPGPPVERFKEAGKHPYGKDNPRNQHAIGTAVPNSRH

SEQ ID NO: 233649 - protein, 365 aa, unidentified
MKKTSTVATESNKNLAGKLTIGLDLGDRWSWYCVLDEAGEVIGEQKVGTTQKAMREAFAAMPRSRVALETGMHSPWVSRLLEELGHEVIVAHARNVRLIGESRKKDDRLDARTLARLARIDPQLLAPVKHRSRQAQADLMVIRARASLVRARTSLVNAARGMTKSFGERIRGCNPRNMDSEKAETLSPELQTALGPLLQALEVLSERIAEYNRQIEHIAQQSYPQTALLKQVKGVGTLIALTYMLTLEDPHRFRKSRDAGCYAGLQPGRRNSGQSEPQMHISKEGDPYLRTMLVQAAHHVLGPFGADSDLRRWGLKLAERGGKNGKKRAVIATARKLAVLLHRLWVSGEVYEPLRNSKPTLLATA

SEQ ID NO: 233650 - protein, 341 aa, unidentified
MTVYIGVDLHARQQTLAFVDTHDGEIQCRELRHQKDDVRAIYQQFTGEVIVGVEASGYTNWFEELVEDCGHTLLVGDAAEIRRLARRRQKNDRRDAELILDLLTHDEFPRLYRYPPESREVLRQLRFRHKLVKLRTMTLNSLQALSIGAGLSLQAKLATARGRTRLEQLHLSPVLTTQRHEWLELCDELSARILTVERWLKGQAKNDARVQRVQTHAGVGLLTSLCLVHTLGDVTRFASTRKVTAYVGLDVTEHSSAERKVYGGISKAGSRLLRYLLVEAGQTAARSDEHLRDFYQQVMKRRGKAKAKVAVARKLLVRTFIMLRDEIDYAEFLRRGKRVEG

SEQ ID NO: 233651 - protein, 469 aa, unidentified
MIEIVITDNIHILAVVDEAIFILFVQEKKKSFLAAMTLINFVAANQKYYTFNLLSVFIMVFWSVQYLLQHLLVQTQLSDQLLQPLILILQLPQTPQFRHARPGKFFLPVNGMDYLLPLRLTVRNVLTRRITMNIVFLGIDLAKNVFQLCGLNQAGKPVYTKRTGRKELLQTLANIPACLIGIEASTGAFYWQREFEKLGHKVKVISPQYVKPFVRGQKNDGNDAQAIAVALMQPTMQFVPPKSPEQQDIQALHRARQRIVNHRTATVCQIRGLLLDRGIPIGSAVSRARRAIPLILEDAENGLSSRMRRTIAELYDLFNDLGRRIHFFDKEIETVFRQSEACQRIAKVKGIGPKTATAVVAAIGKGTEFKNGRHFAAWLGLVPRQHSSGDRQVLMNMTKKGDKHLRTLFIHGARAVVRVATNNNDGHMNQWVNQLKEQRGFNKTTVAVANKNARIIWSMLRNETGYQVV

SEQ ID NO: 233652 - protein, 424 aa, unidentified
MENTAARKRNQVPEGYLVIGVDPHKKRHAAVAITQDFTTQAKFKFDNTREGLEMMLGRARVEMLKSGCRGVMFAIETGGHYWRNIAYYLDERGIPYRFINQFTLKRRREGKDLNHRKNDYRDSEVAAQLLCNGEFTESKLLQGVYAELRTSHNAYQRLVKERTRITNLVKGLLDALFPEFTQVFKDPAGLTALSVLSTCPIPKVIAGMTEDEFVSTIEARHKGQRLMRKKLRTLHYSAKTSIGIYAGARSVSSELAFLVDKLELIRQHIRIMERTLVRLVDETEEGKYLLSIRGLNYIAVAGLLAELGCFKLYRSAKQMIKMAGSNPTESESAGKKRSKTPMSKQGRPLLRYCAWTSVIPMLRFNHDFRVWAKQRRERPAHANPLSGREIVGAALNRLLRLAFALVKNQTYYQDVKPILIPVAV

SEQ ID NO: 233653 - protein, 322 aa, unidentified
MNKNKHFIGIDISKKVFDVWSSKLGHLQFKNTPDGFSEFLLVLDSNCWCVMEYTGIYYYQLALFLYENDLMVSVINPLVIKRFIQMKLQHNKTDKSDAKMIVKYAEEQAMSLWHPLPGYIEECKELHAAISLYFKQSTALKNKLHSLLDKGTRGKILTSIKRQIRQINSEIILLEQELEKIVKLHEQELLSNLTSIPGIGRKTAIMLIVCTNGFKTFENARQLSAFFGLSPVITASGSSVRGKSRISKKGNPSVRNHLFMCSFTAYTKNPQCKALYDRIVAKGKSKKLALIAVTNKLLSQSLAIAKSGVRYDPNFRSVPVFK

SEQ ID NO: 233654 - protein, 392 aa, unidentified
MIYIGIDVAKDKHDCFITNSDGEILFKPFTIPNNRDGFETLFQRIISVSNDLNKVKVGLEATGHYSYNLLGFLLDKGCHTFVINPLHTNLYRKSLSLRKTKTDKVDSRTIATMMMSDMNLKSYSDTSYHNEELKSLTRYRFDKVKERAKLKSSISRLVCILFPELEKLVPTLHLPSVYALLSEFPGANAVASAHLTRLSNLLSESSKGRYGKDTAVIFREAARNSIGSVMPAKSLELKHTIKLIQELTSEIDEIETAIKRIMDEEIQSPILSIPGISYRMGAMIIAEIGDFSRFDSADKILAYAGMSPSTYQSGQLDNCYAHMEKRGSRYLRYALYNATKYVCHWDESFGTYLEKKRSEGKHYNVALSHAAKKLVRLIFAMEKSGQAYVPAA

SEQ ID NO: 233655 - protein, 430 aa, unidentified
MTKRSSTPADAVLVAIDMSKHRQEVLIERPEGGRRRRMTVMATKADYDRLAADLADIGRPVIVGFEATGNYHRTLAHRLLSAGFELRLISSVALARTREALHNGWDKNDSKDAQVILHMLQIGATQRYVDPLAAGINDLQEMSKTHEAISKAKTQTWHRILTHYLPLYFPEIERFAGNSRSDWFLALLERFPTPTSMTALSQEAFTREAWSLVGRKVSKARLINDIYETACASVALPIGEDSVSIAMFRMVIAQARSLIRQRDEIERTAHALLSENRDYQLLRMIPGIGPINALTILAEAGDLRRFAHHRQFLKFCGLDLATCQSGTFRGRTKLSKYGNARLRRTFWMATQVAIRQRDNSFRDKLGRYVAGHANDPDRRRKAMTALTAKMARVAHAVIKTGTEYRPFLERADTRWKDPSLWSREGAAATL

SEQ ID NO: 233656 - protein, 335 aa, unidentified
MEFTFFLGIDVSKEKLDFALNCGETLLFHQVVENTPKALEAFFKELLHIEGFSFKKTLACLEHTGIYSNHILNLLFKKKAKVWLENAVQIKKSIGLVRGKSDKIDSKRIAEYAFDRRAKAKFWEPKRELVKKLAYFSTLRTNLVDAQKRLSTSIKESSSFIEKSLAKTAKNVTSQSLTALAKDIEKVENEIQSIIKSDPELSRLFSQITSVKGVGPVIANHIIIYTNEFKDISDPKKFACYSGVAPFPDGSGKFKGKDRVSHFANKKMKALLSMGATVAIQHDAELRNYFQRKTQEDKKDKSKVINAVRNKLILRIFACVNQNRKYEKNYIRSLA

SEQ ID NO: 233657 - protein, 344 aa, unidentified
MEAAVTIGLDLGKSVFQVHGVNREGVVVVQRRLTGARLLAFFAKQPGCLVGMEACAAAHHWARELRKLGHRPKLMPPRYVKPYVKRQKNDAADAEAICEAVTRPNMRFVEIKSCEQQGVLVLHRVRLMLMRQRIALSNAIRGHMAEYGLVASVGRNGLQRLIEIIADESDERLPAMARSSLVILASQLQLVNEQVLENDRRVRVSARSTDVGRRLMEVPGVGPVLASAIVASVPDPAAFRSGRDLAAWIGLVPKQNSSGGKEKLGGITKQGDRYLRQLLVVGALSVIRYAQRHGTRRPWLVALLSRRSSKIAAVALANKMARMIWAMMMTGERYREPVLVGSAG

SEQ ID NO: 233658 - protein, 344 aa, unidentified
MDHFAGLDVSVKETSVCIVDDTGGIVREVKVASEPDALLAVLKSPTYHFKRIGLEAGPLSQWLFSALADAGLPVICVETRHMRAVLKAQINKTDRNDARGIAQMMRAGLYRPVHVKTLRSQKLRMLLTHRKLLQSKAIAVENDLRGTLRNFGLKVGIVGKLKFEARIKELVESHPDLAVLVEPLLVVRRVLREQLGILHRRLLAIVQDDEVCRRLMTTPGVGPVVALSFRATVDVPARFRNSKAVGAVLGLTPSRYQSGETNRTGAISKCGDEMMRVMLYEAAQSMLVRSAKWSWLKAWAMQIARRRGMKKAIVALARRLAVIMHRIWLDGAEFRWSRQETAAA

SEQ ID NO: 233659 - protein, 520 aa, unidentified
MSATPFRRRRATRRPSATLAKPRGVLHPRVQLVGPEHFGIVCYDCHKGRSKFLLADFYGRVLIPPTQVEHNRPDLDATVAQVRQAFAEHQLRDGVVAIERTGRYHRLVQRTFAAAGFETRIVHPFVTKQYRQPVDPGNKTDDADLAAIHRATVTGCALQEASRDEAWTSLQLVIRHRRDLVRKGAALNCQIRDHLEAALPGYAACFDKLWESAIPWHLLRHYPMAAQLHAAGLTTLCQCLRQANIRFQQRTVEAVLDWAAQAAPGDVAAGQHLRIALALYDDRLRKNQEIQALEREIAGRLAPTPYVLLLSFPGINVVSAADFAGEAGPIPHYANPKAITGRAGLRPSRYQTNQVDKADGPLVRNCNRSLRAAILGIADNLLLCNHHFQHLAALWTGQGKGPRDIRIRVGLRFCRIAFQMVAGRQVFRHPCIPGRHYILDKLNAFHREHGTDLADVLRDLQAAIGQLPSAEYAAEARPLQQELQRINEGRRRGPQRLGDILPIVFARLGVGVVQSTESGE

SEQ ID NO: 233660 - protein, 334 aa, unidentified
MENIALIGIDLGKNSFHIHCQDHRGKAVYRKKFTRPKLIEFLATCPATTIAMEACGGSHFMARKLEELGHFPKLISPQFVRPFVKSNKNDFVDAEAICEAASRPSMRFVQPRTESQQAMRALHRVRESLVQDKVKTTNQMHAFLLEFGISVPRGAAVISRLSTILEDNSLPLYLSQLLLKLQQHYHYLVEQIKDLESQLKRKLDEDEVGQRLLSIPCVGTLTASTISTEIGDGKQYASSRDFAAATGLVPRQYSTGGRTTLLGISKRGNKNIRTLLVQCARVFIQKLEHQSGKLADWVRDLLCRKSNFVVTCALANKLARIAWALTARQQTYVA

SEQ ID NO: 233661 - protein, 353 aa, unidentified
MTSEKYVGLDVHKATIVAAVQDASGKCVMTSVIETKAETIRTFVKGLTGTVRVTLEEGTHASWLSDLIRPLVAEVIVCNPRYNALLQSGNKNDKVDANKLADLLRAGLLKPVYHEAHGTQSLKQLAQCYETLVVDSVRVMNRIKALYRGRGIDCSGNGVYCVGQQKDWLAKLEEPGARSRGQLLYTQLESLKKLRRQARSELIKESRRQAACKLLTPVPGLGPVRVALILATVVTPFRFRTKRQLWTYVGLAVVTKTSAEYEFVGNRLHKRNKPTSTRGLNRNYNRRLKKVFKSAALDATRTEPFASYYRNLIEKGTSPEIARVNIARKLAAIVLSLWKRGEEYDRQRMKKSA

SEQ ID NO: 233662 - protein, 349 aa, unidentified
MNEIIQCGVDFHARQQTICYLKTETGELVTETLKHEPREALRQFYRQFPGPVIVGLEASGYSTWFEELLTELGHEVWLGDATEIRRRARGRQKNDRRDAEHILELLLEHRFPRLHRPTLASRELLRMLRYRQKLVKVRTIVKNSLQALALQAGLSLKAGLFSKAGKEQLLATTMTAVMTVQRQQWWELLVDLDQRIRESEKWLQQEAFQDHRIRLLRSHPGIGLLTALALVHTLEPVSRFATTRKVAAYGGFDPREDSSGERKRFLGISKAGSRLLRHLLVEATLQASKKDPDLKRFYQRLVHRRGKAKARVAVARKLLVRSFIMLRDQINYAEFQQRAVAARLARGVA

SEQ ID NO: 233663 - protein, 415 aa, unidentified
MEDLGLRALHRRVAGIDVHRMLHVVTVLIEQPDGSMQRQTREFGGFRRDCRALAAWLAELHVELVVMESTGIYWKSVFTHLENAGITAWVVNAHRIKHVPGRKTDMADSEWLAVLARFGLVKASFIPPRDLRELRLVSRYRRKLSAMCASEINRLHKILDDGGIKLGGVVSDINGVSARAMVSALIAGQPIEQMLGLARGKLQQKREELGASLDGDLSTRHLFVLGHIEAHIQTLQRELAEIDRYLLAAMRPYAWVHQLLQTIPGIDEIAAALIVIEIGDDMARFGRAQSLACWAALSPGNNESAGKRKSGRTGHGNSTIRFILCECANAARMTKSTLAAKYRSLMVRKSHKKAIIAVAHKMIRLIFVMLSRRQPYLDQGIDYAAMSAKKNAPRWIRQLKAIGRWPSPKSAAASA

SEQ ID NO: 233664 - protein, 403 aa, unidentified
MNNVAGIDVSKGKSMVSVLRPFGEVVAKPFSIGHTGSELKELADYLKSLDGETRVVMEHTGRYYEPVARFLHEEGVFVSAVNPKLIKDYGNNTLRKVKTDKADARKIARYGLDNWAELRQHTPMDTIRMQLKTLNRQQSLYAKTKTMMKNNLIALLDQTYPGVNALFDSPVREDGSQKWVDFATAFWHVDCVRNMSLTAFAERYRKWCKRHGYNFSQSKAVEVHAGAQDLIAMLPRDALTKTMVRQAIDALNAVSASLERLKAEMQALAAQLPEYPVVMAMHGVGDSLGPQLMAELGDVARFTHRNAITAFAGVDPGADQSGTHEAKSTRVSKSGPPELRRALFLVMDCLLKTQPQDDPVYRFMDKKRAEGKPYLVYMTAGANKFLRIYYGRVKEYLAQLENS

SEQ ID NO: 233665 - protein, 361 aa, unidentified
MTETMTWVGLDVHARSTHCAAIDSLTGELSRARFGVGVEPVVQWLGELQGPIRAVYEAGPTGFGLARAAQRAGIDVMIAAPSKTPRARGDRVKSDRKDAELLARLLLAGQLKPVTVPPDWLESVRHLARVREAVRRDLGRGRQRVSKLLLVEGRVYPGATTWNREHRRWIASQQFGHAPTELALIDLLAAVDGLTARREALDERLSRLAQDARLWPTVARLRAFRGIDTLTALAVHLELGGNWQRFRSPAKLASWLGLTPSLEQSGESKTQGQITKTGSAIARRLLVEAAWHYLRQPRIGVTLRNRQVGQSDHILQIAWRAQCRLHRTHQRLREREKPGNVATVAVARELAGFLWAAATAP

SEQ ID NO: 233666 - protein, 379 aa, unidentified
MPRGSRRATAHNRILEEPAMAKAKTLVGLDVHATKIVAVVLDAETGQLQTFSMDGDAAGAAGFCAGLPRPVRVAYEAGPTGYGLARELAKRGVECVVAAPSKIPRASGDRVKTDRRDAEHLVRLLLAGKLHAVRVPGDEEEALRDLVRARDAVRRDLMRARHRLSKLLLRHGIRFDDGQAWTERHRQWLATITLDWPAAHTTMLDARGAIDALCHRRDGLEREIVALLPACPWAVQVGRLRCLRGVDTLTAVGLCAEIGDFERFARAEQLMSYVGLVPSESTTGQQRRLGSITKTGSGHARRLLVEASWHYRPRPSIGKALTDRQADQPPEAIAIAWSAQRRLHRTWTRLEARAKRRTIIAVAAARELAGFAWAITQIE

SEQ ID NO: 233667 - protein, 358 aa, unidentified
MQRNKKTFKGQNIYIGIDVHKKNWQVAVITESGYTERLSTAADAKALFKFLKSHYPDGNYRAVYESGFSGFATHYALSELGVSCVVAHAADIPSSQYELTMKSDRIDAEKLARALRAGLIRGIYVRPKDNLDDRGVLRIRKTIQIQVGGYKTRIKHLLHSNGVELPERFSRSGTHWSRAFIAWLREDVRLLSDTRRSLELLLLQVETLRANLLEATRRVRALSMTDRYREDCALLMGIPGIGLTVAMTILTEVCDIGRFGNERQFASYLGLVPTSHSSGERVSHGEMTFRGNKHIGPLLVEASWVLIVRDRELGRMYTEYRWRMAGQKAIIKIARKLSNIIFAVLKTRKAYEPYRRDA

SEQ ID NO: 233668 - protein, 486 aa, unidentified
MSSQKKKQPEDSGKQKAVNGKNKRRRRKKGMTLDDRPVLEPNAAGIDIGAREIFVAVPADRDENPVRVFPTFTEDLEEMAGWLVSCGVTTVAMESTGVYWIPLYDVLEQHGVRPCLVNARNMKNVPGRRTDWHECQWLQFLHSVGLLRAAFRPDGAVSAVRSLMRHRTDLVQIAAQHIQHMQKSLTQMNLQIHHVISEITGVTGLAIVDAILAGERGPAVLAKLRDHRIHASEEIVQKSLVGNWKPEHLFTLKQSRQIYQQYQESITACDEEIEKLLVAFEPRVDPAEHPLPPDRKAKQRKRKKRGVIPGVNAKTGFDMRTEAYKLFGVDVTQIPGLMMTPLKLFSEVGRDMSRWPTADHFASWLGLCPDNDISGGRVLWKGMRGTRNHAGQLFRMAAFGLHHELSPMGDHLRRMKSKIGPAAAQTATAHKIAIIFYTMVKKQVEYDASIWAQKDAEREKRFEAKLKRQAQARGYKLVKIEETIAA

SEQ ID NO: 233669 - protein, 356 aa, unidentified
MSEKLNSEIAVIGIDIGKNSFHLVGQDRRGRIVLRQKWSRGQVEARLANLPPCLIGMEACTGAHHLSRKLQALGHDARLMPAKYVRPYSKGEKNDYRDAEAIAEAVQRPTMKFVATKSADQLDLQALHRVRERLVGQRTGIINQIRAFLLERGIAVRQGLHFLRAELPAILAKRTDVLSPRMLHVIEDLAGDWRRLDERIDALSDEIMTLARQDKGCERLMTVPGIGPIISSAMVAAIGSGDAFSKGRDFGAWLGLVPKQMSTGDRTILGSISKRGNRYLRTLFVQAAWVVLVKIKPEGWERYGLKSWIEAAKQRLHRNVLAIALANKLARIAWAVLHKGRAFECGKTNATAPRPA

SEQ ID NO: 233670 - protein, 375 aa, unidentified
MEHHSEAFVALDTAKLRNAVAIADAGRAGEVRYLGEIDNTEAETRKLVAKLASKHARLTFCYEAGPTGYGLYRLIKSIGHDCIVVAPSLIPSKPGDRVKTNRRDAVNLVKLLRAGELTAVWVPDERHEAMRDLVRARDAAVKDYRIKRQNVSSLLLRLGRHYPGKKTWGRAHINWLTGLKLEHREQRIAFEEMLLAVRQVRERIERLEQAMREAVADWTLAPVIEAVQAMRGIDMVGAIAFLAELGDLSRFENPRQLMAYLGLTPSERSTGESVKRGGITKAGNTRARRLLIEAAWSYRFPPRVSKDMQARIGAAPRTAREIAWKAQIRLCGRFRALTQKGKRPTIVVTAIARELSAFIWAINREVVGSHAAANQ

SEQ ID NO: 233671 - protein, 341 aa, unidentified
MGSFIGIDTHKDSLSCSAVDDVGREVESVHAVNDGRGFRKIERFAQRVEATRIGIECSGSFGLALAQHLLAAGFDVREMPGQLVKRDRRSMAKGKSDTLDALLIARVVAREDKLPPPPFRGLTHDLKALVDHRETLLNEATRHRNRAHAILTQIRPGYSRAVPALTSARQLDAALELVEGDSGVRATILRDALKRVAELDSTAHVLEQQIDALVKASGTSLTQIVGIAAITAGRILGELRDVSRLSGQAAFGALTGTAPVPASSGKTDRWRLNRGGNRQLNRAMHTIALTQSHHDPRARAYLERKRTAGKTDKEAMRCLKRHLARVVYRRLADDRTLVLLT

SEQ ID NO: 233672 - protein, 355 aa, unidentified
MDNIKYIGLDVHRDTISVAVLNAEGKLVMQSVVATHASAILDFLHGVRGTLHVTFEEGTHSAWLYDLLVRRVAKLVVCNPRKNALLKAGSKSDAIDARKLAELLRAGLLSPVYHGQNSTAAVKHLGRSYAALTEDTTRIMGRLKALYRSQAIACAGQKPYGARHREEWLAQLADSGLQRRARRLYQELDALQQLRREARQDLVLECRKHSEAKLLRTVPWLGPIRVALLIGRVQTPHRFRSKRQFWAYCGLALETRDSGEYRVVNGQIERKQKPVFIRGLNRNHNHDLKSLFKSAATAASSSEGAFGAFYENLLKKGMRVEMARLTLARKIAAITLHVWKKGEAFDAEYVKPQAA

SEQ ID NO: 233673 - protein, 412 aa, unidentified
MLFIGDDWAEDHHDLELEDETGRRLAKARLPEGLDGIAKLHAMVAQHAPADWAELPSEEVADRVVVGIETDRGPWVTALRAAGYRVYAINPLSSARYRERHSTSGAKSDAGDAHVLAEIVRLDRDHHRQIAGDTDLVDAVKLIARAHQTAVWERTRQVLRMRSTLLEYFPAAVAAFEDLSAADALILLARAPSPSRVEKLTRSQVVSALRVARRHHVEAKADPLLAVLRAPGLRQHSTTEAAYAAVVGAQVGIITALNVQIKQLQEVMDEHFGRHPAADIYLSQPGLGVVLAARVLGEFGDDKKRFHDVRARKNYSGQSPITRASGRKTIVMARYARNRRLGDALHQQAFSALKASPGARAYYDALRARKIGHHAALRQLANRLVGVLHGCLKTGTQYNENTAWQHQNVAAA

SEQ ID NO: 233674 - protein, 315 aa, unidentified
MTEPEIFVGMDISKAQLDIAIRPEGQFAVANDAAGVAQLIQRMKALPAGLVVMEATGGLEIPIAGALAAAGVPVIVVNPRQVRDFAKATGQLAKTDIIDAAVLARFAEAIRPEPRPLPDEQTQVLAALVVRRHQLIEMLTAEKNRLVSARRTIQKNLRKHIAWLERALHQADIDLAEAIRQSPVWREKDALLRSVPGIGPVLTATLLATLPELGTLTHKQIAALVGVAPLNRDSGTLRGRRTCWGGRAQVRAVLYMAALAATRFNPVLRAFYQRLCAAGKAKKVALVACMRKLLILLNAMVKHRTPWRAPIGQHA

SEQ ID NO: 233675 - protein, 348 aa, unidentified
MNDQRAHVWVGIDAGKAHHWVTAIDDQGAMLWTKKVSNDEGAILDSLAEVLALGENFTWAVDIVGTTSALLLALLASHGQSALYVPGRIVNRMAGAYRGEAKTDARDAYVIAETARHRHDLTPIRMPVEIIADLKLLIAHRGDLVADRVRMLNRLRDVLTGIFPRLDRAFDYAKHKGALTLLTGYQTPTALRRMGQARLTKWLSRRGVQGAPAVAEAALEAASGQQTQIGNETIAAQIIADIGTQILALDKRLRTLENQITTMFHAHPQAEIIESMPGMGPILGAEFLAAAGPLDNYADDGHLAAAAGLIPVPRDSGRRTGNMHRPKRYNRHLRRSLYLSAQTSVIRE

SEQ ID NO: 233676 - protein, 338 aa, unidentified
MSLLSVGVDIAKQTFAGAVWIQGASRSLGEFPNRQAGFEALAARLEAERARVGAALIQLVLEPTGGYELGLAGFARAQGWRVSRPNPRHVRDFAKGLGQRAKTDKQDALLLARYGAERQPPPWAPLPAAVSELESLLARQQELEQMLRQERNRQQGLAGRPGVAASVLPNLAQVIEALERAREQVEAAIQEHLKEQPALAEQARELRAVPGVGPQSVLPLLVLLHRWHALTGGTGTAKKLTAYAGLDPLTHQSGTSVRGRETISRMGDRRLRARLYMCALGGVKGQNALRAYYQRLVGRGKAKKVALVAASRKILIWAWAVFRDHVSFQAEKALPQAA

SEQ ID NO: 233677 - protein, 348 aa, unidentified
MTVYIGVDFHARQQTISYLTTEEGAIQHLVLLHDNPAAVRAFYAQFAGQRVVVGFESSGYAAWFEELLEELGCEIWIGHATYIRQFAKRRQKNDRRDADLILELLHTGDFPRIHRYSRTTREMLQQLRYRQRLVKMRTMAMNMLLFMASSRGVSLRTQLQSKRGQAKLQQLALPATLGTQRDELLSLLQTLDEKISTIERWLAKETKEDEAVQRLQTHPGIGLLTSICVRYTLEDASRFANTRKVSAFAGFDPMQDQSDERKRMGAISKQGSRWLRFYLVEAGQVATRKDADLQRLYQRVARRRGHAKAKVAVARRLLVRAFIMLRDEIDYAEFQRRGVAARSSRGTA

SEQ ID NO: 233678 - protein, 422 aa, unidentified
MRVPFRRFVGRTGGRRLAPHRAKRDFIGECFPQGRSGRSCVCLVSVLRRAYKLLPFDLWEKIDVQIADRMSVETKITLGVDTHKDTHVAVALDGLGRHLGTLSVPTNTAGYRELLGWARELGSIEQIGVEGTGSFGAGLARLLKAEGIPTREVIRSKRRDQYRSGKSDPIDAEAAARAVLAGTATGEPKDADGQVEMIRALRTTRRSAVKARTQAANQMKALLVSAPEELRAQLRDLSTARLVCRASRFRLGENPDSVMAATKLSLRSVARRYRHLCEEIRELDEQLDRLVAEAAPELMAVDGVSTDTAASLLITVGDNPERLNSEAAFANLCGVAPIPASSGKTVRHRLNIRGNRDANRALYVIALGRMGRDGRTKAYVAKRTAEGKSKREIIRCLKRYIARELYRILVQPLSPLPSVSAP

SEQ ID NO: 233679 - protein, 410 aa, unidentified
MLEVKVENCAGIDVGKKFLAVCVLTGPVDRKPVAEVRRFGTSVKELERLRAWLVERKCTEAVMESTGSYWKPVFNILEGSLKIILANPEQVKALRGKKTDPNDSRWLASLLRHGLVQGSFIPPRDIRELRDLTRRRRTLVGEGAAERNRVQKVLEDANVKLGNVLSDVFGMSGQAMLEALLENKRSAAEIAQLGHWSLAAKIPQITEALEGHRMNDHHRFLVRQALRHMQYIEQMIEELDKEITAKLKPYSKQMELACTVPGIQTISAASILAETGMDMSPEGPFPDCHHLASWAAICPGNNESAGKRRSGKTRQGNRWLRGMLTQTGWAAGARNSLFRERYQRIKLRRGGQRAVIAIAHAQLIAIYWALRNGTPYPEQVQRLEQDRREAQIRHHLQRLAKLGYEPNMHA

SEQ ID NO: 233680 - protein, 468 aa, unidentified
MKPKSRGAKKQKVSPFDGELKLIEPDCAAIDIGSRSHWVAVNPQRDCEAVREFGAFTTDLMRLADWLEQCEVKSVVMEATGVYWVPLYELLENRGFKAYVVDAHTVRHLPGRSKSDVKDCQWLRRLHSYGLLRGSFRPPAQIRQLRNYQRSCTKIVEAAAQQQLRMQKALTLMNIQLHHVISDISGLTGLGIVRAIVGGERDPKQLAKLRDPRIRASKETIQKSLEGNWQEELLFDLKIALESYDHFQGQIAAYNEQICRELREVPSKVDVVREPLPAGRPKVCHKRPGMSQQDQLDLRQELYRISGVDLIRIDGISLQTAQRVFFEIGTDVSAWDDEKQFSSWLGLSPNHRISGGKVLKRSSRKVVNPLSVALRLAARPLRNSHSALGANFRRLIAKIGMPKAITAMARKLAVLIYRMLKYGTQYVDKGMEHYEAKYRETKLQYLRSQAAKLGMALVPNLEAVSAAL

SEQ ID NO: 233681 - protein, 328 aa, unidentified
MVLYAGIDVHKKTCHGVITDAYGKILKNGTFDNSDYGIQNFFDGYGDVEAVIEASYSWRPTYERLDEIGIDVKLAHPYKVRAIAEARIKTDKIDAGILAHLLRANLIPESYVPPKETRELRDKVRLRTQLMREKVRLENKIYAELEKNRIDLDENPFTKKGKEDLRELGIGSVDRYLVIHETVEEQMKVVSNELKEIADDSEEAELLMTIPGVGYFSALLFISEIGDIDRFSSPKKLCSYFGIVPSVHKSGKTEKYGRITKQGSGLVRWALTQCVWSHVRWADSQLTRFYLRKRREKGKKTAAVATARKLLTVIYYMLKKREKFRLEG

SEQ ID NO: 233682 - protein, 370 aa, unidentified
MTDCIIAGCDLHDRSMLVKWSVGRGASKRRSFGNTAAGRERMIRMLQDAAQAANTDRIVFGYEASCLGYGLYDELRSSGIECHVLAPSCMARSPRHTRTKTDEKDADGILDVLRAHVLAGAKLPAVWVPDERTRQDRRIVRRRLVVGEQVGRVKTRITDLLKACGARRPEGVERWSLADRSWLAGLSGEQLGEGAQMVLASLLRELAFCEEELRLQERNVRALSRQKRYGAARAELMKLKGVGILTAMVFLTEMGDLSRFANRRQIGAYLGLAPTSHESGEASDRKGHITKQGSSRVRKVLCQAAWALLGHDPVETAVHARIMRASPKRKKTATVALMRRLAVRMWHVGRAAQASGGCFAPPSEAVACGP

SEQ ID NO: 233683 - protein, 315 aa, unidentified
MNEAADVIVGIDVAKAALDVAVRPSGEARHLANAAAGIGELVGWMQALSPEVIVVEATGGYEAPLVAELGIAHLPVAVVNPRQVRDFARATGRLAKTDRLDAQALAHFGQAMRPTPRLLPDEDTQALAALVERRRQVVAMRTAEENRLGATRVAPVRARIQAHLAWLEADLGEIDGDLQQQLRASPLWREQDDLLQSVPGIGPIIALTLLAQLPELGRLSHGQIAALVGVAPLNRDSGTLRGRRAVWGGRQAVRTALYMGTLRATRCNPAIRLFYDRLLAAGKAKKVALVACMHKLLTILNAMRKHQTPWQAQAA

SEQ ID NO: 233684 - protein, 347 aa, unidentified
MLLGVDAGTGEVSQSKQINASDDGHRDAVRWARELDSERVWAIEDCRHVSRRLEQALLAAGERVVRVPPKMMGQTRRAERQSGKSDEIDALAVARAVVKDGVERFPSAYLDERAMEIRLLSDHRDQLVTERTRIQNRLRWHLLQLCPALEAQLPQAGLTRQAVQERIARRLRTFGDDTRARVAREQLSRVRALTHQINGLERELQRLVAAHRPALLAEQGCGALIAATLIGRTAGAERFPSDSHFARQAGAAPIPVSSGRVDRHRLHRGGDRQLNRALHMIAITKARIDPETRAYVERKRAEGKTRREALRCLKRHLARKIHRLLAMPAADPDPAQFNIAISGRCLT

SEQ ID NO: 233685 - protein, 351 aa, unidentified
MIIIGVDYHPSFQQIAFLDQKTGECGERRLNHREGEAEKFYRDLKQRGVSVRVGMEATGYSRWFERLLAELGIEMWIGNAAEIKTKRVRKQKTDRNDAQLLLKLLLENTFPRIWVPSPENRDLRQLLWHRHRLVQMRTRIQNQLQALAMNEGQRWKKKLWSEPGRVQLEKFPLSVWASRRRNDLLELLDRLNPKIAELTIAVEQEARKWPEVLRLMTHPGVGPLTALAFVLILGTPERFHRGKQIGSYLGLIPSEDSSAGHQRLGHISKQGNALLRFLLVEAAQAAARCDPDWRRRYIHLAMRREKNIAKVAIARRLAVRLYWMWRNGWEYAQSVEFGSHAGQLVTGHGVK

SEQ ID NO: 233686 - protein, 375 aa, unidentified
MINYTIFVGLDVHKDSITVAIARSGKQDVESIGFINNDSTSVRKMVKRLEEKGGELSFCYEAGPCGYGLYRQITAMGHSCMVAASSLVPQRPGDQVKNDRRDARKLARHLRNGDLTSVWVPDEDNEALRDLSRARQSAKEDLHRNRQKLLKFLLRLGVRSPQGIKNWGSKYWQWLKALKLDNSIQQMILSEHIYAIEECDSRVSRFEKEIEAQSQDGPHQKTMAALQGLKGVALITSTTILSEVGDLTRFKNPRQLMAYAGLVPSESSSGNIIKRGSITKSGNSHLRKIIVEAAWHYQHRPTLSIGLKKRQEELSEEIKQISWKAQHRLNLKFRRMVAKGKPSQKAVIGVARELLGFIWAVGQAVGKENELSEAV

SEQ ID NO: 233687 - protein, 375 aa, unidentified
MSKIRFVGLDVHADTIAVAVAEPDGEVRPLGIIPNCLESIRQTIAKLGPANQLKACYEAGPTGYVLYWQLAALGVTCEVVAPSLVPVKAGDRVKTDRRDAAKLARTYRAGDLTPVWVPDAAHEALRDLIRAREDAREDQQRARQRLGKFLLRHGCQPPQEIKKNWTRKHMDWVKRQVHFEQSSSQAAFLDYVHEVEHAADRLERIEKAIDDAIAAAPPDIQQVVQALQALRGVGKIVAVSVVAEVGSLSRFTNPRQLMSYAGVVSSEYSSGNHIHRGGITKTGNAHLRRVIVEAAWAYQHKPWIGGWLAKRQHGLDEETKAIAWKAQWRLCTRYKKLAARGKNKPQIVTAIGRELLGFIWAIAVRPEARIARRAA

SEQ ID NO: 233688 - protein, 349 aa, unidentified
MNRTTYGLDIAKNVMQLHWVDNETGEIGRKKLGRAKLSDFFARLQPARVVMEACGSAHHWARVLVALGHQVELLPARQVRPFVRSNKDDAADARAIWLAAQQSDIRRVPQKSVEQQAALALHRTRQHWVSVRTATINALRGALYEFGVTLPGGKRVGLKALATHRAEIDAKVPATIQRLIDGQLATLKDIGCRIDKLEAEIGMQLEQLDNAATLREVPGIGLLGATAFAATLGDGKAWKSGREFSASLGLVPAHRGTGGKARVGHLSKRGDPYLRTLLIHGARSVIAHAKNKPKWLEQLLARRPMNVAVVALANKMARTAWALVAHGRDYEREWKSTPPKGCTAQASAA

SEQ ID NO: 233689 - protein, 410 aa, unidentified
MKRDKHIYIGLDLHKFQHTAVIVDCWFEKLGEMTFQNKPSIFPSLLEYVNRFLTEGLTPVFGLEDVGGYGRDLALFIIEQGYIVKFVNSSLSNSERNSYAMTQKNDSWDAQCVADVLIRKLPYLPDATPSDIHWIIAQLVGRRNALVKAQTALKNQLHMQLNYFYPSYKEFFSEVDGKTALAFWESYPSPSHLEGETVEDLRTFLLEASNNTCSTRKAEQIMSLVLADGEVKREYQTSRDFIIQSIVRDIRFKKQEIKKVDKELKVTIQTLGMQLETMPGIDTVTSSALIAEIGDIHRFANSDKLARYAGIAPIKMGSGGKETMKKTKQGNRKLYDIFYNLSVQQVQVSKGSKIPRNPVFYAYYNRKLSEGKSKSQALLCIMRRLVRIIYGMMKNKMAYIMPDQPETKAS

SEQ ID NO: 233690 - protein, 401 aa, unidentified
MKEFNAEAVRIETASALEAVRPAQAGRKYPAYIGLDVHKETIAVAVARVGRAAPESRGEIANKPKTVANLVERLNQEFDGEVLLFCYEAGPCGYGLYRQLLALGHDCQVVAPSLIPKKPGERIKTDRRDACKLARTLRNGDLTAVWVPDEEQEAMRDLTRARDDMKGQERKARQQLNAYVLRHGHAWPSNKTRWTQTHYNWLESLKFAHDWQQVVLQEYIDAVKAASQRVADITAQMERVLPQWSLAPVVDSLVALRGIDKLAAMVLLAELGDISRFDSPKQLMAYLGLVPSEHSSGGRRRQGAITKTGNSHARRMLVESAWSYRFPARQTAHLKRKAANASDEAKVIAWRAQKRLCGRYRTLLQAGKNTKQTTVAIARELTGFIWDIVCHEMPKVQQTTR

SEQ ID NO: 233691 - protein, 410 aa, unidentified
MQVEVLFDRVAGLDVGKASLTVCVRTPGPRGRRSETRTFKTTVGSLRVMRDWLVASGVTIAAMESTSTYWKAPFYCLDEGMEVWLLNAAHMKAVPGRKTDVKDAEWIAQLLEHGLLSPSFVPAPEIRHLRMLTRYRVQLMGDRTRDVTRLEQMLEDASIKLSAVASSLSTVSARAMLGAMVAGQRDPTVLAEMAKGKMRGKIPDLREALDGHFTDAHARLVAQMLHRLDRVEQALVELDELIAEACRPWAHQLELLQTIPGVGPKVAQVILAETGGDMSRFPTAAHLAAWAGLAPGVHESAGRWTPVGVRHGNKWLTAMLVEAAGSVGRSKDNYLSAQHARLMARRGRSRAQVAVAHSILVSAYYMLSRDEPYRDLGPDWLRRRDDEAHARRLVSQLERLGHTVVLDPAA

SEQ ID NO: 233692 - protein, 390 aa, unidentified
MHVVAHQPEAPGAIRSDLGAIFVSLELSRSTWLITSLSPCAGEKMSKHGVTAGDIGALLARFSEFKQKAFARTGKSFPIIVIQEAGLDGFWIHRVLQSEGIESHVVDPASIATSRRRRRAKTDRIDGEALLRALLAYKRGEPRVCAMVKAPTPEEEDRRRLSRERKTLIGERVEHVNRIKGLLFCQGVSDYEPLRRNRHQRLDELKTGDGRALPDHLKAQISRELDRLELLLEQIKAVEAGQNTLFAAAKAEAPTPAPVTMLLDIKGIGPEFAAILWMEAFFRSFANRKQIAAYAGLAPTPWQSGAVNREQGVSKSGNPRLRTTLIQLAWLWLRHQPQSALALWFKERVTRNGGRFKKTTIVALARKLLVALWKYVTAGIVIEGAVMKAA

SEQ ID NO: 233693 - protein, 339 aa, unidentified
MWYSGIDQHKRDSVITTYGPDGPRVKQVRVANTPLALAQYFADFPSPHKAVVESTGGWYWLADVLAPLGVELVLAHATRLKAISAAKVKTDQVDSDVLALLLRADLIPEAHMIRPGQRGPRDLMRARLRLVEKCVSAQNSIDRLLEKFNVDTVAELEALYQLQAGCHQAQIHLLEEQITTLERALHPHLIPNPDVQRLLWIPGVGKVNAFTLYTEIDGITRFPSVRQFFSYSRLVPGADNSGGRTRHRSGSKAGNRYLKLAFSHAGIRAVQYYPEIRAFFKAKARRKPIRIARTLVALELARIVYQVLVKQEAFNGQFKNRPLSRGKHAQWPRRASPPA

SEQ ID NO: 233694 - protein, 434 aa, unidentified
MRIVYERCCGLDIHKASIAVCVVITRDGKIEEETRRFGTMTADLLELAAWLKARGIEHVAMESTGVYWKPVWNILEAEGFDLLLANAQEVKIVPGRKTDQKDSQWIADLHQHGLLRKSFVPPRQVRDLRDLTRTRATLAQEHSSTCNRIQKVLEDANIQLGTVASDVFGASGRAMLLAMMKGESDAEALAELSKGRLRSKIPELRRALEGRVTGHHRFLIDRHWRQMESLENQMRQFEEEIAERMKPTAEEIARMRESLPAEAPLPPSPREEAIRLWMELPGVGLTTACSMVAELGVNMEQFPSSAHVASWAALCPGNNESAGKRMSGKTRKGNVWLRRTMCEAAWAAAHSKKTYFAAQFGRIAARRGKKRALLAVAHSLLVAAYEMLKHKEHYREFGADFFEGLNKDQVKRRLVQRLAKLGFQVTVTQTPTAE

SEQ ID NO: 233695 - protein, 418 aa, unidentified
MTRRIAGIDIHKNVLMVVVATVLEKEIDGGMEQQIEYEGRRFGSGARERKHLVAWLRERQAEEVVMESTAQYWKPVWMDLELHFPKLHLAQAHSNKAPKGRKNDFADARRLTRRMAAGELILSFVPDAEQRTWRTMTRGKQQLVRDRVRLQNQTEALLEEMRIKLSGVVSDLFGVSGRRILEALAGGETNPEKLADLGDDRLKCGREALVDALTGHSEPMHLQILKLSMERLKLLDRQIEALEQMAAGALKKHGAAVTRLAGVPGFGVDSAQQVIAEVGSDAKSFSGAGELASWVGTIPGSDVSAEQNHSSRSPKGNKFLRRIFTQAAQAAVKTKGCHFQNVFRRLVPKLGYKGAIWAIAHRLCRLAWKILHDGVSYIEQAAETTPQAKKRRAQRLTQALRRLGFQVAIAPKAEVAQG

SEQ ID NO: 233696 - protein, 408 aa, unidentified
MQTLIERCAGIDVHQRTMVVTVRLPGVGRERVVITQTFGTMTADLLVLRDWLQAQAITHVAMESTGVYWRPLYYLLEDGFTVLLINMQHLSHVPGRKSDVRDSEWLAQLLECGLLRGSLVPPAAMRDLRDLTRYRKRQTEDRAQEVNRLHRVLQDAGLKLASVLTDVMGVSGRAMVDALLQGTTDPAVLAALARGRLRSKLPALQEALRGHFRPQHAFLVTQILAKIDFLEEAIATLTEEIDRQLRPFEATVTRLMTIPGVARRNAITVLVETAGDMRHFPSAAHLCSWAAMCPGQNESGGKRQTGKTRDGNRYLRGALIEAGLATTRARDTALQARYYRIKRHRGHKKAVVAVGHQILEIAYYVMRDGVTYEELGADYFDRRDRERSTRRHVKQLEALGYSVTLNAA

SEQ ID NO: 233697 - protein, 333 aa, unidentified
MTKPVQTLGIDVSKAKLNYCLLGAGGEIKQEGIVTNDHNGVEDLDRMVKEHEQPKSVRVVIESTGDYHLLATMAFSEMGYVVHLINPLITKQYLKANIRKCKTDKVDARLLARIGTMDGDTFPVYHASTEEVRMKKKVSLVHQLTKTKQQMKAALYQAQKTLAILGETSSSGMEVTANAVKELEKGIKELEKEIVEARRKDPMVKQLAEIPGISEQSAALVMTEIAGKTFDTKEKLTAFAGLDVSVRQSGSSLHGKGRLSKRGSPSLRRTLFLIAWGLKQHNEEFKKLYDYYRGKHKHYTAVLNILARKFLHVLFGMMKNQTPFNPDLIVLPS

SEQ ID NO: 233698 - protein, 370 aa, unidentified
MGNHITIVGLDAHKNSIDIATAETGGNKEVRHYGTIGGDMASLDKAIRKLKSKSAGLHFVYEAGPCGYEIYRHLTAQGFSCVVVAPSMTPKKSGDRIKNDRRDAANLARLERAGELTAIHVPREDDEAMRDLTRGREDAVKALRTARQRLGAFLLRYGYRYPGRTTWGPAHMRWLSDIAMPHPAQQITLQEYIHAVMECKDRVARLTEQIQKILPAWRMAPVVKALQALRGVAQIVAVTTVAEIGDMRRFAKPRQLMTYLGLVPSEHSSGDSIMRGGITKTGNGHVRRALVEAAHAYSFPARVSRVLLKRQDDLPQHIRDIAWKAQIRLCGRFRRLMARGKLKTKVVTAIARELAGFIWAIAREVQPQGI

SEQ ID NO: 233699 - protein, 393 aa, unidentified
MMDTSNGRLKSSNHETKTEASMKQNIVHIGLDVDDTQYHGSAFNKETGEVIDFKSRPTLKGLLQQLERMARHFKGRKIKLCYEASYIGYCLQRDLISNNIHCDIVSPSSIPSPRGKAIKTDRIDAGYLAQFYANDLLTIVTPPDEEQEQDRDMLRSRQKVMQQRNQLRKHLQSVLRRSGLHYKAETGNKSHWTKHHYCWLVRTIDGLSGSLKVNLELLMRQLKALNEVLTEYGQQIEVLARSPRYQPAVQSLACYKGIKNIFALTIITEIGDIKRFSHPRKLVSWIGMDIREYSSGGKHNHFGITKHGNRYLRTAIIEANQRGYRTARIGKDVKARRKDVAPELINIADRCLRRLNKKGNRLLLAGKHPNKVKVACAREMVGFVWESLNKAAA

SEQ ID NO: 233700 - protein, 368 aa, unidentified
MSASIIAYERSTLVDREKYIGLDVHQATISVAVMDETGRVVMECILETKAATILEFFAGLRGTVSVTFEEGTCAAWLYDLLKPHVASLLVCNPRKNALLKVGNKSDRIDARKLAELLRGNQLRAVYHGETGVRMLRELCRSYLTIVKDLSRVMNRLKALYRSWAIPCAGRDVYYSRHRAEWLEKIREAGVRRRAEHLYQQLDMLQHMRQPARRELLAESRKHPVTAQLRQIPYLGPIRSALAVALIQTPHRFRSKRQLWAYSGLALETRISAEYEYDRGQLRRSKKMVSIRGLNKDHNHDLKGLFKGTATMASVRPGPFRDFYERALAKGMKPTMARLTLARKIAAITLTIWKKGEPFNADKLKLQAA

SEQ ID NO: 233701 - protein, 368 aa, unidentified
MTTNTLKAAPAASAKELKNEQPAKAKRMLVGVDTHLRGYQAARKIDSGVIGVVENFRSEEELELYVAKQTTLAEQVVVVYEAGPLGYTLYRKLSARGVLCYVCAPDSSEQRKKRRKNNKIDARSLTSKLFNYLNGDQNALQLARVPTEAQEQLRMTSRQHDQLVEERKRLGATGNAMLLSQGFGSWSNWWRPKAWADLSSKLPPWLLERLKVWVDVLKVLDEKISQAKAAFARSCNGPRPKGVGALSQMQLQSEVLDWSLYSNRRKIACLAGMVPSEWSTGDKEWRGSITKVGVPALRRIIVEMVWRIIFFQPQYKPVQKWLEVLRGPNPAMKKKAVIAIGRQLMVDLWRLQTGRVTAQELNLIMVTD

SEQ ID NO: 233702 - protein, 341 aa, unidentified
MSIVGGLDIHRSQITFDYLDTATGEARCGQVRPADREHLHEWLARFTGQDGDFAMEGCTGWRYVAEEVAAAGLRPHVADPAELAALRGRKRHAKTDRADARFAREQLQAGRLPECWVPPPHILEYRALLQAYHDLRADHTAWVQRIQAVLFHQGAPPPGNLATAGGAARLAELAAGLSPAGQVQVANALAVTAVLDQRLDQLRRQVADAARHLAGARALQQRIYGVGPATALALACWLGGAGRFSSSRKAVRFAGLDITVYSSAGKRAPGHLSRQGPAVLRWCAYEAGKVHARPAAPDHAYYDQARDRTDGKRAALSEARKIIRQAVHILAELGDAALAPC

SEQ ID NO: 233703 - protein, 369 aa, unidentified
MPHVTSIGLDVHARSVAAAAFNPFTGEVVHRDFGTDAAEIAEWALGFEEPRACYESGPTGFHMARELRALGLDCAVAAVSKMQRPAADARRKNDRRDAEFIARMLATHNIVEVPLPDMAVEAARDLDRALDDATAEYRRARQRLNMFLIRLGHVWDERNADGARKKAWTRAHWRWVSEIRLEGPQRDALEYYVTAARCAESDRRQLERRVVALAGTDRWRATVEALSCIKGVDTLTAFRLAAEAGSFSRFRSAPAFASWCGLIPSEHSSGESERRGGITKAGNALARTALIESAWHYSTCSPRPKAPAPGTDVPPVIRSRADDCTARLHRRREALAAAGKSACKANAAVARELACWVWEIGCRSEGTVL

SEQ ID NO: 233704 - protein, 375 aa, unidentified
MKEKLRFLGLDVHAETIAVAIAEPDGEVRSLGTIPNRLESIRKLIKKLGPTEKLRACYEAGPTGYVVYWQLAELGVKCDVVAPTLVPVKAGDRVKTDRRDAEKLARSHRSGDLTAVWVPDEGSEALRDLVRTREAAKQDQLRARHRLSKFLLRSGQRPPTGIRPWTRPYLIWIAQLRFTQMAQEATRLDYLHEVEHMRERVERLERAITEAVKLASPALQQVVNDLQALRGIADISAVTIAAELGQVSRFDSARQLMGYCGAVPSEDSSGKRTRRGSITKTGNAHLRRIVVEAAWSYHRPPCIWYGLRKRQESISEEVKEIAWKAQHRLHKRYMRLAAAGKDKRKITTAVARELLGFIWAIGTRAETTVRQRIAA

SEQ ID NO: 233705 - protein, 371 aa, unidentified
MSNVAKYIGLDVHKATIAVAVAEGGPGGEVRFVGTVANDDDEVRKLVKRLATPGATLSFCYEAGPCGYGLQRLLIKLGQPCIVIAPSMMPRRPGDHVKTDRRDAMTLARLLRAGELTAIWVPDEAHEAVRDLIRARRSAQEDATAAKQTVRSFLLRHDRRFEGRSAWTKMYWRWLSEQRFDYPHQQLAFEELQKRVLEAQARVVRLESALGEAVASWHFAPLVRGLQALRGIKLVSAATLVAEVGDLTRFDNPKQLMAYVGLVPSEHSSGARTHRGRITRAGNAQARTTLVEAGWSYRLPAREERRYRERVADLPEEVQAIGWKAQMRLCQRFRRLSATGKPQPKVTTAIARELVGYAWDIARRMAPAMAN

SEQ ID NO: 233706 - protein, 429 aa, unidentified
MESMKRAGKSRQARPEVGCGVVVGIDVSKRWIDYGAFRWGEKAKITRVTQNAAGFGELGRELEALRAQGAEVWVALEPTGPYGRCLLEWLAPSGWRVVQVNPYHVKRTREVRDNNPGCSDRKACRVIADLVWSGCYQSVIRLEGSLAELRVLSGEWESLSKKHTGVNNEFQARLTVWFPELGDIFRDALCKSIRGIVRDYASPRQVAQVGLARVRKTLSRATKGRMVSKAGVIQEAARQSVGLRTAAGECREGMLTLLELAETIERRQAQVRAEFETRLAKLPEAQALLSLPDFGVVGAAGLLGDCGALGSFSNYHQVEKHLGLNLCRCSSGLRQGRYRISKRGRSRARHLLCYLASKQCKAGGLYYEFAAGLKAKGKSAKEIRVAVARKLLRLLFALARDRAIFDPQRFAADRTEHGQPIQQEMPLAA

SEQ ID NO: 233707 - protein, 344 aa, unidentified
MSEITTIGVDLAKQVFQVHGVDAEGAVVLRKQVRRGQVLALFSRLPRCVVGMEACATSHYWARELAALGHEVRLMPAQYVKAYVKRNKNDAADAEAICEAAVRPTMRFVPIKTAEQQAAVLLHRCRERLVRQRTMLVNALRGHLAEFGIIAPQGLRNVGQLIAIVRDENDARLPDLGRQVLQVIATQLEQLGAAVAALEKQLMDWHKASPVSQRLASIPGIGPIIATAIAATVVEPSGFRSGREFAAWLGLVPRQNSTGGKTRLGGISKRGNRYLRRLLINGASANLLRSKATNADPWVIGMRRRRPSLVVAVALANKTARIAWAVMQRQENYRQNYQRVTAAA

SEQ ID NO: 233708 - protein, 319 aa, unidentified
MFTLGIDVSKNTLDAALFDGRKFKTRKFHNTHAGIALMRDWLVSAGAQGCAVGMEATGSYSEAVACALHDADHRVSVINPAQVAAFVQAELGRGKTDALDAKRIARFTALHQPPRWQPPPQNVRILQALVRRLDSLKDLHQQERNRLDTAHPSVQPSIQTVIDTLVAQMRALERTIHDHIDQDPDLRRNCDLLESIPGISERTSAVLLSHLHVIERCRTSKQWVAYVGLDCAIGQSGTSLHRTGHISKRGSAALRAAMFMPAIVAARHNPLLSPFAQRLRAAGKPGLVMVCAVMRKLMSIVFGVIKHQTPFAPEGIARG

SEQ ID NO: 233709 - protein, 345 aa, unidentified
MEVLIGVDPHKVTNALAAIDECGQLLEYAVFATNRAGLRSLVRWAKRFPSRRWAIEGAGGLGRSVALHLVAAGEKVVDVPAKLSSRARLLATGNARKNDRVDAIHVALAALRGERLAEVGEEEQAEVLRMLSERREDLVKERTRALNRLHGLLRDLLPGGAGKNLSAEKAARALRTVRPRSTPARTRRWLAADLVRDVRRLDRQLSELEGRIREALEEASTGLTRLFGVGPILAAKIIGQVGAIARFPGKAHFASYTGTAPIEASSGDVVRHRLSRAGNRQLNHALHMIAICQVCHDTQGRTYYRRKLAEAKSEKEALRCLKRRISDAVYKQLRSDLEDRITVAA

SEQ ID NO: 233710 - protein, 346 aa, unidentified
MEHYAGIDVSLELSSVCVVDAQGKIVKEAKVASDPEALVAFFEALGFAVRLIGLEAGPLSQWLHAGLKQAGFETVLLETRHVKAALSAMTVKTDRKDARGIAQLLRMGWFRAVHAKSMESQEIRALLVARKQLLGRLIDVELSIRGILRGFGLKVGPVTRKGFELRIRELVTGQATLERIAEAMLLARAALKVEYEKLHKAVLAIVREDAVCRRLMTVPSVGPLVAITYKSAMDDPNRIAKSKAAGALFGLTPRKYQSGEKDVTGGITRTGDEMVRTALYEAANVLLSRITRFSKLKRWGMDVAKRRGSKRAKVALARKIAVILHRMWVDGTTYRWAAAEPMAAQT

SEQ ID NO: 233711 - protein, 345 aa, unidentified
MPIVGGLDIHRKQITFGYVDTGTGQVQRGQVSPADREHLRAWLARFSGTEDVAFAIEGCTGWRYVAEELAAAGVTVHLAEPADTAFARGRKRHAKTDKTDCRHLRQLLAEGRLPECWIPPSRILECRALLELYHDLRAGHTAWVQRIHAVLFHQGAPALGGGTLRTGPGLAALRDVSAAHLSPAGQLQVATALEVLEALEVRLHAVRHQLLQEARHLAGAKVLAARLYGVGPFAALAMTCWLGGAGRFSSSRKAVRFAGLDVTVHSSDRKGPPGRLSRQGPPVLRWALYEAGKTHARSSAPDYRYYAQVKDRCNGKRAALSEARKILRQACHILAELGDDALAAT

SEQ ID NO: 233712 - protein, 359 aa, unidentified
MKPYVLKTKYACGVDLHSRQMYVCIMDKDGNIFKHTNIKGNNLDFFLKLIEPYKSDLTVAVESTFNWYFLKDFCDLHNIEFVIGHALYMKHIHGGKAKNDRIDSRKIADLLRGNYLPPSYCYPAHLRSARDLMRRRNHMVRERAALLSHISIVGHQFNMDIKDTHKRKEVRKELLKMFKFDKNTHSNIKADLEAIEAFDKIIKRLDLEIRQHALTEARHSFQILKTIQGSGDTISLSILYEIDDINRFKTVKDFTSYARLVKCKSESAGKSYGYSGTKIGNPHLKWAFGELALYSAIHCPEIKIFFNKYLLNKYSKSKAYSVLAHKLGRAVYFMLKKGTAFDPYKFCLEFAQEYRRNPV

SEQ ID NO: 233713 - protein, 344 aa, unidentified
MKSTTIAVDLAKSVFEIGISHHPGHVSETHRLSREQIGVFMANQPATIVVMEACSSAHYWGRTFQGYGHQVKLVPPLYVRPYVQRSKTDRADVKGMLEAWRNSAIRCVPVKTESQQQLTSLHRVRSGWMEARTKRINMARGLLREFGFIFPLGASSLPERVRELIKDADTNLPMALREVLKQLVLEIGELETRVKAVEKQLEALAIQTPVVEKLRSIPGIGLLTSTALVGFVGDITRFPSGRHFAGFLGLTPREYSSGTHRRLGRISKQGDAYLRTLLIHGARTVLIRAKTSPQPDRFRTWALELQKRSGHNKAAVAVANKLARVVWAVWKSGKPFESRSQPLT

SEQ ID NO: 233714 - protein, 379 aa, unidentified
MKKHCNSAMESEVRAKRVKSRGPVRRETRDVMAELVGKLSKKMDAKALSARLGEEYRRNAVCPNLDRLTVGMDLGDQWSHYCILGLRGETLAEGQMRTRQQEMAEFYGGLAESRVVIEVGTHSAWVREAIAECGHEVLVANPRLMEGSKRRQRKNDRIDANKLARLGRVDPQSLHPIEHRSKEVRQDLLVLRARDALAAARTELINTTRGLVKSMGARLPKCSSPSFAAKVEEAVPSEVREALLPLVRLAAALSDNIQAYDQQIEKLASKKYGHTKLLRQVKGVGPITALAYVLTLEHPERFAKSRDVGPYLGVVPKQEDSGDSQPQLGISKAGDTMLRKLLVGSAHYILGPFGPDTDLRRYGQRLCERGGKTRRNGPR

SEQ ID NO: 233715 - protein, 347 aa, unidentified
MNTITIGLDIAKSVFQVHGEEAGKIVLQKRLRRAQVVSFFAELPRSLVGIEACGSSHYWARLLRELGHDVRLVPAAYVKPFVKRNKTDARDAAAICAALGRPDMRFVAIKSVEQQAARGLERSRDLLVKQHTQLMNSVRGHLAELGIIAPQGRRGFIELAQLVSAGDCRIPAPLLAALRLLIGHIEQLGKARAALEQQIVATARAHPVMRRLATIPGVGPLTAHAIVTAVGDGKQFASARDFAAWCGLTRRVDQSADKRRERGISRQGEMRLRKLLALGASTIMRHLRSCPARATAWQQGILARRPIKVAVLAQAAKNARIAWAMMHSGQVYRMPAITTATATSPAG

SEQ ID NO: 233716 - protein, 346 aa, unidentified
MKILALDLGKYKTVGCAYESESGAHQFKRGLTTAAGLAGMVQAVKPDRVVIEICSIAGWVCDLMWGLGIEVQVANTSDDAWRWRKVKQKDDRRDALKAARLSAVNQLREVYIPAPEVRQWRALITYRQQLIRRRTKIKNHIRDLLLREGQLLGRGSSCWSQLGIAALAAQARPFSECGPAELWRGELQLELEQLKEIQRQVATVTAQLDKLGAGDARVQLLRTVPGVGARLAEAIVALLDQPQRFRKASQVSGYIGMVPKAMDSGETERRGHITRQGSRLVRSLLVEVAWAGLRHNAWVRQTYQRLSGGKKARKKIAIVAVGRKLLVKCWAMLRDNRPWDWQPQIT

SEQ ID NO: 233717 - protein, 362 aa, unidentified
MLHVGVDLHKQTSQIAVLSEDGELTQHRFANDIQRLEQFFTQLPPATPVAIEASGTWWWLVDLLERLGHHAILSHPKQTKAIAAARLKNDRVDAHRLVLLLRGDLLPQVWIPPAPLREARELLRHRMQLVWLRGEIRNRLVALLDRRNLHPTTAKSWFTKRGQRELQQLPLAETPSRVREDCAALLPLLDAQIRRLDAELVAHWGRDARVQRLTTIPGIGPFIAILLVLELGDIQRFANAKRVGSYIGLTPRIRASADRVRTGHISKEGNRLLRWALVLAATQAVRRPGPLRAWYHAVKKRRGRSVARVALARRLAEIVYHVWKHECDYFTVLRRGDRAGVSSPGDMGLSTAALIGQPASRG

SEQ ID NO: 233718 - protein, 354 aa, unidentified
MEQADSQAEVILGVDTHLDVHVGVVIDAVGRLKGTLSIETNPSGYAKLLVWAQSFGRLNRAGIEGTSSYGAGLTRFLEMSGVAIVEINRPNRSRRRHRGKSDPTDAESAARSVLAGDATGTPKSQGGIAEALRTLSVARRSAVKAKTQAVNQLRALLVSAPSVVRDTLLKAKPEHCVAACAALPENDEKNLVLASLKTTLRLLAKRWKALHEELRELDKQLTRLTKLAAPRLLGRFGVGPQTAATLLVTAGDNPTRLRNEAALAALCGVSPLEASSGKTNRHRLNRGGQRQANNALWTIAMVRMRSDARTREYVVRRTGEGLSKKEIHRCLKRYIVRELYPLILADLADSSRSA

SEQ ID NO: 233719 - protein, 393 aa, unidentified
MKQRKNAESEPVRIKKFARFIAISGLSACLNPDPDSRLTSIVKVVGLSSNPFFLKSVKDKRMENFYFIGVDVSKKKLDFCVMFEGKVVHEEETSNHQGAIMSLLHHLEEDYGIASGQMLVCAEHTGQYTFPLACACKAVECKLWLENAAEIKYSSGVQRGKNDRVDAKRIAIYASRFQDKVQYYERPTEDIERLKQLESERTLYVTDLAKYKGQMKDQKEYMPKSLYERKMKRLQALMDDLEEAIQSITDEMDEVIASCPVLFRQRELLMSIDGVGRVVATNMIIATEAFTRFGDPRKFNCYAGVAPFSYSSGSSQHSKARVSHRADKVMKRLLHLAAVAVTHRIGGELKKYYERKVAEGKNKMSVINALRAKIVARMFAVIKRNERYKPILS

SEQ ID NO: 233720 - protein, 337 aa, unidentified
MKRYLGVDLHRTQFVVCTRWENGEQEIRQWRIGELPKFVEQLRNEDQIAVEAMGTTARFYDAVAGRVERVVVVNPHQFKVISESVKKTDRKDAAALALYLEKDLLPEVRMKPKQNRELMHLAETRDLLVKQRSALKGKINNLLAMQGIELKREALSSKIALERVLASPVSGMVQLELRVLVEQVRALSESIGELEERLKEEGQQLPGYENLTSIKGIGSLSATVLLTVIGKISDFGDENKLAAYLGLVPKIANSNESERSGRITKQGNKLARTALVQCGLVAKRYSPYLNRFYERIKQRRGGGKAKIALARKLVKIVYDTLKNQWVFEDFPSFTLAA

SEQ ID NO: 233721 - protein, 339 aa, unidentified
MDATTYGLDLAKRLMQVHWVEAETGEICRRQLKRGQLLEFFAQRAPAVIAMEACGSAHYWGRKLQALGHQVRLIAAQFVRPFVKSNKTDAADAQAIWEAAQRPGMRFVALKSESQQSVLMLHRMRQQLVKIRSMQVNQLRGLLYEFGAELPSGRCAGLQRIPGELARLEAVLPPMVIDTVREQLARLRALDEDIARIERRLAACNKNDSASRRLMDIPGVGLLTATAAVATIGDARAFRSGREFAAFVGLVPRQCGTGGRVKLLGISKRGDVYLRTLLIHGARAVIAHGKQREPWLERLLARRPVNVAVVALANKMARTIWALLAHERTYRKDYAAAAA

SEQ ID NO: 233722 - protein, 345 aa, unidentified
MYIASIGIDLGKTTFHLVALGERNKTLLRKKFSRSQLLAYTANLPASLVGLEACAGAHFLGTALREQGHQVRLIPAQFVKPYRKSNKNDFLDAEAIAEAVTKQNMRFAQLKTQEQLDWQAMHRVRDRLVRRRTALINEIRGFLLERGITFAAQPIHLRKNLPTVIEDAEQNLSPRLRWLLDRMWQEWKQTETEIQAITEEIERISNEDARCRQLRQIPGFGPLVSTATVAAIGNGSAFRRGRDFAAWVGVVPRQYSTGGKRKLYGISKRGNVYLRRMLIHGARAVLFRVKYDTAGFGQWVQRLAKRAPHNKVVVAIANKLARIAWAVLSSGQDYRHQPLQPRAAA

SEQ ID NO: 233723 - protein, 377 aa, unidentified
MHSENIAAYIGLDVHKETLAVAIAAPERLGEVRYYGTINNEAQAVRRLFQKLQGLYGNILSCYEAGPCGFGLYHQLTAMNIKCQVIAPSRIPKSPTDRIKNDHRDAISLARLLRAGELTPVWIPDLTHEAMRDLIRARAAAKRDSRVARQRILSMLLRTDKRYAGKHWTGKHRTWLANQSFSQPSQQIAFQHYCQSLEQIEDRILQLDQEISRLLPEWSLCNLVCQLQALKGVGQLIAITLVAELGDFSRFSNPKQLMAFLGLVPGEYSSGNSIRPRGITKVGNSELRRLLYEAAWSYRTPAKVGAWLIYYRPDSVTQYSKDIAWKAQQRLCSRYRTLTAKGKKSQVAITAVARELTGFMWDIALAAQSSFSQQKQN

SEQ ID NO: 233724 - protein, 468 aa, unidentified
MSEVRLGIDVACRADHRASLADERGEFIWSSWKFRTTTTDLERLWAKIPDGASVTVILEPTRNAWVPLSAWLQARGATVILVPPEQSADLRDYYNKHTKTDRLDSKVLARLPLLHPEGLRGIDNLGPAESLRRAVRHRFSLVKRRSAASLRLDALVELLGPGWADSLGSATASKTALVVLEKYADPRALKRLGRTRLATLLIRSSAGLWREDKADELLAMANETLELWSCGGIDFTELAHDIASEVRVLRLLDDEIAAADKRIAVLYDEADPLGIVRSAPGLGPVLSAAILGNAGDFNRFSNLAGVRSFTGFVPKIDQSGLVAGHKGITKAGDAGLRQALYMAADHARHIDPTLAQRYYRLVMVEGKHHNSALCSVSAVLITRIAACWRKGELYELRDEDGEAITEAEGKAACTDRFKIDPKVRAARRRNTPAKVFKNRVAGRGKKESARRVAPATDPPGKEASENVA

SEQ ID NO: 233725 - protein, 401 aa, unidentified
MKKFNAEEVRSETASALETVRQTQAGKKYPAYIGLDVHKETIAIAVARAGRDAPESWGEVANRPKSVAKLVERLNQEFNGEVLLVCYEAGPCGYVLYRQLLELGHDCQVVAPSLIPKKPGERIKTDRRDARKLAQALRSGDLTAVWVPDEEQEAMRDLTRARDDLKGQERKARQQLNAYVLRHGHAWPSNKTRWTQTHYNWLESLKFPHDWQQVVLQEYIDAVRAGSQRVADITAQMERVLPQWSLAPVVDSLVALRGIDKLAAMVLLAELGDISRFESPKQLMAFLGLVPSEHSSGGRRRQGAITKTGNRHARRMLVESAWSYRFQARQTMHLKRKAKNASTEAKAIAWKAQKRLCGRYRSLTHAGKNTKLVCVAIARELAGFIWDIACHEMPKVQQVAR

SEQ ID NO: 233726 - protein, 334 aa, unidentified
MALELLAIDLGKRSFHLYGIDSAGVILSRKVSRSKLAEAVGELAPKVIAMEACASAHYWARCWLAAGRQVRLINPRFVKPFVKGSKNDAADAEAIFEAAMRPTMRFVPVKSPDQQDLQSLHRARDRLICQWTALINHTRGLLAEYGIVLPQGPWRFTSQAPAAIADADMSELARAIFGELLDQLSDLDRRIKKLDARMVSLCRTTPTCRRLAKLPGVGPVIATAIVAAVNDGRQFRSGREMAAWIGLVPRQYTTGGKPRLGGIGRRANHYLRRQMIHGARAVVSRLPKDADRQAAWLQALMVRRGFNRTIVALANKTARIAWALLTRQEAYAAP

SEQ ID NO: 233727 - protein, 427 aa, unidentified
MRFIGLDVHRDFCEVAISEGGKARRAGRVASRPAELELFARSLGSDDRVVLEATGNALAIARIIEPHVGEVVLAHARKVRAIAEAKVKTDAIDACTLAELLAADLVPRVWLGDERTRLLRRLVSRRRQLVKQSTRTKNEISAVLLRTLQGRPPVSDVFGKGGRAWLAELELGLDERETVDAGLRQLDFLQAELAHVDRAIAERALASPEIRRLMTIPGVDVTTAATLMAAIGDVSRFPSPRHLAGYLGLDPKLRQSGVAKPRHGRISKEGSAAARHALVEAAWSSAKAPGPLRAFAERTAARRGRHIAAVAVARKLAVLAWHLLSRGEDYAYQRPSVVRRKLRRLELKTGAPRAKRQAGAAPLWGSRAQDDLERELARQAELAYSRLVADWKRARPKDGAGATPGRASSRPSERQAARQETAPPPAL

SEQ ID NO: 233728 - protein, 354 aa, unidentified
MKFYTSTTQYHCGIDLHSRQMYVCVMDSQGNKLLHMNIKDNDFEFFLRKIAPWRHDMTVCCECLFCWYWLADACEEAGLSFVLAHALYLKAIHGGKNKNDRIDSEKLARLLRGNLIPPAYAYPAAKRPMRDLLRQRTSYVWQRVELLQRISTRQMAGGEVPVSKFSNNREKWLEALLENTRDSCKRFAISQDVRLVVEYDKAIKELEKELIKLTKRKFSRELALLRSVPGVGKTLGLTILLEVDTIERFPSAQDFLSYCRLVKGTVASAGKVKGLRGAKLGNPYLRWAFGEAAVLGKRHHEDLDAYSRHLEKKHGKFKGNSILASKLARATYYMLKNGTTFNLALLTGTSTRSS

SEQ ID NO: 233729 - protein, 503 aa, unidentified
MNRGQLFGLMRTSKKRSIYKSQNARIQAIFEKAQDPRKVLCVAIDYAKAKHVALICDGNGDILKNPFTVLNSTEGVAFLLEEIAATARHRKIPKTQIILGGEDIPSYVDNFILALKKSGIFVARVNAAEAKLNRENSLASTDQLDLLGIAKTLLSRRARSAGDPLDEDENHYLRIRDLSRTRRHLVKQKTACGNRIHTLSDRLFPGYLSTSSGVLSPFSPPCLDLMKERFSAPQIASRKPESLAKFLRKYSVHHPDEKAAKLITLARNALPPEADRVFALQQSLAASVELYLCLDRNAKHLKLEAATALLQTPYAMLTSIGGVGLTLAAGLAGELGDPKRLGGIDSLCGYAGIVPRSNQTGGPDKPARQGGTSPKCNRVLKDWLVQASQKVALYGPDEWKQRHTRWQVGGQHAAFAGAKRLLRLTRTMTRQQIPWISAAARAQNATRETRARDAEVTFGILVHKWRTLPDWQELVFAPDRPLGFWRKLSMETHGAQLPLRGDE

SEQ ID NO: 233730 - protein, 422 aa, unidentified
MRLIYPICCGLDVHKNVIVATIVTTNGSGISEYNQKSFSTINSDIQKFHDWLMENNCKHVCMESTGKYWIPIFNYLEQDMDICLTHPKYVKSIKGKKTDKKDSKWIADLYKFDLVRCSFIPPKDFRGLRELARYRFKLVCMKSSEKNRIQNCMTISNIGIASILSDPFCKTATEIMTYLLSNTSETIDDKAVRKLIKKKANAKSDEIIEAIKGYNIETDQAKKLELARAHVDYLDDMITQTEVELYVRIKPYYEYVELISALPGITELSATIVLAEIGVRMDIFDNAKHLCSWCGLSPANNESAGKKKSVRIAKAGAYLKPLMVQCALAAIKSKKQPYFAIKYGRIRKRRGHKKAIIAIARMMMVCIYHMVSEKQPFNPTDYEELMDPHYNQPKVTLNDANVFEYLKSQGYDTSLLVKCNDN

SEQ ID NO: 233731 - protein, 364 aa, unidentified
MNKCRLNTELSSHEGTRCQFNGSTGVIKLGIDVHQDFYVVVMQQGGSNPKPPQRFAKEAFLYWAAKLRHQTEQVHAVYEACGFGFGLQRQLAELGIKCYVVCPQKLDERNRRVKTDGLDAKALCLKLDRFVQGNRDALALVRVPSEEEEQLRAIHRQREQLVKARKRLEAQGRSLLVNHGIEPVKNWWKPRTFAALQVPQWMKALLGNSQPILLALQEKIRVLTVQLQAGARANQPRGLGAMTSVVIDREIGNWHRFNNRRQVGSYTGLCPGEYSSGNTRVQSCVTKHGNPRLRAALVELAWRLVRFQPNYKPVLKWRETLRKGALATGAARKKAIVAVARQLAVDLWRIRTGQLSAESLGLSN

SEQ ID NO: 233732 - protein, 345 aa, unidentified
MNKSSKNIGVDLAKTVFQLALADRHFHVHQNKRLNRTQFHAFFVNLEPANIVMETCGTAHYWARTLSAMGHSVTLLPAQYVKPYVRRNKTDRNDAIALVEAARNHEIKSVPVKSEYQQSIQSLHRLREQWKHTRVARINALRGVLREFGVLVPMGPHAAIKTTQAALDSLPALLQPSIHEVLTELTDITQRISNLEKQLKQVVKKDVVIQGFMQINGIGLLTATAMRASVQSPTQFKNGRQLSAWLGITPREYSSGDHRYLGRISKCGDKYLRTLVIHGARSVMARIKVLQRSQQKLTRLQQWAAQLEQRVGHNKATVALANKMVRILWATWMHQRSFDGNYSAQ

SEQ ID NO: 233733 - protein, 354 aa, unidentified
MEKITTVGLDLAEQVMVAHGVGADGRMVLRKALRRDQLLGWSAGLSPCVIAMEACGGAHHWERELTRQGHTVRIIAAEFVKLFRKNGKNDANDAAAICTAVRQTNLRFVAIKSVEQQAALCVHRLRQGLVEERTALINRLRGLLTEFGVLAPLSPEKLRWELAHCQDPEDLRLPAAVRQLVGEQVSALDQVDLRLATYAEQIAAQAKQGDVAKRLQSIAGVGPTTAAAMVATVGTPQEFRNGRQFAAWLGLTPKQHSTGGKTRLGRITKRGDAYLRTLLILGAKSALQAAPRKPPAIRHRLRQWVVAVFGRIGYHKTLVAIANKHARIIWALLVKGEEFDVQRLAPEEVVAVAA

SEQ ID NO: 233734 - protein, 345 aa, unidentified
MNILKQTIGIDVSYKSFDARFGTINTQQQISLSSSKSFNNSPAGFKLFLRWIKSLILSSDIPLFFVMEATGVYYEHLAHFLLEHGYHVAVILPNKIRNYAKSLESKSKTDPLDAAVITSFGLERRLSLWTPPSETLKALRDLCREYQCLKANCTQIKNQLHALNVSFKPHRESFKRKTLLLKFLERQIVLIKKELRALVKTDSTLELRFKQIKTAKGLGDITILTVLAETRCFELVTNQKQLASYAGYDIVFNDSGLKKGRTSISKKGNTFIRKALFMPALSACRANPKMKELYLRLVSKGKNKKLAIIAVARKLLLLIYTLWKTNSPFIPDYKPLQSVPEGFSS

SEQ ID NO: 233735 - protein, 375 aa, unidentified
MQPKGDESEGMINVGIDVHKRRCQACLKDEKGRLIGEVSFARDHDGITSFHRLLQNHGEARIVLESTGNLWVPIYDTLTDDPANRVILANPRKTRIIAEAKIKNDRMDARVLADLVRADLVAESYVPSKEIREQRALLRQRRSFVEDTVAIKNRIHSLLDRHNLQPQYSDLFGKHGREWLCSIELPSTEKTILDVELKQLESLEAGIRTLTEKIAVEAAEEPRVRLLMGFTGIDYYSAMLLLAEIGDIKRFSSPKKLVAYAGLAPGMRSAGKTVRGHITKEGNKYLRWILIEAAQHASRFDPKLQGFYQRVSVRRGRQRAIVGVARKLLVSIYHVLNRNETYHGQRTELLERKIRNLQRIVDSSLQEGRDNQTDD

SEQ ID NO: 233736 - protein, 344 aa, unidentified
MITIGIDPHKASHTAVALDGGGRVQGELRCLANQATLERLLRWAERWPERIWAVEGAAGLGHLLAQQLVAREETVLDVPATLAARARLLAPGHGRKTDGIDAASVATVAQNQPDLRRVGPEDHSAVLRLLSDRRDELSGERRRAVNRLHRLLRDLRPGGAPTELSAARASELLGHIRPGAVVDLERKVMARALVADLRRIDRALTENRSRCAAAVATSGTSLTAVFGISDVLAAKILGHVGDITRFGSADRFASYSGTAPIEVSSGEVTRHRLSRSGNRSLNNALHLAARVQTMHPGPGRDHYERKLAEHKSSREALRSLKRQLAKVVYRHLVADQVRRLDLAS

SEQ ID NO: 233737 - protein, 351 aa, unidentified
MITGSVDAVIGVDTHRDTHTAALTDRVGRQLDMLVVPADAAGYQQLLAWAAQAAPGPRLLWAIEGTRSHGAGLGRALGAVDARVSEVDRPTRRARRAGKSDPIDALLAARSALAADEVRQPRIDGAREAARLLLVERDRLVRHRTAVLNQMRDLVLTAPDELRQRLRDRSIAALTAACAALRDSNRDDVETMVRKQSLRRLARRARALTIDANTIERDLKQLTSEHVPQLIAEPGVGAIVAAQLWASWSHPGRIRSESAFAAIAGASPLQASSGQRDRHRLNRGGDRHLNRALHQIMLTRLAHHPATRAYIDRRVTEGKSTREAQRCIKRYLARRIWRLLEHPAPSRPRTT

SEQ ID NO: 233738 - protein, 355 aa, unidentified
MIVIGIDPHKRSHTAVAVDRATGEIVAERTVAARVQGRGELVLWARSLDPERVWALEDCRHVSGPLERFLLARGERVVRVPPKLMAGARRAARTRGKSDAIDALAVARAFLREPELPAAFLAGREREIRLLTDHREDLVGERTRHQNRLRWHLHDLDCELEIPAGALDRYIWLDRLERWLAGREHEVQVRIAWQLVQRCRELTREVNELERELEALLRSEVAELLALVGCGTLTAAKLVGEVAGVGRFAGEGKLAKHTGTAPLQASSGERQRHRLNRSGNRQLNCALHRIAVTQARVHPPARAYLERKQAEGKSRREALRCLKRHLARTVYRTLRTMEERKMTSTPKPDLEPALT

SEQ ID NO: 233739 - protein, 343 aa, unidentified
MLAITTVGLDIAKSVFQVHGIDAHGSVVVRRQLKRRYVLAYFKKLPACLVGIEACATSHHWSRELQALGHTVRLIPPAYVKPYVKRQKNDAADAEAICEAVQRPSMRFVPTKTSEQQSCLTLHRTRHLFIRQQTAVINTIRAHLAEFGIVAPVGRNGVEDLLYAVADQRDERIPEVARACLEALGALLGKLKAQILEFDRQINAWHRSNETCRRLDELPGVGPALATALVASVADPKAFRSGRDFSAWIGLVPKQNSSGGREKLGSITKQGDRYLRSLFCAGALAVIRYAKIHGTKHRPWLAKLLERRPTKVAAIALANKIARMAWAMMAKGECYREPVALAR

SEQ ID NO: 233740 - protein, 343 aa, unidentified
MEHYVGLDVSLKLTAICIVDRTGKIEREGVVASEPETIAAFIKSYAPNVVRIGLETGPTSTWLWTELNKMGLPVICIDARHAKAALKLQINKSDRNDAVGIARIMQCGWYKEVRVKDLDSHAIKAVLVSRALLVKIKRDIENQIRGILKNLGLVIGQARMNLFGARAAELTKDRPELAAAVVPLLKAREAIGQQICDLDRQVMRLARDDAQVRRFMTAPGVGPITALCFLATIDDPTRFRKSRSVGAYVGLTARRYASGEVDWTGRISKCGDKMLRSYLYEAANVLLTRVAKWSALKAWGVRLAKRSGLRKAKVAVARKLAVILHRMWIDGTEFNWSTKKAAA

SEQ ID NO: 233741 - protein, 392 aa, unidentified
MKFVGIDIAMDKHDIIIIDDTGEIIYDHFIIQNNRFGFKKLHTVIRSCTKSVNEIRIGMEATGIYHENLRDFLISKGYTVYCTNPMLVSLSRKAASPRRTKTDKIDAMAVCRHLMHNLDRLHPYTPPLYHLQELKQLTRDYNTNREKIAKSKTELKRLLQTIFPEFLKHFDPFASWALELLDDYPLPSDYKGLHVDKLADRIQMHSNRWSQAVLLKQIAKDSIGKSDDLNSHLLRFCVSDLLHFDSQNKVLRKVIASTMNLYPKILSVPGVGPINGATILSETGNIDRFPNKHKYTSLYGIDPIVHESGKYKLKHSHLSKRGNKFLRTAIYSAARVACVAPNVRPNKFRTKYLEMTARDNKHHNTIIFAIAKNMVHSIYKLLKTDSFFDDLK

SEQ ID NO: 233742 - protein, 316 aa, unidentified
MDRSSVNQKPIYIGIDVAKAQLDLAARPTGQEWQSPNTPEGIAQVVESLQALAPTLVVLEATGGLQLPLVAALAIECIPLVVVNPRQVRDFAKATGRLAKTDRLDAQVLAHFGEATQPQSRPLPDAQSQALQALLARRGQLVGMLTAEKNRLGAALAPVRPRLQAHISWLQEELASLDQDLGDTIRKSPLWRAKDNLLQGVPGIGPRVSFTLLAHLPELGSLTRQQISALVGVAPLNRDSGLMRGRRSVWGGRARVRAALYMAALVGTRYNPVVRAFYQRLVEAGKPKKVALVACMRKLLCILNAMLKHQQSWNPA

SEQ ID NO: 233743 - protein, 408 aa, unidentified
MNGTDDSRRRHAGVDWSWETHAVCVVDDDGEVVRRFTVAHSAAGLAQLVGQLRLLGVDGVAIERGDGPVVEALLAAGLPVFVITSRQVKALRLRYGTAGNKDDRFDAFVLADVLRTDHRRLTPLTPDGSATAGLRMLVRARKDLVAARIAAHNQLRSHLLSAFPGAVGLFAALDSPISLTFLTRFPSAQRARWLSDKRLAAWLASVGYCGRQNPTELMAHLREAPAGLDGPAAEAAEVVTEQLVALLRTLRERIDVLDDRIAEALELHADAHIFRSLPRAGTVRAALLLAEIGDCRGRFPTEEALAAAAGVSPSTRASGRSHAVVFRHACDKRLREALIDFAADSRQASPWAADIYDRARARGARHPHAVRILARAWIRVLWRCWTDHTAYDPTQHRGLLKLQEQAAA

SEQ ID NO: 233744 - protein, 452 aa, unidentified
MPPKPERKGSWSTTTYILQPNAAGVDIGATEIYIAVPPDRDAQPVRSFRTFTAELKAAAEWLKQCRIDSVAMESTGVYWIPFFQILEAAGFKVFLVNARQVKNVPGRKSDVADCQWLQYLHSVGLLRASFRPEQSVCAVRSILRHRESLIQIATIHVQHMQKALDQMNLQLHHVISDITGVSAIAIIEAILNGERDPVVLAQRCDKRIKASRPTIAAALVGDYRREHLFTLRQSLHGYRQCQELIAACDREIEQHLAAFDSKLELQATPLPKPKDRHKPRRNQMKFDLRAHMYRVYGVDLTAVPGIDALTAHVLFAEIGPDFSRFTSAATFVSWLGLCPDNRISGGKLLSAKTRVVKSRVAKALRMAAQSLHRSQSYLGSYYRRMRTRLGTPKAITAAAHKLARVIYHLLTTGQSYEESGFARCEALHQQRLEHRIRRQARDLGFDLVRSPS

SEQ ID NO: 233745 - protein, 337 aa, unidentified
MDYFAGLDISMDETHVCVLDREGVVVRESKTASTAGAIADELAKAPSCRRIVFETGRMAPILFHGLSQLGLPVVCVESRHAYQALKSLATHKTDRNDARGLAHLARTGFFKPVHVKSLPAHAIRSLISARKKLVGQRVTLENQIRGLAVVFGIRLPRALTAAFIDQALKASEGVAGLSVAMRGLIAARTAVMTAVAAIDTDMRRMARASAACSWLMTIPGVGQLTALAFVAAIDDPSRIRRSRDIGAYLGLVPRRYQSGEVDYVGSISKCGDRRVRTLLYEAANVMLTRYKGQLKLKDWAFAIARRSTMRKARVALARRLAIIMHAMLRDGTEFVLT

SEQ ID NO: 233746 - protein, 344 aa, unidentified
MHYYTALDVSLRSVSICIIDEKGNICFEGTALSEVDDIIDCIRRFHPDIDSVGFEAGTLTQYLTYGFQAADFEVICLEARQVSAALSAMRNKTDKNDARGIAQILRTGWYSRVHVKSFDSHLIRALLTSRKAVLRKCVDLENELRGLIRLIGLKLPGTLKHGIFDQTVRDVVEGHPALAAALIPLLDARLVLYKTYLKLDNQAKGETRKDPICQRLMSVPGVGAITALTFKAAVDDPTRFKSSRTVAAHFGLTPRRFQSGEKDNNGRISKAGDPDVRAALYIAAHSLVIRSSEWSSLRVWGLKLSKTKGHRRAVTAVARKLAVILHKMWINGTDFHFGAVEPTK

SEQ ID NO: 233747 - protein, 317 aa, unidentified
MSNDSTVCAGIDTGKHKLDVAIDGSTERLQVDNSPQGHQALSAWLRQRGVERVGIEASGGYEQAVVSYLRADGFVIIVFQPIQVRAYAKFVLQHAKNDNIDAALVARCTAAATDIREPPDARLAPLAQHLTMIEQLTEDVAHLKTRHEACRDPRIRDFWKQEINRLKALLHGELKRLVAAIRQHRDLSNRLDLIASVDGVGLRTAVAILVRMPEIGRVTREQAAAIAGLAPYDDDSGLRRGSRHIKGGRQRLRQSLYAATLPAVFYWNTQLKTVYRRLIAAGKTHKLALVACARKLLIFVNTVVARGTPWTASPATT

SEQ ID NO: 233748 - protein, 371 aa, unidentified
MRNEITKDSFKDQSFYVGIDYHKKSWQVTILGEQYEHKTMSQNPDPELLASYLKRNFPGGNYHAVYEAGFSGFESCRKLNQLGVNCLVIHAADVPTSQKEKLQKTDKADSRKLARSLRSNEFEAIHVPAPELEADRALVRQRFRLVKDVGRTKNRVKSLLFQFGISIPDRFTASQTRHWSKVYINWLKGLVIDRVSLKQVIDNYIAIGESQRKDLLLLNKQVRYLSLTEVYMYNYKLLLSVPGIGLMTAMTFLVQIGDVGRFKRLQIGDVGRFKRLDDLCNYIGLVPKMYGSGEKMQVGKMIKRGRKELKIMLIEASWEAIRKDPALMLKFNELSKRMHKNKAIVRIARKMLGRIRFVLQNQQPYQLSVVK

SEQ ID NO: 233749 - protein, 410 aa, unidentified
MTTNSQVQPTSCNGVLHVSFELSAKSWKLGFADRLGRRARVRTVRPGDLPELRVEIAKAKRAFGLQSDAKVISAYEAGRDGFWLHRCLIAMGIESYIVEPASIQVTRKSRRAKTDRIDAEKIVAALMRYLAGDRFACSMIRVPDEESEDIRNLNREMVTIKKERTALSNRIGSLLVTQGIPLGVVDRNFPKKLVEMRTPEGKPLGQHLRARLLREFERLVLATEQIRVLEMEQAKMLRVAAKEATKCEAAAKSPKAVIIAEQFMNLVGIGPVTAWTLSSEIFAWRDIANRRQLAALAGLTPTPHDSGDDEKEQGISKSGRGQLRVLLIEIAWGWLIHQPTSALSKWYAERFNDGTKRNRKIGIVALARKLLVALGKYIRGGEIPLGAKVKEQRKFDYTPSLKPRPATATV

SEQ ID NO: 233750 - protein, 344 aa, unidentified
MKRYFIGMDAHSRHSCFVVMNVKGQILHRKQIDTSEAEILGFVRSLEGTKALTFEESTLSQWLYLLLKDEVDELVVANPAAIARRGAAKTDFIDATELADLLRVGRLKSVFHTADDRMELRALISGYNDLVQEIVRTKNRFKALFARSALPSRGTGIYTDEARISELPSLARREVAKALFDQLELLESQRREVYWERFRKNRRRFSEISLLCTIPAFGIVRSNQVVGIVVTPERFSDKYHFFSYAMLVRHKQQSDGKQYGNKQAHGQVLLKSIFKSAAVSALRGGNAFRRKYDQMRATGTPDKAARNSVARALAATVLGVWKTGKKYDDHYREVKQRQNLRRQG

SEQ ID NO: 233751 - protein, 435 aa, unidentified
MIFVGDDWAEVHHDVHVMDDTGARLGWRRLPEGLAGIRGFHELVAGHVKEPGEVVIGIETDRGLWVDALTAAGYQVYAINPLAVARYRDRHHVSGAKSDTGDAKLLADLVRTDRHNHRPVAGDSPAAEAIKVLARGHQNLVWARNRQTNALRSALREYYPAALEAFPDLHDRDALAVLGRAPAPADGARLPTSAIRSVLKRAGRRRNLDDRARQIQAALRTEHLTAPEPVAAAFAATTTAAVGIIGELNRQISDLETRLADHFEQHPDADIYLSQPGLGDVLGARALGEFGDDPDRYTTAKSRRNYAGTSPLTIASGKKRAVLARHIRNRRLYDAIDQWAFCALTVSPGCRAFYDQRRAAGDLHHQALRALGNRLVGILHGCLQHRNHYHEHTAWAASQQPRHPRARRAPTTATFRRRRSRRCPLPSLRRSPRRR

SEQ ID NO: 233752 - protein, 393 aa, unidentified
MVCVGIDVAKDKHDCFIISSEGEILADVFTIPNNAEGFDTLLQAIRRSTRPEDKIKVGLEATGHYSYNIPGFLLDKGLPTYVINPLHTNLYRKSLSLRKTKTDRVDARTIAAMLMSDVDLKSYTDTVYHNEELKSLTRYRFDKVRERAKLKQSVSRLVTILFPELEKLVSSLHSASVYALLSEFPGAKQISSTHMTHLKAVLKNASQGRYGQEMAETIRNAARSSVGSVMPAKSLELQHTIRLIRELDAEIEDIETAIQAIVDEMQSPITTIPGMGVRMGAVILAEIGDFSRFDSPDKILAYAGMSPSTYQSGQLSLSGAYSHMEKRGSRYLRYALYNATKHVCHWDPTFAAYLAKKRAEGKHYNVALSHAAKKLVRLIFAMEKSQRPYCAAA

SEQ ID NO: 233753 - protein, 387 aa, unidentified
MNEPTDNKHTMKKSLLFVGLDVHAQNITIGLAPGDGSAARLYGTIPNDLHALEKVFAKLRKAHPGVELRVCYEAGPTGFVLARRLGQLKINCTVVAPSLIPTRPGERIKTDRRDALKLARLHRAGELTAVHVPEASDEAMRDLCRARTDAVQDLRRSRAQLKAFLLRNGYRYTGKSAWTEAHQRYLRELVLPHPAQRVVLEDAIAAIAGAGERIARLEEQMETLLVSWPMQPVVAALMGMRGFARVGAMVLVSELGGAWRFDHPRQLMAYLGLVPTENTSDQKRRQGGITKTGNSHARWLLIEAAHHYRLSPKISKELSARQQGLSADLKACSWKAQTRLHHRMMTLLARGKQRNKVIVAVARELTGFVWQLFRLMESRMSLQPGGQ

SEQ ID NO: 233754 - protein, 408 aa, unidentified
MEVLHPRCSGLDVHKDTVVAAVRCVSPPVHHEVQSFPTTTRGLFALADWLGSHGCTHVAMEATGVYWKPVWHVLEERFELVLANAQHIRNVPGRKTDVADAVWIADLLAHGLIRSSFVPPAPIQELRDLTRTRKQLVREIAQHSLRIQKVLEDANLKLGSVLSDVLGHSGRAMLQAIIAGEDDPVRLAELAQGTARKKTAALVEALHGRVTPHHRALLKLHLGLVEAVESALEEVDRHVGKALEPIRDLARLLTTMPGVGDLVAQVILAEIGFDMSRFPTSGHLISWAGLCPRNDESAGKRRSTRLRKGGTWLKTTLVTAAWAGVRVKDSYLHALFLRIKSRRGAKKAVLAVAASMLTATYFMLRDGVEYQDLGPDHFDRRDRSKVIHRLVRRLQDLGCAVQITHEAA

SEQ ID NO: 233755 - protein, 369 aa, unidentified
MTFFIGVDLHKTQFTVHVRTEEKVESLDQIKQYPTTVAGYAEFLTRIETYKASGAAVKIGVESTGNTRFFKNQVEKAGAEVTVINTLKFKVINESTKKTDKHDASTISEFLSKDMLPESYLCGKETENIRRLLKSRERLVRSVVGQKNEVHALLVSMGLPDELRCLQSKKGRRNVLDTLESNNDYVLEAQSVKLMFQIIDRMTESVKTIEKQLAELTKDDEMVQRLMTIRGCGKITAWTIRAYTEDIGRFASAKKYAAFCGLVPWVQDSNKTIHHGKITKRGPQELRTCFVQLVLGIRRCKDTSEWRMMQRYEYMKKNKGSGKSIVAAARKMAEIVWAMLSEKQDFNADKMKGIYKPMTLADEALSAMN

SEQ ID NO: 233756 - protein, 386 aa, unidentified
MQASTVSTPITAHISTIFVAIELSQKTWLVTMHSPDKDKISRHKVPGGDHAGLLALIDRVRDRAARTLGAVPAVASCYEAGYDGFWLHRLVMAAGITNYVFDPSSIAVDQRARRVKTDRIDGETMLRTLMAYLRGEPRVVRIVRVPMPEQEDARRGTRERHRLTKEQTAHTNRIKALLRLHGFAVGQPRRRDWLSWLAAPRDWQGQGVPPRVLSEIENEHARLMLVRKQLDALARTPAAADPAPAVAEMVRRSDFLQRLKSLGPAFATTMTQEAFYKDFHNRRQVASYFGLAPSPWQSGGTDRDQGISKAGNPRARCSAVELSWLWLRHQPGSELSQWFRQRTLNAGKRTRRIAIVALARKLVVALWRYLTTGLVPAGAVLKSAKA

SEQ ID NO: 233757 - protein, 355 aa, unidentified
MMIIGCDFHTRQQQIAMLDTETGEMVERQLQHESGEARKFYEQLAKPVRVGIEATGYTQWFERMLAELGHELWVGDAAKIRASVVRRQKTDKRDAAHLLELLLAPDRFPRIWMPTPAERDLRQLVLHRVKLVQMRTKVMNQLHAMAMGQGLCRKKKLWSRAGRQELEALPLGPWAARRRQELLTMLDQWEKPIAELDRAVEQQAAAHGQAVRLMTHPGVGPVTSLAFVLTIGTADRFPRGRQVSSYLGLDPRTDRSADRVRSGPISKQGSSTTRWLLVEAGQTAARLDPELRRVYQRLKFRRGSQIAKVAVARRLAVRLYWMLRSQADYGELTARLVRMRGSSGSGPMEKSPSRR

SEQ ID NO: 233758 - protein, 426 aa, unidentified
MEETDEAVELVERVAALDIGKATLTCCIRIPHEANPARRRQEITEYPTTTRSLLGLADRLRSHGVTLVAMEATSDYWKPAFYLLEAEGFECWLLNAKHVKNVPGRPKTDKLDAVWLAKVVERGMCRPSFVPPKPIRQLRDLTRYRRTLIREQTREKQRLEKILEDAQIKLSATVSDVFGVSGRQMIQAMIAGQRDPKVLAQMARGPMRAKISKLQEALTGHFEDHHGFICQLMLERIDQLTIKIDQLSRRIDLVIAPFAHQVTQLDEVSGIGQVAAQELIAEIGVDMTVFPSAAHLVSWAKFAPQARQSAGKAKSASTGQGNPWLGGTLGEIVAASSRTNTFLAERYRRLIKHRGKGRAIVAIGNSVLTIVWHLLSDPAARYHDLGPDFYESRVNQQRHQRHLIHQLERLTGQKVILQPRPEQPAA

SEQ ID NO: 233759 - protein, 406 aa, unidentified
MSAVMIGIDPHKGSHTAVALDGVEAKLGEIRVSSSVIQVERLLEWAKGWPERTWAIEGAKGLGRLLAEQLVTAGERVVDIQPKLAARVRLLNTGAVNKNDPNDARSVAVAALRSPSLKEIGPESHAAVMKIWAGRHRDLSRTRNRIACRLHAVLCELVPGGFAKEISAVQAARVLENIEVHGASAAARMELAGELLEDLRRIDGQLRDAKRRLAKIVKESKTTLTEIYGVGPIVAATVIGDVAEISRFSSKDRFAAYNGTAPIEASSGNNKVHRLSRRGNRRMNHAIHMAAVTQISHRGTVGRAYYDRKISEGMAHKSALRALKRRISDALYGRMIADARSAAAAIEEGPGGQLGNDSISSVAGSHPQTPTLRSSHSRARSNPRSLRSAANIGNPPRRAKATRRAS

SEQ ID NO: 233760 - protein, 429 aa, unidentified
MQNESIPDARGPVFCGVDTHADSHWLCVLDWRGRKVLSRQFPADAAGYEALAGAIAAAGEPACVAMEGTSSYGAGLTRHLASLGMPVREALSPARMQRRRPGQGKCDEADAERAARAAMSGSRLGTPKSQDGWVDGVRCMLAARSGAVKARTSAINTARSLLTTAPEGLRSRFRGMGGPRLMEELPSVRAEGALGAALGALADLWAAARDAALDMERAIEASLEENCPALLAMYGCGPVSAAKLAVAAGDNPGRLRSEASFAAICGACPIPASSGKTVRHRLNRGGDRQANSALHEIARQRVMRDPETAEYAERARARGKSDREVMRCLKRYVAREAYRALMRPHEVRRPEDASGLVAARRAARVSQVRAASILGTSEKYISMLERGQRELKPIRRAYEAWVEAGLPLDWDRQAFEAERKMDSKKHLAK

SEQ ID NO: 233761 - protein, 433 aa, unidentified
MLKLNYMSTLFVGIDVSSKTNAVYAMDFEENKYISSSFGNNQPGADQLVNMIAECMQKHKNLDTVLIVLESTSVYSVHISNFLSASEVLMPYRPYVFCVNPKAASNYRKSYIGMEKTDPTDAYLIADFGRVGRTKKLEPWRGGQFISLKRLTRHRMHLSECITREKTYMVSNLYLKFSELQLLEGDDKPFGSLYGATSSAVLTEFLSPQEIIDMPEEELLTFLAGKSRNRISDLSKTSELLRKAARDSYRLDKCMYEPLSISLASSFNCIHAYQKEIKLIEQAIEKCINGMNPNALLILQSIPGIGPIWASGILSEIGDITVFHSSDALAKYAGLYWPKGDSGDFTSEDNKMSKAGNPYLRCYLGEAANSVRKHIPEYADFYARKYAEVTKHQHKRALALTSRKLVRLVFGLLVKNQLYTGEKLDAEYNIKSN

SEQ ID NO: 233762 - protein, 349 aa, unidentified
MKIDEVILGVDTHLNLHVGALVSNSGKYLGTLSVTTDAAGYLKLIMWARSFGSLHRAGVEGTGTYGAGLARSLRENEVQVLEVNRPDRATRRSRGKSDPTDAENAARAVLSGIATAVPKVQSGAAEAMRSVSVARRSAVKAKTQAINQLRALLISAPQDVRQRLLKDNTSDSVTSCSRLRSLGSSPMLQTLTATLVLLARRWLALEDEIKALDSMLENLTTQYAPRLRGRFGVGPQTAAVLVAVAGDNPERLKSEASLAALCGVSPLQASSGKTVRHRLNRGGDRAANNALWTIALVRMRSDPRTRAYVDRRTKEGMSKKEIHRCLKRYLVREVYPLILEDLAASAQHS

SEQ ID NO: 233763 - protein, 420 aa, unidentified
MNQTQIYFAGVDWASEKHDVWLTDAGGKRLGMRTFAHSGEGLAQLCAWLTATSGAEPGQIHVAIEVPHGPVVETLLERGFNVYAINPKQLDRFRDRFTLAGAKDDSRDAETLASSLRTDGRAFRKLAFDEPALVELREYSRLTDDLTREKNRLANRIRQQLWRYYPQIAKLDADLSEWVLDVWEAAPDPAKAARLTKRTVSSILKKRRIRRIGTDEVLSILRTQPLSVAPGVTDAAKAHIRLLAEQLRLVNKQIKEAHRQLDRLCTLLAGPAQAGEGEAEPGQPQEQRDAAILDSLPRIGRINLATLLAEASVALRQRDYHALRILCGQAPVTRRSGKSRIVVRRYACHPRLANALYHWARVASQIDEKCMAKYAALRKRGHSHARALRSIGDRLLAVACAMLQKRTLFDPAFGSTNSPC

SEQ ID NO: 233764 - protein, 320 aa, unidentified
MDEVRAIVGIDVSKDRLDVACLAAAVHTSNATSFDNNSAGHAALVAWLERVNPRLIVMESTGGYERLLVAALVAAGLPVVVVNPRQVRDFARAIGVLAKTDMIDAMVIARFGEKVDPRLRPLPGADATVLIDLMARRRQLIDLRTAESNRLGQAISARIKSSIRAVLSTIEKQIAAIDDDLDDHIQRSPVWKAKEDLLTSVPGIGPVTARTLLASAPELGLVSRQSIAALIGVAPFNRDSGSRRGRRAISGGRKVVRGVLYMAALTAVRHNAVFKAHYEKLLATGKAKKVALVAVMRKLLVTLNALLRNQVPWRSALETA

SEQ ID NO: 233765 - protein, 364 aa, unidentified
MKRKVYVGMDVHKETIQIAILPSNTKALVKEQQIKHEEGQIKKFIQKLKSEGTEIHCCYEAGVTGYPLYRYLKTLGVNCRIVAPGKIPRQSSDKIKTDKRDAIKLARLLRSGDLESIHVPSEEDEAVRDYLRSRDSLRLDLGRNRQRLMKFLLRKGIKYSTTKYWTASHYKWLNNLHFENEILQATFNDYYSRVRVQEENLKAMDQKIREIAESEPYREKVGILRCFRGVDYLTAMFLLSEVNDFKRFKTAGSFMSFLGLVPGEYSSGPKRKQTSITKTGSPRLRRILVEAAWQHRFPGTGSKVVAARRVGQSALVVSLAEKASLRLHKKFKSMQLRGKTPQVMITAVSRELSGFLWAAMNLVA

SEQ ID NO: 233766 - protein, 438 aa, unidentified
MSNKVIFNLDELFISVGIDVGADFSWMSIALPNQQFVGKPYKILHNSIDSLTTAVSKIKEAEELYSLESRIFLESTGIYHYPLFCYLRDKGFNCSVINPIITKNSTNINIRKVHNDRFDSKKAALVGLKPDLKVSLMPSDLALNCRNLCREYYDLMDNRSAYVNKLQGELRIAFPQYLGIFSKVTINTSLTLLETYTSPSAFLKADKQEIIDIIKSTARFGLTYAQNKYNAIIQAATDANQFGYIIDSNIKRIRLYISFIRKYDEEINSILESLHELVDANEDSDFVKQIHLIETFKGAGFLSAVSIMGEIGDFSAFSKPKQLFAYFGLDPAVKQSGKFEGTKVQMSKRGSAIARRVIHTLTLQSISISRNREAKNPVLREYYLKKCDSKPKLVAMGAVSHKVCNMIFAILRDNKPFKIIAPREHIKQYNSAKCDIAA

SEQ ID NO: 233767 - protein, 343 aa, unidentified
MSEVTTIGLDIAKTVFHAHGADERGRGVFSKRLTRAKLLAFFAAQPRCIVALEACGGAHHWARELTALGHAVRLIPPAYVKPFVKRHKNDAVDAEAICEAAQRPTMRFVAVKSEEQQASALVFRTRDLFVRQRTQLINAIRGHLTEYGWVAPKGPAYVSMLNDLLDDELGASLPPAAVSMFRVMLDLLADLDERITALDKEIAQRAREQETARRLMTIPGIGPITATALMALAPAAETFAKGRDFAAWLGLTPSQHSTGGKQKLGATSKMGERTLRRLLIIGASAVIIQATRRGTAKGSWLEQMLARKPRMLVTVALANKMARIVWALLAKGGTYRAPMAVAA

SEQ ID NO: 233768 - protein, 314 aa, unidentified
MTTHMEKVYIGVDVAARKLDLTDLPKQVDNQPAAIKRWLRTLPAGAHLVCESTGAYHKLLLRLCWQLGIAVSRVNPEQVRAFAKGQGLRAKTDRLDARVLAEFGRRQQPAPTLAPDPVRARLQEFNTRRLQLVAMRTQELNRQQQPELDKSSAASVRRMLTVLAREIAKLEKAADQLLGKSEELTAQVALLTQVEGVGQRTAKALLATIPELGTVSRQRIAGLAGLAPLPRESGQWKGQRHICGGRTAVRQALYMAALSAMRCNPQLKPFAAQLTARGKPFRLVITAVMRKLLLCLNARLRQHLIACNPQPNLT

SEQ ID NO: 233769 - protein, 264 aa, unidentified
MKHFVGMDLHSTNTVIGIIDETDTEKFSRKIPNNLDLILQVLLPYQSNISGIVIESTYNWYWLADGLMAAEYKVHLANPCAIQQYKGLKFTDDKHDAYWLATLLKLGILPEGYIHNRADCQLRDLLRKRLMLVRQRTQHILSFSSLMNRNLCHRVSSNTIKTLKESDLDDYISEHHLNMSAKANIASIGYLNERIKIIEKEILSIAKMKWGYEKLLTVPGIVKVLALTILLETGNINRFQRVGNFASYCRCVPSKRISNENNKG

SEQ ID NO: 233770 - protein, 379 aa, unidentified
MNDIIRIGMDTSKSVFQLHGVNSAEQPALRKRLRRRQVMGFFEKLPATRIGIEACGGSHYWAREIASLGHEVVLLPPQYVKPYVERNKNDAADAEAICEAMSRPRVQKRLVPVKTAEQQAALMLVGVRDQLIGRCTQLTNTIRGYAAEFGLTAARGLDKIEPLLARIAADTAVPALARALFTMLGEDYVQLKIRLRKIEAERMAWHRGNELSRRLAEIPSVGPLNGLLLVMKTPNPRAFRSGRDFAAWLGLTPKDHSTAGRQRLGVITRAGDETLRRTLVVGATSVVQQAAKGRGKPSPWLLALIKRKPPKLAAVALANKTARIAWKLMVSGERYDRNRAVAARKGCDAPPAKGSAAHPARSARVTAHKATSQTEAREG

SEQ ID NO: 233771 - protein, 464 aa, unidentified
MSKNKKKRFNKKSMDHLEQLNINAAGIDIGAESHYVAVPKGRDPEDQDVRNFSTFTADLYKLADWLKRCNIDTVAMESTGVYWIPLFEILDEQGFDVRLVNPRSIKNAPGRKTDVLDCQWIQQLHTYGLLQSAFRPSNQICELRSYVRQRSMLISYASHHVQHMQKALEQMNVKLCQVIDDIKGVTGMKIIRAIISGERNPKKLAQLRDSRCNNDEAVIAKALEGNFRSEHVFALQQAIELYDFYKKQIVECEIRIQNHLESFDDHSNGTPLEKPSRKSGGSANKFHFDARGYLYRITGVDVTRIEGIEAPTALNIIGEIGIDMSPWPTEKHFASWLGLSPGSKISGGKVLSSRTKPSANRAAHAFRLAAYSLQRSASAIGAFFRRKRAHIGAPKAITATAHKIARIFYKVLKHGTEYVDLGQEYYEQRYKYRVIGNLKRKAKKFGYELINIKEHEQVISTSSS

SEQ ID NO: 233772 - protein, 359 aa, unidentified
MQTKVNEKLFDGQSIYIGIDCHKKNWTVTILGEQYEHKTMSQNPDPDILASYLKRNFPGADYSAVYEAGFNGFYPCRKLRQLGIHCNVIHAADVPTRQKDKLQKMDPVDSRKLARSLRSREFEPIHIPDQSLESDRALVRQRFRVMRDVTRTKARIRSLLFQFSISVPDQFTLGQTRSWSKLYINWLKGLHTEHESLKQTLDNFIRIGEFQRKELLDVNRQVRSLSQTDAYRGNYNLLISIPGIGFLTAMTFLVQIGDIRRFERLDDLCDYVGLVPMMHGSGERMYTGKLINRGRKELKTMIIEAAWESVRLDPALMSKFNELTLRMNKNKAIIRISRKLVSRMRYVLINQEPYRLGII

SEQ ID NO: 233773 - protein, 344 aa, unidentified
MITLGIDCHKKYSQVAVLNEQGKFLMDVKLTNNKEQFSQLLNSLDSEEYQAVIETGYTWGTMYDLLSDLGIDVTVAHALKVKAIASAKIKTDKIDARVLADLLKAELIPEVYIPPKDIRQQKDMLRQRCWLVKSKTAIKNRIHQILTRNHVEDPGFSDLFGTGGRKFLDSLVLAGPDQNILRQDLELYDFINEQIKQTTHWVKDLLKDNRYREILESLPGFGAIFSSLVALEICDISRFAHEGKLSAYAGLVPSTYASGGKVYHGELIPQCNRWLRYAFVEASWVAIGSSPYFRGLFTRMKKNKGTNTAIVAVARRLSEIAYICLKENRLYEERPYISYRKKIA

SEQ ID NO: 233774 - protein, 405 aa, unidentified
MIFAGVDWAETHHDVHLCDEQGRKLASGRLAEGVEGIARFHELAAAYAGEPGEVVIGIETDRGLFVSALAAAGYLVFAVNPMSVARYRDRHSVSGAKSDPGDAKVLAGLVRTDRHNHRPVAADSDQVLAVRALARGHQSMIWARRRQANQLRSALREFYPAALAAFDDLTSGDAIAVLRAAPQPAQGAALSRTQITAALRRGGRTRRLPERAAAVQAALRSPQLPPAPALAGAMGATVAAMAAVIGEMNTQITVLEQELSAGFEAHPDAQVVRSLPGLGIILGARVLGEFGDAPDRYPDAKSRKNYAGTSPITRASGARRAVLARHARNKRLADAIYLWAFASLTASPGARACYDARRAAGDTHHQALRTLGNRLVGILHGCLATRTPYSEHTAWAHRTHLTPAA

SEQ ID NO: 233775 - protein, 408 aa, unidentified
MELTPIHKRVIALDVHQAKITACAIVEHDDGRQEMTKLDFGAFKRDRRALAQWALQIRPEVVVMESTGVYWKSPLAALEAVGIIAWVVNARHVKAVPGRKTDMADAQWLATLARAGLLRASFIPRVDFRRLRLVARQRHKLVGMLSAEKNRLHKVLDDAGIRLNVLVSDVHGQSARAMTKALIQGLPISEILDLKGRLGASREELFEASSTEQFSATHAFVAAEIMQHIEYIEQRVARMDEHLLARLEAWQPQLNLLQTIPGVDQVVAAMLLVEIGADMSAFGSAERLASWVGICPGNYESAGKRKSGKIRKGNAWVRRLLCEFAQAAARTQCALKAKFASLAICKGRKKSVIALAHKMLRTNYARLSSGTHYEDKTVDYEAISVARNAPRWIRMLRKHGFIGQTAAA

SEQ ID NO: 233776 - protein, 397 aa, unidentified
MDSLESTRLEQFRQFKSEIRGSERYLIVGLDIAKDSHHAFFGTATGHTLWKRWLFDNSREGFQKLLLQTEALQVRHGLPQVVFGLEPTANYHKPLGEYLIRGGHQVVFVSGVAVKRNRELLDGRWDKHDTKDAANVADLLSQGKCLYYEHPDPRIRDLRILLSLKKRWKRQEQSLRVRIRNGLVAQYCPELDPSFSRLIAPGKERDLLSAMQQTCSIGCATHPEVGFAAKLMVQELQQARESLKAIQERIQKICFQFPEYPYLLSIPGFGPQVSSQVLAAIGDPFRFAKGSQVLKMAGLDLSADRSGKTSAAATPVISKKGKANLRYALYQAALIASIKNPNFMAYYTHKLRGRAQEKGIQTKMRVKLAAKLLLIAWTLMKRKEPFDAKRLVLSALF

SEQ ID NO: 233777 - protein, 429 aa, unidentified
MSYRIAGIDVHKKMLAVVVSDVEIESEYQFERRMFGSSPEQRRSLAAWLLEQEAEEVVMESTAPYWKPVWGALERYWKPLREKREGARRRSGTLHLAQAPSNRGPRGRKKDFPDAERLVKRLVARELTLRFVPDAEQRLWRTVTRRKYQLTRNRVRLQNQLESFLEEAHIKLSSLVSDLLGLSARRMLKALADGETNPAALAALADQRLRATPAQLCDALGACAELSPVYRRLLKMALEELRLIDEQIGQLDQEMANLLSQHQDAVKRLAEVPGLGVDSAQQIIAEVGPTAATFPSEKCLSSWVGACPGDDESAGVNYSHRSPKGNRHMRRLLHQAANAAARTKGSIFEIVYRRSVPRLGHNQAIGTIAHRQCRLIWLILHQGVRYEERGPAVTKRSKQLRTSKMLRQLRSLGYRIEPPNPQPSQAQVQ

SEQ ID NO: 233778 - protein, 355 aa, unidentified
MWSLGIDQHARQITISLRDENGDVLRARQVSTQPEKIQAFFQQLTQDRLQKDEQFVAILEVCGFNDWLIRMLQDYRCHKVILIQPDDRQKCKTDRRDAAALSELLWVNRARLLAGKPVRGVRQVDIAASSDQENRRLTTLRKEARQARTRVINKIKHIVRRHNLQWHLPTKTFPTKPAVAWLKALVLPATDRLEMNYLLADLEHLEQRYLDLEKVIAQRCAASEQAIILSSMPGVGNFTATALACRVGRVERFPRSHSLPNYWGLTPGCRNSGEKTQRLGRITKAGSSMARWLLAQVAHQVLRKDGRLREWFKNIKRRRGASIARVAVMRKLATIIWHMLKHRKTYAECRAVVSK

SEQ ID NO: 233779 - protein, 410 aa, unidentified
MDLLRREVPATSLVVAVDAGKVFNRVWLTTGERGLIGEPVTLPVLREGVDELERLIASSGVAGTPVIGLEATGSLHRAWAAEIERRWPGSLRLFAPSETTAARGQLGSRRFKTDDRDCAALVWLLRQGAGRPAEPDTVAAMLGVVRHRGQLVDARRVLQQRLHDQLNALCPGLSAPIGHGRALKLASPTGQAVLACAAAFDGRAPTKRSLLARAPGRMTDPTAAFWIDRWKRLLDAPADAPLRAARMRRDLQRWQGLQGDIALAEAQLSDLLAQTPGQILTTLPGVAVVRAAEFSAYTLPIGRWPTPEHLYSATGLAPASYRSSTITRRGRISRQGLAEHRNALMGIAWGLSVNSPAFQARDAELKARGMAPIQARVALARHACRLAWRLLHTQQPYDDRRYAHARRRGR

SEQ ID NO: 233780 - protein, 390 aa, unidentified
MFYAGIDVAMDKHDCVVLDSGGNIVFEVFTFENSRDGFRTLKKVLQACSKNPKKIKVGLEATGHYSDNLLAFLNNSGYDPVLFNPLHTNLFRKGLSLRKTKTDHVDAHTIATMLRTEDLKSYSQQSYHLAELKSLTRYRSALVSDCSRHKISLVRLCQILFPEIKNLVPTLHMSSVYTLLSECPSADKIANCNLTHLTSLLSSASKGHYGRDKAIEIRDAARKSIGIKSTVKELELKQTIDLIQIYLQQIETVDEEINKHMDEIESPITSIPGIANRMAAVILAETNNFQDFERAEQVLAFAGLDPSVYQSGQLTSTHSKMVKRGSKYLRYAIFNAAKYVCHWDPTFRTYLHKKRAEGKPYNVAVSHAAKKLTRVMFHLVKTNKEFISQA

SEQ ID NO: 233781 - protein, 456 aa, unidentified
MPQGANAPGARFGEFVNKVPTLAARSRGEGLMEVIHRRCSGLDVHKETVVACVRLVLDDKITREVRTFETTTSGLLLLLAWLTELGCTHVAMEATGVYWKPVWNILSDGDFELVLANAAHIKNVPGRKTDVSDAAWIADLLAHGLIRSSFVPEQEFQELRELLRTRKQLGRQQSSHIRRLQKTLECANVKLDSVITDIVGKSGRAMLQALIAGETDPVKLAALADRRIKASAQELREALRGRVTDHHRFLLHLHLQHIDFADSAIQDIDRNVTALIARMDQEVEAGQTRATFQSLILLLMTIPGIDVLSARIILSEIGRDMSRFPTAGHLLSWAGLCPRNDESAGKRRSTRLRKGDPWLKTLLVQCAWAARRKKGSYFNAQFLRLRGRRGPKKAACAVAASLLTTIYHMLKDGTQFQDLGADHFDRRSKDVRAKRLVAQLANLGFNAKLTPLAQAA

SEQ ID NO: 233782 - protein, 473 aa, unidentified
MSKGSGLSRSERRRNARKERLRGLVPREGAVIGIDLGEDKQALALVDHDVRVLWRKTARVPAHRLGEALDLAVAAARERGFARVTVACEPTGPRWMQVQRLCGERGLVLVCVQPLASHIAREQQDYTTHKRDESDAVLIARLACELHCYVPEQLDEAWAVLRQLGRRREQLVRAATAAVTRVRDFLSVAWPAAETAAAWPFKSVTWLACLEVVTGRCGGDPARIADLGEQEFLALVNDAARAWGANRAIGRIARNVLAVLEDPDAVGWSRRGLFRRIAGELGDLRRLRAQLEAVEAEMRAVLGGELGLSRLGDIPGLTLTGAAVILAEAGDPRRYETSKSLVKHAGLSPADASSGAFEGTSRISRRGRPGLRTAAWRAVTPLLVHNPVMAAKYQALAGAVEDAARAAAAAARPGSARAAQAGRAARAARAKARTACAAALLRWIYFMTVHDAGWDPAAASGGRLAPSPLPEAA

SEQ ID NO: 233783 - protein, 346 aa, unidentified
MIVIGCDYHPSWQQICFLDTLTGESIEKKLEHASGEAEKYYRGLPGPALIGMESTGNCQWFVEMATAAGHEVWVGDAARIRASEVRQQKTDRRDAALILKLLMEGRFPRIWTPSGPEKDLRQLLIHRYKLVRIRTQVKNELQHLAMNQGVTKKRKLWSKAGEKVLRELPLKPWASRRREDLFQLREMLTGQIDLLDRSVAEVAEKSEKARLLMTQPGVGPITSMAFVLTMGDVNRFQRGKQVASYLGLIPREYSSGGHQRYGSISKQGNWFMRMLLVEAAQSAVRYDPGFRNEYLHRCHRKAKGIAKVAAARKLAVRLYWMLRTHRGYPEVVRVESSSRVPLVSES

SEQ ID NO: 233784 - protein, 441 aa, unidentified
MAMRTRNELTIQHPNAAGIDIGSSSHFVAVPADRSESAVREFGCYTQDLYEMAAWLLTCGITIVALESTGVYWIPVYEVLEAYGIEVMLVNARNVKHVSGRKSDVLDCQWLQQLMSFGLLSAAFRPPANVCALRAISRQRDTLLQEQARCVQRMQKALTQMNLQLTNTITDITGQTGLAIIRAIVAGERNPQELAKLRNYRIHASEAEIAKSLEGTWKEEHIFCLAQALSLYDTYRTLIAEADAKLDALITPLRRQGVKAAAGKVKRGGKNAPGFDVRNALREWAGVDLTQIGGIDVCTALKVLVELGPDLSTFKTAKRFCSWLGLCPGTRISGGKRLSGASKRIPNRVARALKLAAQGLHHSQCALGAYYRRLAARLGKGKAITATAHKLARLIYAMLTHGSEYVEQSQAQYEAKFQERTLKYLQQKAKTLGFDLVPQAV

SEQ ID NO: 233785 - protein, 359 aa, unidentified
MLIIGCDFHPKFQQISMMDTTTGETKKRRLEHPAEAEAFYRSLRGQTVRVGLEATGSYGWFRRLLQECGHQLWLGDPAAIHAANPRKQRNDKRDADCMLTLLHENRFPQVWMRPAAAEDLRQLLVHRVRMVQMRTKVKNQLDSMAKNEGLITGHAWRPNTRPQLEALSLPPWYDRRRRDLLDALAYFDQKIQPLTQAVEEAAQGDAQAALLMTHPWVGPNLSLAFVVIVGPWQRFANGRHLGSYFGLIPCEDTSADKRRLGHITKQGNVLLRWLLTEAAQHVHSGEPGWHRLYGALLRRHQGKSGVAKVAVARKLAIRLYWMLRSGQSYAQIRATEQEREPKCRNRGPKSSSGRKQRCA

SEQ ID NO: 233786 - protein, 377 aa, unidentified
MQETMIQSVKADKLFIGMDLHKNTSTFVVKDKDGKLINSAKVLTDKNDVTRYINSIKRNSDGRDLSLAVEPVSQWYYYADLIENLGVDVHLAHPMEVKAIAHAHIKTDKIDAGVLADLLRTNFLPEAYFSPAEVRSWKEQCRFRASIINLRSQVKNKIHAILFKHSLKHNFSDLFGKGGRRWLASLELKEPFQGNLNKYLILIDQLTEQVVQAEEIITNTVINCPQAKLLISIPGISYCSALTIMAEIGEIDRFISVKHLQSYAGLIPSTYNSGDKQIHGRITKRGSKWLRWIMIESAYHQMNCKRIPGFGAYYNGIKIRKGTKTAAVATARKLLAVVWRLLKDNRPYEVIDPRCWKSRPIASKISSVSAVVSTMAG

SEQ ID NO: 233787 - protein, 382 aa, unidentified
MSSPSESIATRSMIYLGMDVHKESITIAVLPAGAKTPTRLDRLANDLPKLKRWLDRLARDGELRVCYEASGAGYVLHRAMLEWGYACEVIAPSLIPKRPGVQRKHDKRDATDLARLYRAGELTAVRIPSESDERVRDVVRCRETFQHEILKSRHYILKFLARRGFVFREGTNWCTPHLKWLQHLTTDASPLARHDRLVFREYHALLMYKLQRRDELDRQIEQLALLPALAPMVGRLQCFRGISLHSAMVLATEIVDWRRFERPAQLACYLGLISREDSSGDRTRLGSITKAGNSHCRHVLVQAAWSYRHRPQTSVDLARRQQGQPPSVITHSWKAQQRLHKRFNHLSYRKRPQIAVVAVARELVGFVWATMQDVDVAEYQAA

SEQ ID NO: 233788 - protein, 342 aa, unidentified
MNDMMIGVDLAKNVFQIHGALRTGEVQFRKKLTRQQFTAFMARQAPCLIIFEACGGAHYWAREMEALGHEVKLIAPQYVRPFVKRQKNDAADAEAIVIAARQAEMRFVGPKTVEQQSRAAVFRGRERLVHQRTADVNALRALLYEHGYVFPVGMRYLDRMTALVDDDTSDLPALIREECQDLLAQIAEKTAHITERTAKLKALASQSDRARRLQTMPGVGPLTAIAVPAFGSDMAHFKTGRNFAAWLGLVPRQHSSGGKERLGRMTKAGQADIRRLLIMGAMSRLGWLGRRTLAQGNWLSRMSARKPAMLVAIALANKMARQIWAMLTKNEDYKDPALAVAA

SEQ ID NO: 233789 - protein, 359 aa, unidentified
MSLVMGLDQHRAQISAEWIDTITGEISRARVAPADRAGVREFLARFEGGDLEVALEATTGWRFVVEELQRVGADVHLAEPAEASALKGKKKRPKTDWADARHLRELLLIGRLAESWIAPAHLLDLRARVRCRHTLSQQRTECQQRIQAVLYHHGIAQRRDLLTLEKRGWLAALKLPAAAREQITISLAIIDALDLQLVPFDLDLRAYARKQSGCRALIDQIYGVGGLVAVTILAELGDTRRFANSRDVVRYSGLDITVRQSDEHRAPGHLSRQGPPALRWALYEAAQRARFPTSPDRAYYVQAAERIGGSAVTARVSPWLASSSNAASTSSVSSATQPWSRSPAEHSSQLLRGKPKINR

SEQ ID NO: 233790 - protein, 344 aa, unidentified
MSIKVVGIDIAKNLFQVCVLGTNGQILSNRKVKRDKLLDTVRQLPEQTALAMESCATSHHWGRIFQELGYTVALIPAQHVKPFVGRQKNDANDARAICEAYSRPNLHFVPVKSVEQQDLKAIRSVRKRLVENRTALANQIRGLAAEYGVVFPLSIKALRSHLPLALEDAENALSPVMRNLLQTLYCDFVSLSEEIDEMTQSVTILSQQNPKYEAIRNIPGFGPILTAALISEVGVGNQFQNGRQFSAWCGLVPKQNSTGGKSSLGSLSKNGNRELRALLIHGARAVLRCGANKTDAMGAWLRGLIARRGKAKAIVALANKLGRVAWHILAKNSEYDINQAFKPV

SEQ ID NO: 233791 - protein, 411 aa, unidentified
MHNRQNYLYVGVDLHKEQHTAVIINCWQEKLGEIQFDNKPSAFSKFLLEVETYVSDGLSVVFGLEDVGGYGRALAKYLVDHEQVVKEVNPALSFLERKSQVMIQKNDSWDAECVARILVNKFNQLPDVKPNDLFWSIQQLVSRRNALVKAQSALKNQLHIQLNHHYPSYKKFFSELDGKTALAFWQQYPSPSCLEGTNIKRLTAFLLDVSNNTCSIKKASDILKLVKEDGHTMKEYQETRDFLVRSIVRDIEFKKTEMKYIERELKQLVNLLDYQLETMPGIELVTASALIAEIGDVRRFSNANKLARFAGIAPVYFGSGGKGKTHKSKQGNRALHALFYNLAVQQVQVAKGSKLPRNPVFHAYYQKKLKEGKTKGQALVCIMRRLVNIIYGMMKYKTAYELPIVEEKEVV

SEQ ID NO: 233792 - protein, 502 aa, unidentified
MWLSFGLCGPGVAGGRGEAQEGFARLEVAVPSLLDDLFVRASERWLRSTSARVVIGMDPHKRSATIEVMTGDEVIVGAGRFGTDREGYAAMRSYGRQWSDRVWAIEGCQGIGRHIANRLLADGEQVVDVPPKLSARARVFATGQGRKTDATDAHSVALVGTRMSGLRPVVNDEQLAVLRILVDRRRSLGEDHVRMVAQLHQLLLELIPGGAKKSLSAAQAKALLATVRPRDVVGKTRRRVAAELIGDLERVYQRTKQADKELTALLAATGTTLMDLHGIGPSGAARLLVEVGDITRFPNRAHFASWTGTAPIDASSGDQIRHRLSRAGNRQINRVLHIMATVQLRNQTEGRAHYDRKKAAGKTSNEAMRALKRRLSDIVYRRMIDDAITTTVTGPGGHRETSLHSSVTGSHSHTGSSDKSLPGPANSHPTTLMPTAPMTQRGARCGCYRASSPGGGLTAGSQSTALAAWQGWVEDVLDQPTDPRRHRYDHPARITSRSSWVP

SEQ ID NO: 233793 - protein, 423 aa, unidentified
MMKLKYSICCGLDVHKNVIVATIVITNKDGISEYMQTSFSTINSDIQRFHNWLIENNCYHVCMESTGKYWIPIFNYLENDIDVCLTHPKYVKAIKGKKTDKKDSKWIADLYKFDLVRCSFIPPKDFRQLRELARYRFKLVCMKSSEKNRIQNCMTVSNVGIASVLSDPFGKTATEIMSYLLEHTADSIDEKAVRKLIKKGAKAKSDEIIEAIRGYNIETDQAKKLELARGHLEYLDNMITQTEVELYVRIKPYYEFVEFVSTMPGMTELSSTIVLAETGVDMNIFDDAKHLCSWCGLSPANNESAGKKKSVRIAKAGDYLKPMMVQCALAAVQSKKQPYFAIKYGRIKKRRGHKKAIIAIARMMMVCIYHMVSEKKPFTPTDYEDLMAPQNHVERVVLNENNVFAYLESLGYDSSKLVKRNDN

SEQ ID NO: 233794 - protein, 322 aa, unidentified
MQYIGIDVSKATFVVAYSSDKGGEIRTFNNTTAGIKQFIGTLPKDGSIHCVMEATGNYSALLLYMLNVAGITVSMENPLKVKNFARAMLSTVKTDKIDARLIALYGEKMNPQPFKVQGEAILRLRQKRTVIRQLTKQITAMSNLRGSLACLPVPDKGATHTVDETIKFLEKRRDRLQSELTDLVEVEFSRQLALLTTIKGIGITLATALILTTGGFTYFQNAKQVSRYLGICPTYEQSGTSVNIKGHINRNGDAYTRGLLYIAAWPASRFNAQCKETYTRLRQNGKPGKLAMIAVANKLVRQAFAVVAHDKEYIDGFVSNRP

SEQ ID NO: 233795 - protein, 342 aa, unidentified
MDEYDGRQFVGIDLHRRRSVIVRQSESGEQLSAVRIVNDPVALGLQLEQAGSDPEVVLEATYGWYWAVDVLQACGAHVHLAHPLGVKGFRYRRVKNDVRDASDLADLLRMGRLPQAWIAPPQTRELRELVRYRAKLVAIRSGLKAQIHAVLAKAGVVIAASDLFGVTGRHRLANVPLGSAYAQRIGSLLQLIDIFDSHEARFAAMIAEQLDTHTGYHAIQQVPGIGPVLAAVFVAEIGGVDRFTDPAHLCSWAGLTPTHRESDTVVHRGHITKQGSKAVRWAAIEAVQRHPTTTKIAADKHRIEARRGKNIAKVAAARKLLTLVYYGLRDGHIRALDRTRAA

SEQ ID NO: 233796 - protein, 367 aa, unidentified
MKKVSTAAVKQNRNFSEQKLTIGFDLGDRSSWYCVLDEAGSVLLEQRVSTTPKAMREVFGGMPRSRIALETGMHSPWVSRVLSAVGHEVIVAHARNVRLIGESRKKDDRMDAQTLARLARIDPQLLCPVKHRSARAQADLTVIRARAGLVRARTALVNTARGLAKSYGERLRGCNVRNMNPEKAEGLSLELQRALEPLLAGIESLSERIGECNERIEKLAQESYPQVARLKQVKGVGTLIALTYLLTLEDAHRFRKSRDVGCYLGLQPGRRNSGQSEPQMHISKEGDPYLRTLLVQGAHHILGPFGADSDLRRWGLKLAERGGKNGKKRAVIATARKLAVLLHRLWVSGEIYEPLRHNHPRTMPAAA

SEQ ID NO: 233797 - protein, 401 aa, unidentified
MKTVLSVDVAKNKSMIMLMNSDGEILIDTKEIKHNLEDFEKAKEEIKEISPENLTVFMESTGTYHLPVERYFKENGFNTLVINSLTTKNNYDTIRKTKTDKKDCYRLAKLFFVNEVEYHELSKKDLYANLKAMTRQYFYLLQQNVSCKNRYKRLLNICFPELEKIFKSTRIYDDTALNFIKEFPHAEIVKEKRIDALYNNLYKTNGRNLNFYKRLSETIKIASANSYPGVDKEHKDVKNLSDMAKIVQNNNNVINELRDKMIETAKKSPYYEIINSFYGIGEILTAEILGELGDITRFDSPKQLIAFCRLDPTIKQSRKSINVKGAISKRGNKYARYILFNCSQMVVKLGASNYPEHPVYIYYQNKKAEGKHYYESLTACSTKILRMLYSMCKNNKQFLEN

SEQ ID NO: 233798 - protein, 455 aa, unidentified
MTGAKSPGSDALSMVNPGAAAIDIGSTMHMAAINPQVDDNPVRAFGTFTGDLHEMARWFKACGVTNVAMESTGVYWIPAYEVLEQHGFNVILVNARYAKNVPGRKTDVSDAAWLQRLHSYGLLRGSFRPEAGAATMRAYLRQRERLIEYTASHIQHMQKALMEMNVQLHHVVSDITGVTGMRIIRAIVAGERTPNTLAEMRDIRCHASVDKICAALSGNWRDEHIFALCQSLALYDFYQTKILECDRKLEAALKALQIGKGHDVRDLPKVRTKKRQVNTPDFEVRSTLYRVLGVDLTQIHGIGPSLALKLVGECGTDLAAWPSSKHFTSWLCLAPGNKISGGKLLSSKTRRSSSRAAALLRLAATTLGRSDTALGALYRRLSARAGKAKAVTATARKIAVLFYNSLRYGMAYHDPGATQYEERYRSRVIGNLQRRAKTFGFSLQELPPEPDMAVS

SEQ ID NO: 233799 - protein, 342 aa, unidentified
MNYYAGIDVSLKCSSVAVVNANGEIVREAKVETDPTSVIEWFRSCGLPMERIGLEAGPFSQWLYAAMKEAGLAVELLETRHVRNAFKTMSVKTDRKDARGIAELVRVGWYRPVHCKSMDAQETRTMLAARKLVDQKLRDVEMSLRGLLRGSGLKVGKTTPTRFADRIKELVSGNATLQIIAESLLAVHQVLLREFKSFEKRVRIMARDSAEARLLMTTTGVGPIIALTFAAGIDDPGRFKKSKAVGAYFGLAQRKYQSGEMDITGRISKAGDAGVRTALYQAAHIMLTKPVKASALKSWALRLAKRVGMSKAKVALARKLAVVMHRMLVDGKPFNPAAGAAA

SEQ ID NO: 233800 - protein, 311 aa, unidentified
MSSSVGIDVSSATLAVHIRPEDISFNVSNDLSGFKQLVEKLGEYQVSAILLEATGGYECSALRALQGAGFPAFRINPNRARDFAKSMGKRAKTDPIDAAVLAHFAEVLPPQRCVAMTPERALLRELLIQRDRFVQQRDDDKRRLKQAQTACVLASLERHINYLKAEIKALEQEIAKQAEELHDDRVAQLMQVKGIGLVTAAKLVALLPELGQVSRQEIAALVGVAPFNEDSGKHSGKRSIWGGRTRIRRALYMACWVVIRHNKDFTERYTAMRAQGKLAKVAVVACMRVLIVRLNAMLKAGTPWQEQIAQP

SEQ ID NO: 233801 - protein, 316 aa, unidentified
MESITRVGIDASLDTLDVLVDRAENRRFQVPNSLDGVKKLKTELGRGKYIIAIEASGRYEALARHELQAAGYTVKLQNPRQVRRLAEGLGIQAKTDSLDAEVLARTAELCATNEPRSKEREVLGDVSRAIDTMKRLRAGYLRRAQVPGLCPVALKAFRNVAKTFQAEIKRLESEFVKLVKASSFKDRYRYALSVPNVGPNLARVAVCELPEHLENWSIRQISAYAGVAPIDNSSGKRIGAPKVPKHKNVHLKAALFMPAMGAINRDAWAAGTYARLRARGLEHQKAVIPVMHKLLFHLVSVLKRGSAWEAEPPKRT

SEQ ID NO: 233802 - protein, 403 aa, unidentified
MNCVGIDVSKGKSMIAVMRPLGEMVIPPFEVGHTDAELCELSRRLGGLEGETRIVMEATGNYHLPVASFLYDSGFYVSVVNAMLVHGYGNNNLRRVKTDKRDAVKLANYGLDHWLTLPRYIPEDEVRLMLKTTYRQYQQCTKVQTMLKNNLISLLDTAFPDANRLFTSPTRADGSEKWVDFISTFWHCECVCGLSEKAFTAKYQKWCKRHGYNFSQDKALDIYASACGHFSVMPKNDTTKILVEQAVSQLQATSAALAALRNEMQSLAASLPEYPIVMGMFGVGPALGPQLMAEIGDVTRFTHRNAITAFAGVDPGADQSGTHEAKSTRASKSGPPELRKALFLVMDCLLKTMPQDDPVYRFMDKKRAEGKPYLVYMTAGANKFLRIYYGRVKEYLASLENAD

SEQ ID NO: 233803 - protein, 287 aa, unidentified
MLSIGCDAHKRYSQFEAQDGVGKVVDRTKVMHDRGAILEYLARYPEGTPVALETVGNWYWIADEIEAAGCLPLLTHAAKAKVMMGHVDKTDKLDANGLATLLRNGTLPTVWVPSGLVRDQRELPRTRIALSRIRTAIKNRIHATLAKYALSPEGTTDLFSKKGRTWLEGALKSLPPETGGSLKQEIELLDTLSDQIAILEARIRDQIRITTNMQLLKTLPGVGDILAVVIEREMGLIDRFRGPRSFACYSGTTPKVSSSGGKTHYGRMRQPVRRQTGKPTSTSSPPS

SEQ ID NO: 233804 - protein, 368 aa, unidentified
MTRLPMDEFAAFVGIDWADAKHDVCLQAAGSQKREFSVLAHQPDTIDAWVSTLRTRFKGRPMAICLELNKGPIVSALGKYDFLVLFPVKPLTLARYRKAFTPSHAKDDPTDAEFQFELLLTHRDTLQPLTPQSPAMRALEPLVEHRRRLVGDNVRLTNRLTRALNNDFPHVLQWFDDKDTTIFCDFLTQWPTLKAVQLARRSTLERFFRAHHVRDADVIDQCIQAIKSATPLTTDAGVIAPTALLVQALVSQLRVTLHAIDDFDAAIGQRAQSHPDFPLCDSLPGAGAVLAPRLLAAFGAPRDRYTSADELQTYAGIAPVTERSGNKSWVHWRLQCPTCLRHTFVEWARIHPPLLLGPGLRSAAAPQG

SEQ ID NO: 233805 - protein, 401 aa, unidentified
MPTIESNASRVKRFRELKATLRTNRNRLLVGIDVAQAEDVVQVRHAHIRIVVPTLTIPNSTRGFAQLWRRIQQAQRATGCREVVCGLEPTGTYHQALARFLEAQGATVVFVSSSVAYWNRRTQDGTWDKHDRKDAANCADLLEQGKVLFYSQPDGPLAELRHLVKCLRRARGELASCKARWRTTLRPALSPAGEPLPQRLRAELPAVLQAWERGAPGRPAKPKARLPLGLATACADLGAQVTAVQARIARTEQACTPLAERLPAYALLRTIPGVGPTVGAILLAEIGDIAWFTQFSQLRKLAGLDIVRVQSGKVAGQWRISKCGRGLLRWALYQAAVGLARTAAGRVRLAALKAKRHGDRFAGFKALVELAAKVLRVVWGVWRSGTPYDPRRTGGLQRQPR

SEQ ID NO: 233806 - protein, 418 aa, unidentified
MKPWNQLTHFAALDWADDHHDLVVVDAGGQVVLKLTFEHNAQGWQQAQQALAQWPGLPVALETSAGPAVDQLLQRDFAVYPVMPKAAARYRERKRPTGPKDDFHDAWSLADALRTDGHSWCALSPLDPLTAELRALCRDEIVLIEQRTALVNQLQAALKEYYPAAIEAFEDWTVPATWDFVLAFPTPAALVAAGKRRWEKFLHTHKLWRPQTASQRLEIFARAAEFRGAAPIVAAKSLLAQSLARLLQALDHQLEAYRARIRELFNQHPDHQLFDSLPGAGSKLAPRLLVELAAVNWTQISQVQARAGTAPVTQQSGRIRRVKVRRACTHWLRATLHLWADLSRHYSAWSAAYYRAHRDKGQSHACALRCLANRWLEIVGAMVRTGTTYNAEKHLAAIQKHGSYVLKLIPCPAAQDDE

SEQ ID NO: 233807 - protein, 348 aa, unidentified
MHIAVLGIDLGKNSCSVAGLDASGRVVLRRRLHRDSVVKLASRLPACVIAMEACCGAHHLGRLLQAYGHVIRLMSPEYVQPYVKAQKNDERDAEAIAEAATRPTMRFVDLKSEDQLDMQTLHRARSRLVGQRTALINQLRAMLLERGIAVAQGRHRLARYLAPALDDGNAEPVPLSLRIRLLIEDMRAQWSELDRRIASFDAEFVAATRSDEAARRLSTIPGIGALNATALVAAVGDARSFARARDLAAWLGLVPRQATTGGRPRLLGITKRGNKYLRTLLIHGARAALPSLATTEGALGNWLRGLSARAHRNTVIVALANKLARIAWAVLRSTAIYSARISDRPTAV

SEQ ID NO: 233808 - protein, 388 aa, unidentified
MKQKFIQYGVGIDVSKKDLAVCFLAKTEEEALKIRSSRKFANTPAGILELMKWVEKYRKEKCLRLRIYLEVTGVYHEQVLFHLHEAGYEVSLLMGKRVKAYGKSLGEESKNDQKDSYVLGHMALSRQERLWQPASKHIVQIRSLTRHRRSLVQSRVAYQNQLHAVTYSARPSAVVKESLEQLISQMNLQIAQIEQEALSLAQVDEDLYKKICLITKSLKGLGIITMLEVISETNGFSEFKSINQLIKYAGYDIIENQSGNRAGKTRISKHGNARLRAAMYMPVLSILSRKVEPFYALYLRVLKRNPGIKKKAMVALQRKLLIIIYTLWKKNEAFNPEYQWGKDSEKKNNSTKKSSSDSKPELHGIAQPELASNTKIEKIEKISNFSCK

SEQ ID NO: 233809 - protein, 475 aa, unidentified
MNLKGKKKKNQVVTANIFEQQELLKKAEVIRESLTASTWHELETNGKFDKNKKLSFISDDMLILGCDVGSETHYMRAIDTRGRELSKSAFSFDNDSEGFQNAKEWAVKIAAEHNKSQIVLGLEPTGHYWFCLATWMVSNGISVVQVNPYAVKQTKEVEDNSQLKDDTKDPKLIANLVKDGNFGMPYLPEKLYAELRRLSMFRDQLNEDRVRTINRMHREMKIYFPEYKDALGKVDGAFSLQLLKQAPFPDDLTALGEDGIRQIWHEARLRGRGYSRAGEILGYAETSVGIKDGAAAGRTAVKWFVQKILELDAELAVIENQINQKCQEIPHAGNILEISGIGENTLSGILAEMGDISRFDDVKEIQKLSGLSLVACSSGKHKGETRISHRGRKRLRYWLFQAAKSVAAHAEEFKELHMHYTTRADNPLKKMQSLIVIACKLLRIIYTILKNGTAYDPKKMLMDIRHPEKKEAVAA

SEQ ID NO: 233810 - protein, 338 aa, unidentified
MDTEAPAVGIDVSKHKLDVALLIGGKVRSKSVPNSPAGYRELKMWMTKQKVAFDQCLVCMESTGAYSEPVAIGLQALGFTVSVVNPARIKGFGQSELVRNKNDGIDAALIARYCAMMNPAPWKAPSPEQRRLRAMCDRLRALKDMRQQEENRIEACRTVESSEMAAHIHQHVVWLSLQIKQLEHEIDEHIEHHSGLKRDADLMASIPGIGRATVAVMLGYIGDLHRFGSAKALAAHLGVSPRQRISGTSVRGRTTMSRTGNRATRSALYMPAVVASRHNPVLRAFSERLHANGLPKKAVIGAVMRKLVHLMYAVVRSGIAFEPNYQEGPARSGTSSGS

SEQ ID NO: 233811 - protein, 368 aa, unidentified
MKKYTMFVGLDVHKDSIEIAVAEEGPDREVRNWGKIGGDLVSFEKAIRKLQSKGYSLRFVYEAGPCGYTLYRHLVSKGLDCMVVAPSMIPKKSGDRVKTDRRDAEALARLHRAGELNAVYVPQKEDEAIRDLIRARKDAKNAQRVAKQQLKAFLLRNGIRYEGKSSWTPTHMRWLSGITLPSSAQQIAFQEYLDAVRTAGLRADRLTEEIVRHVKLWRMKPVVDAFQALRGVQLITAATIIAEIGDISRFENPRQLMGYLGLVPSEHSSGSSTHRGSITKTGNTHARSALVEAAWQYRLKPKISRCIFIRQENLPEKITAVAWKAQLRLSHRFRLLGSKGKPQQKVVIAVARELAGFMWAIAKEVPVS

SEQ ID NO: 233812 - protein, 450 aa, unidentified
MQPEVEEIPDAEHELLAARVAAIDVAKASGKVCVRLPGRARRRVSRVWDVAATSGAVTELAEHLVGQGIEKVTVESTSDYWRIWYYLLEAVELSVQLVNARDVKNVPGRAKTDKLDAVWLAKLTEKGLLRPSFVPPAPIRRLRDYTRLRTDLTHDRSRQVQRLEKLLEDALIKLSAVATDITGVSGRAMVEALIAGQRDPKVLAGLARGRMKTKHSALLAALDSRFDDHHAELARMLLDQIDALTTQIDALSARIDELLTAMPDAQPVDPHPGGPTPGPSTDTVSDAALGAVDRLDEIPGIGPNVAQVILAEVGLDMSRFPTAAHLVSWAKLCPRTIQSGPLTRGGKTGKGNPYLKGALGDAAAAAAKTNTFLGERYRRIVKRRGKLKALVAVARSILVIIWNMLDDPTARFRDLGADYHTTRINTERRTRNYVTQLMAMGYRVTLEPAA

SEQ ID NO: 233813 - protein, 343 aa, unidentified
MQEITTIGLDIAKSVFQVHGIDAFGAVIVRRQLRRSQVLPFFRKLSGCVIGIEACATAHHWARELENVGHEVRLMPPRYVKPYVKRNKNDAADAEAICEAVQRPTMRFVPIKSPEQQSVLMLHRTRQLFIRQRTALINAIRAHLAEFGIVAGIGRNGVEKLLDLITRGEDERIPPAAHACLMALAAQLAMVKRQILEADRRLLAWHRTSKTSKRLEAIPGVGPLIATALVASIPDPNVFRSGRDLSAWIGLVPKQSSTGGKERLGSITKAGNRYLRSLLVVGALSVIRRAKQLGYTRHPWLVRLMERRSVKIAAIALANKIARIAWAMMARNESYRTPLPASA

SEQ ID NO: 233814 - protein, 472 aa, unidentified
MGKGSGNGTTRGDRKRNARRERLRGLLPRDGAVIGIDLAEDKQAIAVVDHDVRVLARKTVRVKAFRLGEALDWAVGQARAKGFASVTVACEPTGPRWMQVQRLCAERGLPLVCIQPLVSHIAREQQDYTTHKTDESDCVMIGRLAVELHCYIPEELDETWAHLRHLGRRRAQLITASTASMQRIQDFLSVAWPVVTGTCVQPLLSKTWLAALQLVTSRCGADPGNLAALGCEAFTALVRSAVAGWGGKKAWGTICARIFAALTDTEGVVVSSRRGLLRRVADELADLQRTRAQLRRVEADMVAVLDELGLSRLAGIPALTAVGAAAILAETGDPRRYDSSSSLVKHAGMSPSDNASGAFSGDARISRRGRPGLRLAAWRAVWPMLQFNPVMAAKYQAMTQAASDTAAGTSSRQASAAAAAARARRARARVACAASLLRWIYSMVVHGTGWDPDVASGAASCQHAPRYQVEAA

SEQ ID NO: 233815 - protein, 406 aa, unidentified
MISIGIDISKEKFTACALEQGNKVIWKSYDVMNSKSEIEKFLRRMADVTDVRIVMEATGKYHLPILYTLKANGYFVSVVTPLKMKQFCRSISFRKAKNDRLDAKQIAEYGLIYWNTLENYNLDNTNYQELKHLNRSYQHYMELRVCQINFIDHIIDQTFPGIKKLIPHGSQDFSKDKLLDFLEKWWHKDKVLELSKEEFVKKYQIWAKEKRYHPNTQKAKSIYSLAQGGISTQPSNSPYIEADVQESIKLVKGINQSLHHILSQMIELAEPLEEYQEAKKFSGISDKLAVQITAEFGDLSKFRNKKCLISFVGIDAPPYESGNFKATQRKISKRGNSILRKVGYQAMKCMMSAKNQDNEIYLYMIKKEKEGKPRKVCKFAGLNKFLRIYYAKVMQAKLRTEQRKAA

SEQ ID NO: 233816 - protein, 334 aa, unidentified
MSLDLLAIDLGKQSFHIHGIDSDGVIISRKISRAKVIRAIAELAPAVIAMEACASAHYWGRRFLATGHQIRLINPRFVKPFVKGSKNDAADAEAIYEAALRPTMRFVPVKSIEQQDLQSLHRARERVVCARTALINHMRGLLAEYGVILPQGAWRFTTQVTTAIEEAELSELTREIFMDMLDQFNDLNRQLDKLDTQLVTICRTNETCRRLSKMPGVGPVIATALVAAVDDGRHFRSGRELAAWIGLVPRQYTTGGKPRLGGIGRRANHYLRRQMIHGARSVVMRLAKHDDRRSEWLKGLAARRGFNRTIVALANKTARIAWALLTRNEDYVAA

SEQ ID NO: 233817 - protein, 347 aa, unidentified
MKVLIGVDPHKASLAVAAVDEATGELLGRVGFSQDRSGLRRLERWVKRFPERRWAVENARGMGRHLAGKLAAAGESVVDVPPKLSARVRVLSSGNARKNDGVDALATALAASRNERLATVVSEASSEVLRLLSERRGDLVAERTRALNRLHGLLRDLLPGGVAGKLSADRAARILRSIRARGGASTCMRRRLASEVLRDVRTLDRKIADLDVRIEAEVDACGTTLTEIFGVGPILAATIIGTVGDVARFPTKAHFASYSGTAPVEASSGEVVRHRLSLAGNRHLNYALHMVAVCQARSQARGGAYYRKKIYEGKSSKEALRCLKRRVSDAVFRSLVADSKAPSRSAA

SEQ ID NO: 233818 - protein, 366 aa, unidentified
MSKDSKKPAEAVRRYVGIDLGDKRSRVCVTDEKGEIVLEEWVETTPAAFFKRFKGEPEMRIAMEVGAHSRWGNDLLSRCGHDVRVADARQLGLITKSNAKSDKRDARTLAQLVRADPSLLSPIQHRAERLQMDLTVIRMRDNLVEMRTRMVSSVRGVVKATGARLPKGETASFPQQVADLIPEPLRPAVAPILEVVDQLNERIYEYDCLMEHWVRTRYEESERLTQVNGVGTLSALAFMLTVGDKERFSRSRDIGSFLGLRPRLEQSGDSDPQLRITKAGDGYLRRTLVQCAQYILGPFGEDSDLRRWGLKMIEDGKGTKRAKQRAVVGVARRLAVLLMSLWKSGEKYEPLRHSLRGEKGQQEAVA

SEQ ID NO: 233819 - protein, 403 aa, unidentified
MNSVGIDISKGRSTVAVMRPFGEVVISPFEVRHTDSELSELARQLKSLDGETRVVMEATGNYHAPVAKLLHDAGLYVSVINAKLVHGYGNNDLRRVKTDKKDAVKLANYGLDRWLTLPRYVPEEDTRLLLKNCYRQYRQYSKVQTILKNNLISLLDTVFPNANRLFSSPIRVDGSKKWVDFVAEFWHCRCVSEKSQKAFTNKYQRWCRKHGYNFSEAKAHTIHAEACGHIDVIPKSETTKLLVEQAVAQLRATSAALAALKHEMQALASMLPEYPVVMDMFGVGPTLGPQLIAEIGDVRRFYSKKALVAYAGLDAPPNDSGDVTGRHKSMSKVGASSLRRTLFLVMSVYLQTAPLDEPVYQFMDRKRAEGKPYRIYMMASANKFLRIYYATVKAYLESLEHTA

SEQ ID NO: 233820 - protein, 354 aa, unidentified
MLIIGCDYHPSFQQIAFVDTDTGELQERRLEHREEAEKFYRELAVQGMKVRVGMEASGQARWFERLLAELNIELWIGDATEIARKRERKQKTDRQDAQHILHLLLKDDFPQIWVPSWENRDLRQLLWHRHRRVQARTRIMNQLQAVALNEGVRCKKRLWREKGREQLESFRLAPWASRRRHDLLELLDRLNPTIVALSQAIEQEAEKCPEAQRLRTHPGVGPLTALAFVLIIGKPDRFQCGKQIASYLGLVPLEDSSGNRRRLGHITKQGNSLLRFLLVEAAQVTARSLPEWRSKYVHLTLRRGRKIAKVALARKLAVHLYWMMRKEWNYEQLKKFGSHAGQPENRDGVKQNTE

SEQ ID NO: 233821 - protein, 317 aa, unidentified
MISTAKTATMFVGVDVSKATLDVYRPDTKEFLKIENTDEAISQLCSQLEKKKRQVMVVMEGTGGYEYLLVKHLASHKLAAAVFNPRRVRDFAKGIGLDAKTDPIDAKVISRYAEVVVPKPMATKSDHELKHSALVARRSQLLELINQENNRLKQSWDDDAKQSIRDVLEVLKKQLKNVDSLLSKMLAKDTANARTIEILQSVKGVGTVTISTLIAELPELGKLNRGEVAKLVGVAPINRDSGTKSGKRFIGGGRGQVRRVLYMATIVAIRHNATIRAFYIHLKSKGKESKVAIVACMRKLVTIINLLVKSNQTWQAK

SEQ ID NO: 233822 - protein, 366 aa, unidentified
MKKISTMQAFSNEILKEQNLTIGVDLGDRSSAYCVLNEAGEIVLEHKLPTTPEAMKQVFGSMPRCRIAMETGTHSPWVSRLLTALGHEVIVAHAQKVRLITKSRRKDDRLDARALARLARIDPELLSPVKHRSAQAQLHLTEIRARAVLVSARTALVNAARGLVKSYGERLRKCGTQQFRRETTSGLSTGLREALDPLLREVESLNERIQEYDRRIEEMSKKTYPETALLKQIKGVGDLIATTYVLTIEDPHRFRKSRDAGCFVGLQPGRRDSGESEPQMHISKEGDEYLRTLLVQGAHYILGPFGEDSDLRRWGRKLSARGGKTAKKRAVVAVARKLAVLLHRLWVSGEVYEPLRNSQKAMTAAA

SEQ ID NO: 233823 - protein, 353 aa, unidentified
MKPKTESDTALPMVIGVDIGKEVFHLVGFGVDGKIVFRRKIKRLGFAAAFEKVPPCIVGMEACLSAHFVSRTLRTLGHEPRIIPAIYVKPFVKGQKNDYNDAEAIAEAALRPNLRFVQEKSQEQLDLQACHRVRARLVSRRTATINQIRAFLIEQGIAVRSGPRALRTSLFAILENRKDEISPRMARLILDLYKDWCHLDERIDTVTGEIEELSRVDAKCQRLMTVPGIGPVISTGLVAAIGSGEAFERGRDFGAWLGLLPRQYSTGGRSVLGRISKRGSKYLRTLLIQAAKVLLMRPHNWSRYSFGAWLKTASERLHRNKLAVALANKLARIAWSVLRHDKAFDTHLETAAI

SEQ ID NO: 233824 - protein, 347 aa, unidentified
MKHYAGIDVSLNSSSVCVVDESGKIVREVKVASEPVALIHCIKSFGVRVERIGLEAGPLSQWLYGALRECELPVELLETRHVKAALSAMPVKTDRNDARGLAQLMRLGWFRPVHCKSMAAQEVRALLTARKLVQSKLYDIEMSLRGILRGFGLKVGPTTSRSFAARINHLAAGHPSLEMVAEALLSTHAAALCAFKNLEKNVRQISRADARVRLLMSAPGVGPLVALTYVSAIDDPKRFTSSKRVGAHFGLTPKKYQSGETDISGRISKIGDSSVRAVLYEAAHIILTRPIHGGALKSWAMRLAKRAGMKKAKVALARKLAVVLHRMWVSTSIFDFEKANGCMHAAA

SEQ ID NO: 233825 - protein, 357 aa, unidentified
MIAMKYYTSTTQFNCGIDLHARQMYVCVMDRDGKKLVHSNIKNNDFEFFLKLVAPYRHDLTVCAECMFGWYWLADACQAAGLHFVLAHALYLKAIHGGKNKNDRIDSEKLAHLLRTNLIPPAYVYPAEKRPLRALLRQRLRYIWNRTELLARIQSHQLAYNRPISRQRPYNREAWKEQLLTSEPDPVRQLALQNDLALIGHFDAQLAVLEKDLLKLTKRTASRDFALLRTTPGIGDYIGLTLLHEIGDITRFPTVKDFLSYCRLVKGTVASAGKIKGLRGAKLGNPYLRWAFGEAAVVAKRDALLGSLAQRLEARMNGNKFKANAVLAIKLARAVYFMLKNKTAFDPDRLVAALSPN

SEQ ID NO: 233826 - protein, 319 aa, unidentified
MAQNDLVVAGIDVAKDKVDVCIRALSLRHTFASTAEGRRELASWLRRQKVGKAVMEASGGYERDWAKALRGAKIEVRIVDPKRVRSFAQSAGRLAKNDTIDAEMIAWFAETFDEARSQAYDATREQLHQMVNARQALKGMQAKLESQGEHAQPAAVQRMHARILKTITVELVKFEAAIAAMIQATPRFTELAEIIESVPGIGRTTSAALIAAMPELGQANNKIVAALLGVAPYDDDSGRRRGERHIKGGRRRTRNVFYMACLGAATQHNPVLKAFYDRLVAKGKEKKVALIACMRKLISILNIMIERRQKWDASRYALS

SEQ ID NO: 233827 - protein, 338 aa, unidentified
MKAYAGIDLHSSNNYVGIIDENDKRLYGKRIPNELNHVLTALEPFRNRLEGIVVESTYNWYWLVDGLQEHGYKVHLANPSAVKQYEGLKYTDDKWDSFWLAHMRRLGILPEGYIYPKKDRAVRDLLRRRLLFVRHRTSNILSLQSMITRNLGSNMSGNAIKKLNEADADELFDCPNLAFMAKNNIAVIAFLSKIIKGIERQVKSQVKLRKEFEMLLTITGIGDILGLTIMLEVGTIHRFEVVGDYSSYSRCVKSERLTNGKKKGENNKKNGNKYLAWAYVEAANFAIRHSVAAQRFYQRKKAQRDGIVAIKALSNKICRASYYIMRDQVPFDEGLLFK

SEQ ID NO: 233828 - protein, 352 aa, unidentified
MTYYLGVDLHKKTQTWVLLNEEDDTPVFSREYSVSPSEVTRACKDASRFGNIVAAIEPVCGWQWQVVQMRGEGITVHVSNPRKTTAIAKSLQKTDKNDALTLALLVRTGLLYTSIEVSPETKKLRALVRERSFLVQLRASIQCRLEGVITREGRHLLEVVTSSKKGASVILASANHEWKRSVHVKGDITKYIDEIEIELKQEIRTPLLRLLTTIPGVGVITALTWIAEIGDFSLFKTPEKLCAFAGLVPTERSSGGVQRLGHITKAGSTHLRYMAVEAAMHIRNEPKTEKLYEFYEKIKTKKGAMCARVALARKMLSIAWYMVKKNEPYTPQPSPVLSSVHLPLRGDLVHTL

SEQ ID NO: 233829 - protein, 320 aa, unidentified
MTSRGAEKMKNDTIGVDVSKDHLDAHRLADGATRRFANDNGGHKALIKWLAETPLNRVVFEPTGPYHRAVERALGASGVPFVKVNPRQARRFAEATGKLAKTDRLDAAILARMGSLLELGARPARSEVLFELKELYVAREALVKDRTAARNRGKALTLSLLKRQNAQRLEQIDRQIATVEAAILQLVEADESLADRFAILISIPGVSNITAFALLIAMPELGSLEAGQAANLAGLAPIARQSGRWTGRSFIRGGRADVRQALYMPALVAARFNPDMKAKYAHLIKTGKPAKVALTAIMRKLVVLANALLKANRTWTPRTA

SEQ ID NO: 233830 - protein, 408 aa, unidentified
MEVIHERCAGLDVHKETVVGCLRVRERGQVRREVRRWSTTTAELLKLGDWLRQAGCTHVAMEATGVYWKPVWHMLEGEFELLLANPAHIRNVPGRKSDVNDATWIADLLAHGLIRASLVPPGPIQELRDLTRTRKQLMREIAQHKQRIQKVLEDANVKLASVVSDVFGESGRRMLKALSAGQTDAWQLAALRDGRLSASRETLAVALQGKVTAHHRFLLSQHLRMIDYLEQTIRDFEGQIEVVIAPFRAAVACLVTIPGISATAAHVIIAEIGVDMSRFATVAHLRSWAGLCPQLNESAGKIMSRRLRHGAPWLKTVLVQCAWAATRNKHNYLYAQFVRLRARRGPQKAIIAVAASILSIAYYLLRNQVPYRDLGALYFIRADQERIAQRLARRIKDLGYEVQIRKAA

SEQ ID NO: 233831 - protein, 350 aa, unidentified
MDKISALRGAKVVATGIDSAKSTFSICGVDAAQRIVLERTLNRAKLMELFAGMEPCTVGLEACSGSHQLARELNTLGHTVRIMAAKFVAPHRTSAKNDRNDARAIVDALIHPRTRFVPVKSQEQQALLCVQRARAGLVEERTALVNRIRGLLAEFGVVLPIQIAKVRHGALKAAQAIPVLARQVIEQLHAHLLLLDQHIGGYERQLRELARQSDAASRLVEVLGIGPVTALTTVGMVGDAREFKNGRQFTAWMGLVPRQYSTGGKTRLGPITRRGDVYLRSLFIQCAKAFLAVASRRNDRLSRWALAVRARRGFGKAAVAVAAKLARIAWAILAKGERFRVQTLAPIAMV

SEQ ID NO: 233832 - protein, 341 aa, unidentified
MNTIYYIGLDIHKKTITYCIKRIDGYLVQQGTVGAERQALLQWIQGLPGPWIGAMEATIFTGLVYDFLKPHAVDLKVAHPEMLKAITAAKKKNDRADAEKIADLLRVNLLPECHMLPEVLRELRRVLRYRNMIVREAVKMKNKISGLLMETGTTYAKRRLHGRKYFENLLERIEDVPESVKDLLRLSRSSLEMFEAVQKKLVKTLRENRLVHDRVQRLMTIKGVGEVMALTWVLEIGESDRFSAARQAVSYCGLCSAQRESAGKEQRGPISKKRNKHLQTMLIETAKLAPHWNPELARIHEKELAKGNRNRATLAVARKLVAYMLAVERQERPFQVPEQAA

SEQ ID NO: 233833 - protein, 449 aa, unidentified
MHQKKPRKKKTMKLPKHLEHINPYAAGIDVGSKSHFVAVPEGVDDQPVREFPSFTGDLQRLADWLISCGITTVAMESTSIYWIPVFELLESRGLEVKLVNARHVKNVPGRKSDVLDCQWLQRLHTYGLLQGAFRPAEQVCTLRAYVRQRMTLVRYAASHIQHMQKALAQMNLQLHNVVADITGATGMRIIKAILNGERDPKVLANMRDRRCRNSAETIARSLHGNYRPEHLFSLRQAVELYEFYQAKISDCDQHILAQLSGFDAAISEHAPPEGKPPTTPGEALQRMTGVDLTRIDGIDTNTALKIIAEIGIDMSRWKTAKHFASWLGLCPGTKVSGGKVLSAATKPVANRAATALRCAAFALFNSKSALGAYLRRQRSRLGAPKAITATAHKLARLVYTMLKNGTSYVDAGQQYYEEQYRTRILQNLKRKAQAFGFQLVPAQLGSATT

SEQ ID NO: 233834 - protein, 346 aa, unidentified
MTIVEATRAVTGGIDTHGEVHVAAVLDEVGGLLGTESFRADPEGYAELLSWLQAFGEVSKVGVEGTGSYGAGVARHLARAGVHVVEVDRQNRQARRQAGKSDPLDAVEAARAARSGRAHGTAKSRDGSVEAIRVLVVAKRSARGARIKALTQMRQLTFSAPDQLQSKLKGLPIAAFVAAAQGLRPTRSPDVVTAATKAALSSLAHRVADLEEEISDLDAMITPLPKETAPELLAVYGVGIDTAAALLVAAGDNPERLHSEAAWAHLCGVSPLEASSGKVTRHRLNRGGDRQANRALWHIVITRLACDPRTQAYMERRVKDGRPKGEAIRMLKRYVAREVYRYLPRA

SEQ ID NO: 233835 - protein, 411 aa, unidentified
MEAAVITAVGIDVSKSKSTVAVRRPGGEIVLRPFDVRHTNSDLKKLTSTLKKLGGDIRIVMEHTSTYWRPIALTLKEAGFFVSVVNAMLIHDFSDNTIRKLKTDRADALKIANYALTFWDILPPFNNEEETRLLLKMQSRANERITATATALRNGLIALADQTFSGVNIAFAPNTKNANGHEKWVDFFLRYWHKDCVCQYSMEAFTESYRGWCKRKNYKFRTDTAHKIYLLAQESVATLPKCESTKMLITQACKSLNAVCEAKQSTQLEMQRLAAMLPEYEVVMQMEGAGPVTGPALMAEIGDVRRFKNKKALVDFAGIDAPPFQSGAFESKSRHVSKRGSPHLRRTIFIISNIILTRSNPENAVYCFMDKKRSEGKHYYVYTVAGSAKFLRVYYARVTEFLRSQPSYDAY

SEQ ID NO: 233836 - protein, 402 aa, unidentified
MSINTSDPAGSAVRVGRVQVGIDAAVVADHHVTIRETTPDGQVHLSRFRTPPTIAGLTRLGERLSDYPQVVAVAEPTSMTWLGLHVALREAGCDLALVGTRHAARLRGAISGKNKSDVIDADVLAMAGDVFDLAPLRPPAPSQLALRRAVVRRGKLVIDGNRARRRLISLARWAFPDVWEAFAGSWPTAVAVLTRWPDLTALASARHSSVTGVVAAHTRGVPDVDARAEKIRTAATRTAQFWDGHLDLSALTWESSEHLRDITIAAEQIERATVQAHHYWAALYGDDPLLLSLPGMGPMTAPTIRAFFGDAAAFPSAKAAAAYVGLTPSTWSSGTVVQPSRAITKEGPPCCGWRSTRPPAVPAASTPSSPPATGTSWSNAGTATPRPPSPSPASSWSGPGPS

SEQ ID NO: 233837 - protein, 390 aa, unidentified
MIYVGIDVAKDKHDCFITNSDGEVLYKPFTIQNNGEGFDKLYERIRSVSNDFSKVKVGLEATGHYSYNIQGYLVKRGLTIYPLNPLHTNLFRKSQSLRQTKTDKVDARTIAYLLMSNVNLKSYSETSYHNEELKSLTRYRFDKVRERAKLKVAVSRLVCILFPELEKLVPSIHLPSVQALLYEFPGAAHVANAHLTRLTNILKEASRGRYDKNTALTIKAAAKSSIGLNMPAKSLELKHTLALMKELDKEIQEIENEIKLIMDKLESPILSVPGIKYRMGAMIIAEIGDFARFENADKILAYAGLSPSTYQSGKLDSCYSHMEKRGSRYLRYALFNATKLVCMYDPKFREYLNKKRAEGKHYNVAISHATKKLVRLIYALETSGRQYITA

SEQ ID NO: 233838 - protein, 417 aa, unidentified
MKAWNEQTHFAALDWADDHHDLVVVDSQGQTVLELTFDHNAAGWRQAQEALACWPELPVAIETSAGPAVDQLLQRGFAVYPVMPKAAVRYRERKRPTGCKDDRHDAWSLADALRTDGQGWSLLSPLDPLTAELRALCRDEIALIEQRTALVNQLLAALKEYYPAALEAFDDWTAPYTWAFVLAFPTPAELVSGGKRKWEKFLHTHKLWRPQTSAARMEIFARATAFGGSAAITAAKSLLAQSLCRLLQTLEQQLAAYRQRIQVLFDQHPDRDLFGSLPGAGPKLAPRLLAELAGSDWTQINRVQARAGTAPVTYQSGKIRRVKIRRACVHYLRATLHLWADLSRQYSTWAAAYYQAHRDKGQSHACAIRCLGHRWLEIIGGMSRSHKPYNAEAHLKEVQKHGSYVFKLIATPAAKTQ

SEQ ID NO: 233839 - protein, 320 aa, unidentified
MMAQNDLVVVGIDVAKDKVDACIRLRSLRLTCPSSTQGHRKLVAWLRKHQVEKAVMEASGGYERGWAWMLREAGIEVRIVDPKRVRSFALSAGRLAKNDAIDAEMIAWFAETFSEAPSQKHDAAHEELQSLVKARLSLIDARTRLVSQSEHAAPGLVQKAHAHILKSLASQLAKLEAAICTKIKSMPDFAERAEIIESVPGFAETSSANLVAGMPELGQVSDKIAAALIGAAPYDDDSGKRRGERRIKGGRRWVRNAIYMPCVGAATQNNPVLKAYYRRLIAKGKEPKVAIIACMRKLIVILNTMIARRQKWDPSRYSLS

SEQ ID NO: 233840 - protein, 421 aa, unidentified
MFTDMDLIVGVDVHRRTNVTQVIDGQGQVIERPGRFANNRTGTDQLAECLAQIAQSGGYRTIHIAAEATNNFWLPFFCQLSQSHQLSTWPLELYPFNPRVIHNFKKALGDLEKTDDRDAGVTAERLRFGKELPQPFQMDDLYLPLRSLTRYRYHLVGELVRVKSYCLSLVYLKATDYSTMDTRPFSKVFGATSQAVLREFATLDEIAEMPFEDLVEWLDVKGKRRFSNPEENARKLQRVATDAYRLPEEWATVIHDIISLNLRHLSLLENLIKRVETAIAQQMVSIHQTLDTIPGIGPVFAAGIIAEIGDLARFDCNEAKVASYAGLKWPRSQSADFEAEDTKLSRSGNRFLRYYFCEAAQVVRLHVPEYRLYYNRKFREVRKHQHKRAVVLSARKLVRLVVRLLTTNEPYRLRKATDSQS

SEQ ID NO: 233841 - protein, 365 aa, unidentified
MQKISTMQTSEENILNGQLTIGLDLGDRFSSYCILDEVGKILREQKVPTTPEEMKQTFGRMVRSRIAMETGTHSPWVSRLLTGLGHEVIVAHAQRVRLIVKSRRKDDRLDARTLARLARIDPELLSPVQHRSAEAQLHLTEIRARAGLVSARTALVNAARGLVKSYGERLRKCGTQQFRQEITSGLSTGLREALEPLVREVESLNERIKEYERRIERMAKETYPEVELLKQVKGVGDLIALAYVLTIEDPHRFRKSRDAGCFVGLQPGRRDSGESAPQMHISKEGDEYLRKLLVQGAHYILGPFGEDSDLRRWGKKLAERGGKNAKKRAVVAVARKLAVLLHRLWVSGEAYEPLRNSQKAMSTAA

SEQ ID NO: 233842 - protein, 359 aa, unidentified
MQELTFIGLDVHARSVKAALLDGGSGEVTLHSAPPRSEALVGWICGLPGPVTVAYEAGPTGYGLARALEQVGVPCLVAAPSRIERAPADRVKTDRRDALRLARLLRLGELTAVRVPSPAEEAARDLMRAREDARGDLMRARHRLSKLLLRQGLLWEGVTWTAAHERWLAEQRFAARPLQIAYQEAFVTMQGACERRAALDAAIAVEAGEPRWAEVVGRLACLRGVSTLTAFGLAVEIGDWQRFSGRSIGAYLGLVPSESSSGERRRLGAITKTGNGHARRLLIEAAWHQRRPPWRASHELRRRREGQPAAVRARAELANRRLYQRWAAFDGRGKRSTVAAVAVARELAGWCWSLATMEA

SEQ ID NO: 233843 - protein, 408 aa, unidentified
MDVVHLRCAGLDVHKDTVVACARVVESKQVEQEVRTFGTTTKELLSLSDWLTERRCTHVAMESTGVFWKPVWHVLEGSFELVLANAGAIRNLPGRKTDVNDAIWIADLLAHGLIRGSFVPPQPVQELRDLTRTRTQLVREVARHTQRIQKTLEDANLKLTGLISDVLGVTGRAILEALIAGEADLDALANLRRRGIKASHEELVEALRGSVRDHHRFLLQLHLRQIDALGQAVRDLEGRMETLLAPFRPQLELLMTIPGVSETTARVLLAEIGFDMTRFATSGHLVSWAGLCPRLDQSAGKRRSNHLRPGNTWLKTTLVQAAWAATRKKDSALRAQYLRLKSRRGPKKAVIAVAASMLTSAYFMLQRGVPYAELGPSHLDARDPKKTAQRLVRRLNDLGFEVELRRAA

SEQ ID NO: 233844 - protein, 500 aa, unidentified
MKTKRNKGKIRADRKSISVPCSEPAQELRILRPDAAGIDCGAQEHYVAVPPDRASAGQPTVRRFSAFTEGLDAVVDWLKDCRVTTVAMESTGVYWIPLHQKLETAGIEIYLVNARHVRHVPGRKTDVQDSQWLRQLHRFGLLNASFRPEDIICRLRSLHRHRDNLVSSSASEIQHMQKALQQMNLHLHHVVSDITGLTGLRIIDAILAGQRDPQQLVRLRDRRVYKSTPQEMQAALVGDYRGEHLFVLSQSLQAYRFYQARIEECDRETEPLLEKLAQQIEAASANLKLDALEQSGSKGESNRPEQLPEPKPTSGPKSKRKRKPRANEPKIQLAGLLERICGIDLTQVVGLNVLNVLLIVSEIGVDMSKWRSAKAFCSWLGLCPGNKISGGKLLDSRTRQVVNRVADALRLAAQSAGRTQTCLGIFYRRKQAHLGAPKATTATARKLACLIYHLLKNKQPYQEPDSASYQLRLQKSALSKLQRQAIALGYTLLPTAPVPA

SEQ ID NO: 233845 - protein, 334 aa, unidentified
MSEVIREEVVRVGVDLAKRVIQAHAVDGRGRVATNRTLRREQFMPWCAQLPPGCVVAMEASSSAHHWARKLAALGLQPRVISAQLAEPYRLEGRCGKNDANDAAAICEAASRPSMRFVPVKSVEQQSMQCVHRLREGFKEERTGCINRIRGLLAEFGVVVAQSPKALREALPDALEDADNEMNGLARLAIERAAQHWRELDEHIAWCDERIAQHGRDNAAVKHAAQLIGIGPVTASAMTSAVGDFKQFKNGSQFAAWLGVVPRQRSSGGKSVLGGITKHGQSYLRMLLIQGAKSAVMTAERRSDRISQWVLALRERAGWQKAVVALANKNARIL

SEQ ID NO: 233846 - protein, 431 aa, unidentified
MLGGNQEKLMSQNQPEIQYAAFVSIDWADQKHVWSLQEANSSTREHGEVGHMPEAIEAWIAQMSQRFAGRPIAVAVEQSRGALVFMLSKYEQLHIFPVPPAMTANLRKAFYSSGAKTDPADTDLLQDVLQMHREKLRRLSPDTEATRLIQNLVEERRKLVDEKTAQSNRLEAHLKIYFPQIPQWFGDVDSPLVCALLVRWSALEALQKARPDTLRSFFRKHQCRKEELIESRIKAIGEAMPALKDRAVVEAQLAVVKVLVQVIQVLHQGIEDFNRQIQEAAAAHPDFFIFESLPGAGAVMAPRLLAAFGSQRERYRNAAEVQTSSGIAPVTESSGKSSWIHFRFACSKFVRQSFHEWAALSITQSQWARAYYELQCRRGKRHHAAVRALAFKWIRIIFRCWKERVAYDEKVYLAALAQHNSPLLAATKIAL

SEQ ID NO: 233847 - protein, 324 aa, unidentified
MSKHSTVCAGIDTGKHKLDVALEGRSHELQVPNTAEGHRQVSNWLRKQRVARVGIEASGGYEQAVVRQLRQDGFVVIVFQPAQVRAYAVFHLQKAKNDKIDAGLIADCTAAVKKIHEPPDPRLAPFAEVATLLDQLTEDIAHLKTRRESFRDERIKAHLTGEIRRHKALVRAELKKLAADIRRHDDLGKRLDLILSVDGVGLRTAVAILVRMPEIGRVTRERAAALAGFAPYDNDSSDHSGPRHISGGRTRVRGNLYTAALPASMRWNPQLMALYKRLIAKGKPHKVALVACARKLLIFVNTVVERETPWSKEVPALANVERGA

SEQ ID NO: 233848 - protein, 422 aa, unidentified
MLEETQDHDEIIERVAALDVGKAEVVCCVRVPSDNPGGRRRQEVATYSTMTRSLLDMADHLRALGVTRVVMEATSDYWKPAFYLLEASGLDVWLVNAKDVKHLPGRPKTDKLDAVWLAKVAERQMIRASFVPPPDIRKLRDLTRYRSDLVASRTAEKQRVEKLLEDAQIKVSVVATDIFGPSGRDMLAALVAGERSPKVLAQFARRTLRAKIPDLEQAFIGHFTEHHAFLLGRMLDRIDAIDADIDALDRRIAAEIAHHAAIIDRLAQIPGLNTLSARIIVSEIGVDMSRFPTSGHLVSWAKFAPGVKESAGKKKGRGTTGHGNPYLGRVLGNVATAAGRTDTFLGERYRRISRRRGKKKALVAVGRSILVIVWHLLSDPEATFHDLGSDYFDTRIDPERKKRNHLRQLEALGYKVTLEPAA

SEQ ID NO: 233849 - protein, 357 aa, unidentified
MRSIQGYILKGKNVYVGLEDSKKTWKLCVRSEGVVVNECSMPAVYGNLRNYFINRFPECHIHVLYEAGFRGFGLHDQLVSDGWECTVTPPHTVTDEKCQRQKNDRIDCRRLAKNLENSDYKSCYVPDQEQREDRQLSRTYEQIKHDITRVKSRIRRTLEYQGLDHHFPAGKWGEASYRELIELLDTIDISSSLRISLTIMIRELEQLQGLRKELIQCLKGFAKKDRYKDSIALLKSAPGIGLLTAIRLVLEWGDLSRFKRKEQFTSFLGLTPSEYSSGEKELKGHITKQGNRQVRAWLIECSWAAIKKDPVLLDKYRRVYNHCGSKKKAIVAVARKLALRLRSLLLSKQPYAIGIIA

SEQ ID NO: 233850 - protein, 344 aa, unidentified
MKALKSHVAGIDVHKEMLAITVLIGELDGEPKEYQFESSTFTDDLMALGLKLKEMGVTDVAMESSGIYWKPVFNVFNPLGLKVVVANAAHIKNVPGRKTDMNDSRWIAELHRFGLIRASFIPDGEFQRMRLLSRHRTNLTEDLARVKNRIQKVLEDGNIKLSIVVSDIFGVSGLKVLKQIAGGYTHPNILITEVTTKIKRMEEMKKALTNCLTTEHCFVINVLMKQYEELKNRIEEVENELCKKVEPYAHLVEELDKIPGIDAILAMGIIAEASANMSSFKDERAFAAWSAVASGNNESAGKKKRAKCRKGNPALRKMLIQAAQKATTARNPFIALNTTNSAFA

SEQ ID NO: 233851 - protein, 408 aa, unidentified
MGRAAEVVAPSSSIRTDGGCPVVQINDLSRSLAAFDPISTLVVVVEMSKASWLVSGVVPGVERQPLKKLEPDATALLRLIERWRNEAVRAGRPIRRIALAYEAGRDGFWLARWLIARGIEAHVIHSASVAVSRERKRAKTDRLDAAMLMRVFLGWLRGERGHCGMVAIPTMEEEDARRPNRERESLVNERSRIVNRMKSALARLGIRGFKPHLRRAPERLACLRTAEGTGLPANIIEEFRRDMARLALVREQISSIEKTRAERLERAPDTGPHAMVRLLARVIGIGIETADMLVREILSRKLRDRRALARYAGLTGSPDESGLKSREKGLAKAGNARVRRGLIQLAWRFLMFQKDSALARWYRTRTEGPSGARKTTMIVALARKLLIALWRLVTTGEVPDGVELRPAA

SEQ ID NO: 233852 - protein, 410 aa, unidentified
MRLFVGDDWAEDHHDVEVMNEAGKVLAKKRLPEGAAGMAGLHELIGRQLGDDDAAEVVIGTETDHGPWVAALVAAGYLVFAVNPLQASRYRERHGVSGAKSDSADAHMLTDMVRTDSHQLRAVAGDSAEAAGIKIVARTHKTLIWERTRQVQRLRHQLLDYFPAALEAFDDLDAPDTLELLARAPEPARAAKLTRAQVSAVLKRAGRRKITERATVILTALRGERLDQPPAVTAAYAVTVRSLTAVITVLNEQVKALQGQVEADFGRHPDAEIYRSQPGMGAVLGARVLGEFGDDPHRYADGKARRNYAGTSPLTRASGKKKTVTARFISNSRLADALNAQAFASLRASPGARALYDELRARGIDHNDALRRLANRLVGILHGCLKTRTLYDEATAWGHRQNLPQSSEAA

SEQ ID NO: 233853 - protein, 360 aa, unidentified
MLYLGIDQHRKQLTVSIRNEAGDVVLRRQVSTEWNRVRAFFDELRRFAEPEGGFVAIVEVCGFNDWLLKMLAEYGCRETILIQVEKRSKKKTDRRDAHQLSGLLWINRTRLLAGQRIEGVRRVQPPMEQQAEDRQLTVLRQRLGQLRTRTINRIKHLLRKHNLEQEQPAKGLATKRTRKWLAALLLEPFDRLEMNLLLAQWTVWDEQIETLETEIKKRQAENATAALVATIPGCAAYGSLALAARIGSIERFPRPASLANYWGLTPGCRNSGEATDRLGSITKQGSAMARFILGQLVMHVLRRDPWMKAWYGRIKRRRGSKIARVAVMRRLATVIWHMVKYNEPYAIDGPPRRRLAVSAA

SEQ ID NO: 233854 - protein, 337 aa, unidentified
MSVYVGIDVHRKRSQVAVVTEDGQVQLNKNVVNGSEPFLRLIGDLPSGTAVAFEAAFGWSWLADLLEDYGFDAHLVHPLRCKAIASARLKNDKVDAAILAQLLRADLLPEAWIAPANVRQLRALLRHRISLVRLGTQLRNRIHAVAADHGYDRSASYWTGPGRGWLAELDLPAASREIVADCLAVIDGLAPLIERLDGELHARAKADPRVKILRTLPGVGEFTALVMLAEIGDISRFGSARKLASWAGLTPTVRGSDLTVRHGHISKQGSAWLRWVLNQAAQTAKRSPEFAASYAGIAKRRGKKIATIAIARKLLTRAWHLLADMQAASMNEPPRRP

SEQ ID NO: 233855 - protein, 390 aa, unidentified
MARYHVGVDVGKDRHHVAIQDVETNTYCKTISITNDREGFMELISSLERLSVDKSAFLVGIEACPYGLNLSYFLMAVGFNLVEVNPFRAGQFRKAQGRKAKTDRIDARSVTAILSLGDHKPLSIPDPILDNLKELTRFRTDLVDERAAMIIHLREALSVLFPEFDKVFRQLDSAGSLAVLATFPGPEHLIATGEETVGKTLSLASPHRMGRGMARRIVEAAQNTVGVVQKQPALGIKISILAKRIASLQSTIRELERQITALFNSLPCKPQGFPLGRAPTLATIISEIGDVHRFPTLKKFLSHLGWCPQSFQAGNKHVRRLVWMLSVLAVRMVPRYREYFQRRVREGKGKMHILVAVGRKLLSVLYAMLKRGVPYDPNREENSRIALARP

SEQ ID NO: 233856 - protein, 457 aa, unidentified
MNRKRTKSKVDRTMPMVHPNAAAIDVGATIHMAAVSADRTPEPVRSFGTFTTDLHRLVNWFKECGVETVVMESTSVYWIPIFELLDARGFTVFLVNARDAKHVPGRKTDVSDAQWLQRLHSYGLLRASFRPKGQIAELRAYVRQRERLLEYAASHIQHMQKALTEMNLQLHHVVADITGTTGLRIIRAILAGERDSKALAHLRDYRCHASAETIEKALTGSYRAEHLFALEQALALFDAYHEKVSACDVRIEAVLKELSIGRSRGSGSLPSSRRRTDQTNAMAFDVRAALFALLGKDITQIDGLGPYLSLKLIAECGDDLSAWPSAKHFTSWLCLAPSNKISGGKVLSSRTRRSGSRASALLRLAAVTVGRTDTALGAFYRRLSARIGKAKAVTATARKIAVLFYNAVRHGMEYVDPGASFYETRYRARVVDNLHRRAKAFGFVLQPAEPTSSVAVS

SEQ ID NO: 233857 - protein, 344 aa, unidentified
MDHFAGLDVSVKETSICIVDDAGKIVREVKVASEPEALLAALKNPAYHFKRIGLEAGPLSQWLFSALAEAGLPVICVETRHMQAVLKAQINKTDRNDARGIAQMMRVGLYRPVHVKTLRSQKLRMLLTHRKLLQSKAIAIENDLRGTLRNFGLKVGMVGKVKFEARIRELVENLPDLAVLVEPMLIVQRTLREQIVILHRRLLAIVRDDEVCRRLMTTPGVGPVVALTYRATVDVPARFRKSKAVGAVFGLTCAKYQSGEVDRNGRISRCGDEMMRVMLYEAAQSMLRSKKWSWLKAWAMQIARRRGMKKAIVALARRLAVIMHRIWVDGTEFRWTREQAAAAT

SEQ ID NO: 233858 - protein, 362 aa, unidentified
MTESTTIVAFDQHAATTVAGVLLPGQRTPATHSLTSDVTTIGRFVDRLRRTGPVQCCYEAGPCGFELQRFLAARQIPCEIIAPALIPRRPGDRVKTDRRDAGQLAVLYRAGALTAIHIPTEQEEAARDLLRCREDIRADLLRARHRLSKFLLRHGRRFTATKKAWTKRHAAWLQAQRWPLPALEQTHCAYVRAVDEAVGRLQAVEVELRDLLMLDPLRDRVTCLRCFRGLDNLTALTVAAELGDARRFPTAPSTMAFVGLVPSEHSSGPKQARGAITKTGNAHLRRVLVEAAWHYRHHPFLGPSLRERQRGAPAAAIEQAWAAQHRLHRRYRRLAARGKPKQVIVTAIARELTGFLWAVLTQ

SEQ ID NO: 233859 - protein, 346 aa, unidentified
MKILALDLGKYKTVGCEYESESGAHRFQRSLTTPAALRKMVQEVNPERVVIEVCSIAGWVCDLMGELGVAVQVANTSDEAWRWRKVKQKDDRRDALKAARLSAVNQLREVYIPAKEVRQWRALITYRRQLVRRRTQIKNHIRDLLLREGQILARGSQCWNQVGTELLTSLARPLSAVGLTELWRGELYEELQQLELLQARLATVEEKLNAIGKADARVQLLRTAPGVGPRLAEAIVALLDKPQRFGKASQVSAYIGMVPKAFDSGESVRRGHITRQGSRLVRSLLVEVGWAGLRHNAWVRQTYQRLHGGKKARRKIAIVAVGRKLLVRCWAMLRDHRAWDWQPQIT

SEQ ID NO: 233860 - protein, 340 aa, unidentified
MTVIIGVDPHKATHTAVAIDRAERPLARLDVVADRSQTRRLLAWAAPFGERRWAIESADGLGKLLAQQLLGAGEDVVDVPPTLAARVRLGGSTKAAKNDPNDALATAIAGLRHCGLRTVRVDDHTAVIRMLVDRYDDLTRLRTQAACRLHVTLRELVAGGAPRRLSADRAAKLLRSVRPVGVAEIARKRLAGELLADVRRLDREIAAARGRVADAVTKSGTTLLELHGVGPIVAGFILGHVSDPARFPTPARFASYNGTAPIEASSGPTKRHRLNPRGNRKLNHAMHMAAVTQVRHDTPGRAYYQRKIAEGKSNKEALRALKRRISDAVWRQLQVDLGRR

SEQ ID NO: 233861 - protein, 421 aa, unidentified
MLKIHRFNCAGLDVHKNLIVATIGITDKKTRVTEYIQKEFSSLNFDLYHLKNWLIEHDCFDVCMESTGKYWIPVFNILETENKMNIVLVHPKYVKAIKGKKTDKKDSKWICDLFKHDLLKSSFIPPKDIRELRDLSRYRFKLICMRTGERNRYQNAMTVSNIGLASVVSDPFGKTAQSVMNEVLSTKVIDENKIKKLIHGRCKNKDKIVESLKNSKIEPDQRFKMTEIQSHMNELDQHIEAVEVEIIKRASKYFDNFLHITKINGIQMMSAILIISEIGVDMTQFETDKQLCCWAGLSPANNESAGKKKSVRINKAGQYLKPVLVQCALASIKNKDSYFGQKYSRIKKRRGHKKAIIAIARMMLVSIYHMILTGETFNPSDYESFKNPKPQREKNIYTVETALDFLKSQGFDVSSIQDIPK

SEQ ID NO: 233862 - protein, 407 aa, unidentified
MRLFVGDDWAEDHHDVEVLDAAGHRLAKTRLPEGVAGIARLHAIIGELAGADAEDVQVLVGIETDRGPWVAALVAAGYQVFAVNPLQAARYRERHTVSGAKSDAADAHALADMVRTDAHQLRPVAGDSAQAEAVKVVTRTHKTLIWERTRHTQRLRHALRDYFPAAVEAFADLDAADTLQLLAKAPDPASAARLTRDQVSAALKRARRRDIPAKTEQILTVLRADHLGQPAALTGAYAASVGALIAVLLVLNEQVATLQEQVEAHFGQHPDVEILASQPGLGPILGARVLAEFGDDPDRYATAKARKNYAATSPITRASGKTRIVAARYVHNDRLIDALMTQAFAALNASPGARAYYDQLRARGANHNAALRQLANRLVGILHGCLKTRTRYDEAIAWSHHTKAPAA

SEQ ID NO: 233863 - protein, 395 aa, unidentified
MKGRYNLMIYVGIDIAKLNHFAAAISSDGEILIEPFKFSNNYDGFYLLLSHLAPLDQNSIIIGLESTAHYGDNLVRFLISKGFKVCVLNPIQTSFMRKNNVRKTKTDKVDTFVIAKTLMMQDSLRFMALEDLDYIELKELGRFRQKLVKQRTRLKIQLTSYVDQAFPELQYFFKSGLHQNSVYAVLKEAPTPNAIASMHLTHLAHTLEVASHGHFGKDKARELRVLAQKSVGVNDSSLSIQITHTIEQIELLDSQLFSTELEMANLVTCLHSVIMTIPGIGVVNGGMILGEIGDIHRFSNPKKLLAFAGLDPTVYQSGNFQAHRTRMSKRGSKVLRYALMNAAHNVVKNNATFKAYYDAKRAEGRTHYNALGHCAGKLVRVIWKMLTDEVAFNLE

SEQ ID NO: 233864 - protein, 467 aa, unidentified
MSHRRLVGIDLGIATAHTVRVLDGEGIVVAKRRAWPTADSLAAVEAAALAGCPEDTRLEVVIEPTGPAWLPIAVFFCARGHQVFRVSSQKAADLRRFLSRHAKSNGIDADTLARLPLFDPAGLRPLQLPGAERAALDRRVRAADRLTQAGADHKRRIKDLVRQLLPASPLTGELGMADLAVLERYADPHALIRLGMTRLTALITKASHHQQGAERALQWQQAAQASLALYDSHPAIDFAGLAAEVATEVRLLRATCDELAAHAAEREARYQAVDPAGLARSLPGIAEVGGPALAACMGDPARFATGKKFRSFTGLTPKASETGQTDRKGQPMSKAGSSLLRTTLVRAADTARKQDPQLARIYYLQMTERGKDHLGALCVVAAALAERAWTVMRRGTPYVICDTGGQPVTPQQASTIIARDWTVPPEVRARRRSKKTGKAPRKSSKDSANGAASPAAPLHLVTGGPSS

SEQ ID NO: 233865 - protein, 426 aa, unidentified
MNYTQNSKIAQVTERTLVVGVDIGSETNYARAFNWRGQEVSKKVLRFSNSQEGFQSFLEYLRSNQVIAAAEQIIVGCEPTGHYWFTLARYLKAQQINMVLVNPYHVKQIKELDDNSPKKTDQKDPKTIAKLVVDGRYSYPYLPEGIYADLREAVSSRERIVKEVNAVTNRIKRWLKIYFPEYLAVYKSFASESGLTVLETAPLPQDVVKLGAEGVNRLWREKKLRAVGMKRAQTLVEAAQNSIGLDGGVCARMEMQLLLEDYRAKEVQLDKVTAVLETEALKVPHAEKLLSIKGVGLITVAGFLSEVGDIRRFNSPKQIQKLAGLELKENSSGKHRGRTSISKRGRKRLRKILFQVMLPMLQNNAEFREVYESFTVRQKNPLKGKQAIIAAGCKLIRVFYAILKHGTEYDPQKLRMDRLCPESAAA

SEQ ID NO: 233866 - protein, 346 aa, unidentified
MNATTYGMDIAKNVFQVHWVDGNTGEICRKKLPRGKVTEFFAVRPAGRIAMEACGGAHHWGRTLGPLGHQIDLLPTHQVRPFISGNKDDVADARGIWLAAQHGDIRRVAVKSSEQQAMLSLHRMRTHWVSVRTATVNALRGLLYEFGVTLPRGRHSGLRQLAQQRAEINDTLPAVMVRLVDAQLLALADIERHVQAMEEEIKLMLKSQESARRLHDTPGIGVLGATALAATLGDGTSWRNGREFACCLGLAPGHRGTGGKVRIGGISKRGNAYLRTLLINGARALASREHPAPWIVALLGRRPFNVVVVAIAHKLARIAWALVAHGRAYEASWKASAPPAASAGAV

SEQ ID NO: 233867 - protein, 367 aa, unidentified
MKKVSTAAVKQIRNFSQQKLTIGLDLGDRSSWYCLLDEAGSVRLEQRVSTTAKAMREVFGRIPRSRIALETGVHSPWVSRLLSELGHEVIVAHARNVRLIGESRRKDDRLDAQTLARLARIDPQLLCPVRHRSAKAQADLTVIRARAGLVRARTALVNTARGLAKSYGERLRGCNVRNMNPEKAEGLSPELQTALQPLLAGIEMLSEQIREYNERIERLAQQSYPQVALLKQVKGVGTLIALTFLLTLEDAHRFRKSRDVGCYLGLQPGRRNSGQSEPQMHISKEGDPYLRTLLVQGAQHILGPFGANSDLRRWGLKLAERGGRNGKKRAIIAVARKLAVLLHRLWVSGEVYDPLRNSNQRALSAAA

SEQ ID NO: 233868 - protein, 464 aa, unidentified
MLRIAHWALQCCFEHVDQIPLDLCAVLAGNHLLFTTAGEEAVVLEADEQTEEIIERVAALDIGKAELVCCARVPHEGRPGRRLQDVATYSTMTRSLLGMSDHLRCLGVTRVVMEATSDYWKPVFYLLEAAGFETWLVNARDVKHLPGRPKTDRLDAVWLCKVAERQMLRPSFVPPPEIRRLRDVTRYRVDLIEARTAEKQRVEKLLEDAQIKLSVVASDIFGVSGRQMMAALIAGQTNPRTLAQLARGRMRTKLTILEDAFTGYFTDHHGFLLAKMLGRVDALSIDIAELEDAIEEMVAPFADAVERLDEIPGLGVIGASAVIAEVGLDMTRFPTAAHLASWARFAPGVKESAGKKKGRGSTGHGNRYLARVLGEAAVAAARTDTFLGERYRRIARRRGKKKAVVAVGRSLLVIIWHLLADPEARYTDLGSDFHDKRIDPERRKRAYVHQLETLGYKVTIEPAA

SEQ ID NO: 233869 - protein, 358 aa, unidentified
MTHDGPEITGGVDTHGSTHHAAVIGRLGRHLADREFPATVQGYRDLLDWMRSHGELAAVGVEGTGAYGAELARVLTAAGVTVVDVDRPDRKTRRTRGKSDPIDAYAAATAVASGRATGVPKSRDGTVEAVRVLRVTRRGAVKARTQAMNQIRSMLVSAPAVLREQLAGLERAALIRTLARLRPGADLSTPLAATKAALRRLARRHQALDDEITELDTQIGPLVRQAAPELLALFGVGPETAGQLLASAGDNPERMRSESAFAHLAGVAPIPASSGRTHRHRLNRGGDRAANNALHTIVLVRMRYDERTRAYVARRTKEGLSKKDITRCLKRFVAREIYRALTAAPAEQIAQTDLAPAA

SEQ ID NO: 233870 - protein, 338 aa, unidentified
MRINAVGIDLAKNVFQLHGADAQGRPVLRKALPRIKLLDFFAKLPPCLVGMEACSTAHYWARELMAFGHEVKLMPPQYVKPYVKTNKNDAADAEAICEALLRPTMRFVEVKTPDQQVLLLIHREREGAVKDRTALINRLRATLGEFGIAIPVGPQRMQRWFRDEYGVVEVRLPELLRRHISGMRQRLGSLEESLASLDAEIDQCSRNSEACKRLETVPGIGRLTASALVASIGDGRTFNSGRQLAAWLGLVPKQYSSGGRQRLQGISKRGDAYLRRMLIHGARAVIRHMNPKRTTTVWLTKLSARAHKNIVIVALANKLARIAWALLSKGECYKEVSA

SEQ ID NO: 233871 - protein, 417 aa, unidentified
MEHVAIDLGGRESQICIRTQENVIRLEKRVPTRKLKEFFGSIEASRIVLETCAEAFAVAGLAKDAGHDVRVVPATIVRSLGVAQRGIKTDQRDARALSEASVRIELASVHVPKKESREIKTACGMRETAVQARTQLINSVRGWLRGELERVRSGAPETFATRVRESRTSEKIPAHVERQLAIIEAITEQIKGADRDLLELAKRNERCRLLMSVPGVGPITSLRFVAAVDEFERFSDAHQLESYFGLTPGENSSSDARRRTSLTKAGSKKVRWVMVQAAWSASICRRSDPMVLWMRQIAARRGKQVAIAALARKMLGIMFAILRDRVPYNPSRASKIRVEPTDSQTFNDGIGVPPARKYALRKPVDQSDTILPTTPKEASNEQRAAVKADPSTPDYTVAKKPRRSPVRRPLKDTLGRE

SEQ ID NO: 233872 - protein, 384 aa, unidentified
MSWRDLIGAWHRPKQAVSAGVSNLVEVEVDRVMIVLGADTHKRSHTIAAVSATSGELLGEQTVQSGAKGAAGLLRWARGLGDERVWALEDCRHVSGSLERFLIERGERVVRVHSTLMSASRRQARGRGKSDSIDALAVARAALREGLDTLPAAQLDGPELDLRLLVDHRERLVRQRVAINNTLQWHLHDLWPELRLPGSSLFHGNWGPRVARRLARAEQTMRVRIARDELRRIRELTQTIKTLEAEIADLVAQIAPHLLTEPGFGPLTAAKLVGEIAGAQRFSSDAKLARAAGIAPIPVSSGKTSRHRLDRGGNRQINATIHRVAVTRLRCHPETQDYIARKRAEGKSTKDAIRCLKRHLTRRIWHLLQAPAPIPDETLTPSIS

SEQ ID NO: 233873 - protein, 407 aa, unidentified
MQGSVITLDVSKGSCHYQGFIKKNQPSTKTRILKFTKKSFAELSAYRERLAIKAGQEDIPFIFEATGVYHKPLQKYLDDHGFTYYIISPLMSARYRKLELHSNKTDPLDCANIAKVFYEYDKLRVYQRMDKEYESLRDMNRNYEDMLVHLRKYKVRFKSMLDVIFPYYQKCFKNDGIYADLPLILLKEYKHPDIIHQTSEDIMVKKLSKLCPKHQTGYIRNKVQKVKELAEDVYSGCESTDIYVELFTELIETLQKQMKECDEQLIKIIETAAKSPYFDLIRSVAGIGDNLAARILAEIGDINQFDTRNKLISYAGLDPMIRQSGKKDGIHLSVSKKGNRYLRCLLYQAASANYRLKKNDVIYRFNQKKRQQSNPLNSKAANTATAHKILVIVYGMCKNGTYYNPCE

SEQ ID NO: 233874 - protein, 347 aa, unidentified
MDRNGKPVLRRRLNRPQLAALAASIPICRVAMESCPGSQYWGRRFAEHGHEIRIIPAQFVKPFVKSNKNDYNDAEAIAEAGSRDTMRSVPLKNPEQLDLQVTHRVRQRLIVERSAVVNQIRALLLENGIAIPLGRALFAKRLPDILEDAENELSARARALLARLRTRWLALDVEIEEVTRLLTDHAGASELCRRAITVPGVGPIVSTALIAAVGNARAFNRGRDLASRATAILHGGRTTLGRISKRGNAYLRQLFIQGAQALYTHMKRERSRMGQWLRNLECRAHRHVVVVALANKIVRICWKVLTSGPRLQAVPHRGIGSWHENILSCFARSDRRMAQPFTGASKT

SEQ ID NO: 233875 - protein, 340 aa, unidentified
MQYIGLDVHKDNITVCGLSPAGKPKFEVDLKRTDQEWSVLGNYIRGMNGNDLCFMMESGTYAYLPYRIITDMGYEAHVVHAQSLKMITDTDKKTDKKDAFTIARMLRLWKKGDLELKMSYIPTREQCELKDLCRYREEISKKISDETRRIKSHMARNCQILPNGCDNFQTIKARKYVTDNYPSDFTLMQRMRSLNDMFVERDRVKKEVESRMTDSKDVELLSQIPGIGDQTAVQIMSMIIDVSRFPDAEKLCAYFGMVPRVRDSGGKQHHGGLSKNGDRMMRAIMERVTESHIRNCDSSITRYYNRIQPRMGTKKALITASVKMLEVIYAVLKRGTPFRP

SEQ ID NO: 233876 - protein, 421 aa, unidentified
MFDWSAFTHFAGLDWAKDHHNIVVVDRQGRVVLDLCIDDTTQGWAGLREKVRGLDRVAFTIETSSGPVVERLLEAGWGVFPVNPAAAAAFRTRKAPSGVKSDRLDAWCLADALRSDGQAWRALKPEDPLTQELRLVCRDEIGLIEQRTALINALRAALREYYPAALEAFDDWTTRGSWAFVERFPTPEELQRKGKRAWEKFLHSHRMAHPDRYAKRLEIFARAMQFHGLAAVTSAKSRLALALCAQLRTLEAQLEAYRARIEELFATHPDAGVFASLPGAGDKLAPRLLAELGDDRERFDSAQAVQCLAGTAPVSWISGQMHLVKHRLACNKILKATVHLWANLTRDQCAWAEAYYQQKRRQGQSHACAIRCLGQRWLKILFRMWKESKPYDEALHTRNQVRHGSWVLEHIADAPPRTSDH

SEQ ID NO: 233877 - protein, 409 aa, unidentified
MDQLIERCCGLDVHRDTIAACVRVPGPNGKRQHEVRTFGTTAVELLALRDWLEAHAVTHIAMESTGVYWKPVFYVLEEAFTCLLVNAAHIKQVPGRKTDVKDCMWIAQCLEHGLLRGSFVPPAPIRELRDLTRHRKVLIQERTRAANRLHKLLEDAGIKLASVATNILGVSGRAMLEALVHGTTDPAVLADLARGKLRKKLPALRQALAGRFRPHHAFLVGQLLAHVDYLDEAITTMSEEVEGRLAPFAAQLTQLDTIPGINTRTAEVIIAELGVDMSCFPSDRHLASWAGICPGNNESAGKHQSGKTRKGNRWLRMTLIEAAGAAIRTKDSALGARYRRVMRHRGHKKAVVAVAHAMLRAVYHLLAEGTTYREPGSDYYDRHHTHRVTRRAIQLLERQGYRVVLEPAA

SEQ ID NO: 233878 - protein, 320 aa, unidentified
MLSFCGIDVSKDRLDVMVLPDEYSSSVPNDPAGWAILVEQLRGFSITAIGIEASGGYERGAVRSLQAAGMPVRQVNPFKLRQFAKASGVLAKNDPLDARMIASFVGIMPTRPAQRTTPAAEQLVEMLAVRRQLSAEKTAAENASRLLEDLMLQRLSRRRIARLAADIELLDKRLVEIVATDATLAHRYRLLTSMPGVGPVLACTLIALLPELGGMSRKQVAALVGVAPYAFESGALKGRRCIWGGRANVRQVLYMAAMSASNWNPVLKLFHDRLKGAGKLPKVVIVAVMRKMITTLNAMVRDDIAWADRLSGRHSVTTAR

SEQ ID NO: 233879 - protein, 372 aa, unidentified
MGNGITFVGLDAHKKGISVAMLVPGEMIPVQWEIVNEAGAVKRMVRKIEREAAGEVRFCYEAGSLGYALQRQITEAGSERVSCMVVAPSLIPRKPGERIKTDRRDARKLAELFRAGLLTEVQPPSEEDESVRDLCRGREDGKEDLTRCRHRLGKMLLRRGLIYTEGNAWTSKHHLWLRGLRFENEPAQVVFDDYLLAIEQLEERVKGLDEKIVGVSQKAPYAEPVGHLRCFRGIDTVTAMTIVSELHGFERFRSPRGLMAFLGLVPSEHTSGYDPRRGSITKMGNGHVRRALIETAWHYRHRPALGAPLRKRRKGQPAQVIALADKAQQRLCRRYHRLTERGMPAPKAVTAVARELTGFIWAVLSRDAHASV

SEQ ID NO: 233880 - protein, 319 aa, unidentified
MVVGIDVAKAELVVSILPTGERFTVANDERGLRTLVERLRSVTPTLIVLEATGGYELLAVAALAAASLPVVVVNPRQVRDFAKATGQLAKTDRIDADVLARFADVVRPAVRPIADEAAQELEALLTRRRQLLEMLQAERNRTGQVFGKGKRLVKKSLKAHISYLERELRMTDTDLGAMIKASPVWRERDELLRTVPGVGPVLSRTLLADLPELGRLSRREIAKLVGVAPLSRDSGTMRGRRFVQGGRATVRAVLYMAALVATKRNAVIRTFYRRLLAAGKPKKLALVACMRKLLTILNVMVRTAQPWTVNAAAGALVST

SEQ ID NO: 233881 - protein, 377 aa, unidentified
MNAPGAAQGKHTGETSALYMAFELGEENWKLAMSDGMRGPSRYTLHAGDTTGLLECVAKAKARCGLTSEVRVHSCYEAGRDGFWLHRWLIEQGIDNVVVDSASIEVNRRARRVKTDRLDAEKLLAMLIRYAAGERRVWSVVRVPTAGQEDARRVHRELGQLGHERTGHINRIRALLVLDNVRVKYVGGRLWQRWWNDHAGELRPAVRAQIEREIERLSLVQAQMRTIEAEQRKAVDSDNEPQVARLMQLRGIGMSSGWVLVKELFGWRGFRNRREVAGCLGLTPSPYASGQSETEQGISKAGNRRVRTLMVELAWSWLRYQPDSALSKWFTRRFGGGGARMRRIGIVALARRLAIALWRYLEDGLIPEGAQFKPIGG

SEQ ID NO: 233882 - protein, 469 aa, unidentified
MTPRKGKRFRTSERSEPAASFTLQHGHAAGVDVHSDNHFVAVPPDNVPAGFVNPDAQLPPAVRKFGANTGDLEALAAWLKDCHVTRVAMESTGVYWIPLFDLLAGQGFDVILVDPRQTKHAPGRPKSDVLDCQWIQRLHSYGLLTASFRPSDEIVVWRGHQRQREMLIRYAGQHILHMQKALEEMNVKLTEVVSDVTGATGMKIIKDIIRGVRDPHKLAKHRHECCAATEAEIASALYGNWRKEHLLALKQAVALYEFYHRQLRECDVEIEACLRGFADKSAGRVLTAKPQVRKRRMNEPTFNARALLFRMAGVDLTVIEGISEPTALVILSEIGTDMSRFATEKHFVSWLGLCPQHRSSNRRIMSRRVRKGANRAARAFRMAGQGCHHAKNALGAFYRRIQARCGGPKAVVATARKIAERVYRLLKYGEAYVRQAEAAYEEQYRLRTLKGMARKAATLGYKLVPVASE

SEQ ID NO: 233883 - protein, 319 aa, unidentified
MTQNDLVVVGIDIAKEKVDACIRKVSLRETFPNTAQGHRKLVAWLRKYQVGKAVMEASGGYERTWRDLIHKAGIEVRIVDPRRVRSFAQSAGRLAKNDPIDAEMIAWFAETFSQAPGQVPDATREELAALVKARKALVDLKTRLQAQDEHAAPKPARKAFARVLKSIVAEVDELEITISAKVKATPEFAERAEIIESVPGLARTTSAALIAGIAELGQVSDEVAGALIGAAPYDDDSGKRRGERHIKGGRRWVRNAIYIPVLGAATRHNPVLKAYYQRLIAKGKPKKVALIACMRKLIVILNTMLARGERWDPSRYVPR

SEQ ID NO: 233884 - protein, 409 aa, unidentified
MRYYVGVDWADQTHAVWVVDERGTKITARTVPHTAAGFSEWGRELDEWRAQGIERWAAIERPDGRVVDFLLDHGVAVYPVNPKALDRARDRFRQSGAKSDPFDARVLADFLRTDHAHLQALQPSSDPAQELKLLTEDCQRHIRQQTRLVNQLTATLKAYYPRALEVAELTTALAREFLQAYPTPEALTALTQRQWQRWARGRRLSEARIGALWAVLQQPQLPVPAHVVRAKARLMQSLVEQLTPVVAAIAQYRTVIDDFFARMPAAQWARTLPIGKRGITAPTLRARLGDAPGRWESFRHLQAQAGAVPVTKRSGKQRVIHFRFACDKSLRHVVDQVAFLSLLSSDWARAYYDRQRARGHSHYQALRALGAKWLKIIFVMWHRHVPYDEQYHLATMTRQHLQQRQKTIA

SEQ ID NO: 233885 - protein, 422 aa, unidentified
MLEETKDTEEIVERVAALDVGKAGVVCCTRVPREGTPGRRMQEVATYSTMTRSLLGLSDRLRDLGVTRVVMEATSDYWRPAFYLLEAAGLEVWLVNARDVKHLPGRPKTDKLDAVWLAKVAERQMLRPSFVPPREIRALRDLTRYRTDLVNARTSEKQRVEKLLEDAQIKLSAVASDIFGRSGRDMLAALIAGERDPKVLAQYARQRLRAKLTELEEAFTGHFSAHHAGLLTQMLGRIDAINADMAALDVRIGQEVAPYAAAIAQLSQIPGISPIAAHVIIAEIGLDMSRFPTAAHLASWAKFAPGVKESAGRKKGRGTTGHGNSYLARVLGNCATAAGKTDTFLGERYRRIARRRGKRKALVAVGRSLLVVIWHLLSAPDTQFHDLGSDYYETRIDPERRKRNHLRQLEALGFKVTLEATA

SEQ ID NO: 233886 - protein, 320 aa, unidentified
MTYIGIDVSKDSFVAAYPAKSGYTTKTFKNTSSGVHQFIQSLPAECHCIMEATGNYSMLLLYLLQQANITVSMENPQKIKHFARAMLSTTKTDEIDAKLIAMYGEKMEPAPYKIPSESIIQLKQKRTVLRQLKKQLTMMINLQHSLSVLPKQDPTAKVATEQTIKFLRKQISKLEDEITHLSNKEFKRQMELLTSIKGIGENIASALIMATGGFTYFSSAKQISRFLGLCPTYQQSGTSVNFKGHINRNGDTHLRSQLYIVAVASIKCNAACRDTFVRLRERGKSGKAAIIAVANKLIRIAFAVVTNNRPYLDGYASTLA

SEQ ID NO: 233887 - protein, 417 aa, unidentified
MAMKIVRFNCCGMDVHKNLVVATIGITDRKTNITEYFQRSFSTLNSDLYRLKDWLKSHHCSDVCMESTGKYWIPIFNILEDEINVHLTHPKYVKAIKGKKTDKKDSKWICDLFKHDLIKFSFIPPKEIRELREIARYRYKLVCMRSSERNRYQNCMTVSNVGLASVVSDPFGKTASNIMKEVMKSNVIDDDKILKLVHKNCKNKDKILDSLHGYRIESDQRFKMEKSLDHMEYLDQLIDSCEVELIKRAYPFRRSFQHITQIKGISALSAILIISEIGIDMSQFGSDKQLVSWAGLSPANNESAGKKKSVRISKAGQYLKPLLVQCALSAIKDKASYFGRKYSNIKKRRGHKKAIIAIARMMLVSIYHMILTGEEFQPCDYESFMDPKPNANPSLTVEKALNFLKQSGIDISSILVN

SEQ ID NO: 233888 - protein, 315 aa, unidentified
MEQSPSSPSFVGIDVSKDRLDVHVRPSGQTFAVARDAKGLEQVTNELRGLTPALIVLEATGGFEITVAAALAGASLPLAVVNPRQIRDFARATGRLAKTDALDAQIIALFAERIRPEPRPIADADSQALAELIARRRQVVEMIGMETNRSRQARNPRVQRTIKATLKILEAQLAELDREINDTVRGSPIWRAADDLLTSVPGVGDVTSRTLIADLPELGQLDRRRIAALVGVAPVNRDSGQMRGRRTIAGGRTDVRSALYMATLSATRWNPIISQHYKSLVERGRPKKVALVACMRRLLGILNAILRTKTPWQIA

SEQ ID NO: 233889 - protein, 387 aa, unidentified
MPQPNDLGRSLAALDQDSTLIAVIEMSQSIWLVAGIVPGINRQPLKKLGADETALLQLLYRWRDEATKAGRTIDRIAVAYEAGRDGFWLARWLRARGIEAHVIHPTSVAVSREHRRAKTDRLDTELLKRAFLGWLRGESRHCSMAKIPTPEEEDAKRPNRERENLVGERTRIVNRMKSTLARLGLRGFKPTLRQAAERLDRLRTAEGVPLPPNTLAELRRDMARLRFVMDQIREIEAARLVRLEQHPEQASHAMVRLLARVIGIGIETADMLVHEILSRNLRDRKAVARYAGLTGSPDESGARRREKGLARAGNARVRRGMIQLAWRFLMFQKNSALAQWYRRQTTDSRGTTRKTMIVALARKLLVALWRLVTTGEVPEGVVLRRVA

SEQ ID NO: 233890 - protein, 396 aa, unidentified
MERAFAGVDVGKESHWVVAVGEEGEELLSRRVENTQEDLLGVMAEVGALAEHVRWALDLTFGPAALVLALLVAKDQEVFYVPGLVVNRSRGALVGEGKTDRRDALVIAENARLRRNLARYEPSEETIASLRLLVGHRQDLVADRTRLINRLREVLVGVFPGLEHTLDLRTQGAPKLLLRYQTPLKIRRAGLRRLTDYLKSQGVWKAEELAERALRAAQAQTVHLPAEDLGARLACELTGELVRLNERMRRLDEELEACFFSHAQAKILVSLPGMGPRLGAEFLVAVGSLSAFASADKLAAYAGLAPVSSDSGKVQGRLRRPQGGNRSLKRVFYQSAFASLKSPASRAFYDRKRSEGKKHHQALLALARRRVNVLWAMLRDGTLFDQQVAITEVAVA

SEQ ID NO: 233891 - protein, 347 aa, unidentified
MSFIGVDLHQNSFTVCRRSSDGTESFETLSLSASDMERFCLSLDGDDELAIEATGNSAWFRDQVLPCVGRVVVVNPSQFKVIRKSVKKTDRNDAAALALFLAKDMLPETRVKSQDESELASLTQTRDLLVKQRTRLLNKIHALHVRKGLKLRKESLGSKRGLAAIDLGLFSVCEAIEIGVLREQALSLSASLARLDREIETIAVTFEGYESLISIKGIGPRSAAVLLSSIGNVHDFESADKLAAYFGIVPRVSQSNETDSRGRITKRGNKLARTTLVQCGLIAMRYSPYLKQFHQRIRGRRGSGKAIIATARKLLSIIYDTLKNRWVFDDFTRFLRRDEKIPAGQSS

SEQ ID NO: 233892 - protein, 370 aa, unidentified
MPKYSTAFGMDVHLRSTTVCALDAETGEAVTRRFPGNPWGEIAGWMDGFPGPSLAAYESGYLGFAPQRELAGLGVECVVAAVSKIPRSAADSASKNDRNDAARMAKAILAHDISSVWVPSPEVEGIRDLAGAYDGATARLATAKQRLLAFLAKRGFVYGGTTPAGNPRKYWTYDFLRWLDKVRPEDDGGVRTLAALRNEVEAAAEARADLLSEYRAAVDASSIAAEVAALQSIKGCAFALAAAFSAEVGDFTRFRSGRQVTAYFGLAPSQRSSGDSVRLGGISGAGNALVRKLAVEGSWCYAAARHQPKLMPRDTGVPLEIRMHGRKGSERLLRRREEMLARGMPAAKANAAELVRWLWALGMMCREGAE

SEQ ID NO: 233893 - protein, 366 aa, unidentified
MHVHFGWQFGNPSEKGKVMDRITRIGVDLAKNLIVVHGVDSMERVAVRKAIPRQKFLEWFANLEPCLVAMEACSAAHYWGRKLRALGHEVRLIAPQFAAAYRKGGKHVKNDRLDAEAICEAASRPHMRFVALKTADQQNVLVLHRMRSGFVEERTALVNRLRGELFEFGVFLPQGIDAFRDHFVEALEAGTTELDGIARTALLAGWHHIHALDEQIAWCDSQIAARVKHDTNAQRLMAIVGIGPLTASAAVATVGDARVFRNGRQFSAWLGSVPKQASSGGKTRLGHITKQGNTYLRTLLFQGARSALTSAHRRTDRLSRWIVQLHARVGWYRTLVAIVNKHARILWAILAKGERFDPCYTPIRPS

SEQ ID NO: 233894 - protein, 366 aa, unidentified
MKKNNKRTEHVEGMPAKAWGEKHKVTVGLDLGDRYSYYCMINEDGEVFEEGRIRTNEEGLQRQFQENGGWRIAMEAGVHSPWVSRKLGAWGHQVIVANPRQIPALTETDSRNDRNDAENLARFAYCDPRLLKPIEHRSVERQRDLNLLKVRDTLVRARTMMINSLRGLVKSEGRRLPSCDADYFASRVELFIPAGLREVSRPMLAQIQQVTQHIQDLEKQIKKLGDGYPEIGLLQTAQGVGPIIAAAYVLTLDRPEAFPRSRQAGAFLGLRPRQKQSGNADVQCRISKRGNQFLRRLLVQGAQSILGPKSGDSALRRWGLKLAGSGGKRGKKRAVVAVARKLAVILHSMWKNNQKFRPFPKTAVAA

SEQ ID NO: 233895 - protein, 345 aa, unidentified
MPIVGGLDIHRKQLTFDYLDTATGEVKRGQIAPADRAHLRAWLARFAGRDDVAFALEGCTGWRYVAEELAAAGVAAHVAEPADTAFARGRKRHAKTDKTDSRHLRELLAEGRLPECWIPPSRILECRALLETYHALRAEHTAWVQRIHAVFFHQGAPALGEAALRTGRDLQAVRAAAAAHLSPAGQLQVDTALAVLDALEARLDVVRHRLLDAARGLTGARVLAERLYGVGPVTALAMTCWLGGAGRFSSSRKAVRFAGLDITVYSSDGKRSPGRLSRQGPPVLRWAVYEAGKTHARAPAPDHRYYAQVKDRQDGKRAALSEARKLLRQACHILAELGDDALSAA

SEQ ID NO: 233896 - protein, 344 aa, unidentified
MDHFAGLDVSVKQTSICIVDDTGRIVREAKVTSEPEALLAVLKNLAFHFKRIGLEAGPLSQWLYSALAEAGLPVICVETRHMRAVLKAQINKTDRNDARGIAQMMRVGLYRPVHVKTLRSQKLRMLLTHRKLLQSKAIAIDNDLRGTLRNFGLKVGMVGTVRFEARIRELVENLADLATLIEPLLIVRRTLREQFCIPHRRLLAIVRDDEVCRRLMTTPGVGPVVSLTYRATVDVPARFRKSKSVGAVFGLTCSKYQSGEVDWSGRISRCGDEMMRVMLYEAAQSMLRSKKWSWLKAWAMQIARRCGMKKAIVALARRLAVIMHRMWVDGTEFRWTREQAAAAA

SEQ ID NO: 233897 - protein, 373 aa, unidentified
MYVGFARFPVNGMVRRRSLEVVDCGARRHLMKIHALGIDLGKTVFHLVGLDASGQVVVRKRCSRTQLLAFTANLQVGLIGMEACSGAHFLGRALRAQGHEVRLMPAQYVKPYVHTNKSDYIDAEAIAEAVQRPRMRFVPIKTEEQLDLQALHRVRERWVMRRTAVVNQIRSLLLERGLTLPKGRSHLDKQLPLILEDGELNLSDSFRVLLAQLKLELEQLAARIAEMDRVIQKTARENEACQRLTEIPGVGPVTATALIAAVGNASAFEKGRKLSSWMGIVPGEYTTGGKQKLLGISKRGNKYLRRLFIQGARSVLQQRDKQAPGLSEWLAQLLARTHQNVVVVALANKMVRMAWAVLCKNERYRAPVLAITT

SEQ ID NO: 233898 - protein, 351 aa, unidentified
MKGMAVAIVESRVTGGVDTHLDVHVAAALDGIGGLLGVESFPTTAAGCEDLLEWVAGFGPIAVIGVEGTGSYGAGLGRYLQAAGVAVVEVDRSDRQDRRRQGKSDPLDAISAARAAQSGRARGEPKGRDGRVEAIRTLMVAKRSARGDRTATLNQMRALISTAPDDVRARFAHHSVARLVAVTAAMRPRPGDVVGYATRVTLRELGQRAAYLGDQIDRLNELIAPLVTARAPGLVALYGVGPDTAAILLIAAGDHPERLRNEAAWAHMCATAPIPASSGKVVRHRLNPAGDRQANHALWRIVITRMSSEPRTRAYVQRRTAEGLSKMEIIRCLKRYVARETYRHLQPPVAD

SEQ ID NO: 233899 - protein, 430 aa, unidentified
MPYNIAGIDVHKKMLAVVVSDVELDGQYQFERRMFGSNPEQLRSLAAWLVAQEVEEVVMESTAQYWKPVWEALERYWKPISEKREGAGRKCGTLHLAQAQSNRGRRGRKRDFPDAERLVKRLVARELTLSFVPDPEQRVWRTVTRRKYQLTRDHVRLQNQLESLLEEAHIKLSSLVSNLLGASARRMMKALADGETNPAALAALADKQLRATPEQLCDALGACTDLKPVYRRLLKMVLEQLQFLEEQIGKLDQEMATLLSQHQDAVKRLAEVPGLGVDSAQQIIAEVGPTAATFPSAKQLSSWVGICSGDEESAGVNYSHRSPNGNRHMRRVLNQSANAAARTKGSIFEIVYHRYVPRLGHNQTIGAIAHRQCRLIWLILHKAVRYEEHGPAVTTRSKQKRTARMIRQLRSLGYRIELPSSQHPTPTQRP

SEQ ID NO: 233900 - protein, 401 aa, unidentified
MRFYTKQHRYYCGIDLHARRMYICILDADGQIRVHRNGPATPEHLLATIAPYREDLAVAVECIFTWYWVADLCAREGLAFVLGHALYMKAIHGGKAKNDKIDAHKIAVLLRGGMLPMAYVYPRAMRATRDLLRRRCHFMRKRAELLTHIQNTATQYLLPPFGKKIAHKSNRTDVAEQFTAPEVRKSIETNVALLDHYDRLLTDLELYLARTAKVHDVHTFARLRSVPGIGQILALVLLYEIHDIRRFPSVQDFVSYCRLVKCGKESDGKHYGYSGAKIGNAHLKWAFSEAAVLCLRQNPPAQRFVAHLTQQHGKAKALTIFAHKLARAVYYMRRREQVFDATRFFAGTAATPDPPGRATLTPGAPRGQATTTTGAPRGSRIPRSTRRRHCPGVVPMTTTAE

SEQ ID NO: 233901 - protein, 408 aa, unidentified
MSVNGLPRECFDGGLIVAIDPGKAMHRVWVTDRAGMVGEPVSLPNSRIGIERLEALVGEASATFAVEATGALHRAWAAELERRRPGALRLFAPSQTHAARAQLGTRRFKTDDRDCAALVWLARQGAGRPARSSGVEAMLAAVSHRRQLVLALTPLRQRLHDQLNALAPGLSAPAGHGRALLLSTPTGHAVLACAAAFAGRPPSPQSLQARANGRLTAATAALWAGRWRQCLAPPPDAELRAARLARDLDRFQALRVDIAFVDGQLEHLLADSAGQILTTLPGVATARAAALAAYTLPIERFPTPEHLYSATGLAPASYESASVRRRSAIARTGLPEHRDALMGIAWGLGQFAPAFQRRRRELNQRGKTGIQARVALARHACRLCWRMLDTQQPYDDRRYDRARRDRGR

SEQ ID NO: 233902 - protein, 356 aa, unidentified
MLYLGIDQHARQITISLRDAAGDVVQAQQVSTQPEKITAFFQQLTRERLRKDESFVAVLEVCGFNDWLIRLLHDYRCHKVILIQPDDRKKRKTDRRDAAGLSELLWVNRARLLHGKPVRGLRQVDIASTTDQENRRLTTLRKDAGADLARVINKIKQILRRHNLHWEMPTKTFPTVAAIAWLKALVLPEIDQLEMRHLLLNLEQVQQRLKELEQVIAQRARASTEAAILSSMPGMGGGFTAMALACRVGRVERFPRAHSLANYWGLTPGCRNSGENDQRLGSITKAGSAMARWLLAQLVHKVLRRDARLREWFKRIKRRRGSSIARVAVMRKLATIIWHMLSKRLTYAECRARAAA

SEQ ID NO: 233903 - protein, 348 aa, unidentified
MNRKTIAIDLAKDVFELAINNGGVITRERLTRNRFLHYIAQLSPAHIVMEACGSAHHWARHLKARGHDVIMLPAQHVRPFRRGNKTDRADANALLQADRIGGIKPVPIKSVEQQNLQHLHRLREQWKTTRTARINALRGILREHGHAFPAATDTFLANAMETVETDPALAMLRPALHALQAEITFLEDQMADVEQQLRELTRHHPEIRAMQTISGVGLLTATATLAAVGTPAHFRNGRQFSAWLGITPREHSSGNRRSLGSITRRGNVYLRTLFIHGARSALLAAKRVARVKPDQLTRLQRWALDLEQRVGHNKAAVGLANKMARIAWAVWHHAREFDGNWQPEPLAA

SEQ ID NO: 233904 - protein, 389 aa, unidentified
MLQSNDLSRSLAALNQDSTLVVVIEMGQSSWLVRGTIPGVARQPLKKLAPDEAGLLKLLHRWRSEAIRTGREIERIVVAYEAGRDGFWLARWLRARNIEAFVIHPSSVAVSREHRRVKTDRLDTELLMRAFLGWLRGERRHCSMAAIPTIEEEDAKRPNREREKLVGERTRTVNRIKATLARLGICTLKPTLRNAEERLAGLRTREGVPLPENTQAELRRDMVRLRLVSAQIKEIEQDRLRELAAGAPAQKGPHAMIRLIARVLGIGIETADMLINEILSRHLRDSKAVARYAGLTGSPDESGRRRREKGLARAGNARVRRGMIQLAWRFLRFQKESGLAQWFRARTADGRGGTRKTMIVALARKLLIALWRLATTGEIPQGVSLRPAA

SEQ ID NO: 233905 - protein, 370 aa, unidentified
MGHHTEAFVGIDTSKLRNAIAIADAGRSGEVRYLGEFPATDAAIRKLVAKLVAQYRRLTFCYEAGPTGYGLYRLLKSLGHECHVVAPSLIPKRPGDRIKTNRRDAVSLAKLCRADELTAVWVPDERHEAMRDLSRARQAAKKDLQGKRQQISSLMLRLGRIYPGKKTWGPAHMRWLTEQKLDHREQRIAFEELLEGTRQESERVERLEKAIREAVPDWSLAEVVTALQAMRGIDLIAAVGVLAEIGDLSRFQNPRELMGYLGLVPSESSTGDKVKRGGITKAGNGRARRMLTEAAWSYRYPPRVSRDKQPRVAAAPRRVREIAWKAQTRLCGRFRSLERKGKRRTVVATAIARELSAFIWAINRELMSGV

SEQ ID NO: 233906 - protein, 341 aa, unidentified
MDLLKTVFGIDVSSRKSNVCIMVNGQKVNDYAISNDMVGFNRLLGDLKQVTKPQIIFEATGVYSRRLQAFLDMHELRYVMMNPLEAKRKTKDDLHQNKTDKLDALYLAKLQSEHPQRLAYVQNKEYQELMANNRIYEQASHDLITNRNRLHKAIQLTFPEIEHLMVNPRGKNYWSIVLRFPHPDIVLETKEADIIDFLKGLTGIGKKRANDITQSLIRLAKVACPAVKKNSAHIRGLKMAINNILSAEEECQTALQEMAKLAPKRDLEILTSILGIGENTALRIISELGDIRRFNNPSQLNAFVGVDPQVYESGNLTAHLSISKRGAAIGRKVLHKPNSVG

SEQ ID NO: 233907 - protein, 367 aa, unidentified
MKKVSTAATKQSRNISQQRLTIGLDLGDRNSCYCVLDEAGRIQLEQRVRTTAKALQEVFGAMPRSRVALEIGTHSPWISRLLSKLGHEVIVANARKVRLIGENRKKDDRLDAQTLARLARIDPQLLCPVKHRSAQAQADLMMIRARASLVRVRTGLVNAARGLAKSYGERLLGGNVRNMNPEKAEGLSPELQRALEPLLSAIEEVSERICEYNDRIEALAQTSYPQVELLKQIKGVGTLIALTFLLTLEDPHRFRKSRDVGCYLGLQPGRRQSGKSDPQMHITKEGDPYLRTLLVQGAQHILGPFGIDCDLRRWGLKLAERGGRNGKKRAIVATARKLAVLLHHLWVSGEVYKPLHHSSPTTVAAAA

SEQ ID NO: 233908 - protein, 402 aa, unidentified
MNCVGIDVSKGKSMIAVMRPFGEVVVSPFEVRHTANELSELAGLLKSLDGETRVVMESTGNYPAPVAWLLHGAGLYVSVVNAMLVHDYGNNSLRRGKTDKKDAVKLANYGLDHWLTLPRYVPEEDTRLMLKTCYRQYQQYSKVQTMLKNNLISLLDTAFPDANRLFTSPPRTDGSEKWVDFVATFWHCECVCGLSKKAFTAKYQKWCRKHGYNFSQDKALDIYASACGRFGVMPKTNTAKLLVEQAISQLQTTSAALAALKQEMQSLAASLPEYPVVMGMFGVGPTLGPQLIAEIGDVRRFHSKKALVVFAGIDAPPYQSGQIDVRSRSISKRGSASLRRTLFLVMGVLLQCAPMDEPVYQFMNKKRSEGKPYRVYMMASANKFLRIYYASVKAYLDSLEHD

SEQ ID NO: 233909 - protein, 363 aa, unidentified
MFTERTSIGLDVHARSVVAAAIDGVTGQVSQTRLTPSYEHIQEWIKQLPGPVAVADEAGPTGFGLYRALTGAGIRCEVLAPSKLQKPAGDRVKTDARDALHLARLLRLDEVTSVSIPSVNREACRDLVRAREDCRGDLMRARHRLSKLLLRHGIVYHGGAAWTDAHDRWLRARAVPQLLTPATRMAFDSDYEHVLMLQARRQCLDSAIEDIAADSEFTAVVRRLSCLRGVGTLTAFALAVEIGDWDRFTGNTIGSFVGLVPSESSSGSTRAQGPITKTGNTHVRRLLVEAAWHHRPKYQVRAVMRSRWELAPAAARARGHEGNRRLHNRWLGFLARRKRSTVANVAIARELAGWCWSLAVMDD

SEQ ID NO: 233910 - protein, 344 aa, unidentified
MDHFAGLDVSVKETSICIVDDTGGIVREVKVASEPDALLAVLKSQSYHFKRIGLESGPLSQWLFSALAEAGLPAICVETRHMRAVLQAQINKTDRNDARGIARMMRAGLYRSVHVKTLRSQKLRMLLTHRKLLQSKAIAIENDLRGTLRNFGLKVGMVGKLKFEARIKELVENLPDLTVLVEPLLIVRRVLREQTAVLHRRLLAIVRDDEVCRRLMTVPGVGPVVALTYRATVDVPARFKNSKAVGAVFGLTPSRYQSGEIDRTGGISKCGDEMMRVMLYEAAQILLVRSAKWSWLKAWAMQIAKRRGMKKAIVALARRLAAIMHRIWVDGTEFRWSRQEAAAA

SEQ ID NO: 233911 - protein, 386 aa, unidentified
MQTLNDFSRSRIALEPNGTLIAVIEMSVSSWLVAGILPGVERQPLKKLAVDESALLKLLQRWREEAEKAGRRIERIAVAFEAGRDGFWLARWLKARSIEAHVIHAASVAVSREHRRAKTDRLDTALLKRAFLGWLRGERDHCKMVAIPTIKDEDAKRPNRERENLVSEQSRIINRMKATLIRLGIRGFNPKLKRAAGRLEDLRTPGGEPIPPNTLAELRRDMERRRLVRDQIRQIEEARLERFDHAPGDGSHPMVRLLARVIGVGIETADMLVHEVLSRNMRDRRAVARYAGLTGSPDESGRKRREKGLARSGNGRVRHGMIQLAWRFLLHQKDSALAQWFRARTENARGSRKRMIVALARKLLIALWRLVRQGVVPDGVVLRPAQ

SEQ ID NO: 233912 - protein, 359 aa, unidentified
MLVERTCVGLDVHARSVAAAAIDGVTGELSQARLTPSHDHIRSWIEQFDGPVAVVYEAGPTGFGLYRALNPVGVRCVVAAPSKLQRPPGDRVKTDAKDAVHLARLLRLGEITAVTVPTVDQEAARDLVRARDDCRGDLMRARHRLSKLLLRHGFVYSGGQAWTGVHDQWLRRQRFDHRATTMAFESGYEAVTAITARRGRLDKVIAVLAAGSEFTPIVHRLGCVRGIATLTAFALAVEIGDWNRFTGSSIASFVGLVPSEHSSGASRVQGSITKTGNTHVRRLLVEAAWQHRPAYRPGKVMRDRWDLADPAARARGDAGNRRLHQRWVQFNLRRKRPVIANIAIARELAGWCWSLAVMG

SEQ ID NO: 233913 - protein, 346 aa, unidentified
MRYYTKQHKFYCGIDLHTNKMYLCIINREGDIVLHRNMRTKPDIFLRAIKPFREDLVVAAECMFAWYWLADLCEDEGIPFILGHALYMRAIHGGKSKNDKIDSHKIAALLKGGLIPQAYVYPRKKRATRDLMRRRNHFMRKRAELLAHTQNTASQYNMDPLGRIAKPLNREGLVERFDSPCVQMSIAANLDMVEAYDRVIAVLEQDIIQSAKAHDPGAYALLKTIPGVGRIIALNLLYEIENIDRFPRVQNFASYSRLVKCAKESNGKRYGTAGKKIGNAHLRWAFSEAAQLFLKGNEPARKYMEKIVSKHGKGKALSILAHKLGRAVYFMLKNREGFELNRFLAT

SEQ ID NO: 233914 - protein, 345 aa, unidentified
MMMTIGGDAHKRTHTFVAVDSTGRKVAEHTFSATTDGHLEALTWAAQWPDRQWALEDCRQVTRRLERDLLGAGERVLRVPTQLMAGARKSARTPGKSDPIDALSVARAALREPDLPVAQLAGPERHVKLLVDHREDLVAERVRTQCRLHWHLHELMPEHKIGLRTLNRFCVLDDLRSRIEHLDGPVAAISRELIARVRDVTVRINALHREITQLVAELAPTLLALEGCGPMSAAKIVAEVAGVDRFRSRSAFARWNGTAPIPVWSANERFRLNRGGNRQVNAAIHRIAITQWRGPSRGHDYVQARIDRGTTKRCAIRSLKRRISDEVFARLHVDLARRPAVAFAA

SEQ ID NO: 233915 - protein, 416 aa, unidentified
MDVIVARCAGLDVHKNTVVACVRTPGPDGARVSTVRRFRTFTAALGQLRDWLVAEGVTQAAMEATGVYWKPVWHVLEGAPGLEVLLANAHAVKNMPGRKTDVADAQWLAQLCECGLIRPSFVPPPEQARLRDLTRYRKKLIEERTRETQRIQKLLEDAGIKLDSVVSDILGVSARRMLEALIEGVRDVDALAGLAHTSMRAKIPQLRRAVEGRFGAHHALMLGMHLQHVDQLSDAILRLDEEVDRVIRPFQTALRHLITIPGVGRRTAEVIIAEAGVEMHRFPTAGHLASWAGMCPGNHESGGKRRSGRARKGNRALRAALCEAAWSASHAKSGYLGAQYRHLLRTFGKDGQTRAVFAVGHSILVITWHLLANDCDYQDLGAEHFTRREDPEARQRWLIRQLEALGNTVTVEPNAA

SEQ ID NO: 233916 - protein, 343 aa, unidentified
MKHIGFDIHSAITHISVFSERGQEILYTKIPTREADLVAFMMSVSGPKRVALEESQMADFVTRAIEPHATKVIRCLPQHNRLISESEQKYDRADARALAELLFLNKLKEVHHAPWAYRQLREGVRAYWTASQDLSRNKSQLKAFLLFNGIHCTGEKVYSSRHRSTFKKQAEKRSLNMSILEQHYRNLDFCRNRKAAHINILKELVHSFQQDDRNLKTYPGVGVIGSATFIAYLENGWRLKNKRKLWQYCGVGVRRHESAGKGRRKASRRGNRYLKNVVMTAAATIASRRIDDNALTKIWRAGITAGISGTRMKRNIARKVVVLVQRSLRFKEGYRDDRVMTTH

SEQ ID NO: 233917 - protein, 403 aa, unidentified
MPVTNAGKKKVVDSPPGAFASGTSARSVAQSTVEAQGESTMRTVALDWGRRISFCEVKGGEVTHRATTDSLEALVGLLGPETPPAKVAIEACREAWHVAKRLREWGHVPILVDTTRVRQLGVGQHKRKNDRIDAEALARALAENRLPKAHELSEHRQRLRRAVNGRALLIEMKSKVIIAIRGEARTMGQALGSCNADDFSENLEKWQLSAEFKAQVAPLRLVLTTVESALLAADEQLAKVSVEEPATSLLQSAPGVGPIVAASFVSVIDDPKRFKTAHQVEAYIGLVPSENTSIKRRLGSITKQGNSYLRAVLVQAAWTIARSRASSPLKSWAKKVETRRGKRVAVVALARRLAGVLWAMWRDNKSFAASRLCPTLEKRDGPAERVDAVGLALSVLSQQGAIS

SEQ ID NO: 233918 - protein, 337 aa, unidentified
MSVYVGIDVHRKRSQVAVVTEDGQVQLNKNVVNGSEPFLRLIGDLPAGTPVAFEAAFGWGWLIELLEDYGFEAHLVHPLRCKAIASARLKNDKVDAAILAQLLRADLLPEAWIAPAKVRQLRALLRHRISLVRLGTQLRNRIHAVAADHGYDRSASYWTGPGRGWLAELDLPAASREIVTDCLAVIDGLAPVIERLDGELHAHAKADPRVKGLRTLPGVGEFTALVMLAEIGDVTRFPSARKLASWAGLTPTVRGSDLKVRHGHISKQGSAWLRWAMNQAAQTAKRSPEFAATYSAIAKRRGKKIATIAIARKLLTRAWHLLSEMQAADAATPPRRP

SEQ ID NO: 233919 - protein, 387 aa, unidentified
MPLAADLPAQTQPVPRPAQVLYVSLELSPSKWLVTSLLSGTGRMSKHLVIGGDGNALLRLLAALRTRAEQRAGAPVVIVAIQEAGLDGFSVHRLLEANSVESWVVDPASVAVPRRMRRAKSDAIDGETLLRTLLAFRRGEPRVCSMVHPPSVEEEDRRRITRERRTLLRERIEHTNRIKGLLMSQGVTGYDPLGKDRWARLESLETRDGHALPPRLKAEIGREIERLELLARQIRQVEAERDALAATVPEVAASPAALLLRLKGVGPEAATLLWLEGLFRTFANRRQLAAYAGLAPTPWLSGRIRREQGISKAGNPRLRTAMIELAWLWLRHQPESALSRWFGERVRAGGGRNRRTTIVALARKLLVALWRYLVHGQVPDGAVLKPS

SEQ ID NO: 233920 - protein, 312 aa, unidentified
MDTACIGIDVSKATLDVYVLSSKEHIRVPNNVEGFKKIVSRIKAIKPSKVVMEATGGYEALCAAHLVAYGIPLAVVNPRQVRDFARAVGILAKTDTIDAQVLAQFARAVDPPCRPLPSSDERQLKELLKRRSQLIDMRIRESNRLGTMRTQRATNSIELVLNTINEEIARIDDDIYQLIQGSPVWQQKVELYKSVPSIGDGTAYMLIANLPELGTINRREIASLVGLAPMNRDSGILRGRRMVCGGRPWVRRALYMPTINAVRFNPLVRKMYDRLIQSGKPHKVAITACMRKLLTILNAIARDNTPWAYKIT

SEQ ID NO: 233921 - protein, 360 aa, unidentified
MKQQTIQYLAFDVHQATVVGVARDERGSIVLRATIPTEARAILQLVKSAGPRVHVAFEEGTQAQWLHDLVVPHAEKVIVCNTRGRDESGNKNDRLDAEGLSERLRLGSLKPVFHGVTSVLTLKELVRSYNNLVEDATRVMQRIKALYRARAIPTKGTAVYRALERKQWLAKLEGGSRVRAAVLFSHLDVLLRLRPPAKAAMLAEARRQPGWKVLRSIPYLGPIRVAEILAIVRTPFRFRTKRNLWPYVGLAVVTRSSADQEFVDGRLRKRRASAADPWSEPQSQPDAQVGVQGRCERGNGQPRPSPGLLPSLSRSRCEGGAGEGHARPQDRLRRSTSVEERRTLGSEEADDASDITARMS

SEQ ID NO: 233922 - protein, 274 aa, unidentified
MTLPRDVLGVDVAKGWIDVFSLATGARRHVSVTGGALARFARTAAGALVVFEASGGCERPLAAALAQAGVPFARVNPRQARDFARATGRLAKTDRVDAEVLARMGRALDLAPTPPEEPDRARLADLLARRDDLVGMIQAEKNRASTARDPWIARGIARVLRVLERHLAALGAEIDGLVAACEPLADEARRLRSAPGVGPLVSATLVARLPELGRLDRRRIAALAGLAPHACDSGLSRGSRHVWGGRAEVRRALYLAAFVASRCDPRFRAFRHRL

SEQ ID NO: 233923 - protein, 343 aa, unidentified
MKIHALGIDLGKTVFHLVGLDASGQVVVRKRCSRPQLLAFTANLQVGLIGMEACSGAHFLGRALRTQGQEVRLMPAQYVKPYVKTNKSDYIDAEAIAEAVQRPRMRFVPIKTEEQLDLQALHRVRERWVMRRTAVVNQIRSLLLERGLTLPKGRRHLDEQLPRILEDGELNLSDSFRVLLAQLKLELEQLAARIEPMDAVIQKTARENEACQRLTEIPGVGPVTATALIGAVGNASAFGKGRNLSAWMGIVPREYTTGGKQKLLGISKRGNKYLRRLFIQGARSVLQQRHKQAPGLSEWLAQLLARTHQNVVVVALANKLVPMAWAVLCKNGRYRAPVLAVTT

SEQ ID NO: 233924 - protein, 403 aa, unidentified
MNNVAGIDVSKGKSMVSVLRPFGEVVAKPFSIGHTGSELKELADYLKSLDGETRVVMEHTGRYYEPVARFLHEEGVFVSAVNPKLIKDYGNNTLRKVKTDKADARKIARYGLDNWAELRQHTPMDTIRMQLKTLNRQQSLYAKTKTMMKNNLIALLDQTYPGVNALFDSPVREDGSQKWVDFATAFWHVDCVRNMSLTAFAERYRKWCKRHGYNFSQSKAVEVHAGAQDLIAMLPKDALTKTMVRQAIDALNAVSASLERLKAEMCTLAAQLPEYPVVMAMHGVGDSLGPQLMAELGDVTRFTHRNAITAFAGVDPGADQSGTHEAKSTRVSKSGPPELRRALFLVMDCLLKTQPQDDPVYRFMDKKRAEGKPYLVYMTAGANKFLRIYYGRVKEYLASLEEN

SEQ ID NO: 233925 - protein, 343 aa, unidentified
MRNHTERSVCVGLDYHARSVQVAILDEDGREVANRSCRNDIGEVAAVCAAHGRVRSVAIEACCGASDFAHRLAETTGWSTNLAHPGFVSRMKQSPDKSDRSDANVLADLGRVGYLPKVWLAPAYIRELRMLDSLRDALVADIKNRKLRVQAVLREQRSFDPIVDARPWTRRWMTWLRDEAGLSDAGRFVVRMELHRLSELRGALKEAEARLEETTRGDRVVAALMEQRGVGKAIAWKLRARVGRFGRFRTGKQLCRFCGLSPRNASSGQRQADSGLINACDRPLRAMLLQAGHTLRTHDVRWRAHAAGMARRGKLGSVVAAAIANRWLRGLFHRMKELGMENM

SEQ ID NO: 233926 - protein, 346 aa, unidentified
MEQIIRIGMDTSKHFFQLHGVDAAERPVLRKRLGRRQMMAFFAKLPPTVIGIEACGAAHYWGRILGELGHEVKLLAPQHVKPYVMRNKNDGRDADALCEATGRPRMRFVPVKTAEQQAALMLAGIREQLIARRTQLSNAIRGYAAEFGVTAAKGLDKIEPLLAQMARDESLPALARELFAMQGREYARLQVELKAIEVRLRAWHRANADSRRLAGIPGVGPIGATALVMKTPDPRAFPSGRHFAAWLGLTPKDHSTAGKTRLGKITRAGDERLRSVLVAGATAVIQQAKHGRGHPSPWLIALLKRKPPKLAAVALANKIARIAWKLMVTGESYDGARMPGASAAAA

SEQ ID NO: 233927 - protein, 367 aa, unidentified
MKKVSTVAAISSRKMSQQQLTIGLDLGDRNSWYCVLEEGGQIQQEQRVPTTRKALREVFGGMPHSRVALETGTHSPWISRLLSELGHEVIVAHARKVRLIGESRKKDDRRDAQTLARLARIDPKLLCPVKHRSAKAQADLTLIRARAGLVRARTALVNTARSLAKSYGERLRGCNVRNMNPEKAESLSPELQAALEPLLACIASVSEQICEYNERIEKLAQESYPQVALLKQIKGVGTLIGLTFLLTLEDPHRFRKSRDVGCYLGLQPGRRNSGQSEPQMHISKEGDPYLRTLLVQGAQHILGPFGVDCDLRRWGLNLAERGGKSGKKRAIIATARKLAVLLHHLWASGEVYAPLHNSSRTTVAAAA

SEQ ID NO: 233928 - protein, 343 aa, unidentified
MSIVRVTGGVDTHADTHVAAAIDHNGGVLGIESFPTNEVGYESLAGWLAGFGPVTQVGVEGTGSYGVGLARFLATVEVAVVEVDRPNRQLRRRKGKSDPTDAVAAARAALSGQAAVIPKARNGPVEQMRVLLVARRSARQQRIQTLNQLRHLVLTAPEPIRVRFKDRYKAGLITEAARMRPRAGVDPVLFTTNVVIRDLARRIKSLNTEMRNIDRILTALIGDTAPSLLELCGLGPDTAASLLVAAGDNPERLGSERAWAHMCGVTPIPASSGKVTRYRLNRGGDRNANAALYRIVLTRMSSHDQTRCYVARRRAEGLNTAEIMRCLKRYVARQVYKHLPVAA

SEQ ID NO: 233929 - protein, 406 aa, unidentified
MRRLADYKLDPYEVVGETGPDIAAIEMLPGERMEDCRIEPTHEVIRMIYIGIDVHKKFCYACIKNKKGGIIEEFKFLNTNDGFTRLLRAIGARPAKAVVESTGNLWLRLFLTLEENGVEVILSNPSKTKAIAEARLKSDKVDAAMLADLLRADLIAACYVPPAHVREVREITRMRMTLVRDRTRVKNRIHSLLDRCDVPRYPGSTLWGKAGIKWLKGLNLPETDGFIFQTYLSQLESLNGLVEEVEKNIAQRAVDSEDIRLLMTIPGIDYYAAMLFVSEIGDIERFPSSSKLASWLGLTPRVSQSGTKCHHGSITKMGSPRLRWVLVQTAHSAVRYDDHFRRKFTRISERRGRSKAFVAVAREIAVACFHMLKKREPYRFADPDLVRRKYKRLEKLGSPALCAVKS

SEQ ID NO: 233930 - protein, 333 aa, unidentified
MIATSPLLLLPRLGIDISKITFDAHLCLSDGRTCSAAFDNNKVGFTQLDAWLSQHQATKTCAGLEATGSYGALLLWHLHAQGHTVFQLNPRRVKDYARSQGRRVKTDAIDAAVIAAYLKASEDLKPWQPAAKALQELQDLVRRRNQVIISLDGERNRKEKGNSKVVAASLERQIRALKAEVDKLDKAIDGHVLKHTELQKRERLLRSIDGVGRMVAATILAEVPQIDSFARARDLAAFAGLTPSLSQSGTSVRKRGRMTKEGSALLRKMLYMAAIQAAHRTNNAFHSCYNAFVERGKSKMCALGAIMHKIIRVAFGVLKHGTPFVKNFAKLEG

SEQ ID NO: 233931 - protein, 402 aa, unidentified
MNCVGIDVSKGKSMIAVMRPFGEVVVSPFEVLHTDSELSELARLLKSLDGETRVVMEATGNYHAPVAWLLHDAGLYVSVVNAMLVHDYGNNSLRRAKTDKKDAVKLANYGLDHWLTLPRYVPDEDTRLMLKTCYRQYQQYSKVQTMLKNNLISLLDTTFPDANRLFASPPRADGSEKWVDFVDAFWHCECVCGLSEKTFITRYQKWCRKHGYNFNENKALDIYASACGHFGVMPKTDTTKLLVEQAISQLRATSAALAALKQEMQSLAASLPEYPVVMGMFGVGPSLGPQLMAEIGDVRRFHSKKALVAFAGIDAPPYQSGQMDVRSRSISKRGSASLRRTLFLVMSVILQRAPMDEPVYQFMNKKRSEGKPYRVYMMASANKFLRIYYASVKAYLDSLEHD

SEQ ID NO: 233932 - protein, 385 aa, unidentified
MRGSSFIPKNYDVFIGLDVSKKSMSVTFTNHQGFIRSLNMPHKAEPLLHYVRKHFPDQKIAFVYEAGPTGYGLYDGLAAQAYPCLIVAPSMIPRAPGQRVKTNRLDSKALSENLRGGQLKSIHVPSPTYRQLRHLTQLRDVLVSELAGMKQRIKSLLLFEGIEFPPAPPGSQWSFLVKDKLRKLPCSGTVRFKLDQLLDSLEFNEKQILKTITEIRRFCRNDPELSQCMKYLMTVSGIGWITASQLLARIGDWRELKNIRQLAGFLGLVPTEHSTGERVDRGSITRTGDERLRSKLIQGSWSAIRQDGELREFFRSVCRKHPREVASRVAIVAVARKLTVRISVVLMKQRPYEVREKVHSAPLTQEETSSQGATRRLTEPGEKNS

SEQ ID NO: 233933 - protein, 347 aa, unidentified
MLHAGLDLSRKKLDVCLLSDQGEHLDQLVSPPDGDALGTLARRIGETYRQPVCAVIESMTGARFVHDTLEQAGWEVEIADAQKVKGLAPLACKTDKIDSRVLAVLSQRDLVPAIWLPDPRVREERELARFRLHLVKHKSALKCRVHSTLINFGKPCPVTDLFAVEGRRLLERLQVPEPWRGNITASVELIDDLERQIAEINRRLKEGHADHRYIPLLLSAPGIGWVLAFTIAAEIGEIDRFASPEKLAGYTGLCPRVNQSGDKDRRGPLTKHGPTYLRWALLEATMHALKHPAYAQRYQRNKRRLGKQRGAKVAQIDIARRLAHAIWHMLSRNQQFAPRGAAFRLAA

SEQ ID NO: 233934 - protein, 369 aa, unidentified
MEMYVGVDVHSKSSVFVIQDADGKLVGRGEVPTSREGFERLCSQYRLPPGTKVALETGTVAFFVARELSRLRLAPVVVDAHEVRVKAHRPTQKSDRRDALELCEGIRRNSYRTIVHVPPLEIGQLRETLSRRRHFVRLQTSEVNAAKRLLRSAGLGQLARSLGSEAGWEKLEESLRKKDGTLAMYIQQHRAVWQSAREQVEALEQALELQQVPFAEQLERLQTVPGVGPIVAATAVAVFSNASRFPTAKHAASYGGLVPSTHQSGDRDRHGKITKKGSGELRAMLCEAAHHAARPKHPLNPYFRKLCAKHGYKMGVIAVAHRLCRILYAMLKNRTDFDERKLAVEKGPFRRTTEHLYRLKVVPTTGTNT

SEQ ID NO: 233935 - protein, 390 aa, unidentified
MQALHPRPDEHAAVRTDLKAIFVSLELSRSTWVITSLSPGGGEKMSKHAVPSGDIPALLARLSQLKEKARARTGQVFPIIVIQEAGLDGFWIHRVLQQEGIESYVVDPASIATSRRRRRAKTDKIDGEALVRALLAYKRGEPRVCAMVQAPTPHEEDRRRISREREVLTAERVQHVNRIKGLLFAQGISDYEPLHRNRRERLAELITGDGRPLPECLKAQISRELDRLELLIEQIKAVEAERDAVLAQAQASPGVPAPAAQLLALRGIGPEAAATLWSEGLFRTFNNRKQVAAYAGLAPTPWQSGSVHRDQGVSKAGNPRLRTIMIQIAWLWLRHQPQSALALWYRARIKRRGGRLGKTMIVALARRLLVALWKYATAGVLIEGAILKPA

SEQ ID NO: 233936 - protein, 549 aa, unidentified
MKLCLSIVEEKSKLLCAAVVGREGRLIIGALCPSRSLVSGVSVFNIGDVFILQSGYDPVKEMAAVSAPLRPQLLAQSPVDKTRKRDQIISHLQKQSQRTAQNSISNLPQHLQHININAAGIDIGSDRHLVAVPEGRDTVSVREFATFTADLHAIADWLEQCGITTVAMESTGVYWIPLYEILEQRGFEVYLVDARRVKNVSGRKSDVLDCQWVQELHTYGLLAKAFRPAEEVCVLRGYMRQKEMLVQTAAMHIQHMQKALQQMNLLLHNVVSDITGVTGMKILKAIISGERNPQVLAKERDPRCRNSTETIAKSLVGNYRPEHLFALRQAVELYEIYQTKIADCEAAIVAYLEQQEHHTEDEPPAPQKAVSARDRMRGGSDIRAKLYKMTGVDLFAVPGLAADTLLTLASEVGLNTSPWQSEKNFTSWLALCPGTKRSGRRVLSSKTRPSANRAAQAFRMAAATQARANTALGAFYRRIRARSGGREAITATAHKIARIFYAMLKNGTEYVEIGQAAYEQKFKERRLRSLKQQATAFGYQLTPIAAGSF

SEQ ID NO: 233937 - protein, 342 aa, unidentified
MAYYVGLDVSLKQTAICVVDGDCGVVWQGCADTHPEMILSALDRWVGKIARLGLETGSITPWLARALKARGLPVIVMDARRASDAMKARPVKTDRADARALAEMLQAGWYGEVYLKSEDSHRRKALLSARDQLVRNKRSFFGQIRGLLRPFGIRLGGRMGTSKFDQAARAATRHDDILYLSVNALLEALAAIESQIAVLDKAVRRLCDRSAACWRLMTVPGVGPITALAFEAAIEDPARFKRSRDVGAYLGLTPRRYQSGDRDVSGAISKQGDAMARHCLYEAANCILTTWSGRSALKSWGLKLVRRIGAKKARVAVARKLACLLLRLWKDNAPYEGDLRTA

SEQ ID NO: 233938 - protein, 336 aa, unidentified
MSNVTTVGIDLAKNVFSMHGVDSHGQVLMRRTISRSKLLSVVAQLPPCVIGMETCSGAHEWARQFKDLGHDPRLMSARFVRPYRKSGKNDGNDAEAICEAVSRPSMRFVPIKSVEQQAISTLHRVRQGFIEERTATINRIRGLIAEFGVALPQRASEVRRGATASLERLPTLAAGAVRDLLDHVEVLTNRIERYQLELEAHTRTDPRAQRIQALSGIGAVSASAIVASVSDAREFRSARQFAAWLGLVPRQYSTGGKARLGHITKRGDAYLRTLLVLGARSALRTAAKRADRLARWALSVKQRRGYHRACVAIAAKNARIIWALLARNEPFRLTTA

SEQ ID NO: 233939 - protein, 316 aa, unidentified
MDGSITSFVGIDIAKRSLDVCLLPEGKQLSLPYDTAGLKQLFAWLPEAGSCLIVVEATGGYQRRVVAQLADAGHRVAVVNPRQVRDFAKGLGILAKTDRLDAQVIARFGQHVRPRTLAKTHEKQEELAQLVTRRRQLIELRTAENNRMETLVSRPVRKSVQQVVDLLNKQIKRIEKEIVAMLESDDDWKSKGKIIQSPPGIGPVTVATLLAELPELGFLNRQEIAALVGLAPYNRDSGRFHGKRSIWGGRASVRSALYMAALTARRCNPVIRSFAQRLEAQGKPFKVVITACMRKLLVILNTLVKTNSPWNPDYAK

SEQ ID NO: 233940 - protein, 317 aa, unidentified
MSNSRFIGIDVSKQNLDVHVRPDDLRYQLSYDAAGLAALVERFHGLQPELIVLEATGGYEHQLVAELLNDQLPVVVINPRWVRNFARASGQLAKTDAIDATILSAFAEKMRPPIRPLPDDDLKELRGLLVRRRQIVDMIVSEKNRQYTAPKRIARQIQTHINWLEKRLDEADDDLRCHIEASPLWKAKDDLLQSAPGIGPACSMTLLAALPELGTLNRHQIAALVGVAPINKDSGRFRGRRTTQAGRSHVRSVLFMSALSAIRFNPVIARFYKHLLAAGKPKMVAMVACMRKLLTILNTMLKSSTPWISNYEKNTCA

SEQ ID NO: 233941 - protein, 433 aa, unidentified
MQEAEDEPLFADRAAGIDIAKAGIEVTIRVPSDTRRGGRQQETRSFRTTRKELLALADWLRCWQVTKVGMESTGDYWKPVYFLLEAEGLDCVLYHAAQVKALPGRPKTDKLDSVWLAKITERGSLPGSFVPPEEIRRLRTHTRYRRHLTQARTAEKQRVEKLLEDAHLKLSSVISDIHGVSGRAMLEAIAAGERNPKTLAQLARGTMRGKITQLEEALDCAFVTEEHAAVLAMMLATVDYYSARIGELTAKINMLCEPYARQIAQLDAVPGTGVITAQDVIAEIGTDMTVFPTAAHLVSWAKWCPQVAQSGGKRKGANATGRGNRYLSAALGEAAVGAGRTQSFPGAKYRRLVKRMPKKKALVATGNSLLTTYHALLSDPEATYADLGTDYYERRVNIRRQARNHLRGLERLGYKVTIEPIDPATGELQATAS

SEQ ID NO: 233942 - protein, 338 aa, unidentified
MKLYGAIDLHSNNNVTVLIDEQDRVIYQKRLPNDLPTIVQQLSGYQASLEGIVVESTFNWYWLVDGLMDNGHRVHLANTAAIQQYEGLKYTDDNSDARWLAHILRLGVLPQGYIYPKPERGVRDLLRKRSQLVRQRTANLLSIHNLVTRNTGSSISGNRIKALDSQGVDELLPEKDLALAVKANLSMMQCAQEQISILEKTVKERIKLRAEFSFLKTVPGIGQTLALTIMMETGDIRRFPTVGDFASYCRCVGSHQLSNGKRKGSGNTKNGNKYLSWAFVEAANFAIRFSPKIQSFYQRKKAKSHKVLAIKAVAHKLCRACYYIMRDQVPFDISKAFT

SEQ ID NO: 233943 - protein, 412 aa, unidentified
MDVYCGIDWAEDHHDIALADRAGQLLARRRISDDAAGLAQLLALLAEHGDAAQDPIPVAIETPRGLLVACLRATGRRVYPVNPMAVARYRDRHSIAGRKSDHGDAVVLANVLRTDLHAHRPLPDDSELAQAIAVLARAQQDAVWARTQAHNKLRSHLREYFPGFLAAYADARGGITRPDARVVLAAAPTPAAAAQLTLTQLRSLLKRAGRTRGIDTEATQLRDAFRLPQMRQLPLVEAAMGRQTLALLGQLDAACAAAEDLEQAVTESFNQHPDAGIITSFPGLGALTGARVLAEIGDDRSRFQDAKGLKAYAGAAPITRASGKTKSVTHRRIKNNRLSAAGYTWAFSALTASPGARAHYDRRKEDGDRHAAAQRNLFGRLLGCLWTCLTTSQHYDENTAFPVTAEKLPHAA

SEQ ID NO: 233944 - protein, 329 aa, unidentified
MSKISKKVIGVDVGAKFLTVSFNDFENRDQVFNIENTQRSILSFLKKLRIEDYCFVIEATGNYSSRILHLSLDNGFESSLINCMSVKYFSRMKNIISKTDAEDAKVIRLYGEIFRPEVYIPKSIEIEHLDQEIKLLNDLEEEKRRYSVKLKSLRYNPQLNPNTEKHYEKRLKQLDKEIREVEMRLPQLQDEEFREIKGLIQSVSGIGEKTSLQLMTATSGFKNFDSSKSLVKYFGLAPRIYQSGKKSYSPGKCRTSKTHIRSLLYVCSWTAIKHNTQCKELYLRLLEKGKPEKLALIAVCNKLLRICFGVVKNKTAYQQNFQKNFKILT

SEQ ID NO: 233945 - protein, 389 aa, unidentified
MKIFVGIDIAKLNHFAAAISSDGEILLEPFKFTNDADGFQLLVSKLESFDKNSIIIGLESTAHYGDNLVRYLVAEFYQVCVLNPIKTCQMRKNNVRKTKTDKVDTFVIAKTLMMQDDLRFITFFDLDMMDLKALGRFRQKTIKQRTRLKIQLTTYVDQVFPEIQYFFKSGLHQNAVYALLKEAPSPKEIASMHMTHLANLLKVNSHGHFTKEHAKELRVLAQKSVGANDSAISIQITQTIQQIELLDSQLEKIEAEMTDIMKFNDSVIMTIPGIGYINGGMILGEIGDIHRFSNPNKLLAFAGLDPSVYQSGNFQAKTTRMSKRGSRVLRYALVNAAWNVVRNNATFKAYYDAKRAEGRSHYNALGHCAGKLVRVIWKMLTDEVEFNLE

SEQ ID NO: 233946 - protein, 316 aa, unidentified
MEANPVFVGIDVSKARLDVAIRPTGEKDSVANDKVGIKALVKRLAEIQPTLIVMEATGSMERQLSAALGGAGLPVVVVNPRQVRDFAKATGQLAKTDTTDALVLARFAEAVRPAVRPLPDEVTLELRALTSRRRQITEMIVAERNRIANASQAVRKRIDAHIRWLEAELERADKDLDQSIRQSPIWRENEDLLRSVPSIGPVVSRTLLAELSELGKLNRKQIAALVGIAPLNRDSGTFRGRRAIWGGRATVRAALYMAALVASRRNCVIRAFYKRLRDGGKPSKVALVACMRKLLTILNAMIKHKSRWSETTLQST

SEQ ID NO: 233947 - protein, 345 aa, unidentified
MKIVSLDLHEDASQMVVTDEDGRVLDEMRVPTETRQLRRAVSAVDGDTRVVFEEGPLSMLARDALEDVAEEVVSADPAHNGLIARDENSDDESDARHLATLLQVGAVREVYVPGEPHRSLRSVLNHRLGLQKSRTAVKNRIKALARRNGVATKGKSLYRAPVREKALERIDNVAMRWQMQSLWRQLDMLGDEVARSRREIRRLAGRIPATERLRTVPGVGLIISATIVAWIVDPHRFRDRSALSAYAGLGLGQGVTNWQPVGPARASRRGNRRLKKALFMAATCAAGTDTALGFRYRVRKRQGWSTIRSKRDVARKILHLCSALWKKGDQYKDSLVNGPQIPRRA

SEQ ID NO: 233948 - protein, 344 aa, unidentified
MRIVEVTGGVDTHADNHMAAAVDQNGGLLGVESFPASETGFEGLLAWLVGFGPVSQIGVEGTGSWGVGLTRFLHDQEIVVIEVDRPNRQKRRKHGKSDPTDAVAAARAALSGEASVTPKTRNGSVEQIRVLMVARRSAREQRIQTLNQLRHLVFCAPEEIRIRFKDRPKMGLITEAANMRPHKGSDPVTYTTNLVIRNLAKRIKALNTEMADIDEMLTGLIEDTAPELFDLYGVGVDTAGTLLVTAGDNPERVSSEGSWAHLCGTTPLPANSGKVTTRFRLSRGGDRQANAALYRIVLTRMSSDEETRRYVARRRDKGLNTAEIMRCLKRYVARQTYKHLPHMI

SEQ ID NO: 233949 - protein, 410 aa, unidentified
MKVAGIDVHKKVLMVVVVDTSTPEEKPARRRFVSMPSELHRLLTWLREQGVEEVVMESTAQYWRSVWLELEPHMRLHLAQAFSNRAPRGRKHDFKDAERLVRRLIAEELILSFVPSGEQRIWRSLTRMKLQLTRDRVRLQNQIECLLEEMRIKLSIVVSNLLGASGLRILHALANGQTDPKKLAQLGGERLQCTEEQLVDALTGRAQPVHGAMLALQLQRLQLIDQQMEQLNRMIADAMKSQQDAVMRLAEVPGFGVDSAQQIIAEVGAQASTFASAAELTSWVGTCPGKEESAEQNHSSRSAKGNKYMRRVLNQAAHAAVAKKGSRFQIVFRRLLPRLGYQSAIWAVAHRLCRLVWKILHEGVRFIEQGAEVSPREKKKRAQMLARALRKLGYEVTITPMHQLVPKPVV

SEQ ID NO: 233950 - protein, 333 aa, unidentified
MKDLTNFQHFVGCDVSKSTLDLALHERGNDYRTFEHLKVPNTAQGFQDMRKWLRTFKIDIKTAVIAMEHTGIYSNALSEWCFKKGVTFVMLHPLDVKNAGCRGRNKTDKVDAQFIADYVYTMREKLTPSQPEASIIKRLRELRNERQLAVRAHTAYLNQLKTVTDRSTLKRMENMADSFTAQIKAIEKEIKKVIDSDSQIKRTYELLISVPGIGMVNALATIVTTGNFTRFQTARQYAKFICISPLSRQSGTSIKGGDHVSRAGHNEIKSLLTQGARNVIYSDPQFKAYYERKRAEGKSHGCVMNAVKFKLICRMFAVVQRQSPYVNTERYLS

SEQ ID NO: 233951 - protein, 357 aa, unidentified
MKSQEIKYVGIDCGKKTLEVIRIGDNSLHQRQQFSTTEIGISKLINWLNPNDVVGLEAGSQSFRIAKSILNKGIQVIVLNPGDLATIYQSLKKTDKEDSLKIARLIQRFPIEELPTVPIPNDEEEDNRRLCTEQENWTRQLTQSKNRLHSLFTQAGLTHITKKHLRTKANREISVALLPSRYQKEAERILKVLDLVEQNLKLIEEEIKEALKKNKAYAQTIMSMPGVGMITSLAIMSYMGNCKRFSSAKQAAYYVGLVPRVDISGDSAYYGRIVNRGCHSIRRVIVQAAWSLVRCQYGGKIKEFYQRLYPKKGAKKSIIATSRKMIEILYTMIKTGELFDSMPEKVLNRKLTQYGLM

SEQ ID NO: 233952 - protein, 485 aa, unidentified
MTTRQRSTSSSTDPPVRREVVLGVDTHGEVHVAAVISPLGKILGTASFPATAAGYRQLLVWARKRGTVRRAGVEGTGTFGAGLSRYLLAQQVEVYEVNRSDRSARRLLGKSDPLDAQAAARAVLSGRARARAKSGDGPVHSARMLKLAKDSAVKARTQAINQLKAVLVIADPALRERLSSLGNRELFRTCARLGLPGGGGDEDAVTQATHLTLRMLAERIEQLTGQINELNQRLTRLVERHAPQLLVPVGIGPDSAVTLLITMGDNPERLGTEASFAALCGVSPVEYSSGRRSTRRLNYGGDRQANAALHRIVFTRLRHDPRTRRTTNAAPRRARPGVRSSDASSGMPPARSSTWSDRFAAPPRYRGVCDRPVIGPGRAGEHSGAASVRSHWTKPHRITPVGLRLELDCACAHDALGSSCSSCSHDALEDAGFAIRLVVSLRSSITSGPDRGAHGGIERGQLEADLEGVPRHGSRERDVGMLVIC

SEQ ID NO: 233953 - protein, 315 aa, unidentified
MDEHRTIFVGIDVSKDRLDVHLRPSDEALHVPRDAKGLDTLARRLGRLPVALVVLEATGGFEASVAAALAAVGLPLCIVNPRQIRDFARAMGRLAKTDTLDAEVIALFAERIRPPARPLPEPERSHFAELVSRRRQIIGMIGMETNRRDQAVDKQLIRRVDRHIAFLERELVELDRDIDRAIKASPVWCETEALLKSVPGIGDVTARTLLAQLPELGTIGRHQLAALVGIAPINRDSGLMRGRRSIAGGRTSVRGVLYMAALTAIRRGSPFRPFYERLTQRGRPRKVALVAVMRKLLVTLNAIVRERTPWRPLAA

SEQ ID NO: 233954 - protein, 408 aa, unidentified
MNPLFVGIDVSSKNNVVCLMKPDGTKFSTFSVQNNLGGAKILSEKIVSALDKLQLSEVKIGLEATSIYGDSLVYALREDGKLGRYQRKIHVLNPKQVRKFKDAYSDLPKNDYVDAFVIADHLRFGRIASEVYMDDYRYRSLQTLTRARFDAVQNLTREKQRFANYLFLKCSGIAQDKDIPNTSATTLALMETFESVDELANCDLETLTAFVSTAGRGRFADPEATAKAVQAAARGSYRLPKTVNDSINQAMSVSIASMRALESQIKVLEKAIEQQFEIIPNTLTSIPGIGPVYSAGIIAEIGDIHRFESQASVAKYAGLVWTQHQSGDFEAQNTRMIKSGNRYLRYYLLEAANSVRRCDSEFRRYYDLKFHEVNKFQHKRALALTARKLVRVVFRLLKDNRLYIVPES

SEQ ID NO: 233955 - protein, 340 aa, unidentified
MTIVTIGLDLAKSVFQAHGVDETGATALAKRLHRKQMEPFFSKLPRCLIAMEACGTAHYWARTLAAMGHEVRLIPPSYVKAYVKRGKSDALDAEAICEAVQRPTMRFVPVKTVEQQSILMAHRARSLLVRQRTMLANALRAHLAELGLVTNPGIANLAKLAQQALSDENGLPSYARTTLEALVRQIMTLSEEITTLDRKLLTWHAESEASQRLTAIPGLGIITATAIAATVTDPDQFRSGRQFAAWLGLTPQQHSTGGKTQLGGISKQGDRYLRRLLVVGATAVIRHTKDKPTPMANWIRKLLVKKPFRVVSVALANKLARIAWVVLTRKEAYRPYQLAA

SEQ ID NO: 233956 - protein, 369 aa, unidentified
MSESTMFVGLDVHKESIEIALAPYGGGEVRHYGRIAGDLDAVDKAISRIRKVHPKLDFVYEAGPCGYALHRHLRRKGFACVVVAPSMIPKCSGDRIKTDRRDAVMLARLYRAGELTAVFVPGPEDEAIRDLSRAREDAMIAHKRARQQLGALLLRQNIRYPGKRAWTLAHQRWMAHVKMPMPVQQIVFQEYLNAVDEAHQRVERMTDQIRLSTESWRMAPVASALQALRGVSLIAATSILAELGDLTRFENPRQLMAFVGLVPSQYSSGPRQRLGHITKTGNSHARRMLVEAAWAYRFPARISRGLRDRQENQAQKTCEIAWKAQVRLCSKYRRLVVKGKLKQVITTAIARELLGFIWAITQEVKPIAK

SEQ ID NO: 233957 - protein, 394 aa, unidentified
MKLVGIDVGKNSHHFCVMDKETGEFNVAPSSFSNNKEGFDFLINSLKPYSKKSILIGMEDTGHYHVALLKFLLSSGYTVALINPKTTDLTRKMEGGITKNDKLDTITICDVLDTPERKKQYRITKVDRFDLYEQRQLTRHHHNLKEELNVYCNRLQKSIDLVFPEFNTLFSSKYSIVYMNLLKTFGSAEAIASTDIRTIRKCFEIKGRGNRISLTPEKLKECAKNSIGISSEVETIQIKHLVSQITLIKEQIAEIDKKIEEFSITNNSPILSIPGISHFSGTSILAELGDIGNYSKPSQIIKFAGVAPYHYESSQYNAQHTGITKKGSKYLRKTLYQIILTVINNNPVFKKYYRLKISQGKGHRCAQGHCIRKLLRIIYHLLETGQSFDPALLR

SEQ ID NO: 233958 - protein, 310 aa, unidentified
MDQRFVGIDVSQDQLEVHGRPTAESWRVAADDAGVAALLDRLRALGVTLIVLEATGGYETMAAVALAEAGWPLAIVNPRQIRDFARATGQLAKTDALDARIIAAFAEAVRPPVRPVPDEQARTLGELVARRRQLVEMLGAELNRRRATRQPALRKQLDRHVAWLQAAVTQLDQDLQRVIRSTPLWRETEDLLRSVPGVGNVTACTLIAELPELGLLNRRAIAALVGVAPFARDSGTLRGRRMIVGGRATVRRTLYMATLTAIRRNPVMTAFYSRLRGTGHPAKVAQTAAMRKLIVMLNAILRDRRPWQPA

SEQ ID NO: 233959 - protein, 329 aa, unidentified
MNSHHMQNINVGVDIGKSQLDIFIRPLDIFFTVANDEKGIRDAINKIKIHKPQCIVVEATGRLEMPFILACSEAKLPFVIANPMHVKRFAGAIGRRAKNDRLDAELIAHYAEAIKPKLTELKPEKIRLMSDLVTRRNQLLTMQTMQTMQTMEKNRHQILSQTLLSTIKPILTALKNQITKIELKIQKLIEECTEYQSKNIILQSMPGIGKIAAASIISNVPELGYITNKQAASLIGVAPMTKESGAYKGKRVIQGGRAQVRTVLYMAMMSAMQCNPVFKATYQRLLGLGKPKKVAIIACVRKMVVILNSMLRDGVMWDKNTGENKLLTP

SEQ ID NO: 233960 - protein, 316 aa, unidentified
MASFLGIDVSSLSLDAAVRPQGIKMHLSNDPTGFEALLESLRKLSIKRVLLEATGGYERDVMRFLQDAGYKVIRVNPRRARSFADSLGIKAKTDAIDAEVLAHYAEVIPDQPSLRISPERALLRELLQQRDRLVQQRDDDLRRLKQVQSTAVANYLNANLKHFKAQIKLVEREIEQQTAMLNDERVTQLIKVKGIGMVTAGKLVALLPELGRVESREIASLVGVAPFNHDSGKFLGKRSISGGRFAVRRSLYMACLVAMRYNPALKARYQSLRERGKLPKVAIVACMRTFIVRLNAMLRTGTSWLDLVLPQPESTT

SEQ ID NO: 233961 - protein, 414 aa, unidentified
MKVQHQCCAGLDVHKRTVVACVLKGAPGNEPAMETKSFGTTTPELMEMVEWLKSHGTTHGAMEATGNYWMPVYNLLEGHFELIVVNAAHMKAVPGRKTDVQDAHWIADLLRHGLLRASFIPPREQRDLRELTRHRSSLAAKRGQAANELQKALESANIKLQSVVTDITGVSATEMLTEMLGGKSDPKELAQLARLKLRSKIPQLEKALSGKLRAHHRLILEQLLADIALLVAQIAELDAYIERWLQKDNDHIDRLDGTPGINRRVAEVIIAEAGTDMSRFPDARHFASWVGLCPGQNESAGKRRSGKTRKGNRALRTALVESAHGAVRKKGSYFGAQYRRLARKRGPKKALIAVAHSLAVIVYHILKNQTAYVELGANHFERLNPNRLLHSLTKRIKNLGFQVTLSPISTPVPA

SEQ ID NO: 233962 - protein, 418 aa, unidentified
MIDDLDFYVGIDLAAEKHRACVVNRSGKVVGELGFEHSGAGLIDLIRSLEKLTCSMANRVGIVLETPRGPVVECVLERGYSVFSINPKQLDRFRDRHTVAGAKDDRRDALVLADSLRTDLPLFRRLQQESAATIRLRELSRLEDDLMQDHNRLINQLREQLHRYFPQLLPLSSAAEDAWVWDLIEIAPLPATACKLTRGRIEGVLKRHRIRRLTAEEVMTTLRVPALELAPGSAEAASEHALLLLPRLRLIRKQRLDIASRMETLLDERTEAGSETKDHEPKRPTDVAVLRSLPGVGRIVASTLLAEASQAIADRDYQALRSYAGVAPVTRQSGNKKIVVMRRGCHNRLRNAVYHWSRVATMCDERSRAHYAKLRAQGHSHGRALRTLADRWLTVLVAMLTTQEGFDSARWNACVIAP

SEQ ID NO: 233963 - protein, 353 aa, unidentified
MTTQCAIDFHARSQTIRWMTEGDGEIHSVLLNHETDDVRAFYASLPKPVIVGLESHGYTGWFEQMLSELGITVRIGDAARIRACKTRKQKNDDRDADLIFELMTTERFPEIYRPTPESRTVLQQLRFRNNLVRARTRIANSLVAIALSCGAVRRFSVLTTKGRRRMAALKMSEEQAWQRDRWFEFLDGLEPVITEVERKLEAEAKKDPRVCRLMTQKGVGVLTGLALVHVLGPPERFATSRKVAAYVGLDAVESQSGQRRHIGRISKQGSRLLRFLLVEAAQTSARCDPELKAVYERLRRKKTHATAKVAIARRLLVRSWILLRDQIDIDEFRRRGRARCGVKPGQPEETHGL

SEQ ID NO: 233964 - protein, 411 aa, unidentified
MRLFVGDDWAEDHHDVELMDEAGRVLARKRLPEGVAGMARLHALIGQQLGDDADDAEVVTGTGTDRGPWVAALVAAGYTVYGVNPLQASRYRERHGVSGAKSDTGDAHMLTDMVRTDSHQLRAVAGDSPDAGAVKVVARTHKTLIWERTRQVQRLRHQLREYFPAALAAFEDLDAPDALELLGKAPDPARAARLTRAQVSAALKRARRRDIPGKATAILAALRSEQLGQPPAVTAAYAVTARSLIAVITTLNEQVTVLEEQVRAHFGRHPDAEIYLSQPGIGPVLGARVLGEFGDDPGRYASGKARKNYAATSPITRASGKKKVVAARFIRNDRLTDALMAQALSALGASPGARALYDADRDRGAEHNPALRKLANRLVGILHGCLKTRTPYDEATAWPQRENLPQSDLAA

SEQ ID NO: 233965 - protein, 412 aa, unidentified
MLKIVYPVCCGMDVHKSFVVACVASTNDHGVTTYRSGRFSTFTGDLRRLAAWLHAHSCTDVCMESTGKYRIPVYNILESSCRITLAHSKYVKAIRGKKIDKKDAKWIADIFKHGLVCGSFIPPADIRQLRDLMRCRAKLTGFSTGEKNRVQNCLTVSNIKLDDVFSDVFGKTASAITQRLLENDAPFDVTLFLNKNLKASADRIQAAVDGHICAHQAGKLRVIRSHMENLAACKKSLEVLIFGLAEKYLPTLDLILTVPGIQVFAAIGILSEIGADMSVFQSSKHLCSWAGLTPQNNESAGKKKTTRISRAGAYIKPLLVQCALCAIRKKSNPEIRSRYLNLKKRRGHKKAIIAIARMLLTAIYNIIKRNEKYNPALYRKADTPPRNREVSVNEAIYILQRQGYLVTAPQSA

SEQ ID NO: 233966 - protein, 347 aa, unidentified
MRFYTQQHPHYCGIDLHARTMYLCILNQAGAIVLHRNMSADPDSFLQAIAPFRENIVVAVECIFTWYWLADLCAREKIGFVLGHALYMKAIHGGKAKNDKIDAHKIAVLLRGGMIPTAYVYPAEMRATRDLLRRRMHMMRQRAGLLAHVQMTNQQYNLPDIGKKIAYRSNREGVAERFADPSAQSNVAFDLKRIGFYDDLLNQIELEILRHARKHDANTLHLLDSVPGVGKILSLVLLYEIHDISRFPRVQDFASYCRLVKPKKESAGKVYGSSGNKIGNAHLKWAFSEAAVGFLRNNPQGQAYLARLENKHGKAKALTALAHKLARAVYHMLQRKEAFDIQRFLNR

SEQ ID NO: 233967 - protein, 344 aa, unidentified
MDHFAGLDVSVKETSVCILDDAGKIVKEAKVASEPQALLEVLANPAYRFKRIGLEAGPLSQWLFSALAEAELPVICVETRHMQAVLKAQINKTDRNDARGIAQMMRVGLYRVVHVKTLRSQKLRMLLTHRKLLQSKAIAIENDLRGTLRNFGLKVGMVGTVRFETRVQELIETIPDLVVLVEPMLVVRRALREQIVILHRRLLAIVRDDEVCRRLMTTPGVGPVVALTYRATVDVPARFRKSKSVGAVFGLTCSKYQSGEIDRNGRISRCGDEMMRVMLYEAAQSMLHSKKWSWLKAWALQIARRRGMKKAIVALARRLAVIMHRIWIDGTEFRWTREPATAAA

SEQ ID NO: 233968 - protein, 413 aa, unidentified
MDVLHPRCCGLDVHKNSISACILVQVAGRVQKHQRRFGAMTQDLQELANWLRQFEVAQVAMESSGVYWKPVWNILEGQFTVVLANAQHIKNVPGRKTDQKDAEWIAQLLQHGLLRPSYVPCEVIRDLRDLTRMRASLSQEASRISSRVQKVLEDANVKLASVATNTLGKSGRAMLEEIIAGQNDPEYLASLALGHLRAKTPQLRLALEGKIRPHHRFLLRRLLDQLRFVEHEIVLLDERLEDIGRERPELSQAVARWDTIPGIDRVAGWTLLAEVGHTMAQFPTAEQLASWACLCPGNHESAGKRLGGTTRKGSPWLRRMACQCAWAAARTKNTYLSAQFRRVAARRGSKRAIIAVAHSLVIIGYYLQKSQRNYEDLGGDYFDRIDSDGLKRYFIRRLEKLGHKVTLVPIKAA

SEQ ID NO: 233969 - protein, 343 aa, unidentified
MDHFAGLDVSVKDTSVCIVDDTGQIIREVKVASEPEALLAVLRNPAYHFKRIGLEAGPLSQWLFSAMAEADLPVICVETRHMRAVLKARINKTDRNDARGIAQMIRVGLYRPVHVKTLRSQKLRMLLTYRKLLQSKAIAVENDLRASLRNFGLKVGMVGSARFEARVTDLVESLPDLRVLIEPLLIVRRVLREQLGILHRRLLAIVRDDEVCRRLMTVPGVGPVVALTYRATVDVPTRFRKSKSVGAVFGLTCSRDQSGERDRPGAISRCGDEMMRTALYEAAQVMLVHSTRWSWLKAWAMQIAKRRGMKKAIVALARRLAVIMHRIWVDGTEFCWTREAAAA

SEQ ID NO: 233970 - protein, 332 aa, unidentified
MNMHPQGGVARPDQRLNAGIDVSKQHLDACWGTEDQRLDNDEPGWDVLIANFRATHVDLVVIEATGGYERGLVCALQGAGITVARVNPRQARDFAKSMGVLAKTDRVDARTLRDFADVLARHKDRHKYITPLIDAQRQELAALMARRRQLVDMRVAEGNRLEQAGTRAARSIRSVLKTLDKQIADIDRDADDHLDRHFKEQRMLLDSVKGVGPVTILTLTSALPELGHLGRRQIAKLVGVAPLADDSGSRKGPRRVWGGRGEVRSVVYMATTSAIRFNPAIKAFHSRLIAAGKPKKVAIVACMRKLLTILNAMLRDHALWDATKHLQTSKTA

SEQ ID NO: 233971 - protein, 344 aa, unidentified
MHRVYVGLDLGSSCFHQVVINSDGAVTINRSFSTSESNLRRAFSDLQGEVHVHLEAGELAPWASAVSASLAARVVCSHPRDNAWIARDGDKCDRVDAFKLAELLRLHRFKEVHYPQLPARRDFKTLVQHYDELTAQQARLKTKLKARLRMQGVIVSGARVFSVTGRQPVLARVASPNVRTALTQLFSILDQSVTAQTEARLLMLRAAQTLPEIKLLRTAPGVGPIGACRFSAYIHTPQRFSSKRKLWKYCRLSVSHRSSNGKPLRRPRLDRSGCGRLKDVSRKAFDVAIRARTDNAFKRAYQRALETTHDATHARLTVQRKIVATLRAMWLTNTPYTEPERPRS

SEQ ID NO: 233972 - protein, 343 aa, unidentified
MQTITTIGLDIAKSVFQVHGVDAAGQVVIRRQLKRRYVLAFFQKLPPCLIGIEACASSHYWSRELQALGHTVRLMPPAYVKPYVKRQKNDATDAEAICEAVARANMRFVPTKTPEQQSCLMLHRTRHLFIRQQTAVINSIRAHLAEFGIVAPVGRKGVTELLHIVADPSDKRVPEVARACLAALGNQLLSLKEQIVEFDRMIMVWHRSNETSKRLHYIPGVGPLLATALVASVADPRTFRSGRNFSAWIGLVPTQHSSGGKDRLGSISKQGDRYLRSLFVAGALAVIRYAKIHGTKHRPWLTALLARRPTKVAAIALANKLARMAWAMMAKGERYRQPVALAA

SEQ ID NO: 233973 - protein, 391 aa, unidentified
MIYIGIDVAKDKHDCFITNSEGEVLFNAFTIPNNADGFHDLFQKISSLTNDFSNVKVGLEATGHYNYNLLGFLIDKGLPTFVINPLHTNLFRKSLSLRQTKTDKVDAHTIALMMMSGVNLQSYSNTSYHNEELKSLTRYRFDKVQERAKLKTSISRLVNILFPELEKLVPSLHMVSIYALLAEFPSSAQIASCHLTRLTNLLANASKGHYNKEKAIEIRNAAKHSIGSNMPAKSLELKHTIRLIQELTSEIDEIEVSIKSIMDEIRSPILSIPGINYRMGAMIIAEIGDFNRFSSPDKILAYAGLSPSTYQSGQLDGCYSHMEKRGSRYLRYALFNATKFVCIWDNQFSAYLAKKRSEGKHYNVAISHAAKKLVRVIYQLEKSGQLYHRAA

SEQ ID NO: 233974 - protein, 387 aa, unidentified
MQKLHDNSKASPAAFMQDSTLIAVIELSLSSWLVAGLIPGVSREPLKKLEPNPEDLLKLLHGWRDEAIKAGRLITRIAVAYETGRDSFWLARWLQERGIDAHVIHANSVTVSREHRRAKTDRLDTAMLKRGFLGWLRGERGHCTVAIVPTMEEEDAKRPHREREGLVHEQTRVVNRMKSALIQFGVRNFNPKLRKASVKLETVRTPEGKSLPPNTIAALRRDMERLKIIKEQIKAIEQARLQQFEQKPEALASRMVYLLVRIYGLGLETADLLVHELLSRTLRDRKAVARYAGLTGSPDESGSKRREKGLSRSGNARVRKIMIQLAWRMVKFQPDSALVQWFKQRTENAKGSRKPMIVALARKLIIALWRYANDGVIPEGFRLHSAA

SEQ ID NO: 233975 - protein, 440 aa, unidentified
MEQVIIGVDPHKLSATIEVVDHEETVLGSGRFTTDQAGYAAMRRYAKAWSDRVWAVEGANGTGRPLAQRLLEADEQVVDVPAKLAARVRLFDTGHNRKSDALDAHSIAVVAVRTRNLRVLRIDGELEALRLLADRREALTRRRVQTVDRLQALLAELLPGQAKKDITPLQAKAMLAGVRPRDVAGKTRRRIAAEELAELISVDARIKKATAELKAMVLVRHSRLMDLHGVGPVVAARILADVGDVARFANRNRFASWTGTAPLDASSGEQNRHRLSRAGNRRVNHMIHIAAVTQLRLNTEGRAYYRHKRAAGKKPLEAMRCLKRRISDAIYRQLVADAQRAALTAAADGIDAGPGGHCGASHQSSAVDLPPHIDTSDQPLPGPAHPTLPPIQAAAHHHAAPAPQPRRRRAGAVNVERPTGRTRLTATSAGAHSKAPKPRS

SEQ ID NO: 233976 - protein, 344 aa, unidentified
MEQIYYAGLDIHKKIIAFCIKQADGTIVAEGKIDASRAALKQWAASTPGPWIGAMEATIFTGWVYDFLKSYARQLQVGNPLMMKAITAAKKKNDKLDARTIADLVRCNLLPRCHMASEEMRDLRRVLRYRNLLVRQAVRMKNRMATLLMETGQEYNKKKLHGAKYFRGLLEKIQDVPESFKEILQMSRGALELFESCQKRLLKGLVHNEGLQERVQRLMSIQGVGEVTALSWALEIGEVQRFTSIRKAISYCGLCSAQVESGGKITRMPLSKQRNKHLQCVLIEAAKLAPGHNPELAQVYNQERQRGNNHNQATITVARKLVAFLLAVDKSGKAFVKKAEKQAA

SEQ ID NO: 233977 - protein, 436 aa, unidentified
MIPAVLTHCAGIDIGKRALAVCLMVGPAEAEPKVEVREFSTFTADLEAMKEWLVRADCTHVVMESTGPYWKPVFNVLEGSMVVCLANAEDVKGRKGHKTDRKDAKWLAHLLRHDMIRASFVPSRPIRELRDLTRRRKQLLGDATSERNRVQKTLEDANVKLGSVLSDVFGVSGQSMLEALLEGNGSAQEIAEMARHKARQKIPQIIESLSGHRFGDHHRFMIRMSLDHLRMLERQIMALDQEIVKRIDSLGLERLLNLLQTIPGLGHDSAVAILAEVGPDMNQFPTAKQLSSWAGVCPGNKKSAGKDFRGHTTRGNRWLRSTLTECAWAVSRSKESPLRDKFWRWAVGGKKKAVVAVAHALLLQVYQVLQTQQPLAQTPSPPMDERRRKRIVRHHLRCLGRLGISTGPKRIYTEGAVPRRGRRPSKAQNGVPEVRE

SEQ ID NO: 233978 - protein, 356 aa, unidentified
MRSLGVSHPILGALTPQWRYLNDQSALLCRFGMSLDGTILREVVVTTDPDAIATCLAVDQERLERIGLEAGPLSEWLVRGLADHGITAVLMETRQVRAALSAMIVKTDRKDARGMAHLLRMGWFRRVHVKTMDAREQRTMLSARSTLMARLKDIENSVRGLLRGFGLRLPLLLRGRWDAGVREAVAGHPSLLQILDPLLTARRVLREQLILLDKRMRDAARVDRVCRRLMTPPGVGAIVAMTFRAAVDQPDRFRSSKKIGACFGLTPRKYQSGETDRDGAISRAGDTSVRVALFEAAHVIMTRMASWSTLKAWAMNVARRRGAKRAKVALARKLGVVLHAMWIKETDFRFTRPTSV

SEQ ID NO: 233979 - protein, 356 aa, unidentified
MSRDIKYIGMDVHKEAIVIAVLNNSGKLVMESIVETKASSILQFIHGLQGELHVTWEEGTWAAWLYDLLKPHVHEVLVCNPRRNALLKEGSKNDKVDARKLADLLRTGMLRPVYHGEHGLRTLRELARTYQTLSKDLNRVMNRVKALYRGWSIPCAGTQVYAPRYREEWLGKIEHAGVRRRAELLYQQLDGLQALRRTLRPELLAESRKHKAAKLLRQIPCIGPIRAARLLALMQTPHRFRSKRQLWTYSGLGIETRDSAQYRFVRGQLQLAKKPQQIRGLNQNHNHEMKEIFKGAATRASCGVGPLRDFYVALLDKGMKPEMARLTLARKIAAIALTLWKKEERFDAEQLKTQAA

SEQ ID NO: 233980 - protein, 339 aa, unidentified
MKREYDHYIAVDWSIKNMAIARMTKKSNKITVMDVPSDVKELQVYLKNLKGSKIMTIEETTTSQWLYTELKDDVDKVVICDPYRNRLLSEGPKTDKIDASKLVQLLKADLLKEVFHDTDRFLYLRHLVSGYEDLIKAGTRLKNQRYSLLRACGLNGNEEKGFKFERFEDQLVLDSLDRQIEINDKEWENYEKAFKKLARQYPEIRNQDSLPGIGLIGAVKIVARVVSPSRFPDVGHFLSYAGLVKLEKKSGMKVYGRKSSRYCSELKGVYKTGIMAAIDGNNEISDCFNYLVKEKGYAKHNARHKACRRLATLSWGVFKSGQKYQPRLRRQNGALSRVS

SEQ ID NO: 233981 - protein, 451 aa, unidentified
MSKVSLKKQKKKHVATFPLVNIDSAGIDISDKEMMVAVPADRDGKFVRAFGSFTCELHQIAKWLKSCKISTVAMESTGVYWVQLFLILQDYGFEVYLVNSRYVKNVTGRKTDESDAMWIQKLHSCGLLKNSFQPDNATRTLRVLVRHRKSLIKSGSAYVNRMQKSLEQMNIKVHTVISDILGKTGTLIIEAILSGERSAATLAGLADRRIKASKEDMVKSLEGDWRPEHLFELKHSYEIYNYHQAKIEECNQQIEQQLLEQIADKNDGDISFLDTNRTEIKSSLKNQISFDLKLYLKSLLGVDPTEIFGISEISTLEIVSETGTDMSKWPNEKHFTSWLGLAPNNKISGGKIISSRIMKKKHNAGQAFRMAANSLYRSQNPLGDYYRRIKARQGAGKAVVATARKLAVIYYNMVSKKEGFNPNQLLEYQEKYKQKKIRSLEKRLADLKEAS

SEQ ID NO: 233982 - protein, 417 aa, unidentified
MEQFAAFIAIDWSDAKHDVCLVDASTGKKESFVLKHTPEELAAWATALRTRFAGGKIAVCVEPSRGPLISALLPYDFLVRSPIHPATLAKDRQAFSPSRAKDDPRDADDLLAWLLHHRDHLKAWRPANATTRTRQYLVEHRRRLVHDRTRLSHRMTALLKAYFPQVLHWCDDIRTTRVGDFLLRWPTVEALKKVKPSTLEQCFHEHNSVRKETIANRIAAIKEAVPLTTDQAVTRSSALMINALATQMKTTIAAIRAFDDEIEQLCRTHEDYHLFASLPGAGPVYTARLTAAMGTDRDRWTTVDELLCFSGVAPVLERSGKSTWIRWRYFCPKFLRQSFHEYAGESINHSFWAKAYYMSQRARGKSHQAAVRALAFKWIRIIYKCWKTRTPYSEVRYLESLRKKGSPLLAFAANNPL

SEQ ID NO: 233983 - protein, 344 aa, unidentified
MEHYAGIDVSLESSSLCVVDATGRIVREAKIASEPEALVGWFHHFGIELTRIGLEAGPLSQWLYTGMREAGLAVELLETRHVRDAFKAMPVKTDRKDARGIAQLMRLGWFRSVHCKSLPAQETRALLTARKLVQSKHHDTEMSLRGILRGFGLKVGKTSQRTFASRVRELVAGHPTLLLVVEALLAARAALGEQLSRLEKRVRSLARHDRRVRRLMSAPGVGAIVALTFVAAIDDPARFQSSKAVGAHFGLTPKKYQSGETDVTGRISKIGDAGVRTMLYEAANVILTKPVKGSLLKSWAMRLALRAGMRKAKVALARKLAVVLHRMLADDTEFLADKAATAAT

SEQ ID NO: 233984 - protein, 424 aa, unidentified
MKSQPDTEFAAFIGIDWADAKHDICLQVANTEKREFAVLPHRPEAIDQWACSLRQRFQSRPVAVCLELAKGPLVYALQKHDFLVLFPVNPTTLAKYREAFTPSHAKDDPTDAEYQLELLVLHRDKLKALNPQSAPMRTLESLVEQRRRVVDDSKRITNRLTSALKQYYPQVVQWFDAKDTVLFCDFLSRWPTLKQVKHARRATLEAFFREHNARSAKLVKERLAAIKSATPLTEDVAVIMPHQLLAQALVGQLRVTLQAIERFDVEISTISRTLPDYPLFRDLPGAGAALAPRLLTAFGEQRERYDSAAEIQKYTGIAPVTERSGKQHWIHWRLQCPTFLRQTFVEWAAETITRSFWAGAYYRQQRAKGCSHPVAVRGLAFKWIRILYRCWKTRTPYDESKYLNALKRRGSPLLNWTVEAAKNT

SEQ ID NO: 233985 - protein, 366 aa, unidentified
MAKRSTTVGLDVHKDTIDVVIAEPGADGEVRHFGTIGGDLGSLDRMLTRLRRPGRRLQFVYEAGPCGFHLHRHLTGQGIECVVVAPSMTPRRSGDRVKTDRRDAEALARLHRAGELRAIYVPTPEDEAIRDLVRAREDAVEIQRRARQRLKAFVLRHGFRYAGRAGWTFRYRHWLAGLRFPHPAQQLAFQEYIDTIGEAEKRVARLTEEITKALEGWCRAPVVRALQALRGVSLLTAATLVAELGDIARFATPCELMAYLGLVPSEYSSGAKTRRGAITKAGNPHVRRVLAEAAWAYQGQARVGRAMMCRQEKLPQAIRDIAGRRSFGSRLASAAWPRAGRHGRRSPRPSRVSSPGSSGTSPGTCR

SEQ ID NO: 233986 - protein, 385 aa, unidentified
MNQTSSCAISTNTLHCALELSKNSWLLAIQFPDREQPSLYPIEGGNTEKLMAKLAAARDCWAKVSGSPPAITVCYEVGYDAFWLARFLMGRSIECLVIDPGSLQVNRRGRRVKTDRVDVKMLLRTLIAWCRGERHVWSLVRIPSIDEEDLRRSHRERGRLVRERTAHINRIKGLLFGQGIRGINVKSQYKTLAVDNLVTGDGHRLPPRLVCEVTREIQRLAMVQEQIAKIERERDTAPTRCEATERKRHLLLQLKSIGPAISALLSREVYYRQFTNRRQVGSFLGLAPSPYNSGAEERCQGISRAGSGHVRAIMIETAWLWIRHQPKSALTRWFVERTAGQSRRVRKILIVAVARKLAIALWRYVEHGMVPQGAILNPPTTGNAR

SEQ ID NO: 233987 - protein, 331 aa, unidentified
MKFKSFIGIDVSKSTLDAYLKINQSHAIFQNDEKGYRELVEWVMENSGLVLAKDLLFGFESTGIYSSELALFLEKHALPFYIMSGLELKRSLGIRRGKSDKADSKDIAQYLYEKQEKIEPTVLPSQTIQDLKKLFNYRERLVKERAAFKTRLTEYETIVSKNRLKVYQKSHTTVIACLDKQIETIEKEIEKLIHSEELLLNQYKLINSIKGVGPQTALALIVLTEGFTKFSSWRKFASYAGTAPFPNQSGTFNGRTKTSKLANKRIKTLLTMCAGTAIQYSTEMKNYYQKRIGEGKSKMSTLNIIRNKLLSRAFAVVNRNSNYVDTLKYAA

SEQ ID NO: 233988 - protein, 429 aa, unidentified
MNYNTQNAKIASITEKTLIVGIDVGSETHYARAFSWRNYEYSKKPFAFSNDEDGFASFKAWMDDIAEKHEMEKVIPGMEPTGHYWLNLGAYLQGQGMRPVHVNPHHVKKSKELDDNNPNKNDRKDPKTIAGLVNEGRFSYPYIPTGIYAEIRNLSNLRIQTQEEITRIKNRIARWFSIYFPEIKDVYRNPDAVSGLMVIKQAPLPCDIKGLGVDGVNKIWRDARLKGAGIKRAKTLVTAAEHSIGNTEAPRSARKEIRNLLNDYEIYKSRMDELMEEIEELLSEIPYIDKLMGICGIGIKTVSCFIAEVGDIERFDNPKQVQKLAGYAIVADSSGKHNGESRISHRGRKRLRYALYEAAISVIGKNKEFKEIHHYYRTREKNPLKKMQSVIAVSCKLIRIFYTILTKGIDYDGQKMLRDIVRPGMQSTA

SEQ ID NO: 233989 - protein, 358 aa, unidentified
MKRLTKKQNWFKQQNLTKKDIIYVGLDVHKKSISVAIWLNNRIDLTFNASADYARLIKQLQPIKKAIKLVVYEAGPTGYGLARAMEQAKIPVQVISPANTPRPSKRCSKTDRLDCCRLAEFAAKGLLKPVAIPTKQEEADRQLNRLRDQLVRKRRRVRQQIKSFLLQYSIAEPDGLKGWSLAAIDELQRLPLTAALRFTLDMYLEELAQILMYLEHTEAELQALSQQERHHRSIKILRSHPGVGPVTAWAFRLEMFRPERFTQATEIGSFLGLSPRISQSGQTTREGPIVKTGREQLRSKLIEASWVWIQHDARARKVYGRLSNNTGSANKAIVAMARRLAIRLWKMLCNDQFYRQAG

SEQ ID NO: 233990 - protein, 339 aa, unidentified
MKLYSGIDLHSTNSYLAIIDESGKRIFKENLPNEIATITDRLSLYSGTLEGVVVESTYNWYWLVDGLMAEGFVVHLANPSAIQKYSGLKHADDKHDAFWLAEMLRLDILPTGYIYPKDERPLRDLLRKRSHLVSLRSSLLISLQNIISRNCGMKMKTNDIKRLREDRVHPLLADNEDLALAGQVSKDSIDFLSRQIRSIETFIEKKIELKDGYKNLVTICGIGKILGLIIMLESGPMERFEKVGNYASYCRVVSSQWTSNGKSKSKGNKKNGNKYLSWAFSEAAEFARRFDDRARAYYNRKLRKTNFMVAHAALAHKLARAAYYIMRDHVEFMPEKIFT

SEQ ID NO: 233991 - protein, 418 aa, unidentified
MVKNRIPVCHVAVYLRNAACLTTNTMNKPTGKINRIIGLDMHPDVFAAAALEKTTADLSKVLWVQDRVPTKGIERWAKKHLDAGDVLVLEASGNSFEVASRFHRLGYTCLVLESCQAAKIKDNFCNDDRHSAIKLARVYLSGLAKLVWQPDEETRQMREIFFSHRASVKDCTRLRNRIRTFLNEYCVRLPKGTRLTQSSGLNCALKAREWTTLQSELLRERFEQLWQTEARRKRLEKLMVELLLERPEWAKTWRLMGVRHIVAFALMAMIGDIKRFPNAKKLVGYFGLSPSKVQSGNNVKGREKGMGNTGRGDVRVLLVQAAQNAMTQKSSPLHRWGWKLTMKKNKNVAVAAVARKLTTAIWHLLQGHFTPILEIGKHLETKLLKLATVLGRERIKELGFKRRQDFVLHHFNIIQLST

SEQ ID NO: 233992 - protein, 342 aa, unidentified
MEVDVLGIDLAKRVFQLHGATRTGVVVHRSKVSRPSFLESIRRLSPKLVVMEACSSAHHWARVLQRQGIEVRLISPQYVAPFVKTNKNDRNDAEAIVEAASRPSMRFVSIKTVEQQDLQALHRLRQLLVQQRTAIINQVRGVLAERGIVVAQSPTAFHRAMPTVLAGQDDELSQFCRGLLVELLEHLKSVEEKIDSCDARVKVFMASSQACKRIGEIDGVGPLTATAIVAGVGDASEFKNGRHLAAWLGLVPRQYSSGGKSKLYGISKRGDTYLRTLLIHGARAVLRYVAGKTDSQSRWLQQLIERRGYNRAAVAVANKNARIIQALLSSERAYVRPAAVGS

SEQ ID NO: 233993 - protein, 345 aa, unidentified
MERYLGLDMHRDSCTVVVLSAGGKKTGQQVVPTEAASLVQYVKSLSGELHVCVEEGEWSEWVVEILSPWVQRVVSCTAPGRRGPRSDAKDAHELAERLRTNQTGPPVYKASREWARLREAVRLDGKLVQDEVRAKQRLKSLYRRRGVACVSEEVYSPKLRKVWNAKLPQSVRPSAELLGQELDQLLELQQTAEQQVFAAAKEFPMWKTLRTVPGIGRKRAAQLLAIVVTPHRFRTKRLFWSYCGLGVVTRSTSDWVRQKSGQWVRSAVYQTRGLNPACNRQLKGIFVSAARTALRCRRPNPLLDAYERLVESGTKPNLARLTIARKIAAIVLAMWKTESEYRIMS

SEQ ID NO: 233994 - protein, 439 aa, unidentified
MPTPSLLVLDSTAAAIDVGSEQLHVSIAGGPPKIFGTTTAELYALRDYLLAQGVRSVAMEFTGIYWLCPYEVLEKAGLEVVVVNGKYVKNLPGRKTDKKDCQWQATLHAHGLLKPGFVPPEHIRRLQDYTRLRTDHIVMAGSHEQHMQKALERMNLKIHDVISDLTGMSGLKMVEAILAGERNPVALVALCDPQIQKRKAGRLREALEGTWKEEHLFALRQAYELWQFYQKKIAECDQAIEKILVELAGPEDPKNPAPPATKRGGVNSPEIAGLHGLLWRLCAGKDLTTLPGVADYVLLQLIAEVGTDLEKNWKSEKHFTAWLGLAPGSRQSGKRRGSQKRSRNRGGRLFCVIARTVGRSVDKALGGFYRRLKGRRGGLIANLALARKIAELFWRLMVHGIAYAEQGLKKYEAKVAQTEQGLLQKLARKYNMVLQPKAA

SEQ ID NO: 233995 - protein, 396 aa, unidentified
MYYLGIDIGKKNHEAGVIDQQGNSVGKTLRFSNSKTGSDKLLAFLNQHQLTPDNCACGLEATGHYWLSVFTYLYQLGFKVTAFNPLQSDALRNFYIRKTKTDTRDAFLIAQVIRIDVPEATPFIEEALLQIRHLERLRYSLVDQSSDIKRKVIALLDQIFPEYEELFSEVFGTSSSELLFHYPMPEDIQTIDTDSLAAFLNESSKQSYGEKRAHEKATKIKQSAAESFGITMANDSFRMQIHLLLEQLSLLDRQIHQIEEKLSALVKQQATYLTTIKGVGDVTAAVIIGEIGSIERFYRPEQLVAFAGLDPAVKQSGKFNATEVHISKRGSPYLRRAIWHAAFSASQSDPALSQFYNKLKDRGKGHHVAVGAVARKLAHIIFAILRDNKPYEPQVK

SEQ ID NO: 233996 - protein, 350 aa, unidentified
MRRPKDKLIAGLDLHSNNVMIGIINQDGKRVAHRKLGCDLNEVVGFLEPFRPQLQSMAVESTFNWYWLVDGLRAKDYPIDLANPAKIEQYSGMKHVTDKDDAFHLAELQRLDILPKAHVYDPELRQVRDLLRRRVNLVHQRTALLLSFKSLYARTTGQRLDLSDAKKMEPKEAPKLYTHSANQLIAEVQAEHIQALNRSVVRLERAVLARARQIPLYERLLTIPGIGRTLGMTITMEVGDIKRFKSDGDFVSYCRLVDAKRLSNGKCKADNNQKCGNKYLSWAFVEASNFARRYDKQCRRWYDRKAAKTSSIIATKALGCKLAKAAWHVMAQQTDYDAKRMFGELAMTKN

SEQ ID NO: 233997 - protein, 363 aa, unidentified
MDPALAAVESRTSTAVKEDVMQVVRIGLDLAKYVFEVHGVDNHGKVVVRKRLRRDAVAGFFANLPACLVGMEASNGAHYWARVLTELGHQVRLISPQFVTPYVKSNKNDQNDAEAICEAVGRPSMRFVPPKSTDQLAVQAVHRIRRRLVADRVRLVNQIRGLLSEHGIVIARDIAQLRRGLAVIVGSINDGLGEMLRALMRELQEELSELDTRIAAHDQRIREIFRTSEQCQRLGKIEGVGPVTATALIAAVGDRSCFKNGRQFAAWLGLVPKQRSSGGRARLFGISKRGDRYLRTLMIHGARAALSRATGKQDPRSLWLGKMRQRRHPNVVAVALANKNARIVWAMLTGDAAYEPALSVKAA

SEQ ID NO: 233998 - protein, 395 aa, unidentified
MQTLFVGIDVSKDSFSVAGLDGQGATAFSLTTGMNRAGFSELFKAISSHSVALSDVVVAMESSGCYHLNLFSFLSSKGLRTLVINPLVVANFSRLSLRKTKTDRKDAFTIARFILSHRDSVEPFTILQAHQDLKDLAREREFTLKMISSIKNEIKRLLQSTFPELEHMGNVFSDTMLQFLSVFPSARLIRMAEPQAISHAFEQRDKRKRIAVPPETIRRAARNSIAAVSLAKEMILPGKIETLLHLEERLAQLTKMLVKLCETTMQEDLKILTSIDGINNITAAPFLAEMGDWRGFRSYKQLIAFAGIDPSIHQSGTIQGVSRLSKRGNRHLRRLIWLMTFCAIRMEGPFKAYFIRRKTQGLPFKKALFATAHKLVRVIFSMLNNRTCYVAQPTA

SEQ ID NO: 233999 - protein, 366 aa, unidentified
MKESITPIGMPVGIDVHKRRCKVVEFRQGEIKVRKPMGNTREEWLELLTELPPEAEIGLEVSTAGYFAMSVLEAAGWRDRAHWVHTAGIDSNRRQKNDRLDAERLARKLAAHHVDPLPEAWFPPPAIRALRLRARQRCWLALLRTQGKNHVQSLLEMHGLQIPGSDPFGAAGRRWLGEQKLPAPLAESIPQTLRLLALLEEEIHTSEQYLRAEDEQFPELMLLRTIPGIGPILAPVIWSEIGTIERFRSAKALANGTGLVASFYDSGEVKTTGPITHQGSRWLRWAFVTAANVAIQGRNPFARRYHRLRRSKKANVAKAAIAHSLARCVYGVLKHGCPYREDRWGRKVGALEPETRAGARSTKTAL

SEQ ID NO: 234000 - protein, 348 aa, unidentified
MTEIYYAGLDVSARSVNLCVVDEDGRVTHERKLGIEPEAISAHLVSLEVRFARIGLEAGMLSQHLYAGLAAAGLPVICVETRHMKAALSAQLNKTDRHDARGIAQMMRVGLFKPVHVKTPTSQRLRTVLTARQLLRNKLQDVENEIRGLIRNFGYHLGKVTARDFEPRVRELIAESDLHVVADALLLARRSLREQFGPLDDLLVRLAREDEISRRFMTVPGVGPLVALTFRATVDVPARFTRSRTVGAHFGLTPRKQQSGEVDRTGRISRWGDAMMRSALYEAAQVLLTRVKRWSALKAWAAQVSRRRGHKKAIVALARRIGVILHRMWIDGTEFDWGKRPEAAAQSA

SEQ ID NO: 234001 - protein, 419 aa, unidentified
MIEAVLERCAGIDVGKKYVVCCLSLGAANSTATEETRQYDTTVAELEKMRDWLLENQCSHVAMESTGPYWKPVFNLLEDHFTVILANAQQVKSLPGKKTDRKDGRRLAHFLRHNLIEGSFIPPVAIRQLRDLTRRRRKLLGAGASERNRVQKVLEDANVKLGNVLSDVFGASGQAMLEALLSNQGTPQQLAEFARGKLRRKMPEIVTAVEEHRMREHHRFLIRQSLRHMAFLEEQVAALDEEILRQMKPFEKEFESLQTIPGIKATAAASILAEVGVNMKQFPTAHHLASWAGICPGNNESAGKHKGTQTRKGDPWLRGTLTESAWAASRKKGSSFAARFRRLAPHRGQKRALVALGHNLLIVVYQVLSTGQPYQELGSTYHEERTKEARVRHHLRCLRALGALAPGADLTEVPHTPTV

SEQ ID NO: 234002 - protein, 496 aa, unidentified
MSAFLRRSGQNPHRWATKGMKSKKELLAKKKHIKRKSAKAKHNRVLGIHNPHAAGADIGATEIYIAVPPDRLEMNVRCFGTFTQDLRAIVQWLREYKVTSVAMESTGVYWIPLYELLEQEGFEIYLVNARHVKNVPGRKSDVQDCQWLQYLHSVGLLRGSYRPAQDICAMRAISRYRDNLLHFGAQHLQHMQAALDQMNLRLHHVIADLSGLTGMAIIEAILAGERDPRQLAKLRDPRIKASQETIAKALEGNWRVEHLFVLGQALQSWKQVQQQLGQCDQKLEELSSQLEGKIDLANSPLPPSAKYCGREPRSKNQPNGPWREELYRHFGVDLTEVPGLSLGVVLTLFVELGADLSAFPTPRHFAAWMGLCPDNAITGGKVIRRGTRRNRQRIRLALRLAATSLHHNKTQLGECFRRLRARLGAPKAITAMAHKLARIIWHLVTHRVGYDESIFAEREEQLLRRKQRQLRNLAHSLGFTLVPNPRPAATSNAEVS

SEQ ID NO: 234003 - protein, 318 aa, unidentified
MNVIGLDVSKDTIDATLITTKGSKDYIKISNNNEGFENLINWIKTKRIRKIAISMEATGIYYEQAAEYLNALYTVYVINPLKIKEYAKSQFSHTKTDKADSKLIAEFANRHLDKLTPFRPSENPILYKLVNLLQQLKEQQKETQNRLHTAKDIYIKSTHEAIIELLEEKIDQTSKRIEGMIKKKESLNIEYQNLQTIPAIGKETAVILLRHLTDKNFETANKFVAFAGLSPKIEQSGTSVNKKGRLSRYGHRQLKRALFMPALVAYRMNAFPQLVRNLEAAKKPKMIIIVAIMRKLAKIAFYIHKTKKPFDKARHQTV

SEQ ID NO: 234004 - protein, 412 aa, unidentified
MEAIIERCCGIDVRKKTIVACLMVGKPDGKPQKTIKTFSTMTRELLACKDWLESEGCTYVAMESSGVYWKPVFNILEDSMEVILANARHIKNVPGRKTDVKDCEWIAQLLRHGLIKGSFIPPKPIRELRDLTRYRCKLIQTKSSDLNRIHKLLEDANIKLSSVVSDINGISAQDMIYHLIKEDMSPKEMAELARGRLRKKITELEKALEGSLREHHRLILKVSIQMIASYDNAIDKLDREIDQRMEPYREESERLQSIPGFKKKTAESIVAEIGVDMNRFPSHCHLSSWAGVSPGNNESAGKRRSGKSTPGNRWLKGSLTEAAWAASKSKGTYLKARYHRLASRRGKKRACLAIGHTILIMAYHIIKEQCTYRELGADYFDRLNEVHIIRRLTSRIQALGYHVSIERLPIAA

SEQ ID NO: 234005 - protein, 346 aa, unidentified
MTVSEYVGLDVSKEETSFCVKDAAGAVLARGTAPSDPAALFEALKAHCQCPERIVLETGTMSAWLARGLARLGLPAQVIDARQAHAVMRLQHHKTDAGDAELLAEIARTGFCRKVAVSSEAAQEMRVLLKARAHLVRQHRASQNTLRGLLASLGLRFAKGKSRLEARVNAALEDRPDLRPAIAPLLSATASLKREIARLDKAVLERARTDERTRLLMSAPGVGAVTALAFAATIDAPDRFARSRAVGAYLGLTPRRFQSGAMDYTGRISRHGDGLLRSLLYEAASVLLTRVRRAHPLKEWAHRIRKRTSFKKACVALARKLAVILHRMLITGEAFRWPQTEEAVTA

SEQ ID NO: 234006 - protein, 333 aa, unidentified
MNQQTHYYGVDVSKDTLHISHQTGLDDQGQPQWAYHKVPNELAHLQNWATPLPPNCQVIFEHTGTYSARLAWVLALLDKAFSILTPAQSKGFSTSLKSISKTDRSDAILLARYGQIFQPQPSQLADESLHQLRQQHKHLNDLRISHQAVANQLHALSFDPRASTKVKTSLLVLQQSYLTKIALFEEELDQMSQHELQTISERMQRVKGIGPASAQALCTATNGLAGFESAKAVAKFVGLAPTQVQSGSSVRRRGRMARTGLGYVRGLLYMAARSARKYNLACQALYDRLRAKGKCHRVAMVGVMNKLVHQVFVVVKNNVEFINGFGLPKQNLA

SEQ ID NO: 234007 - protein, 354 aa, unidentified
MERFIGLDVHASSTTMAVVGASGKRLGSKVVETAAASIVEQLCSWSGTTHVALEEGTQSEWLYEVISPHVAQVVVLHLDEKSSRGQKNDSSDAFGLAERLRTGSFNSVVYKSVGVFATLRQLCRVHSKVVGDTVRVQNRLKAVFRSRGIAVDGRGVYGQSKRQSYLSALPLSCRGAALVLYAEFDALKEIGQQAEQDLVAESHRHPASRILESCPGMGPIRVAQALAVIVSPRRFRTRQQLWSYSGLGIVMRSSSDWIRQDGNWMRAELSKTRGLNRNFNRLLKRVFKGAATTVITLYGTDEPLRRDYERLLAAGTKPNLAKLTLARKIAATVWSMWKKEESYNPQAQTTSKHS

SEQ ID NO: 234008 - protein, 338 aa, unidentified
MKTYAGIDLHSSNNYIGVIDANDKRLYSKRHDNRLEDVLKVLSRFKASLQGIVVESTYNWYWLVDGLMDQGYSVHLANPNAIQVYDGLKHTDDKWDSFWLAHLLRLGILPEGYIYPKQQRPLRDLLRRRLMFVKQRTSQILSLQSMITRNRGLNFSGDQIKRFRDEFIEKLFSDRHLLFTAKRNIDTIRFLDRIIGEIEQEVVSQIKIKKEFIKLLTTPGIGNILGLTIMLEVGHIGRFPKVGDYSSYSRCVESKKISNRKKKGENNKKNGNRYLAWAYVEAANHAIRCCPKAQKFFQRKLAKSKRVLATKALANKLSKATYFIMRDQVDFDEDKLFQ

SEQ ID NO: 234009 - protein, 411 aa, unidentified
MHNRQNYLYVGVDLHKEHHTAVIINCWQEKLGEIQFDNKPSAFSKFLLEVETYVSAGITVVFGLEDVGGYGRALAKYLVDHEQVVKEGNPALSFLERKSHVTTQKSDSWDAECVARILINKLNQLPDAKPNDLFWSIQQLVSTRNALVKAQSALKNQLHIQLNHHYPSYKKFFSELDGKTALAFWQQYPSPFCLEGANIKQLTAFLLDVSNNTCSVKKASDILKLVKEDGQTMKEYQETRDFLVRSIVRDIEFKKKEMKYIERELKRLVNLLDYQLETMPGIELVTASALIAEIGDVRRFPNANKLARFAGIAPVYFGSGGKGKTHKSKQGNRALHALFYNLAVQQVQVAKGSKLPRNPVFHAYYQKKLKEGKTKGQALVCIMRRLVNIVYGMMKYKTAYELPVVEEKEVV

SEQ ID NO: 234010 - protein, 388 aa, unidentified
MNVGADKSEPLTAIHTDLGAIFVSLELSRSSWLITSLSPGGGEKMSKHSVPGGDFAGLMERFAQLQEKARLRTGQSFRIIVVQEAGLDGFWIHRALQNEGIESHVVDAASIATSRRRRRAKTDKIDGETLVRALLAYKRGEPRVCAMVKAPTPGEEDRRQLCRERKALTAERVRHVNRIKGLLFSQGISGYQPLRRDRRQRLEELQTGDGRAFPQHLKALVNRELDRLELLLKQIKTVEAARDALLAVGQTGKPAPAAMLLDIRGIGPEFAAILWSEGLFRHFENRRQIAAYAGLAPTPWQSGAVDREQGVSKAGNPRLRTTLIQLAWLWLRNQPRSALSVWFHERVSRNGGRLRKTTIVALARKLLVALWKYVTAGVVIEGVTMKVA

SEQ ID NO: 234011 - protein, 310 aa, unidentified
MTKRFVGVDVAKASLTVVVRPELSSFVFPNTPSGRKKLAETLQKLSPSLVVLEATGGWEREVVETLAEAGLPVRVVNPRQVRDFAKALGKLAKTDRIDAAILAHFAEATQPEPRPLPDEETRELRDLLTRRKQLQDMLTAEKNRLRRAPSSLRPDIEEHIRWLEEKLKELERKIEEKTATFGERMQILMSVPGVGLLTSAVLLGYLPELGKLSGKEIAALAGVAPFNRDSGEHKGKRAVWGGRKEVRAALYMATVAAVRWNPTLRGFYQRLLGAGKPVKVALVACMRKLLVILNAMVKRGTTWSPTYATP

SEQ ID NO: 234012 - protein, 344 aa, unidentified
MLQYVGLDVSLAEVAICVVDEDGTIEFEGTAPSEPDAIADWLLEHDVHPEKVGLEIGGLARWLYAELAERGLPMICIDPRRLRALTKTMPVKTDRNDARAIAQVIRVGWYRPVHIKSPVGQELRMLLANRKTLLVKYGDIENEVRGTLRAFGLKLSGRIASGQFEQRAMELVENRPSLAAMVRPMLIARTALREQCAVLHKMLLDAVARDDTCRRLMTVPGVGAVTAVTFLAVIDDPSRFQHSRDVGAHLGMTPRKYASGETDRNGSISKTGDALMRTTLYQASLALLTRSKRWSTLKAWGMAVAKRRGLRRAIVAVARKLAIVMHRIWADGTEFRWTREEAVA

SEQ ID NO: 234013 - protein, 321 aa, unidentified
MDKYTEIYGVDISKDVFDVQNSKGDYFQLSNDEKGFKNFVKKLSKTALVVMEATGYYHYCLAQYLYQQGYMVSVVNPLSVKRFIQMKLSKIKTDKSDAKAICEYAIINEVPLYTAKDENQAECLQLIRLIAIYIKQSTALKNKIHGEKTLGIPSKVVYHSLNSSLKAVVKEIKALEERLTELVKDHQQTQLTLLKSIPGMGIKTAIMLIVMTDGFNRFENAKQLCSYAGITPIIRESGSSVRGLSRISKMGNQKLRNLLFLCSFSACKYNKACSELYNRIVAKGKSKKLALIAVCNKLLKQAFAIVKSGLPYDENFVSVLK

SEQ ID NO: 234014 - protein, 372 aa, unidentified
MGHHTEAFVGIDTSKLRNAVAIADSGRGGEVRYLGEFPATEAAIQKLVAKLSAKYRHLTFCYESGPTGYGLYRLLKSLGHECLVVAPSLVPKKAGDRVKTNRRDAVGLAKLLRAGELTAVWVPDERHEAMRDLSRARLAVKKDLQGKRQQISSLMLRLGRIYPGKTTWGPAHMKWLMAQKLEHREQRIAFEELLEGIRQEGERVERLEDAIREAVPEWSLAEVVAALQAVRGIDLVAAVGVLAEIGDLSRFQNPRQLMGYLGLVPSENSTGDKVKRGGITKAGNGRARRILVEAAWSYRYPPRVSRDKLPKVEAAPRHVREIAWKAQTRLCGRFRSLERKGKRRTVIATAIARELSAFIWAINRELMAHRQA

SEQ ID NO: 234015 - protein, 391 aa, unidentified
MIYIGIDVAKDKHDCFITNSDGEVLFKAFTIANNLDGFNDLYQKIESVMDDVTKVKVGLEATGHYSYNLLGYLIDKGLPTYVINPLHTNLYRKSLSLRQTKTDKVDARTIASMLMSDVNLKSYSDTSYHNEELKSLTRYRFDKVKERAKLKTSVSRLVCILFPELEKLVPTLHMASVYALLSEFPSAKHVATAHLTRLTNLLSESSKGRYGKDTAITFRDSARASIGSNMPVKSLELKHTIKLIQELDSEIDEIENEIKILMDEINSPILSIPGINYRMGAMIIAEIGDFNRFDSPDKILAYAGFSPSTYQSGQLDGAYSHMEKRGSRYLRYALYNAAKYVCNWDPTFAEYLAKKRAEGKHYNVAISHAVKKLVRVIYHLEKTNQQYIKAV

SEQ ID NO: 234016 - protein, 341 aa, unidentified
MPIVTIGIDLAKNVFAIHGVDDAGKAMLIKPHVPRDQLVALIAQLPACLIGMEACSGAHHWARVFQQHGHTVKLMAPNLVAPYRMSGKRGKNDAADAAAICEAVTRPSMRFVPLKDEHQQATLCLHRTRQGFVEERTATYNRLRGLLSEFGVVLPQSPEKLRRYITEHLDTLPGWAKHSISDLLDHAGNIEDRLIEYDRAIAGIAREDARSKRLMQLRGIGPTTASALLASIGAGHDFRNGRQVAAWIGLTPGQYSSGGKARLGSITKAGDAYLRGLLVNGARAVIASLGEKQDRFSRWVRTLVERRGYWRAAIAIAAKNARLAWASLKYGDDFKLEPVAD

SEQ ID NO: 234017 - protein, 370 aa, unidentified
MKRLPDPVQKINAWVLGLDLHKKITVWVLLDRRGHFVDQGQIPSRPGALRALYKKVIGRKTAHVVFEAGGSSSWAFDTCADLLEDTSRIHVAHSKLVKAIANSTQKNDFNDAWWLAHLTFEQRLPEVWWPRGKYRELRTACREREAYVNERTRIVKRIHAHMRQIGAPLPKGALKNGSEREALRARLPQLSPVLRLAIEQELAHYDMLTQYIQVWEKEIERMVADWDDVALLMELPGIRTTLAAVITAESGPIRRFRNQKAYGRYSGAVPTEHSSAGQVRFGKISREGNPHLRWALTQAVSACMRTKRGKGVAVRNWVLAREKRMGGRKKAITAAARKFAEAIWRLHQLGESFDLERMFGRVPCELRRSA

SEQ ID NO: 234018 - protein, 337 aa, unidentified
MQKNYLGMDVSKLSFDVSLIAVLKGQKQPIVVSKFDNDSVGLKCFKAWLDEHNVTFDANSILVIENTGIYHRQIWNFCSTHLLPIYIGNAADLKWSFGIARGKNDKVDSMRLCDYAYKNHEDIKPTASLNKVLITLKDLLSNRSKLLKLKNAIKQTLGELKGSNDKATQSLMENLNKAALDGLKKSIKQIDAELLKIVNQDESILVNYKRMLSVPGIGKITATFIICCTNNFAIKVTGKQLANYAGVVPFDNTSGTSIKGKSRVHFMANKALKSLLTMGALSAIQTYPEFTDYYDRKITEGKKHLQVLNAIKNKMLLRVASVINQQKDYVNNYKKAC

SEQ ID NO: 234019 - protein, 335 aa, unidentified
MYYSGIDLHRDNCFITTVNESGTIVKQQRVHNSEVLVLNYFQSLGDSHRTVVESTTGWYWLNDLLESHNIPMTLAHAKYLKAISYAKVKTDKVDSHTLATLLRLNLIPAAHKISRELRGLRDTMRMRLRLVQQRTACYRRIESILAKFNTPENVPDQYKFQSDAVQQIVQSLTDQILTLEKSLHPVLVPNSDIQHLFYIPGIGKITAFSLYLEIDGIERFGSVKQFLSYCRLVPAALNSNRRIHQRSSKDGNKYLKIAFSDASVHAVQYYPEFKAFYNKMLRRTNKAIAYTIVAKELAKIVYFILKNHSPYKGFKGLPISRQKSLQWPRLLSPDA

SEQ ID NO: 234020 - protein, 337 aa, unidentified
MEHFAGLDVSMEETHVCVIDREGKVILEVRTPTVPKAIAAALAKGPALERVLFETGRMAPTLFHGLTALGLPVVCAESRQAYQALRSLAAHKTDRNDARGLAHLARTGFFKPVHVKSLPSHAVRALIIARKKLVGQRVTLENQIRGLAVAFGVRLPRGLSPGFAENGMAVGRGIPGLDGAIRGLLAARDAILKAIVAIDADMKTLERSSAACRRLMTIPGVGRLTALAFAAAIDDPGRFRRSRDVGAYLGLVPRRYQSGEIDYTGSISKCGDGRLRTLLYEAANVMLTRYRGSLALKTWALAIARRSTMRKARVALARRLAVIMFAILKHGTEFEPA

SEQ ID NO: 234021 - protein, 392 aa, unidentified
MLLEARIDEPTAIRRQIAAIFVSLELSRSNWLITSLSPGNGVKMSKHGVPAGDLKALLARFAELQRKAQMRTGQHYPIITIQEAGLDGFWLHRALRQQGIESHVVDAASIAAPRRKRRAKTDGIDGEALLRVLLAYKRGEPRVCSMVIAPSPEEEDRRRLCRERGVLIGERIAHVNRIKGLLFAQGICGYSPLRGNRRARLEALCTGDGRALPEHVKAQIVRELDRLELLLAQIKAVEAERDAKLTAAARTDDGTAPHPLALLLGIRGIGMEFAAALWVECLYRSFANRRRLAAYAGLAATPWQSGAVAHEQGVSKAGNPRVRTKMVQLAWLWLRHQPQSALARWFHEQGKRERKNWRKSAIVALARKLLVALWKYVTAGVPIEGAVLKNAA

SEQ ID NO: 234022 - protein, 306 aa, unidentified
MELFAGIDVAKDTLEVSIRPDNFRKTFPNDEEGRTGLTRLLGTMKPALAVLEASGGYEIPVVEALRSLNVVVVNPRQIRDFAKATGRLAKTDTLDADIIARFGEVIRPEIRPLKDADTQRLHALIARRRQLVQMLTEEKNHLAIAPSWTKADIETHIAWLTECITKVGKEMSELIKGNPLWKEKEKLLRTFKGIGPVNAGTLLARLPELGQLDRKKIAALAGLAPLNRDSGKYRGRRTIFGGRADVRAALYMAALTAIRHNSVIKTFYERLIHAGKLPKVALTACMHKILIILNAMVRSNTPWCAR

SEQ ID NO: 234023 - protein, 318 aa, unidentified
MNIIGLDISKDTIDATLHKTNGSIHYIKFKNNDDGLKQFRLWIKGNRIRKAYIGMEATGIYYEKAADMLSSYYTVYVINPLKINDYGKSRFNRTKTDKADSNLIADYIKRHQDTLIPYQIPKNKALQKLINLKNQLQQQQKQIKNRLHSTEEDFIRNIHQDLIDTIQDKMEQVKIAISEQIKKQTDYNHYRNLQTIPSIGKDTASVLYAQLTEKHFKTANQFVSYAGLSPAIIQSGTSVRGRGRLSRYGNRRLKSTLYMPALCAYRFNAFPKLINNLKKAGKPKMVIIVAIMRKLAKLAYYIVKTGQPYDAERHRLNQ

SEQ ID NO: 234024 - protein, 412 aa, unidentified
MERLLERCAGLDVHKRTVAACVRVPGPGGKRVHHVHTFGTTAADLLALGDWLATHEVTHVAMESTGVYWKPVYAILEGAFEILVANAQHIKKVPGRKTDVKDAEWIADLLRHGLLRPSFVPPQPIRELRDLLRYRRKLVESQSAERNRLLKVLEGANVKLASVASDAFGVSGTLMVEALVEGKATPQEMAELAKGRLREKIPQLEAALEGRLEEHHRFLLRIQLRRLRHVDADLEELEKRMFEKLRPYAPQHALLMEIPGVDRILAAVIIAELGVDMSVFGSVSQVVSWAGVCPGNHESAGKRQSGRTTKGNVYLKTALVEAANAAARAKDTYLREKFFRLKARRGHKRAAMAVAHKILVAAYHMLSEQVSYNDLGDAYLDQLSKKHLTRTLVRRLERLGYSVKLEQNADAA

SEQ ID NO: 234025 - protein, 353 aa, unidentified
MSHLPEEREVILGVDTHLDVHVAVLIDVVGRIVATTSVSTTALGYEQLIEWARGFGRLTRAGIEGTGTYGAALARRMQAHGVQVLEINRPDRSRRRLRGKSDPTDAENAARAVLAGEANAIPKAQSGVVEAMRAVSMARRSAVKAKTQAINQLRALLVTAPESIRATLWKVKPEQCVARCARLQSLGDTPLLQALTNTLRLLARRWMSLAKELHQVDAALVELTKRAGRRLLTRFDVGPQTAATLLVTAGDNPNRLRSEAALAALCGASPLEASSGKTTRHRLNRGGDRTANNALWTISMVRMRSDPRTRAYVARRTAEGLSTKEIQRCLKRYIVRELYPLILADLADSVCKT

SEQ ID NO: 234026 - protein, 324 aa, unidentified
MDDGSTQQMKMTAGLDIGDKYSYLYVLDNQSGEMIEESRLRTTPDDLRRRFDSEQKMKIAIEVGTHSNWVNRILKECAHEVLVANPRKTRLIYGDKHKTDKLDAQKLARLARVDPELLYPIEHRGEQSQTHLALIHSRDALVRSRTQLINHVRGTVKSFGARLPKCSAESFHKKVADALPSELAEALEDVVKTIGSLTVKIRDYEGRIERVCKKSYPQETALLQQVAGVGALTLLTFVLTLEDPDRFEKSRAVGAYLGLVPAKDQSGDQDPGKGISGEGDEMLRRLLVSSAHYILGPFGPDSDLRRHGEKIAVRGGKNAKKREL

SEQ ID NO: 234027 - protein, 423 aa, unidentified
MDVLYPRCAGLDVHKAMIVACVRIVAGGKTMRECRTFETSTTGLQGLLAWLTEQGCTHVAMEATGVYWKPVWNILSDGGFDLIVANAAHIKTVPGRKSDVNDATWIADLLACGLIRASFVPAQDFQELRALLRTRTQLTREQTRHIQRLQKTLDEANIKLDTAISDVMGVSGRRMVEALIAGETNPVVLADLADRRIKAPREELVEALRGRVTEHHRFMLRLHLEQHDRVAAAIASVDAEIDTTVARMDQREVAGQASFRALILLLATVPGGGLLAATVILAEIGTDMSRFPTAGHLLSWAGFCPGQNESAGKRRSAKLRTGAPWLKVILVQCAWAASRTKGSYYKAQFWRLCARHGKKKAACAVAASMLTAIYHMLKDGTEHHDLGAEYFDRRPAEVKANKLVGQLAKLGFAVELRSLAEAV

SEQ ID NO: 234028 - protein, 346 aa, unidentified
MLYAGLDLARKRICFDARRPDGEIVDRGASPTDSEGLDRLAQRLLAHDPQVLAVVESMNGARFVHDQLELHDIDVQICDAERAKGLAPLACKTDKIDAGVLAELARRDLVPEIWLPDPGTRADRERARFRLHLVRKRTALKNRVHSTLIAWGKPCPVSDLFGRRGRGLLGRLSIPEPWRSTLQASLQLIDSIDGEITAQERELRLIGAEHPYVPQLTTVPGIAWVLGFTIACEIGDITRFPSPKKLTGYTGLCPKVNQSGEHDWRGRMKKNGPRYLRWALIEAAQHAGRSPHYRKLYERTRKRHGPQRGAKVAAIVVARKLSGAIWHMLTNDEPFAPGSAAGTLAA

SEQ ID NO: 234029 - protein, 406 aa, unidentified
MSTFIGIDWSQDKHDVAFMNTAGAIIARLTIPHQPAGFRQLDTTRQRLGVTTTGCLVGLETAHNLLLDFLWDHGYEHIFVIPPLVVKSSRGRYGHSGARDDTLDAQLLADLLRTDRARLHPWRPDSPLTRNIRARVGFLSFLKHEAIRVHNRLRAVLLRYYPQAMELFSGLMVPTTLAFIAAFNTPQALAALSYEAFASFAQEQGHWHRQGVFACFARLQHTPLQASPAIVAAYQDEARLLAQQLRELILAKQEVQRALNTLFAQHPDQAIFASLPGVGAFLAPALLAKLGDDRERFPSAASLQALAGTCPVTAASGKRRVVKFRQACDKEFRDIAQQWARCSLRKSVWAVAYWQQLRPRCASEHDAYRRLANRWLAVLWKLWQSREPYDEAYHLQQRHRRSQPLA

SEQ ID NO: 234030 - protein, 386 aa, unidentified
MANTARRRSNPSITTTGSPVGEITGGVDTHRDFHVVAALDGLGRLLGTATFDATDVGYARLAEWLAGFGPVPAVGVEGTGDYGAGLTRHLTGQHIRVVEVNRPNRQKRRRQGKSDTTDAINAARAVLAGEAHAAPKLRSGPVESLRVLRETKQQLTKARTAAINTLRALLVTAPAGLRESMTGLNTRDLVAACANLDTPTVPASGLRGRARTASHDELAEALCDHETATRTALATLAATITGYDTRLTELTTQLEALIARIAPRTLACRGLGPDTTTQLLVTAGDNPDRIHSEAAFARLTGVAPLDASSGQQQHHRLSRAGDRAANSALYRITLTRMATCERTRTYLTQRLAANGSNKKHLIRCLKRYITREIYPQLRTDLTTLTT

SEQ ID NO: 234031 - protein, 357 aa, unidentified
MGQSNRISFKGQNIYVGIDVHLRSWSVTILSETSVLKRMSQGADPDALHRFLASHYPEAEYHSVYEAGFCGFWIHDRLTELGIHNIVVNPADVPTMGSEKLRKTDAVDSKKLAVSLRARQLKGIYTPDSEALEIRSLIRLKNSITKDTTRQKNRIKSQLRYLGIEIPAEYLEPHSNWSKRFLNWLKEVEMRTPSGRHSLDILIMQFEALRKQKAEMTRKLRELSHTERFEETLKLLMSVPGIGQTTGLALISEIVDITRFANAEQLAAYVGMIPMCHSSGDHEGVGDITLRKHAILRSNIIEAAWVAIRKDEAMQLCYLNNCKRMVPSKAIVKVARKLVNRIYFVLKRRQPYVNAVA

SEQ ID NO: 234032 - protein, 377 aa, unidentified
MYYFILYVYTILTLLFKGIGSSEHYVRAFDYLGRELTRKVFRFSTDINGFNSFYDWVTQICIKHGKNEAMIGCEPTGHYWYTFYQFVKDHGMKLAFVNPASVKKAKELDDNSPKKTDLKDPKTIAKLVIDGRYSFPYVPEGIYAEIREVTSSRDRIMKELNAASNRIQRWLKIYFPEYLTVYKKFDTTTGRMILEEVPLPTMVTALGVDNIIKIWREHKVRGKGASFNRAKTLVDAAHDSVGKSGGQGAVMEIQMLLEDYKVKKQQLEMVTSVMEELIMQIPNAEKMLSVDGVGLVTVAGFISEVGDISRFKNPKQIQKYAGFELVENSSGKHKGRTTISKRGRKKLRKIIYQVVLPLIQSNKEFTERPTGNDSRWM

SEQ ID NO: 234033 - protein, 371 aa, unidentified
MDRNRTCVGLDVHARSVWACTVDDDSGEMKTSRISPKTPEIVKWARALPGFVEVAYEAGPTGFGLARALIAAGMTCHVLAPSKMERPSAARVKTDKTDAEWIARLVRIGELATVVVPSEGQEAARDLVRAREDVRGDLMRARHRLSKLLLRQGIVYEATAWTGVHEKWLRSMSFDALGVQFAFDEGLDAVLTTTARRDRLDAQIVKMAAEPLWAPVVGRLGCLRGVSTLTGFGLAVEIGDWQRFTGRNIGAFLGLVPTENSSGDSRSQGSITKTGNGHARRLLVESSWHHRRQYRLSAELIRRQTGQAPAVRARADQANRRLNQRWRTFDARKKRPTIAAVGVARELAGWCWSLAVMDEENNNKSAMNRAG

SEQ ID NO: 234034 - protein, 348 aa, unidentified
MPCQSYCIGVDASSDYLDLDGLPGQSRRRFANTPESHAELAARLSALRAAGHDVLVVMEASGGCERGLHRALVEAGVPAAIVNPQQVREFARSQGLRAKTDRVDARAIRRFGEVSRPRPTPLPEPVRAELIELLGYRDQIVAEITARTLQRSHLRSAFLITRADAALARLRQESEMLARLIEATVAGDAELSRRADLLTSFKGAGPLVAAELVAHMPELGTLNERQAASLAGLAPFACDSGKMRGVREITGGRPKVRRALFHVARVGLRWNPTLKALYERLTARGKPGKVALVACMRKAVVILNAMLKSGQPWDPDYEAKKEEARKAAKAARHQPGPAEGVIEGAAAA

SEQ ID NO: 234035 - protein, 320 aa, unidentified
MTSRGAEKMNNDTIGVDVSKDHLDAHRLADGASRRFANDKCGRKAFVKWCAQTPVQRVVFEPTGPYHRAFERALGAAGAPFVKVNPRQARRFAEAIGKLAKTDRLDAAMLARMGAMLELKTRPPQSEALLELKELHLAREALVKDRTAAKNRGKVLAAPLLKRHNAQRLEQIKRQITAIEAAILEQVQADPDLAQRFAILTSIPGVSAITAFALLIEMPELGALEPGQAASLAGLAPVARQSGRWTGRAFIRGGRASVRQAVYMPALVATRFNPDMKAKYKQLINAGKPAKVALTAVMRKLILLANALLKANRSWTPKPA

SEQ ID NO: 234036 - protein, 402 aa, unidentified
MNCVGIDVSKGKSTIAVMRPFGEVVVSPFEVCHTVNELSELARQLKSLDGEARVVVESTGNYHAPVAWLLHDAGFYVSVVNAMLVHDYGNNSLRRAKTDKKDAVKLANYGLDHWLTLPRYVPEEDTRLMLKTCYRQYQQYSKVQTMLKNNLISLLDTAFPNANRLFTSPPRADGSEKWVDFVATFWHCECVCGLSEKAFTAKYQKWCKKHGYNFSEDKALDIYASAFAHFGVMPKTDTAKLLVEQAISQLRATSAALAALKQKMQSLAASLPENPVVMEMFGVGPTLGPQLMAEIGDVRRFHSKKALVAFAGIDAPPYQSGQIDVRSRSISKRGSASLRRTLFLVMGVLLQCAPMDEPVYQFMDKKRSEGKPYRVYMMASANKFLRIYYASVKAYLDSLEHD

SEQ ID NO: 234037 - protein, 357 aa, unidentified
MKTALVMRRGSVVGKDIYVGIDVHKESWQLTVRTEGEEIFNGRIPGHYQSLKKFFERYEGCRIKVAYEAGPFGFWLSDKLTADSIEVLVVPPSLIPTESGNRVKTDRRDSRKLARLLESNMLKRVYVLAPLEREHRDLLRTRRQIVDHRNDVARQIKSKLLFYGITPPFTSATRWSYKYIKWLKALQFDTTYLKECFDLLIELFEYLTRQIVRINKKVVLLCRDKKYRDRIRLLCTAPGIGRLTAIEILVELQDMSRFESADELASFIGLTPSEYSTGERTRQGRITRCGNKRVRTYLVESAWTLITKDPAMRLKYLKLKNLRGGKRATIAIARKLLIVIRRMLLDNVPYRMTAMAA

SEQ ID NO: 234038 - protein, 355 aa, unidentified
MNGTKYVAMDVHTATISVAVLNFDGKLIMESVIEAKRSTIVEFIQGLRGELFLTFEEGTWSAWLYDLLTPYVANIVVCDPRRNALLKEGSANDRIDARKLAELLRLNSLRSVYHGENGLHTLKELARAYLTINKDLARVMSRVKAVYRSWGIPCAGESVYNPRHREEWLRKITQASVRRRAELFYEQLDALVPLRKRARQELLAEGKKHQAWKLLRSIPALGPIRVAVLMAIVQTPHRFRTKRMLWKYSGFGVLTQTSADHRYVDGQLQRSKKPAFVRGLDPAHNHQLKNVFKSAAIQASTTKGPFREFYEALVTKGMRPEMARLTLARKIATISWMVWKKGVAFDAKYLKAQTA

SEQ ID NO: 234039 - protein, 354 aa, unidentified
MIIVGCDYHPGFQQIAYVDTETGEVKEQRLEHRELAEKFYRELASQGETIRLGMEASGHARWFERLLAELNIELWIGDAAKIRAKRVRKHKTDRQDAQHILQLLREDRFPQIWVASWENRDLRQLLWHRHRMVQARTRIMNQLQAVALNEGLRCKKKLWREQGRKQLEAYRLAPWASRRREDLLKLLDELNPTIAELTQAIDQEVEKSAEAGRLMTHPGVGPLTALAFVLIIGRAERFQCGKQIAAYLGLVPLEDSSGERRRLGHITKQGSSMLRFLLVESAQVAARSIPHWRNQYFHLAMRRGRKIAKVAMARKLAVRLFWMMRQGWDYEQVNKFGSHAGQPEHRHGVQSNTA

SEQ ID NO: 234040 - protein, 437 aa, unidentified
MRGNANETLYLRSKDPSAHTDQLVIYCMTDDVDKAGGVDVHTKTLVASIVAGDEYVTRSFKATKNGQEELRDWLLENDCHRVLFEATGVYWYQLYLVLYQALEVVVANPWHIKNIHGIKTDKRDSQWLAKVCQQKLADPSRVFTGWYYEYRELSRHREALVKTRTTLKNRVHRRLELCNIKLGQVFTDCFGKKGRHILEDLLKGKPLEEIIEDKKLKLSKAKKESLREAVADMLDPLSIRTIEYHLKMIDDLDEEIRVIEAEMARKGREKKELLDILAGIPGVGRIGAHTILAEIGRVEDFETGEQLASYFGLAPRIYQSGEKNLTGHITKHGSPHMRWILVQIAHTLGRMKDNNLSRFYNRLRERKSPGVAAVATARKLLCIIHHLLVNKEPYMEEDGKKKRIRRLPTIELPQDLEHALQVVVQAGYVVKPKGRTT

SEQ ID NO: 234041 - protein, 317 aa, unidentified
MERTEISFEQAVRVGCGIDVHQAVIVATISKGQENYETKEFSAFTSSLTDLREWCKRAGVTHVAMESTGVYWKPVFNILEEDFEIILVNARHVKNVPGHKTDKKDSKWISKLLLAGLLKGSFIPPRDIRELRDLVRYKKKQVAHVSSEKNRMIKILEDANIKISSVLSDVHGASGSKIIHDIIDGKTDVDELIKHIHGKVKASREDIRKALEGRLTAHHRFMLKIIRKSIEEKEGIIKELEDQIDVATAQYAVEVELLQTIDGVGKDSAIGIISEIGVNMEQFPNEHHLSSWSGMSPGNNESAGKKKAQGPLKETNI

SEQ ID NO: 234042 - protein, 411 aa, unidentified
MEVTYKRCCGLDVHKETVVACLLIREGGKVLKEIQTFLTMTVDLVVLHDWLKAHQVTHVAMESTGIYWRPVFNLLEEDFTVLLVNAAHIKTVPGRKTDVKDCEWIADLLSHGLLRGSFIPPEPIRDLRDLTRYRKSLSDERVREVNRLQKFLEAANIKLSSVATDVMGASGRAMLEALASGGTDPQALSELAKGRLRKKLPELKKALEGRFRPHHRFMVSEILTHLDFLDESIERVSQEVSTRIVPFSPKVDLLDLIPGIDQRVAEGVLSEIGVDMSCFPTDGHAASWAGLCPGNNESAGKRKSGKTRKGDRWLRRYLIEAAWAATRKKGSYLSALYHRLVVRRGKKKAIVAVAHRLLVIIYHMLKDHGTYRELGSDHFNKLNAAYVRRHHVKRLESLGFKVILEPISEAA

SEQ ID NO: 234043 - protein, 359 aa, unidentified
MSEHTFIGLDVHARSVAAGLLGGESGEVRSCSAPTRAAELVSWLQAQGESISVAYEAGPTGFGLARACAAAQIPCLVAAPSRIARAPGERVKTDRRDALKLARLLRLGELTAVRVPSACEEGARDLVRAREDARADLMRARHRLSKLLLRQDLVWEASAWTQAHERWLATQRFEERGLAIAYAEAVAAVASVRARRDALDAAIAEEAAEPRWAQVVGRLACLRGVSTLTAFGLAAEIGDWERFDGRSIGAYLGLVPSESSSGERRRQGAITKTGNGHARRLLVEAAWQQRRPVSHPSRELVRRREGQPALVRVRAEAAGRRLQKRWRSFDARGKRSTVAAVAVARELAGWCWSLATMDA

SEQ ID NO: 234044 - protein, 330 aa, unidentified
MEQYIGCDSHRRYSVFVAMNERGQASAPMRVEHDREGIREFLRELPVGSQVAIESTGGWYWLVDEMEAAGLKPRLANAHEAKQRMAGRNKTDKLDARGLALELLMGTLPSIWIPPAELRDLRALMRTRLALRAQSTQVKNRVSAAVNRYGLKEPQQDGDLFERSGRVHLNRYVQCLPEATQAATLRELDLLDSLRDHIGALEKQIETRIGNREEMRLLKTLHGVGPILGATLLLEIGEIDRFPSAARLASYAGLVPIVHSSGGKTWHGRVPKNANLYLKWAFVEAANCIVAQRRRLKGTHVVESDTPRGAGGLMSWTASKAVGHWFRRRA

SEQ ID NO: 234045 - protein, 380 aa, unidentified
MDQQVIFVGLDVHKATIAVALAPDGRSNEVRFQGSVPHRPGAMADLGRRLQSKHPGARLTFCYEAGSCGYGLARELTDAGYECLVIAPSFIPSRPGDHIKTDKRDATMLAKMHRAGELTTVWVPDASHEAVRDLVRAREAAMYWRNRARQALSSFLLRQGYRYGGRSAWTASYWRWLATLVLEHPAQQIAMQEYILAIHEADARHDRLVKQIEGIIPTWSMAPLVTALQAMRGIAMITAATIVAEIGDLGRFATPRKLMAYLGLVPAEHSSGAKIRRRGITKAGNPRARRLLVESAWTYAKSPRVSQEIQRRQEGVELDIVKIAWKAQLRLHDRYRRLAATGKPKNVVITAIARELVGFIWAIGQRVAAPTAETNTAVLR

SEQ ID NO: 234046 - protein, 372 aa, unidentified
MDESSKGTIYVGLDVHKESITVAYAPEERGAEVVSLGAIGPRQSDIDKLIRKLQSKGATLVFVYEAGPCGYWLYRYLTGKGLTCHVVAPSLIPRKPGDRVKTDRRDAATLARLMRSGDLSSIYVPRVEDEALRDLSRGREDAMQDLKRSKRRLKSFLLRQDIRYEGRASWNAAHLRWLAGVVCPTPVQQIVFQEYLRAVSEQQERRERLERELHEGVKGWRLYPVVEALQALRGVGLTGAVILMAELGDITRFDSPRQLMNYLGLTPSEYSSGERRRQGGITKAGNSHARRALVEGAWAYRYPAKVSRHLRLRQEKLPAEIQAISWKAQVRLCKRYRQLSVRGKHVNQVVVAIAREMAAFAWAIARLVPVAA

SEQ ID NO: 234047 - protein, 389 aa, unidentified
MVDYTQKKVEVISFERRPSAYPEFIDKVGKFVPKGKTAIFGLEDTKGYGRSLAVFLVEKGYIVKEVNPALSSAERKSKATVKKNDRWDAECITRVLHRDFEELPDAKPLDIYWTFKQLTNRRNTLVKSQAILKNQLHDKLSHHYPSYKKFFSEIDGKTALAFWEKYPSPQVIKYVDLEDFAQFLRDNSHNACSTRKAKEILGLIEADGDTTREYQEYRDFTIESIVREIRFLKEEILKINKKLRELLKKLDFKLETMSGIDVVTASNLVAEIGDISRFKNEEKLACYAGIAPIKFSSAGKGREQKNKQGNRKLNGVFYMLALQQIQISKGSGLPRNQAFYNYYMKKYGEKNEKTPALVSLMRLLVKFIYKMMKYKIEYQPPEVQNTRVS

SEQ ID NO: 234048 - protein, 340 aa, unidentified
MQAPRHIGIDLHRNQFTCCVRLENGRNYLTDWKLEDLPQFVKKLRPGDEIAVEVTGNTRLFRDAVSPHVARVVAVDPNQFKVISHSVKKTDPNDARNLALYLAKDLLPEVRMKDKTQAQLASLTHTRDTLVKLRTALKNKINNILSAHGINLEKEALSSEKKLNEVLAMKFDPMVKIELEVIVEEIRSLNQKVAKLEKTIAEEGSKLEGHKNLTSIKGIGPLTGSILLSVIGDINDFADEGKLAAYFGIVPRVSNSNETERSGRITKRGNKLGRTALVQCALIAQRYSPYLKRHYEKIKARRGTGKAIIALARKLLGIIYRTLKNKWVFEDFPNFVLAEV

SEQ ID NO: 234049 - protein, 341 aa, unidentified
MDITTIGLDLAKSVSHVVCCNQAGKIVRKKMLRRTQILHFFSELPPCLVGVESCASAHYWAREIAKYGHQVKQIAPQHVKAYVRGNKTDFNDALAIAEAVVRPEMRFVRTKTQTQQDIQALHVMRKKCERDRTANSNEIRGLLNEYGIILPVGISHVYKSLPKLFDRQVENGLSELFKELLERHYQKLVELDEHLDWYTKKIKQLSQHEACRRLQSIPGVGPIIASALYQHIGNGSEFKNGRAVSASLGLVPKQHSSGGKHNLQGISKRGDSYLRTLLIHGARAVMRVSKHKETPLSQWIKRIEQTRGRNKAAVALANKLARIAWALLAQGGDYQPELTTA

SEQ ID NO: 234050 - protein, 336 aa, unidentified
MSLYCGIDLHSNNNYACVIDNKDKRIFEKKLDNSAELVIQALQPYKRRLKAVAIESTFNWYWLVDSLMAAGFEVMLVNTAKVVQYEGLKRTDDRYDAFHLAHLMRLGILPTGYIYPLAERGLRDLMRKRMGLVRDRTRYILSLKTQHQRQTGRNLASNDIKTRKFQLPVLGDANVQLAMSSNLSMIRVLTGEVKALEKVIMTQVESSPSFELLKTTDGIGDILAETILLETGDIDRFKSPGNFASYCRCVDSRKESNGKKKGVGNKKNGNKYLAWAFMEAANFAIMHSVKASQYYSRKKAKTNRVVALKALSHKLARACYYIMKRGVAFDEDKLFS

SEQ ID NO: 234051 - protein, 461 aa, unidentified
MGRARAKRIPAKTVEDEEYELRHERTCGIDIAKDKADIAVRLPPEREGGRRRTRIWTLPSVFAAITELGAELTEAGVELVVLEATSDYWRSWFYLLEAMGLNVRLVNPSHAKQLAGRPKTDKLDCQWLARLAEMGLLRASFVPPPAVRALRDLTRTRLHFTRDQTREWQRLEKLLEGALIRLSSAVGKMAGNKSALKILQAIVDGERDPGALAALAHGNVKAGRDGVRAHLEGMMPAPHHTELIRIHLGLIKTLEREAGRIDDLIREHFDTMEDAWGVTADGVPSPDPGPDAALLTAAQRLAEIPGVSLELAIGIIAELGLDMSRFPTSGHLVSWAGLSPVSQQSGRQSRKAKKGKGDAYLKGYCTAASLAASSTGTFLGERYRRLARRIGGAKAQVAVARSILVIVWHLLADPAARYTDLGPDWHLRKTDRSRRTRSHVQQLRALGYDVTLTPADQTTAA

SEQ ID NO: 234052 - protein, 375 aa, unidentified
MKEKLRFLGLDVHAETIAVAIAEPDGEVRSLGTIPNRAESIRKLIKKLGPAEQLRACYEAGPTGYVVYWQLAELGIQCEVVAPTLVPVKAGDRVKTDRRDAEKLARCYPSGDLTAVWVPDEGSEALRDLVRAREAAKQDQMRARHRLSKFLLRSGQRPPTGVRSWTRPYLIWVAQLRFTQIAQESTRQDYLHEVEHMRERVARLEQAIMEAVKVASPALQQVINDLQALRGIADISAVTIAAELGQVSRFGSARQLMGYCGAVPSENSSGKRVRRGSITKTGNAHLRRIVGEAAWSYRRPPGIWYGLRRRQESISEETKEIAWKAQHRLHKRYMKLGTAGKVQGKIITAVARELLGFIWAIGTRAEMIVNQRTAA

SEQ ID NO: 234053 - protein, 423 aa, unidentified
MRQEAQKQQEFGAYIGLDWADQKHVISLRSADSKQVEQCELAQKPEALAAWVSGLQQRFPGQRVAVALEQSRGALVYALMGYDFLVLYPINPKSLAKYREAFYPSGAKDDPTDGDLLRELVAMHRDRLRAWVPDDELTRTITLLNEYRRDLVGRQTALTNQLTGLLKLYYPQALGWMGGLATVQACDFLQRWPTLAKVQQATLLKLRKFYTAHGCRKAELIEQRLQEIKVAQPLTRDGAVITASVSMVQATINQLRPLLESIALMEKQIAELFSQHEDHDLFSSFPGAGPALAPRLMGAMGADRGRFAAASEVQQLSGIAPVTVRSGKSCWVHRRWACPKFVRQSFHEFAGQSIRQSAWARAFYDQQRQRGKGHHAAVRSLAYRWIRIIYRCWKMRVPYCEETYCRALERRQSPLARVLAAQT

SEQ ID NO: 234054 - protein, 416 aa, unidentified
MDTMYERCCGLDIHKKTIEACFRSGKKKTHMSFGTTSAELRKLTMWLVENDCQSVAMESTGSYWKPIFNILELSGTDMKIIVVNARHMKNVPGRKTDVNDAEWIAELLQYGLLRPSFIPDREQRELRELSRYRKSLVGERAREINRLQKMLEGGNIKLTSVVSEVTGYSSRRLLDRLLRSDEPMTEEVISELVHTSLVGKSKELEIALDGLLSELQKELLIKVLDHIDDMSRRIADLDDFCRKQMKKYEDALDKLDEIPGIARRTAETILIETGLDMSRFPTAKHFARWAGLAPGNNESAGKRSSGRTTKGNPTLKSTLIQSAKVAARKKDSFFKARYQKIAARRGANRASVAVAHSMLIAIYHILKSGERFKDLGEDYYNQFNKEKKKKYYLKKLTKLGVNLKEATLSISIQTAT

SEQ ID NO: 234055 - protein, 418 aa, unidentified
MKIVFPTCCGVDVHKSFLVATIIKTPQDSLQPSYQKKRFSTFNSDLNRFADWLHENDCLDVCMESTGKYWVPVFNILEKRGIRVIIANPKWVKAVKGNKDDTKDSKWIGDLFRIGLVKSSFIPAKDIRILRELTRYRYKLTSMKSSEKNRFQNAFTVCNVALDSVVSDMFGKSATAITDYLTSDEDFDPQHCVSLLHRSLKKKAEDVLSSIEGYEIALEQKCRIGIVRDHLHYIEKLIERVDICINTMVEKYDGAISLLRTIPGIDRSSAITVISEIGVDMAQFGSSKRLCCWAGLTPGNNESAGKKKSVRISRAGVYLKPVLVQAAHAAVKDKLNPYYALKYERIAKRRGKKRAIVAIARMILTAIYSMLSTGEIWNPVDLFKVDMPEHLKEQQLQKAMKQAVRFLEAQGLTVLDSA

SEQ ID NO: 234056 - protein, 358 aa, unidentified
MQRNEISFKGQKIFIGIDVHAKSWKVAIAPEVGAVKGHSQKPSAKELFDFLKKNYPDGEYQAVYESGFSGFSTYYALKKVGIECMVIHAADVPTTQYEEVMKTDRIDAAKLARSLKAGQLRYNYVPEKQYIDDRSVVRIRRTIQKQLSGYKSRVKHLLHCHGVEMPERFSRVQTHWSRAFITWLMNDVKLMSDSRTSLDLLIRQVEVIRGTLLEATRQLRLMSQAERYKRRHDLLRTIPGIGPIVSMCILVEVCDVKRFHNENQFAAYLGLIPTSHSSGEKIVHGEKTFRGNKQLGPMVVEAAWVAITRDTGLGSQYFQYKQRMEPQEAIVRIARKLSNIIFSVLKNEKEYVPYQPGN

SEQ ID NO: 234057 - protein, 351 aa, unidentified
MVVLGVDPHKPTHTVIVVDELGRVLDELTVPARQDGHLRLLGWARRFGPQRRWAIEDCRHVAGGLVRDLLAAGEQVVMVPPKLMARSRESARTRGKSDPIDALATARAALREPDLPTAHLDGPTLDLRLLVDHRDDLVAERTRMINRLRWHLHDLDPDLNPPRATLHRPHVLTELATRLAALPPGVRRDLAAELCDRITEHTARITTLETQISEQVRPLAPTLLAIVGIGPLTAAKLLGETGGAARFGRAARFAAHTGTTPIPVWTGNRTKHRLNRGGNRQLNAALHRVAITQLRCHQPARALIQRRQRDHHDTKAGALRVLKRHLADVVFTALITDEQARTHPPAHPAAA

SEQ ID NO: 234058 - protein, 340 aa, unidentified
MTITTIGIDLAKNVFAVHGVDQNGKTVLVKSRVTRAALPGLIASLPPCVIGMEACSGAHYWARLFLQYGHEPRLMAAKFVSPYRMAGKSGKNDAADAQAICEAVRRPHMRFVPVKDESQQAMQCLHRTRQGFIEEKTATYNRLRRLISEFGVIAPQSTDALRRMVSVQKRSLPLQVQQCVDDLLEHVDRIEANITEYDRILSRIAKTDHRSQRLMKLKGVGPTTACALVACIGNAHDFKNGRQLAAWLGLTPSQYSSGGKSKLGRITKAGDSYLRTLLVQGARSVLIGAEKRTDSFSRWVCSLVERRGYWRAVVAIAAKNARLCWASLHYGDDFRLYSAS

SEQ ID NO: 234059 - protein, 405 aa, unidentified
MSDTEDVGVFLGLDVGKSAHHGHGLTPAGKKVFDKPLPNSEPNLRVVLDKLTAKFGTVLVIVDQPASIGALPLTVAREAGCQVAYLPGLAMRRIADLYPGEAKTDAKDAAVIADAARTMPHALRSLDLTDEITAELTVLVGFDQDLAAEATRTTNRIRGLLTQFHPSLERVLGPRLDHQAVTWLLERHGSPAALRKAGRRRLVEVIHPKAPRMAQRLIDDIFEALDEQTVVVPGTGTLDIVVPSLAASLAAVHTQRRSMEAQINTLLEAHPLSPVLPSMPGVGVRTAAVLLVTVGDGTSFPTAAHPASYAGLAPATRSSGTSIHGEHAPRGGNRQLKRAMFLSAFACMNADPASRTYYDKQRARGKTHTQAPLRLARQRISVLFAMLRDSTFYESRTPKDIELAA

SEQ ID NO: 234060 - protein, 366 aa, unidentified
MQEISTMQASGSDNFKGRQITIGLDLGDRSSSYCVLGATGDILLEDKLPTTSQAMKQLFGRMLRSRIAMETGTHSPWVSRLLTELGHEVIVAHAQRVRLIVKSRKKDDRLDARTLARLARIDPQLLNPVRHRSAQAQMHLTEIRARAELVRARTALVNSVRGLVKSYGERLRKCGTQQVGRDLAMGLSAELRAALEPLLREIESLNEHIKEYDRRIEKMAKEAYPEVALLKQVKGVGDLIALGYVLTIEDPHRFKKSRDVGCFLGLQPGRRNSGESEPQMHITKEGDRYLRTLLVQGAHYILGPFGEDSDLRRWGRKLSERGGKKAKRRAVVAVARKLAVLLHRLWVSGEAYEPLRNNQKTVSVAA

SEQ ID NO: 234061 - protein, 368 aa, unidentified
MAEPIMVACDLHDKTMLLKIARGRGAAETLSVANTIPGRDKLIAELRRRSKAAKGAKVIFAYEASGQGFGLYDQLTAAGITCHVLAPTKIARSPQQGCQKTDEKDAILILEVLRGHVLAGNRLPSVWIPDPQTRDDRELVRLRLDLAEKITAVKAQVQGLLKRNNLKRPEGLGQGWTKKFWSWLDQLTTGETLGWATRNTLASLLRQLRFLQEEIGRVEEQLSVLAYQPRYLPTLKRMTQLSGVGVLTALVFLTEVGDLGRFTNRRQISAYLGLVPRSYESGDQKDRKGRITRQGPSRVRRVLCQATWARVRCDGPDHEHYQRLVAKNPKRKKIAVVAEMRRLAVRLWHCGRSSSQPPLRPTCRAPAV

SEQ ID NO: 234062 - protein, 339 aa, unidentified
MQLYTGFDLHSTNNYLAIIDEKGKRVYKRRLRNDPESILTALMPHKDNIEGIVVESTYNWYWLVDLLMEEGYEVHLANPAGIQQYKGLKYSDDKHDAFWLAEMLRLGILPEGYIYPKEVRPVRDLLRKRGHLVRLRTSLILSLQNIISRNNGLKMTANDMKALKIDRVAPVLQHNEDLALVGKVSKESIDFFTRQIRAIESVVGKRMTLENPYSSLLTVYGIGKILGLTIKLETGPIERFKKAGNYVSYCRKVSSKWISNNKKKGKGNVKSGNKYLAWAFSEAAELARRSYPEARAYYNRKMQKTNRMVAHNALSHKLAKAAYYIMKDGVPFMPEKIFV

SEQ ID NO: 234063 - protein, 310 aa, unidentified
MGNVGIDVSKHHLDVAIRPAAERFRVENSEAGLTELLKRLKKVKCHRIVVEPSGGYELQLVRSLAQAKLPAVVINARQIRQFAQATGRLAKTDNIDADVLAHFAEAIEPEIRPLPDDSHRELEALVTRRRQLVDMRGDEQKRRQTAPKAVRPNIEQVIEFLSQQIDDLDDDLKKLIRATPLWREADDLLQSVPGVGPVLSATLTAFLPELGQLSRKQIAALVGVAPLNNDSGQKSGKRSTWGGRAPVRAVLYMAAQTASRYNAPLAAFYQRLLSKGKAPKLALVAVMRKLLTVLNAIARTKQTWTAPLPA

SEQ ID NO: 234064 - protein, 304 aa, unidentified
MFVGIDVSKDRLDIHIRPSGDAFTVMHDGEGITALVERLGELRPELIVLEATGGLQTRVAATLAAAHLPTAVVNPRQVRDFARATGRLAKTDALDAEAIARFAEAVKPEPRPLSDEDGQALQALVARRRQLVEMRVAEKNRRQQVKAQLRKRLDEHIEWLAQAIAELDTDIDDHIKGSPVWRAKEDLLVSVPGIGNTTARTLIADLPELGTLSRRRIAALVGLAPFNRDSGRMRGKRSISGGRVSVRNALFMATIASVRFNPVIRTTFQRLVAVGKPKMTAIVACMRKLLVILNAIMRDRTVWT

SEQ ID NO: 234065 - protein, 343 aa, unidentified
MDYYIGLDAHSKTCTYVCLNKEGDILRQGTFSTNERNLKDLCRSFKGETALVLEETNIAQWLYVVLKDEVDKLVVCHPAYLPMKSGPKNDYRDALHLAHQLRSNNLTPVFHEDSFLMNLRTIVSNYENVNLHGTNLKYNFKSLLRSDGVQTQSACKTVSNPEKWKELKTPSKRFVAEKLYEQIVANEKLKAQYVREFRVNILKEPSIRNLSSLPGVGKVRAHIIAAYISSAHRFENKHKLWSYAKLIRHRDESDGYVMRKRTPHGRSELKAAFMGAAQRIIISASSTALQDYFLHLIENKKLGQREAKKALARKIAAICLVIMKKGTKYDDDEVRRSFQTEEV

SEQ ID NO: 234066 - protein, 325 aa, unidentified
MTTSCPVSVGIDVCKEKLDVAMLAPDHSASLYSYTNTAEGITKLLFDLETQKTAETVPCVIESTGNVHFRVALMVSRAGYGVKCINPLITKKYQRASIRNAKSDRVDAKRLAEIGLLEPHLQPYKATKENLFIAKLIASLAKCEKLKQQLVGHRAQLAECIEALDTPLDLTQYDLAITALEAQIGTLQAILIVYAPNEAIELAKHTRGISTEQASILLASLQDKHFTNRDQLVAFVGLDVMSRKSGAWVGKQKLSKRGNAYLRKTLYRIAWGLKTHNEDYRTYYEKLRERGLHYTTCLMAVARKFLRYLYAYYYKRSVSFPHTFV

SEQ ID NO: 234067 - protein, 418 aa, unidentified
MKEIKTKGCHIVNEKALIVAVDIGKTMNMGYCRCPDRTEVKPFAFQNGYQGFKKFLDVIIQTRNEKRLESVVVGFESTGVYAEPLVHFLRSKDVQIVQVNPLHTRKLKELQDNSPNKTDRKDPRVIADILELGHGLTVVIPEGAAADLRRLTNARERVLQRRTMLFNQLHAMVFVCFPEFLEIMKGVKTRTARYLLKRYPRPADVLGHGLDALIFEFRKVSRGRIGGDRAQSLYEAAKTSVGVQEGSLGLLMDLQECLAGIEQCEYAVAQLEEEMFRCLPAIPYSTLLLSMRGIGKVTVAGIIGEVGDFRNFKRASDLLKYAGLNFYEISSGQRKGNRHITKRGRALMRKLLFLAAVRMVRKGGIMHAHYQRYLQNGMKKVKALVAVSRKLLGIMHALVRDQRVYEDHHVEAAYRRAA

SEQ ID NO: 234068 - protein, 536 aa, unidentified
MVWFAAWLVHRELTRREECVRIARKPEPATAPWKGRAKSIMKTATEQPQEAVKKTVKPAAPTKPGSKSKKARVKGPSIQNRNAAGIDIGSQSHHVAVPADRDVQPVRTFRAYTCGLEEMMQWLKACRITTVAMESTGVYWIPAYQMLEQNGFEVLLVDARSVKHVPGHKTDVKDCQWLQQLHTYGLLRGAFRPSDETCRLRTLQRHRKNLVESVSMKVQHIQKAFNEMGLHLHHVLSDIMGESGLRIIDAILAGERDAGHLASLVDWRVKKSQAEIAAALKGNYREEQLFVIAQTLESVRAEQRQIEACDQQILRSLQKMSGPVRAESSTGLTGLTPAEELAAEVRQPEQVPAARRLRKKPAKTRYEDSLKEQLKRILGVDLTQIPGLGVLAVLTLLSEIGTNMGKWRNAKAFASWMGLCPNNKISGGRVMSSRTRKVVCRSATILRMAAMAVGRTQTPLGAFYRRKQAHLGAPKAITATARKIACLIYQLLKKQQEYEAKDVRIYQINYRKRAIEILRKRAADLDCDIVEIQKAA

SEQ ID NO: 234069 - protein, 340 aa, unidentified
MTVHVCGIDIGKTVFHLIGLSKEGQIVTKKRFTRKQLITHTVNMPACLIGMEACPGAHFLARVLRAQGHEVKLMPAEYVRPFVKSNKNDYVDAEAIAEAVLRPTMRFVPIKSEAQLDLQALHRVRDRWMGRRTAVINQIRGFLLEHGITVAVGPAHLGRQIPSILEDANNLLSSRMRALLVELRDEWKKLETQIEEIDREFVQAAKKEENCRRLLTIPGIGPLTATALTAAIGNGAAFRKSRDLAAWLGLVPRQHSTGGKTRLLGISKRGNPYLRRLFIHGGRAVVARVKREDHTFGNWLNQLEARSPRNAVVVAMANKLARIAWAVLTRGQDYRATACP

SEQ ID NO: 234070 - protein, 484 aa, unidentified
MKSKAYRATSVNDVKVEEVVGRLSDGPVWAGLDVGKGQTMVVIRDAQGTMLRPWKVRQPNEIRVIAQRLQNLSRHRPLVVAMEPTGTYGDALRQALGDAGLAVHRVSPKASRDYAEILDGVPSQHDGKDAAVVAELAAIGKSRLWPMEPAAHHGMLQQVQWMDTQQDILQLWLGRLEALLARHWPELTTLLELNSPTLLRILAEYGGPAAMSQDEQAPARMAGWGGGLLKREKIAAVLESARSTTGVRMQADDGEFIQRCARAALAARHEIRQVQNALEKRAAGDEVVQRIGQAVGMVTACVLYASVGNPGDYSCGEAYRKALGLNLKERSSGQHQGHLKITKRGPSLARRWLYFSALRLIQKSAVKPWYERKKSRDQQRGGKGVVAVMRKLSLAVYAVARGATFDAARLFPGRNIEADARGTPRLGALPPDPRNLSPAHQSRTGNEAAGASDPEPAARSASVAGPALGSVSTGALSSVPVKQA

SEQ ID NO: 234071 - protein, 410 aa, unidentified
MSNSLLVGIDVSLNDNKVRILHPDGTSLSKFVVSNSVPGAKTLSQKVSGIAEKNSFDSIVIGLESTSVYGDPLVYFLKQDASVNRFNTKIHVLNPTQVNKFKMFYPDLPKTDDIDAWVIAEHLRFGRINKEVYMDDKYKALQKLTRARFHTVQNLAREKNWFLNNLFLKFSSLAQEKIFSDRFGATSSSIIEEFFSVDEISYMPIAELAEFINKKGKGHFQDPEKIATAVQKAARSSYRLPKTVTDSVNQILAVSFVAMKAYKEQLKIFDKAIEEQFKLIPNTLLSIKGIGPVYAAGIVAEIGDIHRFKDHAALAKFAGIAWTKHQSGNFTAAHTHLIKFGNRYLRYYIMEATNKVRMHDHEFKRFYDLKYSQTPKTPHKRALALTARKFVRLVYALLHSNRLYTPPKGE

SEQ ID NO: 234072 - protein, 354 aa, unidentified
MAPPVPIIGIDPHKRSHTAVVLDDCEEVIAHLRIDAGHCQADQLLAWAPPDPARVWAIENANGLGYLLAQQLIARGETVVDVPATMAARARKLSGKSGTKTDAHDARSVAIAAAHHRSLRQIIPEDLTTVIGLLLDRRWQLVSQRQRTICQLHATLTDLTPAGAKTHLTCDKTVALLRRIRPVTAVEASRKQVAQELLEDWRWLNRRIPPAEDRLFRAVAAHGTTLTSIYGVGDVGAATIISIVGDVTRYPTAGHFAAFCGTAPLQASSGDVIRHRLSRRGNRQLNKVLHVAARCQVRNGAPGRAYFLRKIEEGNGHLEALRKLKRQLATVVYRRLLADQAVRGGQVGTRPKSA

SEQ ID NO: 234073 - protein, 343 aa, unidentified
MQAVTTIGLDIAKSVFQIHGVDAAGNVIVRRRLKRRYVLPFFQKLPPCLVGIEACASSHHWSRELKALGHTVRLMPAAYVKPYVKRQKNDAADAEAICEAVTRANMRFVATKTPEQQSCLMLHRTRHLFIRQQTAVINAIRAHLAEFGIVAPIGRNGVEQLLDVVADASDKRLPDLARACVAALGTQLRMLKARIVEFDRLIMAWHRSNEASKRLDEIPGVGPALATALVASVADPKAFRSGRNFSAWIGLVPKQHSSGGKNKLGSISKQGDRYLRSLFTAGALAVIRYAKIHGTRHRPWLTALLARRPTKVAAIALANKIARMAWAMMARGDRYKEPVALAA

SEQ ID NO: 234074 - protein, 350 aa, unidentified
MTKGNTTLKWVVGLDLGDRFSQACVLDRATGALMREERVSTTPTGLSRFLKSLERSRVVVEVGTHSPWVSREIETAGHEVVVAKAGRLPVIFRDHRKSDRRDAEYLARLGRMDVKMLEPLKHRSEGVQRDLAALRSRDALLAARTLLINHCRGLVKSFGQRFAACDADSFAKKAEAQIPAPLLEALSPVVATIQQLTEQIRAYNRGLERTIKASYPAAQQLRQVGSVGPVTALRYVLTIEDPWRFARPRNVAAYVGLVPRRHASGERDPQLGITRAGDRKLRTLLVECAQHMLGPFGADSALRRFGERLMERGGPRAKRRAVVAVARKLSVLLLVLWRTGQTYDPMHNTA

SEQ ID NO: 234075 - protein, 489 aa, unidentified
MSKLYGGIDIGLKEFHFHAMDENGNPIGKPKRFSNNVPGMEQLVEHLDVHIQKQEATSVTLGMEATGLYWFPLFHALQQDERMAQWNTQLLAMNPKLVASFRQAYPDVDKTDKVDALIIADRVRFGRGIAPQHIHSEQFLGLQRLTRFYVHLIQQQTDLKNYASSFLYLTFSEWIRCKPFSDRYGATACQLMKKYKSAEEMAEVTADELQTLLKDFSKNHFRDPKHKAEDVLQMVQDSFVVPQGLVDSVHLLIKQTLQQLDLLDKHLNRLMKKIEKAMKGIKHPLLSIPGIGPVSAALIIAEIGDISRFEVEAKLAKYAGLTWRTKQSGNFRAEETFMTKTGNVYLRRGFMIAAQSMVNHNDEYNDYYQRKIKEATRHAHKRALSLTARKLVRLVHAMLSTNQLYMTPEERLKRNKEVDNQTNAPAPVDPVCATQTPLVDTVDNTTSIPLPVPKKEHKKAKGTAAATSSTRQRAGTQRTQHPKDHAVST

SEQ ID NO: 234076 - protein, 387 aa, unidentified
MPQRDDLSRSVVAFQQDSTLVAVVELSRSSWLVAGIVPGIGRHPLKKLAPDEEALLRLLQRWRDEAAGAGRTITRLAVAFEAGRDGFWLARWLRARGVEAHVIHPTSVAVSREHRRAKTDRLDTELLKRAFLGWLRGEPDHCSMAAVPTLEQEDAKRPSREREGLVGERTRIVNRMKGALARLGIRGFKPTLRKAPERLEALRTPEGSSLPPNTLAELRRDMARLRLVREQIAELEAARLERLRQAPEDRPHAMVRLLARVVGVGVETADMLVREVLSRELRDRKALARYAGLTGSPDESGARRREKGLARVGNARVRRGMLQLAWRFLRFQADSRLARWYRARTADARGGTPKAMIVAPARKLLIALWRLVTTGEAPEGVALRPAA

SEQ ID NO: 234077 - protein, 379 aa, unidentified
MPSKNIVYLAIELSVTSWLIGARLSGTEKVRLHRVDGGNTGALVALIEELRSRASSKLSGAAEVACCLEAGRDGFWLHRLLTAHGFAAYVLEPTSILVNRRKRRAKTDRLDAEGMLHVLAAWLGGDRRVCSMVRVPTPAEEDAKRPHRERGHLVQEKLRIENRIEALLFTQGIRGRPSLRSWERDMAELRTGDGRAVPPSLRAELDRLRRRLVLTLELIRELEADRAKVMGEARTADMMVGKIIALQHIYGIGENFAAVLGREVFYRSFSNRRQLASYVGITPMPYQSGGKDRDRGISRAGNPRARTTMIQLAWLWLRYQPDSPLATWFRERVGRLRGRTRRIAIVALARKLLIALWRYVETGVVPDGIVLRATPAANA

SEQ ID NO: 234078 - protein, 347 aa, unidentified
MRFYTKAHKHYCGVDLHARSMYVCVVNQDGAVLLHRNLPCEPERFLSAIHPYREDLVVGVECIFTWYWLADLCTKESIAFVLGHALYMRAIHGAKTKNDRIDSRKMAGLLRGGLMPQAYAYPAQMRGTRDLMRRRLHFVRHRGQLLAHIQMTHHQYNLDSPGKRISYRSNRDGIGEGFEDASVRESIAADLALVDHYEVVIGQLELSALRQARGHDSNSFQLLRSIPGIGKVLAMTILYEIHDIERFERVQEFASYSRLVKCEKISAGKVVGKGGAKIGNAYLKWAFSEAAVLFLAKCPEGKSLFARIERKHGKAKALSILAHRIGRAVYFMLARKRAFDLERFLRS

SEQ ID NO: 234079 - protein, 385 aa, unidentified
MSQFSGSPQAAIDYNSTIIGALELSEKKWVLAVQLPGVDRHSRHVLDGGGETLASFVERLKVRCVSAGRKIARVILTHEAGRDGFWLARFLARRGIEVHVMQPSSLPVDRRARRAKTDMIDVEMLLRTLMAWLRGEPRVCSMVPIPSEADEEARRAHREREDLTRERRSIVNKIDGILATLGVKGYKALRRDRREQLNCARQPGGDPIPQKARARIERLLDRLDLVLKLIDQVESARDAVLKKDAPADEAEEMIRSLTELRSIGPDVATLLVREAFVRQFRNRRALAGYVGLGGTPFSSGGSEREQGIGKDGNRRVRAAMVELAWMWLRWQPDSALSVWFRARVGAMGGRIRKIMIVALARKLLVALWRYVTDGVVPEGAKLKAA

SEQ ID NO: 234080 - protein, 315 aa, unidentified
MTQQERFVGIDVSKAQLDIAVLPEERVWRVEREEASIAGLVKELRTLAPSLIVLEATGGLESPLTAALATAGLPVAVVNPRQARDFAKATGRLSKTDALDAQVLARLGQTLRPPVRALKNEETQELEALLTRRRQIVEMLTMEKNRLPSAGQRVRKDITAHIAWLTKRLKDVDGDLQSAIAASDFWRIKDDIIRSLPGAGKVLSTTLLASLPELGTLNRRQIAALVGVAPFNCDSGTMRGSRHIWGGRASVRSVLYMATITAIRCNPDIRAFHARLRGAGKKPKVAITACMRKLVTILNAMIRSNTPWQPHTVVV

SEQ ID NO: 234081 - protein, 334 aa, unidentified
MDKVTTVGIDLAKSVYSLHGVDGAGQVVLRRTVRRDQLMQTVAAQSPCLIGMEACSGAHEWGRRFQGLGHTVKLMAPKFVAPYRKSGKNDGNDAEAICEAVTRPSMRFVPVKSVEQQALLAMHRVRQGFVVERTATINRLRGLLCEFGVVLPLRSVTVRRQAAAAAEKLPELARRAIGDLLEQLRVLDERIGGYDREIEAQARLCEPAQRLMKIRGIGPTTALAIVATVGNAREFKNGRQFAAWIGLTPSQHSTGGKPRLGHISKRGDAYLRNLLVQGARSVLHSASAHQDRMSRWILELRPRRGYYRTLVAIANKNARIAWALLAKNETLRSA

SEQ ID NO: 234082 - protein, 334 aa, unidentified
MENIALIGIDLGKNSFHIHSQDRRGKAVYRKKFTRPKLIEFLATCPATTIAMEACGGSHFMARKLEELGHSPKLISPQFVRPFVKSNKNDFVDAEAICEAASRPSMRFVQPRTESQQAMRALHRVRESLVQDKVKTTNQMHAFLLEFGISVPRGAAVISRLSTILEDNSLPLYLSQLLLKLQQHYHYLVEQIKDLESQLKRKLDEDEVGQRLLSIPCVGTLTASTISTEIGDGKQYASSRDFAAATGLVPRQYSTGGRTTLLGISKRGNKKIRTLLVQCARVFIQKLEHQSGKLADWVRDLLCRKSNFVVTCALANKLARIAWALTARQQTYVA

SEQ ID NO: 234083 - protein, 412 aa, unidentified
MEVMYPCCCGLDVHKKSITACVLWAEVKGKSRKEKKRFGTFTHDLLQLADWLEQCGVTHVAMESTGVYWKPVWNILAEQFEVLLVNAQHIKAVPGRKTDQKDSEWIADLLQHGLLRGSFVPPQPIRELRDLTRYRVSLVQEINRIANRIQKVLEDANIKLASVATDALGASGRAILEAMLAGEEDAARLAEMSKGLLRNKIPELKLALEGRMTEHHRFLLRQLLEHLRFTESKRSEIEQEIDRRMRPFEDKVTRLCTIPGVDRVTAWGMLAEMGMNMNQFPSSGHLASWACLCPGSFESAGKRLSGKMRKGNVSLRRCLSQAAWAISMMKNNYLSALYRRIAARRGAKRAVMAVAHALLEIAYHMLKRKEDYRELGADHFDRIDVNRIRRSLVRRLERLGHKVTLEPLAQTA

SEQ ID NO: 234084 - protein, 388 aa, unidentified
MPAAETPVAYLGIDVGKSSHSACALDAGGGVAFRAELANRPDDIDRVLERAGSGALVVVDQKRNIGALVLARAHAHGNPCAYLPGYAEKQARGMFPGIAKTDAIDAEVIARTALGVPRALRPAPEEPEGTASLRILSSQREFASSARTRAKNRLRATLLEADPALEGAVDPSSRWQVSMLAEFGGAAGCSAAGWRRFSSAARRAGAPAAGARRLWEALLASSRSGRRLPAGEDVAVRILAREIASLDADIEELDSLVADSLTGDEVYECLLTVPGIGPKTAAALVTSIDISAFRGHDELASYCGVAPSDRRSGSSIRSTSPQHGGNRQLKNLLIFSCNSLIGTDNRFGRYYGECRARGMRHSKALKAVARKRLKVIYAIMRDAVPYAA

SEQ ID NO: 234085 - protein, 389 aa, unidentified
MQRPHDDSKACLTAFIQDSTLTVVVEMSLKSWLVAGMIPGVNREPLKKIAPNPELLLQLLYRWRDEAIKAGKEITRIAVAYDNETGRDGFWLARWLRARGIDAHVIHATSVAISREHRRAKTDRIDTAMLRRGFLGWLRGEPGHCTMAIVPTVAEEDTKRPHRERESLVKLRTSTVNRMKSILIQFGVHNFNPVLRKAPEKLDAVRTPEGIPLPSNAVAALRRQMERFRVIKEQIKAIERTRLERLQRDPAEKFNAMVVLLVQIIGLGVETAEQLVHEILFRNLRDRKAVARYAGLTGAPDESGSKRREKGLSRCGNGRVRNILIQLSWRLLKFQPASGLVLWFKNRTANVQRSRKPMIVAFARKLIIALWRYVNTGLVPEGFHLRSAA

SEQ ID NO: 234086 - protein, 421 aa, unidentified
MPTTLCVGGDIHQETLQLRTIDKTDGHEVGKALTVQNNRPGADQVIAQLVHLMTQQGYTHLEFGLEATGLFWLPFYQYLQQSPALTPFHPTWVCFNPKLVAKFKEGVTLSEIKDDEHDALAVAERLRFGHLPTTYVPSNEWLALRLLTRYRYRLARQIGQEKLRALTRVFLKASEWQRGQPFCEVWGATSATLLTEFSVAEIAAMSLPQLTKLIQEYGRKQFDDPQATARHVQRTLQNSFPVTADLDAALTNVLQIAWAHIRGLEKLMRRLDRDIAQRMQRIPNPLLSVPGLGPVITAGIVAEIAEIQRFPDHPQLAKFVGLVWRKHASGQFVGEETRLAKTGNVYLRYYLIEGANLMRQHNMDYKAYYRCKFAEVPKHQHKRALVLTARKLVRLVFALLMQNQSYVRPQAKQSQEVAPTA

SEQ ID NO: 234087 - protein, 461 aa, unidentified
MTMRTKTKNPKKRKQKVSVEQAWPLINPHAAGIDIGSREHWVAVPTDRDPQSVRCFGTCTSDLDELAQWLVKCRITSIAMEATGVYWIPAFQLLERRGLEVVLVNARQTKNVSGRKSDVLDCQWIQRLHTYGLLGASFRPADPYCVVRSYLRYRDELVAARSTQTQHMQKALQQMNVQLMQVLSDINGVSGLAILAAILQGERHPLKLAAMVDRRVKSTQAEVAKALVGDYRAEHLFQLKTAFELYHTYEAKITACDEELARELEKLPDRVDVKLKPLPAKTNHKPIDESIRRDLYLKLGVDLTAIEGIGALVALTTLTEVGPDLSRFKTEKHFTSWLGLCPDNRISGGKVLSCRTRRVVNRLSDALRLAATTLERSQTALGAYYRRMKAKLGAAEGVTATAHKLARIIYRMLKHGQEYVRQGMEDFEKKHLARRLKALQKSAESLGLQLIEKQIVTETVS

SEQ ID NO: 234088 - protein, 331 aa, unidentified
MQRKEIFIGIDVSKETLDVAYYGSKNHLRIANNSEGLKLLLAWLKKLDIAIEECWFLFEYTGGYEYRLVQFCASRGITFTRVSGLEIKKSLGMQRGKNDKIDAKRIGQYGYEKRERIQCQNPCSAALTRLKAMLTQRRAFVKDKKANEHRLNELIAMMDLKKNDSLIKYYRQGAAFAEKMIIKIEAQIQKLIKKEEALLKNFKFLTSITGIGNVNAWMAIAYTENFTRFSNGRKFGAYCGIVPYDHQSGKSIKGKSRVSHMANKDIKADLFMAAKAAVGYYPEIRAYYQKREKMGKHHMSIMNAVKFKLILRMFAVVNKQELYVKKSKIAA

SEQ ID NO: 234089 - protein, 351 aa, unidentified
MTSHRDQPTSTYSSIGIDIGKDVFHIVGFDTSGKLVLRRKFKRLALETELAKLPPSIVGLEACLSAHFVSRTLRRLGHSPRIIPAIYVKPFAKGQKNDYNDAEAIAEAALRPNLHVVREKTQDQLDLQALHRVRARLVSRRTATINQIRAFLIEHGIAVRTGASALRNSVAVILEKRADELSPRMVSIIQGLCDDWSHLDGRIEALTSEIEEISHKEKNCRRLMSVPGIGPMISTAMVAAIGAGDAFERGRDFGAWLGLVPRQYSTGGKPILGRISKRGNKYLRTLFIQAANVILMRPQNWERFSFGAWLSNAATRMHRNKLATALANKLARIAWSVLRHHRKFDEALAAV

SEQ ID NO: 234090 - protein, 350 aa, unidentified
METATIAIDLAKSVFELAAADQNGRVIERRRLSRGQLERYFENRIVGKVVMEACGTAHHWGRWFAARGIKAILLPPHYVRAYVRRDKTDRADATALLEASRASDIVPVSVKSLEQQALQSLHRVRAAWNAERVARINLLRSLCREFGINAPVGAEKGIAELRRVIADDSTPVPDMLRGTLLQLLEELREIDGRQLQLETHLAQIARQSPVCQRLRTIPGIGVLTSTAFFGAVADIRTFPNARRFAGWLGLTPREHSSGTTRRLGAISKRGDGYLRMLLVYGARAVLYSGNAARRAGRPLDALRAWGLRVLARSGHNKAAVAIANKLARIIWATWHRQQDFHFHEELAVTA

SEQ ID NO: 234091 - protein, 367 aa, unidentified
MKKVSTVAVNQSGHFAQPKLTIGLDLGDRSSWYCVLDERGELQAEGKVSTTAKAMCEAFQRMPRSRIALETGTHSPWVSRVLSELGHEVIVAHARNVRLIGESRRKDDRLDARTLARLARIDPQLLSPVKHRSAKAQADLTLIRARAGLVRARTALVNTVRSLAKSYGERLRSCNVRNMDPEKAEGLSPELQAALEPLLRSVESLSEGIREYNQRIEALAQQSYPEVALLKQVKGVGTLIALTFLLTLEDPHRFRKSRDVGCYLGLQPGRRNSGQSEPQMHISKEGDPYLRTLLVQGAQHILGPFGPDCDLRRWGLKLAERGGKSGKKRAIIATARKLAVLLHRLWVTGDVYEPLHNSRHQAVPAVA

SEQ ID NO: 234092 - protein, 385 aa, unidentified
MISVGIDVSKGKSTVCILKPYGEIVSKPFNITHTQKDLSELSSMLFRLNDEVKIVMEATGIYHLPVLTYLQEKGFFVSVINPYLMKSYRNESLRKAKTDKIDSRIIANYGIDHWFKMKEFQTSGEIYEELKLLGQQYRHYMKLHLLSLAELTHLLDLTMPGIKNLLASWNETNRKDKRSDFVERFWHYDVITSMSEQEFTEEYILWAKEKKYVPSQEKAKVIYTLAQESIPTLPSETSLVKMLVTEAVRVLKEVDATLGLILSRMQEIAKTLPEYSVVREMGGVGNTLAPKLIAEIGDVRRFRNGKALVAFAGIDPPPYESGQFVGCNRKISKRGSASLRKVGYETMRSLKMRSRPEDPVYRYVVKKESEGKSKKSAKIAGFTLN

SEQ ID NO: 234093 - protein, 343 aa, unidentified
MDHFAGLDVSVKETSVCIVDDSGRIVREVRVVSEPEALLPVLTNPAYHFKRIGLEAGPLSQWLFGALAEAGLPVICVETRHMRAVLKAQINKTDRNDARGIAQMMRAGLYRPVHVKTLRSQKLRMLLTHRKLLQSKAIAIDNDLRGTLRNFGLKVGIVGTVKFEARIKELVENLPDLAILIEPLLIVRRVLREQLGILHRRLLTIVRDDDVCRRLMTVPGVGPVVALTYRATVDVPARFRNSKSVGAAFGLTPSKYQSGEINRTGAISRCGDEIMRVMLYEAAQTMLVVSTKWSWLKAWAMKIARHRGMKKAIVALARRLAVIMHRIWVDGTEFRWTRDIAAA

SEQ ID NO: 234094 - protein, 410 aa, unidentified
MPEPTYALYVGVDWGNQTHQVAVLDTARGLRGERGGAHDGPGLHALASWLAELAAPGTVAVAIEVPHGAVVDTLRERGFAVYALNPRPMDRFRDRDTVAGAKDDRRDAQVLAAALLTDRPAFRRLHVDDPQVVQLRELTRIEAELSEALRRLANRLREQLLRFYPQALELCPAADEPWFWALLTQLPTPPAAARRRRGPVAALLREYRIRRLTADEVLTVLRRTPLTVAPGTLEAATEHIALVLPRLELIATQRRACAPRVETMLAVLAAAGQQQGHRDVTILRSFPGVGRVVAATMLAEASQLLAARAYHRLRASGGAAPVTRQSGKQRGVPMRYAWNPRLRNALYYWAFIAARHDPATRQHYEGLRARGHSQGRALRGVADRLLAVLIVMLKTQTLYDPSRREAKFAA

SEQ ID NO: 234095 - protein, 343 aa, unidentified
MQAVTTIGLDIAKSVFQVHGVDAAGQVLFRRQLKRRAVLAFFQKLPVCLVGIEACASSHYWSRELQALGHSVRLMPPAYVKPYVKRQKNDMADAEAICEAVARANMRFVPTKTPAQQSCLMFHRTRHLFIRQQTAVINSIRAHLAEFGIVAPVGRKGVTELLHIVADPSDKRVPEVARACLAALGNQLLSLKEQIVEFDRMIMVWHRSNETSKRLHYIPGVGPMLATALVASVADPRTFRSGRNFSAWIGLVPKQHSSGGKDKLGSISKQGDRYLRSLFVAGALAVIRYAKIHGTKHRPWLTALLARRPTKVAAIALANKLARMAWAMMAKGERYRQPVALAA

SEQ ID NO: 234096 - protein, 435 aa, unidentified
MRRRIFHVPAPARGGPARQSQYGTTGSDRGVIRLRRLRCAGAQTQSYKRKEPAVGNCIRFVGLDVHKETIAVAVCEESGHCQSLGTIPNTPEAVARLMRKLGPASSLQAAYEAGPCGYVLYRQLQKLSIPCIVAAPTLIPVRAGDRVKTDRRDAVKLARFLRTGDLVPVWVPDEASQALRDLLRCRQTAQQDLKRAQNRLTKFLLRQGLSEPEGAKPFSKQFGIWLRTLQLSQPSQQRTLQDYLLEADHQAQRLTLLDADLREQLPVLPEPMQRVIAALKCLHGVELLTAATVVAEAGELERFHKAGQLFSYAGLVPSEHSSGGPSGQRRGGLTKTGNAHLRRVLVEAAWHFRRCPGISVALRKRRVGQDPEVIQIADQAHKRLYRKFSRMEQKNKPSCKAATAVSRELLGFMWAIARRVKGLPTPELQPEPAAG

SEQ ID NO: 234097 - protein, 394 aa, unidentified
MSTAMNASAFVAPVPAATAATAATVTGTILAIDLGKFHSQACVYRVADGSHEFQRLATTPAAMHDLLVGRAADRVVIEAGAQAGWVADLCRSLGLPLLVANANGEAWRWRSVKNKSDREDALKLARLCVMNQLSAVHVPVKEVRQWRSLIQYRHTLVERRTAMRNAVHALLAVQGDQAVIKSWSGPMIEELKKLARPLAECGVGELWRGQLDLELTAMEQVGALIEQAEAKLDALAAATGAEGDADGEADANGGRGKRVQLLRTIPGVGPRLAELVVAWVDDPHRFRSGREVGAYAGLAPRRFQSGEADRHGRISKAGCGRLRKVLVQVAWGMLRHNERGRASFERVCKGQKTRRKQAAVALARKVLVWCWAMLRDGKPWREDDRRKLAQATAA

SEQ ID NO: 234098 - protein, 424 aa, unidentified
MDAKNQNSWEQHRYYMGLDWAKKEHAIAVVDRDGRIMHETTIEHTAEGWHRLREKLVDLAGPDLSFVAATIETNRGPAVERLLELGCVVYPINPNAAQCYRSRKTPSGSKTDRLDALSFADALRTDGHGWRPLNPEDPKTQELRLLCRDEMSLIEQRTTLVNQLQQALHEYYPAALEAFDDWTSPSSWAFVERFPTPEVLKKKGKRHWDKFLHTHRLYRPKTYQKRIETFTSATEFCGSQAVTNAKSMLAVSLAKQLRLLEQQLKTYRERIDALFQNHCDYSIFASLPGIGQKLGPRLLSEVSDDRDRFPAYERLQCYAGTAPVSFQSGQIHRVRFRYACNKNLRAAVHLWADLSRKKCTWAQVYYNQKRLEGKSHACALRCLGQRWLKILWKMWQTKTPYDEQIHTRNQIKHGSWVLALTGSK

SEQ ID NO: 234099 - protein, 425 aa, unidentified
MSPPILSSYERYLAVDLHKHYVVVGGLNAHYEVVLPLRRVDLSEWPAWSKKNLRKSDILVVEATTNAWDFYDQVAPLVGRVVVANAGKIAGLVKSKVKTDRVDVLKLAKLLVAGLIPEVWVPPDDVRELRALMAHRRQLVKNCTMLKNRLQSILHRHQLVPPEGGLFSENNRAWWDKLVVSPIEHLHIQHDLETLDTIAPQIKDTEDEILRLSTSPRWFQPAAYLLQLPGFGVIIVMTILAAIGDIARFEKDKQLVGYSGLGASVHASGETHRTGRITKAGRRDLRWALVEAAWRAVEHHPHWKNEYERLARRMDKNKAIVAIAHKLLIAVWHVLSEYTADKHAEPKMVATKLMRWSWDLTEEQRGGLTTREFIRLGLMHLKLGEDLTHLTYGNLPRRIASIDELLAAHPEYRSLQDNPLRPVAL

SEQ ID NO: 234100 - protein, 412 aa, unidentified
MQTLVERGCGLDVHQATVVACLLIVVNNGKVQKQVRTFGTTTRELLSLREWLLGEGCTHVAMESTGVYWKPVYAILEGALEIVVANAQHIKKVPGRKTDVKDAEWIADLLCHGLLRSSFVPPPPIRELRDLSRYRRKLVESRSAERNRLLKLLETANIKLASVATDVFGASGRLMLGALVEGEATPQQMADLAKGPLRKKIPHLELALEGKMEEHHRFLLKVQLHRLQAAEEDLAVLEQRLRERLEPYATQLALLDEIPGVDWTLAAVIIAELGVDMTVFQSVSQLASWAGVCPGNNESAGKRKSSRIPKGNVHLKTALVEAAHSAAKAKGTYLRDKFFRLKARRGYKRAAVAIAHKILVAIYHMLSQQVSYNDLGDLYLDKLNKHHLTRNLVHRLERLGYTVTLTPEQKAA

SEQ ID NO: 234101 - protein, 338 aa, unidentified
MNKVSIIGIDLAKSVFQLHGNDSYGHKRLGKQVSRNKLLDTIAQIPCCTIAMEACCGAYYWAAQCEALGHTVKIIPAQYVKPFVKVNKNDARDAEAIAEAAARPATPTVAIKTAEQQDIQAIHRVRERLVKERTAISNELRGLLAEVGIVLPRGSQALIQAVPSILEDGDNHLTYRRRELIDDLRAQWQERLQRVKAYDLQLQQIARQNNICRLLQTIPGVGPVIATLMYSYIGSASNYKSGRHLGAALGLVPRQHASGGKERLLGISKQGNKQIRKQLVHGARAAYRVLVQPGNNSRLGAWVQRKQDKHPNKIVVGLANKMARVIWAVMMKQEPYKA

SEQ ID NO: 234102 - protein, 370 aa, unidentified
MAKRSMFVGMDVHKESIDVSLAEEGRDGEVRRYGVIPGDLEAVAKVVRALRAPNRRLRFVYEAGPCGFGIHRYLTGQGEDCVVVNPSSMPKRSGDRIKTDRRDGDALARLHRAGELTAIYIPTPDDEALRDLVRAREDAVGLSTQAKHRLKAFLLRQGRRYPGRAGWTRPYRRWLADLSFPLAPQHIALQEYRDTIEETERRVERLTDQLRQQTPAWRWAPVVDALQALRGVSFVTAVGLVVEVGDIRRFDHPRQLMAFLGLVPSEYSSGPSVRRGGITKAGNPHARRLLAEAAWAYQGVPRIGRQMLYRQEALPKTVCDIAWKAQLRLTSRFRKLVARGKAKPKVATAIARELTGFIWAIAREVPAPPA

SEQ ID NO: 234103 - protein, 428 aa, unidentified
MDEVNRNRLEEFRQLRQEVRHSGEYLIVGMDIAKDQHHAFFGTATGKTLLRRLVFSNDHEGFRKLLDHAEALRVRHGLKKVVYGMEPTANYHKPLGEYLITLGRTVVLVSGVTVKRNRESLDGRWDKHDVKDSANVADLISQGKCLHYEHPSAELRGLRGLLSLKRRLKKQEQGYRVRIRNNLIAQYFPEMDSHYGRSEAEGLGIVRWCFPPSQITELDVEPFIQRVTSRRIRMEQRRRLEAIWEKAGMSIGCDGVPGVEHEAKIMVEGLKQLREMIKETEGKIQELCNEFPEYRFLLTIPGFGPDVSAKVLGAIGDPDRFQNGKQVLKLGGLDLSADRSGKDSDKATPEISKRGKADLRYALYQAAFIASTKNRDFMLYYTSKLQGRQREKGIHTKMLVKLSAKMLLIAWTVMKKKEAFNPAYLRAE

SEQ ID NO: 234104 - protein, 359 aa, unidentified
MTSMAPNPRRRRVIIGVDTHKYVHVAVGLDIIGGVIDSRSFAADSGGYEQLITWALSLGLKLTFAIEGTGSYGAGLTSAVRRRGVGTVEVMRTDRRDRRLRGKSDSLDAENAARAVLSGNATAIPKTNDGTVEMIRQVKIAKDLAVKARSAAIISLKTIIVTAAPELREQLQGLPRVALIERCAGLRPGTLTSVLAATKHTLRATARRWVLLNTEVLAHEKILTELTKQVVPDLVTAHGIGPDTASEMLIVAGDNAARVRSEPAWARLLGVAPVPASSGLTNRHRLNRGGHRQANAALYRAVIVRMQFHEPTKAYVARRTAEGKTKREIIRCLKRLLAREIWTLMKPFREASVTTAMAA

SEQ ID NO: 234105 - protein, 381 aa, unidentified
MGRAFPQRRGRAVEEHSEVFVGLDVAKVRHAVAVADGGRQGEVRYLGEIDADPASVRRMVARLEKRHRHMHFCYEAGPTGYGLYRQIVAMGHRCTVVAPSLIPKRPGDRVKTNRRDAMQLARLLRADELTAVWVPDEAHEAVRELIRSREAAVDDLRRKRQSISSMMLRYGRTYSGKKTWGPRYQQWLQTQRFDHPAQQLALQEMILAARHAMERLSRVEAAIVEFLPGWSLAPVVEALQALRGVRLITAATIMVEVGDLRRFETPRQLMGYLGLVPGERSTGDSIRRLGITKAGNARVRRVLVESAWSYRHVPRTSKLKHYVHERVSPAVRDIALKAQSRLCARYRALSGRGKKLTVAVTAIARELAGFVWAIGKEMQPS

SEQ ID NO: 234106 - protein, 410 aa, unidentified
MEVIVSCGCGLDVHQATVVACLLIGEPGRKPRREIRTFTTMTYDLIRLRDWLQTEGCTVVAMEATGVYWKPVYNILEGHFQLILANARHIKAVPGRKTDVKDAEWIADLLRHGLLKASYVPPPPFRELRGLLRYRVKVVKTEVAQRNRIIKLLESANIKLSSVVSDVFGVSGRLMLEALIRGQATPEEMAELAKKRMRVKIPQLKLALDGRLEAHQRELLKIQLARLDQHQVELQELEAKLQTKLEPYAQQMALLDGIPGIDWVVAATIIAEIGVEMQQWPTVEQLTSWSGLCPGQNESGGKRRQAPIRPGNPYLRTALVEAALAAIHDKNSYFREKFYRLKARRGYKRAVIAIAHKLLIASYHVLREQTPYRELGPDYLDRLEPEHLKRNLVRRLQRMGWQVTLEPLRV

SEQ ID NO: 234107 - protein, 339 aa, unidentified
MTIPTYHLFVGVDVAAATASVAIATTADAIQPAWSIQQDTQGWHQLQTRLLQTAVPAAHILVVMEATGTYWMQLALHLHQAGFAVSVINPLQAKRFAQALLKRRKTDALDAQLLAQLAATLKPAPWSPPPAVYDELLQRLQERDQLLETIHQNRNRLHALRQRPQIVKPVQQRMERHILFMEKQIALIDAEIRSAMSQDADWAAAAKLLLSIAGIGFITAAWILTATVNFAYSQTAEQVVAYAGLAPQPFDSGSSIHRPATLGHAGHPRLRTALYMATLSAAQHNPIIKSFYSRLRQAGKPNKVARCAAARKLLCIAFAVVSKHQPFDPDFHSKPCFSA

SEQ ID NO: 234108 - protein, 348 aa, unidentified
MRFYTGQHRYYCGIDLHARTMYLCILDHESGKTVLQRNLRCEPELFLRAIEPYRAHLVVGAECIFCWYWLADLCMQEDIPFVLGHALYMKAIHGGKAKNDKIDAHKIAVLLRGGAFPVAYVYPRGMRATRDLLRRRLLFVRRRSELFTHIRIVFHQLNLPAPAGRLREPRSRVGLLEAIPDAVVRANVEADLALAERLDEIIRSLELTIRRQAKVDDPKTLRLLKTIPGVGRILALTLLYELHDIDRFPRVGDFLSYARLVKSQKASAGRVTGTSGAKIGNAHLKWAYSEAAVLFLQKNPRAQRLISRLRSKHGKGKALSILAARLGRASYFMLRRATAFDMDRFVLN

SEQ ID NO: 234109 - protein, 408 aa, unidentified
METIHPICCGLDVHQASVSACLRRVNAQGAVSVESREFGTTVKELVVLADWLVAEGCPVAAMESTGVYWKPVWNILSALLDVWVVNARDVKQRRGKKSDRADAKWIAELVAHDLVQPSFVPPPRIGVLRDLVRMRTVLVQTRTQVKNRVLAVLEDTNVKLASVVSDPFGASARKIMEALVNGERDCKVLSEMAMGVLRRKIPQLEVALEGGFTEHHAFMIRLGLESLDQCNRQIGELDAQIARLMEPLQEEASQLKSIPGVGENAARVVLSEIGTDMSRFGSAERLASWAGVCPGNHESAGKRHSGKTRKGNRYLRRVMAECAWAASRTDTFLGRTFRRFQVRIGGKKAAVAVGHKILVIIFHLLNEGQLYDDGRYDHINQKEQIRQRNRALTTLQRLGYHVVLTATP

SEQ ID NO: 234110 - protein, 358 aa, unidentified
MRIIGCDLHARQQTVAMLDTDSGELVEKTLQHDGEELRKFYSGLSRPVLVGIEATGSMQWFLELMEELGIECRVGDPAKIRAAEPRKQKNDRRDAQLLLKLLVENRFPTIWMPSTEQRDLRALLRHRHQWVRLRSPVQHTLQSMALNHGLRRGHALWNQAGQHALWTLPLAPHASERRKALMKLYPCLQESIDELDRQVSRQVDQHPPARRLMTHPGVGPITALATEVFLGDPMRFSDGKALASYIGMIPSEHSSGGRQRLGAMSKQGNTLLRYLWCEAAMHAVERDPELKRFYRRKLVQKGLGKARVAAARKLGIRLWIMLRDQIDYQEFCRRGKARQESGSVRAGMPVGVEKLAHW

SEQ ID NO: 234111 - protein, 412 aa, unidentified
MDVIVQRPAALDVHKEQVTACVRFPGGDGGRGQEVREFKTTVGGLLVLHDWLQAHGVTQVAMEATGVYWKPVWAILEDDFECILVNARHVKNLPGRKTDVKDAEWLCQLLEAGLLAASFVPPKPIRRLRNFTRYRTAQVKERQREANRLHKALEDTGIKLDCVVTDILGKSGRAMLDALCEGTTDPEILAELAKGRLRAKIPALREALEGRFDSHHALLIGAILSHLDFLDEQIERLSEAIEEQLAPFQAHVELLRSLTGIETRTAQNILAEIGTEMSVFPTAGHLASWAGRCPGNDESAGKRRSGKTRKGSKWLDEALKNAAMSALRTNDSYLQAQYQRLRPRIGHGRALGAVKHSIICAIWHMLSTGELYRDLGGDYYRKRNPERQTRRLVAQLERLGHKVTLEALPQTA

SEQ ID NO: 234112 - protein, 376 aa, unidentified
MKKIRFVGLDVHAETIAVAVAEPDGEVRSLGTIPNREESVRKLVKKLGPPHQLRACYEAGPTGYVLYWLLTSLGVKCDVVAPTLIPVKAGDRVKTDRRDGLKLARLHRSGDLTAVWVPDEAHEALRDLVRAREAAKQDQLRARHRLSKFLLRHGKRFPGAGKAWTLKYMAWIGQIRFTQPAQEYAMLDYLHEVEHMNERVLRLEQAIEEAVKLSPAWMQEVVQALQSLRGVAKISAATLVSELGEISRFDNPRKLMAYSGAVPGENSSGERVRRGAITKTGNAHLRRVVIEAAWSYRLRPGIGPALRQRQKGVSEEVKEIAWKAQNRLHKKYQRLMAAGKDQRKIITAVGRELLGFIWAIGRATETRCRQQSAMTA

SEQ ID NO: 234113 - protein, 366 aa, unidentified
MKKISTMARRGNKIFKDPRLTIGLDLGDRTSHYCILNEAGDVVLEHGLSTTPKGIHQVFNRIPRSRIALETGTHSPWVSRHLTQLGHEVIVAHARNVRLIGESSRKDDQLDARTLARLARIDPGLLGPVRHRSAQAQIHLTVIRARATLVSARTALVNAARGLTKSYGERLRKCGSGQMSREVAKELSQELRDALEPLLKEIESLNDRIDEYDRRIEQIAKEVYPQVALLKQVKGVGTLIALTYILTLDDPYRFRRSRDAGCFLGLRPGRRNSGNSEPQLHISKEGDGYLRTLMVQGAHYILGPFGQDSDLRRWGLKLAERGGKNAKKRAVVAVARKLAVLLHKLWVSGEVYQPLRSNHRVVSAVA

SEQ ID NO: 234114 - protein, 370 aa, unidentified
MLDTTTFVGLDVHARSIKAVSLDVMTGEVRCATFGYDAGAVAEWVRSVDPKAKCVYESGVTGFDLQKRLSGLGVDCVVGAVSKMIKPSADRRRKNDRNDAEFLARMLSVGNVVEVWVPDDECEAARDLTRALEDARDDLSRSKQRLSKFLLRHGLAFDERTPTGRRKGNWTRAHWSWIESIRFAERADNEALAYYVDAVRRAAEEKARLEGLVEAEARKPRWRKRVDSLRCLKGVDTATAADLVFEAGEFSRFRNARSFAAWVGLTPSEHSSGESDRRGAITKAGNKHLRKALVEAAWHYLTCSARPKEPARGQAPDPGARRHAAKGVRRLVERRGTLLARGVHNNKANVATARELACWVWAVGLMAEEA

SEQ ID NO: 234115 - protein, 408 aa, unidentified
MRVIGLDIHRVFAEAVMLDDGKIVRLGRIGMTRDHLEAFARTLTHNDHVVVEATCNASAVVAVMSPHVGRMVIANPRQVRLIAHVKIKTDTIDATVLAKLYASNFLPEVWVPDAHTQALRRQVTRRNQIMRQRVRLKTTTQSILHAHLVPQCPHADLFGVRGRSWLMAQHLPADEREAIERHLREYDRLSDDLRVVERELAREALADANVKRLMTIPGIDMVVALGLTAAIGPISRFRGPDQLVAYFGLNPSVHQSGEGRPQHGRITKQGRSHARTLLVEAAWQAVRGPGPLRAFYQRVSARRGNHVAAVAVARKLAVIAWHMLTKGEDYAGVRPALHAKKLRDLELRSGLPARRGQRGATYEYNLTRTRQEERRRAEQTEIAYRRLTEGWTRRGRRVPTGATKEERP

SEQ ID NO: 234116 - protein, 444 aa, unidentified
MHYQKVLKMPESIPYLSVGFDVGADFTWMSIMLPNGILIGKPFKIIHSDPQSRELAISKIKEAQEMYSLESRCFLESTGIYHIPLLCFLRDKGFDCAVINPIITKNSTNMNVRKLHNDKFDSKKAAKVGLDASLKASIVPDDAIIDLRNLVRDYYYFKDLQSAIVLKLHAELKVSFPAYLNVFSKVTTQTSLKLLEAYPLAADMLAAPKDELVETIRSTARFGETYALARYDAICTAAKDAAVFGRALPSNALRIRLYIKMYREYQAHLDSILEELHQAVGKLEGTPDYDRISFIQTLHGVGFLSAVVLIAEMGSFDLFSSPKKLYAYFGLDPGVNDSGKFHGDRVHMSKRGSSLARRILHMVAINNLKVDKATKTPVNPVIYDYYTRKCASKKKSVAVGAVMHKICNIIFAMLRDNKPFELITPEEHRERYAAEHPESVNPAA

SEQ ID NO: 234117 - protein, 435 aa, unidentified
MEEVEDEPLFCDRVAGIDIGKATVMVTIRVPGEARAKGRQQETREFGTTRRELLALADWLRCWQVERAGMEATSDYWKPVLFTLEQEGSGCLLCQASQVKALPGRPKTDKLGSVWLARITEQGSLAGSFVPPEEIRRLRTHIRYRRKLVQMRTAQKERCEKLLEDAHLKLSSVISDIHGVSGRDMLRAIAAGERNPKVLAQMARGVMRSKTARLEQALDCSFFTGEHAFILTMMLDGIDSLTAQIGVLDARIADMCQPYRRQLEQLDEIPGFGITTAQDLIAEIGTDMNVFPTAGHLASCARQAPRVKESAGKRKGKNATGRGNPCTGGALGEASISAGRTQTFLGERYRRLTRRMPKRKAQVAIMRSQLVIAHALLSDPDARYQDLGPDYYERKADIRRRARNHARALERLGYKVTLEAIDPGTGELHLAATAG

SEQ ID NO: 234118 - protein, 338 aa, unidentified
MTIIRIGLDTSKHVFQVHGVDEAEQPVLRRQVRRSEMEKLFAKLPPTRIGIEACGASHHWARVLRGLGHEVVLMPPQYIKPYVKRRSKNDAIDAAAICEAMSRPEMRFVPVKSAERQAGLMVLRVRELLVKQRTALINAIRGHAAEFGVTAAKGPVRVAELLQRVDVEESGVPAPARELLGLLAGQLDAVEARLKTLEGQLMAVHKENQASQCLATIPGVGPIGAVSFALRVPDPKAFRSGRHFAAWLGLTPREHSTGGRRRLGRISREGDDTLRRLLVLGATAVIRVAKPGKASPWLLQLLARRPKKLAAVALANKMARIIRAMLVSGEVYRRPYPA

SEQ ID NO: 234119 - protein, 368 aa, unidentified
MSETIVAYQSFSGVDLHKDTVTLCAVDPRGQVISRLKTRTKCVGAIDAWLRALPRPSRLAVEAVGFVEWFIDRFRDCVDRIDIADATELANRRGKRRKSDPNDALDIAKRLARDECPLGFIADEELMQLRKLGRHWRQLSGVVARAKHCMRSILLAANLRGPTLDGAGAQRWLLAHGHLLKPVQRRAFANLTEIVQLVELQRAPLRHAIIHAARSPRFAPLMAILQSVPGIGPIWSCIIAAEIGPFDRFPNADALEFWAGLTADLKESAGRTQSGPITKAGSRTLRWALCKAAVTLCHSDARQEAVRQRLIRRTGGIKAKANVAMGRRLLRILYAMVRDSKPYQRGPRRNRTSAANKARARKRRKEVA

SEQ ID NO: 234120 - protein, 315 aa, unidentified
MSTASWLGIDQSSEWLDACLWPADQSWHVAMGSGALEQWVAQLPGGISLAVIEATGGREKRTVAALMGAGIPVAVVNPKRARSFAEALGQEAKTDPLDARMIARFAAAVQPQPRPVPAAEQALLGELLTRRRQLIETRVAESNRLGTVQAPPVRRSLQAHLQWLDRQIQDLDRQIDDQIRQSPTWRENEEILRSAPGVGRVCSRTLLAHLPELGTLSRRQIAALAGVAPFTRQSGKWRGRRFIGGGRPAVRAALYMATLAATRFNPVIAAFYHRLLQAGKVKKVALTACMRKLLTMLNAMMRDRVWWQDTQFSLD

SEQ ID NO: 234121 - protein, 412 aa, unidentified
MQTLVERGCGLDVHQATVVACLLIVGKDGKVQKQMRTFGTTTRELLNLREWLLSQGCTHAAMESTGVYWKPVYAILEGGLEIVVANAQHVKKVPGRKTDVKDAEWIADLLCHGLLRSSFVPPKAIRELRDLTRYRRKLVESQAAERNRLLKLLESANIKLASVATDVFGTSGRLMLRALIAGKATAQEMAELARRKLRSKIPQLQLALEGKLEGHHRFLLKLQLDRLERAEGDLAVLEQRIQEKLEPYAAQLALLREIPGVDWTLAAVIIAELGVDMSVFQSVSQLASWAGVCPGNNESAGKRKSSRIPKGNVYLKTALVEAAHAAARTKGTYLRDKFYRLKARRGYKRAVVAIGHKILVSVYHMVSQNVSYNDLGDLYLDKLNKNHLTRNLVHRLERLGYSVILAPQQKAA

SEQ ID NO: 234122 - protein, 463 aa, unidentified
MEGKARRTHRNHKGPSLLERVNHNAAGIDCGSAEHYVAVPVDRDAEPVRHFRTFTAELHRLADWLVSCRIKTVAMESTGVYWIPVYEILVARGIEVLLVNARHLKNTPGRKSDVTDCEWLRELHSVGLLRGSFRPDEEIVTLRSYLRHRDTLVQSAATAITRMQKALVQMNLQLHIVIRDIMGMTGLAIIRDIVNGQTDPGRLAKHRDAHCKASEADIAAALTGHYRPEHLFALKQNLEIFDAHQRQIEACDAQIEVCLTELAEKMAPPSAPLPPRRSRRNRRSNEPRFEVRPMLHRLANTDLSELDGIGPYTALRLISEIGTDMSRWRTDRHFTSWLTLAPNNKISGGRLLSSRTQPSASRAAAILRMAAQSLARTQTALGAFYRRLAFRIGKAKAITATARKLAVLVYHSLKGDFVYKDPGAAAYDARHRDSVIRRLRHRAAALGLSLVDGQTGEILDGVS

SEQ ID NO: 234123 - protein, 451 aa, unidentified
MAKTKKRKQRKLDRSLPAMRPNAGGIDIGATEIFVAVPADRDTESVRSFPTFTEDLHALADWLQRCRVETVAMESTGVYWIPLFQILEARNIEVHLVNAQHVHHVPGRKSDVLDCQWLQYLHSVGLRRASFRPEQAVCEIRSLMRHRENLVQMACVHVQHMHKSLDQMNLQIHHVISDITGVTGLAIVDAIVAGITDPKELAKLRDHRIKASIATVKKSLVGDYRPEHIFTLKQSVTAYRQSQQLIADCDREIQQRVQTFETKDDHPSPANDSSSATTPPPSSFDLRNHLKRIFGVDLTLIPGFDSLRVETIFSETGADLSSKFPNDDRFCSWVNLCPKDGTSAGRRIRGPKMKTKNRVNQEFRMAAQCLHNNKSYLGDYYRSQRARYGALKAIKNTAHKLARIFYHVVTTRQPYDETVFAKLEARNQKRRLHNLQTRARQMGYTLVEAHA

SEQ ID NO: 234124 - protein, 333 aa, unidentified
MKSGTVHIGVDVSKEKLDIYLPPQGRGRAETKQLDNSVAGFRTLRDLARKAKAVVCVEPTGGYELELIAFMHKSGVAVAYADALRVRQFARAEGCHSKNDKVDAALISRFADKIGVRTLSPSDVESVELKRRMKFRQTLMDSRTALVCRLETETEADIRSMIREQIRHLNKLIAKVERSCLEAVAKNKDMDALRRRLTEVGGVGDLTAVSVLAGLPEIGKLSDEKLNRLVGIAPEERQSGTKEWQRRIWGGRRSVRNALYMAAVASIMWNSVLGSYYRRKRAEGHPHKWAIVPTMRKLLSLLNRIARDASFKPAPEPESTKRNARARRKKKTA

SEQ ID NO: 234125 - protein, 371 aa, unidentified
MKENSTFIGMDVHKNSIDIAIAPKSRKAQVRHYGKIDGTLAALDKVVRKLVSQGDRPHFVYEAGPCGYQIYRHLTAKGFDCSVVAPSMIPKKSGNRIKNDRRDSLMLARLHRAGELTAVYVPVVEDEAIRDLSRAREDAKGDEKKSKQRLLAFLLRSGHRYSGRSPWSQAHMRWLADIKMVHPSQQIVLQEYIDTLSHCTLRLQRLTDQIRQLLPQWRLFPLVQALQSLRGVSLIVAATTVAEIGDFKRFQNPEELMNYLGLVPSEHSSGEKTRRGSITKAGNSHVRRMLVEAAWAYRFRARVSRALLKRQEGLPQEIRDIAWKAQVRLCARYRHLWAKGKVKQVVTTAIARELCGFIWAIANETDVPMTA

SEQ ID NO: 234126 - protein, 364 aa, unidentified
MHYVDNTTELSSLEETRCQFNGGKAIIKLGIDVHQHFYVVVEQVGGSNPNPPQRFRKEAFLHWAAKLKNQGKQVHAVYEACGFGFGLQRQLSALGIDCHVVCPQKLDERNRRVKTDGLDAKALCLKLDRFVQGNGDALALVRVPSEKEEQRRAIHRQREQLVKARKRLEAQGRSLMVNHGIEPIQQWWKGRAFAQLQVPAWMQELLATSQPILLALEEKIKTLTVQLQNAAEPNQPRGFGALTSVVIDREIGNWQRFSNRRRVSSYTGLCPGEYSTGDTRLQTCVTKHGNPRLRAALVEAAWRLVRFQPNYRPIIKWRATLSKGALATRAARKKAIVAVARQLAVDLWRIRTGRVSAQELGLIN

SEQ ID NO: 234127 - protein, 340 aa, unidentified
MTITTVGIDLAKNVFAVHCIDQNGKAVLVKPKVSRAALSELIAGLPPCVIGMEACSGAHYWARLFRQYGHDVRLMAPKFVSPYRMAGKTGKNDAADAIAICEAVQRPHMRFVPVKDESQQAMQCLHRTRQGFIQERTATYNRLRGLISEFGVIAPQSTDALRHVVSDQKETLPVQVRLCIDDLLTHVTNIEEKIAEYDRVLSRVAKTDHRSQQLMELKGVGPTTASALVASICNAHDFKNGRQLAAWLGLTPSQYSSGGKSKLGRITKAGDAYLRTLLVQGARSVMVGAENRTDPFSRWVCSLIGRRGYWRAVVAIAAKNARLCWASLHYGDDFRLYSTT

SEQ ID NO: 234128 - protein, 318 aa, unidentified
MNMKTNQNINVGVDTGKYQLDIYIRPLDIYFTVENDEKGIKEAVKKIKKYKPNRIVIEATGRLEMPFIIACAEANLPFTIANPVHVKRFAGALGQRAKTDKLDAQLIAHYSEAIQPKLSKLKPDTMQAMSDLVTRRNQLLNMQTMEKNRLQIMPKELAMTIKPVLTLFKNQIVKIEDKIAKLIESCPEYQAKNMILQSMKGIGKIAAASLISNLPELGYINSKQASALIGVAPINRDSGRYKGQRKIQGGRPQVRTVLYMAMMSAMQSNPVFKATYQRLLAAGKPKKVAIIACIRKMIVILNSMLRDGVMWEAPKVIN

SEQ ID NO: 234129 - protein, 396 aa, unidentified
MISVGIDVSKGKSTVCIMKPCGEILESPFDIGHTADELDSLISLIKSFDEETRVVMEDTGHYHLPVATYLSSHNIFVCCVNALRMKKFCSQSIRRAKTDKIDSIKIASFGITYWNELVKAYPSNVIYDELKFLARQYYQVTGMLVKSKVNFSNLLDQVMPKINDVLSNQGENHKLTEFVNRYIHFQNILDMGEMKFTSDYCKWAKKKGYRLNERKAAEILALAQNGIPTLPNSQSVKIAVSEAVKLIHSIEESRNTILAQMQDLCNTLPEYSVIKEMNCIGDTLAPRIIAEIGDVRRFKNKHSLIAYAGIDAPPYQSGAFHASERHISKRGNSYLRKTGYEIMQSLIKHKPADNAIYNFIQKKRSEGKCGKEAMIAGLNKFLRVYYGKVMEFYSEH

SEQ ID NO: 234130 - protein, 359 aa, unidentified
MVRLGTSSFLSLFVHYKDMQNFYFIGIDVSKSKLDICVMLKSRILKEEVVSNHPQAIASVIVSIKEELSMDNDSFIICAEHTGQYTYPLMCASKTVGCKLLLEYPYQIKYCSVDTRGKNDKVDARRIADYAMRFIDKARPYERPSEELTRLKQFEAERSLYLTDLAKYKAQLSDQKDYMEPEIFKRKSKRLKDMIKALEKTLKAINDEMSKVIASSNTLSRQMQLLQSIEGVGPVIAMNMIIATEAFTRFDNPRQFSCYVGVAPFAYTSGSSQHSRNRVSKRAVKYIKCLLHMSAVAITHKKTGELKTYFERKVAEGKNKMTVLNAMRAKLVARMFAVIRKIKFINLFFRFRLAKIIRI

SEQ ID NO: 234131 - protein, 438 aa, unidentified
MSNKVIFNLDDLFISVGIDVGADFSWMSIALPNQQFVGKPYKILHSSIDSLTTAVSKIKEAEELYSLESRIFLESTGIYHYPLFCYLRDKGFNCSVINPIITKNSTNINIRKVHNDRFDSKKAALVGLKPDLKVSLMPSDLALNCRNLCREYYDLMDNRSAYVNKLQGELRMAFPQYLGIFSKVTINTSLTLLETYTSPSAFLEADKQEIINIIKSTARFGLTYAQNKYNAIIQAATDANQFGYIIDSNIKRIRLYISFIRKYDEEINNILESLHELVDANEDADFVKQIHLIETFKGAGFLSAVSIMGEIGDFSAFSKPKQLFAYFGLDPAVKQSGKFEGTKVQMSKRGSAIARRVIHTLTLQSISISRNREAKNPVLREYYLKKCDSKPKLVAMGAVSHKVCNMIFAILRDNKPFKIIAPQEHIKQYNSAKCDIAA

SEQ ID NO: 234132 - protein, 422 aa, unidentified
MHGKTKRMHTFEQLTHFAGFDWAKDHHDAVILDRQGATVASLTFAHTAEGWAQWRALIKAYPGLGVAIETNQGAAVEQLLQSQVTVYPMQPKAAERYRDRHVPSGSKTDQTDAWCFADALRVDGQHWRPLAPEDPLTEELRLLCRDEVELITQRTALVNQLQQALYEYYPAALEAFDDWTAASAWEFVLAYPTAQQLVKAGQRKWERFLHAHKLWRPDTAAKRLEIFGRADRFGGSEAVTRAKSRLAVSTAQVLRTLQRQLEEYRSAIEKLFAQHPDHDLFGSLPGAGDKLAPRLLSEIGTEREQYPDAQGLQCVAGTAPVSFESGQTRRAKIRWHCNRHLRHAVHLWANCSRKFCAWAQAYYLAQREKGKSHACALRCLGQRWLKILWKLWQSRQPYDETIHALNQQKHGSWLLQLNPKTT

SEQ ID NO: 234133 - protein, 348 aa, unidentified
MTFVGCDLHSRKQQVAALDTRSGELVEQELAHAGDAVERFYRALPPPVTIGIETTGYTQWFHALMHRLGHTVLVGEAAKIRAMVVRKTKTDRRDARHLLDLLQHDRFPTVWIPDPDTRDRRALIAHRVRLVRMRTMVKNGLQAIALNQRLALRSALWTQRGLTQLKALVLPTHTTRRRDDSLELLAWLTTRIDQLDEHIAAIARADPRVQLLLTHPGVGPLTALTTVLVLGPLVRFPDSKHVVSYVGLAPAVNASADKQRLGKITKQGNALLRWVLGQAAPLAARADDDLRRRYFSVMHRRGRPKAKVALARKLLVRLYIMLRDQIDYEEFRRRGRAPRPPQLPGAVM

SEQ ID NO: 234134 - protein, 255 aa, unidentified
MSDSSVMVGIDVASEHVDVAAIGAAMPPARYGNESEGHSALAATLVAAKTGLVVMEATGGYEAALACALQAAGLPVVVINPRQARDFARSMGRLAKTDQVDAQTLAELAATLARRPDLQRFLRPVPDPLQQDLAALVTRRRQLTTMLLSERQRLRLAVAVVRPSIEAVIAMLRQQLDDVEAQMVGHVGDHYAALDAVLQSAGGIGPVASASLIADLPELGRLNRRQIAALVGVAPYAKDSGQHRGCLLYTSSTAA

SEQ ID NO: 234135 - protein, 357 aa, unidentified
MMEIAGLPVPVFCGVDWAEDHHDVALVDAGATRLAKLRISDDAAGFAQLTALLTEHGDSKDHKIPVAIETSRGLLVACLRATGRPVFAINPLAVARYRDRHSVARKKSDAIDAAVLANILRTDMAAHRPLPKDSELAQAIAVLARAQQDAVWDRVQAHNKLRSQLREFYPAILAAFADKRGGICSPEARTILAKAPTPAAAARLTRRRLQSLLRQAGRLRGIEAEADRFHEVFHREYLHQPPQVEAAFGQQATALLRQLEAACTNADQLEAATRESFDQHPDASIISSFPGLGSLTGARVLAEIGDDRARFTTAGSMKAYAGSAPVTRASGKSCTVMARRVKNQRLAAASTSGPSPP

SEQ ID NO: 234136 - protein, 330 aa, unidentified
MSFKILKFNCCGLDIHKTWIYACIGITDSNNRTEYKQARFSSFTKGLNELCNWLAKYNCMDVCMESTGKYWIPVFNILEQHNLWVTLSHPKYTKPMKGNKTDRKDAKWICDLYMCGMVKPSFIPPADIRELRDLVRYRYKLTCMITGEKNRAQNCLTVSNLKLDDVFSDVFGKSSRSITEQILQHPGKNFDVAPFVDGRCKTPVEEIQAAVDGAISKEQAVKLRQCLDHIDELNQHISEVEQEILRLSDKYEAALNLIRTVPGFDKNPLTSIQVLSEIGGDMSVFPTAKHLVSWAGCCPRNDKSDRKIKSTRISRAGFYFNQFWCRLQML

SEQ ID NO: 234137 - protein, 482 aa, unidentified
MTPRRQKNGRVVASPEPLRVANPHAAGIDVHAAVHWVAVPPNHVAAAKCMDAGAGDAANLPPHVRKFGTCTADLELLADWLHQCGITSVAMESTGVYWIPLFELLERRGFQVYLVDPRQTKHAPGRPKTDVLDCQWIQRLHSYGLLTASFRPEDQVVVLRGYLRQRHMLIRYAGQHVQHMQKALEQMNVKLPEVVSDITGVTGLAIIKAILAGERAPRKLAKLRDERCKRTEVEIARALQGNWREEHLFALKQALELYQDYEHLLRECDVKLEAHLATFADKSGGQKLVPKPRRCGRRHNEAAFAVRSALHRMSGHDLTVLEGIDDNTALVILSEIGMDMSKWPTEKHFTSWLGLCPQHQGSAGKIKSRRVRRGSNLAARAFRLAAQGCHHAKNALGAFYRRIRARCGGIKAVFATARKIAERVYRLLKYGTEYVRQGIEAYEKAYRERLLKGLTYRAKSLGYALIALPEAPPSTEATPATL

SEQ ID NO: 234138 - protein, 487 aa, unidentified
MVKRKKSTFERLSGARMNRQQRRKLGRRLAGKDPGLTIVNANAGGIDVGNASHFVAVPADRDSNPVQEFGCWTADLKRMAEWLQACRIDTVAIQATGVYSIALYDILTQHKIRVVLVNAQHTKNVPGRKSDVQECQWLMKLHTYGLLRDSFRLAENMEAVRSIWRLRDRHVKEASRAIQHMQKALTRMNIQLANAIRDITGVSGLAIIAAILKGERDPCKLADLRDKRVKATREEVARSLEGNWREDLLFELGQALQSYHFAHQLMRECDGKLEGYLANLPTRMLEVPGGPEIAPVAAPKKVCKTKKTKKPRGNEPTLDLKTELKRICGVDLTSIDGIDVITAQTIVSEIGADTSGFSTEHHFASWLGLTPSKDISGGKVIGPGRRKVQNRVAMALRIAATTLLKSGSYLGARYRHLRRQLPSHKAAVKAMARYLAVLVYRMLTHGEAWVDRGAAQFEQKRTDRELASLKSRALARGFQLTPLAAAG

SEQ ID NO: 234139 - protein, 430 aa, unidentified
MKSNTQNAKIEAITEKTLVLGIDVGSKTHYARAFDYRGIEYSKKPFKFSNTEAGFATFKEWILDLKERHEKDKVVPGMEPTGHYWFNLGKFLQDNEMKPVLVNPHHVKKSKELDDNNPTKNDRKDPKVIAGLVREGRYMIPYLPDGVYADLRTASNIRFQLQAELTRIQNRISRWFNIYFPEYKTVYGKPDAKSGMLILKHAPLPEDILTLGIDGVNQIWRDAKMRAVGKARAKTLIEAAEHSVGSKEGAISARMEIRMLLEDYESRNIRLQEIMTLIEELVNQIPMAEKLLEIKGVGIKTVSGFLAEVGDISRFNNPKELQKLAGLALVENSSGKHKGRTTISRRGRKRLRYLLFEVAMSLVAKNPEFRELHTYYTTRRLNPLKKMQSLMAVAAKLIRVFYVMLTKGVDYDPKKMVGDIKRPAVYLQAA

SEQ ID NO: 234140 - protein, 333 aa, unidentified
MNTTQNSTKSKIVKVIGVDLAKDHCDVIGYDENGKICLRLDGCSYAKLREILSNLPQAVVLMEACKGSMFHARSIADLGHEVRLVKGADVKALRNVNHKNDLRDAAYIAKLYFVPGTTYVYIKSQQQQSLQFLQNEYKSLQELRIQAGNQIHAGLEEFGCPVRKSSKFIKTRMVAHLEKHAELIPEDVMASFKRRREIWLNLLQQEEEAKRRLEQVAATDANAKRIMTVPCVGPQTAVGLLVHVGVDFGRFKNSRQFAASLGLVPKQNSTGGNNTLNHITKCGPKSLRSNLVQCAQLVLMYPENRGIYTQSDSSKKSSRNIWSLAVVSVDQRY

SEQ ID NO: 234141 - protein, 396 aa, unidentified
MRNDVTIYVGIDFSKEKFNACLLMEQGVMGESEFPNSKTGYLKLTKWVKNTSELGRSFDSSLVLFCGEHTGTCSIGLCEYLYAKGMKIWLESALKIKYGSGLKRIKDDKADAEMIAYYAKRFYEPGSCALFEPDSADLKTLRTLYQFRNRVVCDRVAIGNRISSGAFDCSTLVRNRMVKHHKEAQKDEKDIEKEMVKLMETSEELASNYQILISFKGIGPITAAALIIYTSNFKKFDNPRKFACYCGIAPFGKQSGTSINTKPHVSRFAHIGIKAAMVQACKSAMQHNAVIKAYAQRLYAKGKHEGIVMNNVKNKVVHIIFKMIQTQTLWEQEYQQKHMKECKAIPGKNGIGATEAAPIINATLKTSSSVVECTFLEEHSFQKNCKKTSSFSCVET

SEQ ID NO: 234142 - protein, 427 aa, unidentified
MAVVMIGVDPHKASRTAVAINAAEQPLGQLRVRASAVQAERLLGWAQAWPERAWAVEGAGGLGHLLARQLLSAGERVLDVPPQLAARVRLLATGDVSKNDPSDARSVAVAALRSAQVREVRRDDHATVLKVRAKRYRDLGRARTQVACRLHQVLCELVPGGVSGEITAGRAGQVLASSAPAGAVDAARWELAAELTEDLRGAGTRIRETRKKAAAAVRAAGTSLTGLFGAGPVIAAAVIGDVRHVSRFPDRDHFAAYNGTAPIEVSSGGRKACRLSRRGNRRLSHAIHMAAVTQIRYRHTKGRACYDKKLAEGKTPKEALRALKRQISDAIFACLQEDARRAAAPAGKSPGGQPGNHSVSRAAGSHPDHRLFGQATPGPATHPTTLTAPFPAPLPSPASELPGPGPGAARPRGGARRASSTRPPASR

SEQ ID NO: 234143 - protein, 310 aa, unidentified
MFVGIDVSKDRLDVHVNPGGVAWSVANDDDGHRELASRLAELKPTLVVTEATGGYESQVVAELAAHELPVAVVNPRQVRDFAKAIGRLAKTDAIDACVLALFAEAVKPEARPLRDEATQELQAMVLRRRQLVDMRAAEKNRLGSCRVARVRKDIEKTIAWLTRRIKDVEDDIDKQIRKTPVWREREELLTSAGGVGATTARTLLTALPELGTLDRRSIAALVGLAPFNNDSGKMRGKRSIRGGRAEVRKVLYMATVTATRHNPTIAAMYARLVAAGKAKKVALVACARKLLTVLNAMARNNTPWKAELAR

SEQ ID NO: 234144 - protein, 347 aa, unidentified
MEQAIRIGMDTSKHIFQLHGVDAAEKPVLRKRLGRKAMVDFFAKLPPTVIGIEACGTSHQWARVLVSLGHQVKLIAPQHVKPYVKRNKNDGRDAEALCEAMSRPTMRFVAVKTAEQQAALMLAGIREQMIARRTQVSNMIRGYAAEFGITAPQGLNQIEPLLARLAQDESVPELARGLFALQSRDYAQLQVELNAVEVKLRAWHRANADSRRLAKIPGVGPIGATGLVMKTPDPHAYPSGRHFAAWIGLTPKDHSTAGKTRLGKITRAGDERLRSVLVAGATAVIQQAKRGRGHPSPWLVALLKRKPPKLAAVALANKNARIAWKLMVTGESYDGARMPKASVAAAA

SEQ ID NO: 234145 - protein, 318 aa, unidentified
MMQDYLGIDVSKAKLDVVLLIGERSFAKEFANTPKGMKLLLGWLRSLRAGEVHACLEATGSYSDGIAEFLYEAGYAVSVVNPFRTHSFRGSRLQRNKTDKADARLIAEFCRSESPGLWKPASPQVKHLQALSRRIDALEEMRLMEQNRLDTAPQEAKASIRRMIRVLEREIAVIRKEAEDLIGGDPDLKVQDELLRSIPGIGKKTSMMLLSEVEFDRYESARALAAYAGTTPAKQDSGNQKKSKLSRVGAVRIRKGMYFPAIVAQTCNPIVREFASRLSARGKRPMQIVCAAMRKLLHIAYGVLKHRTPFTPNAASYT

SEQ ID NO: 234146 - protein, 418 aa, unidentified
MNKHNNSGKKSEPTSKQAKPRGPIRRDTKDVLAELVGKLKEKLDPKKLAATSAGEKHKRGELRPNLDRLTVGVDLGDQWSNYCILDLEGETLAEGQLRTTQEDLAEFFQALNAARVVFEVGTHSPWVQEVIGGCGHEVLVANPRMMDGSKRRKRKNDRIDANKLARLGRVDPQSLHPIRHRSREVRQDLAVLRARDALVAARTELINATRGLVKSMGTRLPKCSSPSFAEKVEGTIPAELRDALLPLVRMATALSDCIQEYDEKIEKLGREKYGHTALLRQVKGVGPITSLAYVLTLENPDRFVKSRDVGPYLGLVPKQEDSGEIQPQLGISKTGDTMVRKLLVGSAHYILGPFGPDTDLRRYGLRLCERGGKNAKKRAAVAVARKLAVLLHCLWGSGEVYEPLRQGTSATIAPAVAA

SEQ ID NO: 234147 - protein, 346 aa, unidentified
MCERKDIILAVDYHAENTEIRWLNCYTGEERRMNIPSARASILRLVEKAVAEAAKVGGKVVWIMESTTGWARVKELIGSRVQFIMANVLQMPLPPKAYRRKSDKIDTGRLLREFLNGLLPMSYQPVAWWRKVRRLVDSRQDLVERQTAVKNWISHFLHHETWYDRAGLWTQKGMKRLRALKLSASDRMLLELKLQELEQLEDRREQMETAMQAVYDQWPQAQWVDEVRGIGMVTAVSILAHIGAIERFMTAEDLISYAGLAPGHRQSDDTRHNGKIGGGGTDSNLRYLLIESMQWVCQIPRYHDAFERAAARHGKNIARIIVARMLLRSIFKMLHDGVRFNQVPAA

SEQ ID NO: 234148 - protein, 427 aa, unidentified
MGLIVPTTIHPEREDQPLPYEWFVGIDWGSQQHQVYVLDRDRRRVGERVVDHDGASLARLADWLWTLSAGQPQRVAVAIEVPRGAIVEGLLERGFHLFALNPKQLDRFRDRHSVAGAKDDRRDAFVLADSVCTDQPSFRRLQLDAPQFILLRELSRAEETLLEEFRRSANRLREQLHRFYPQMLQLCSAADEPWLWDLITLAPTPAHAMLLSEEQGQRVLKAHRLRRLKAPAVLACLQAPALPVAPGTAEAAQAHCGFLLPCLRVLAEQLQACSQQVSTLLRTMADEPGEGGSPSDVAIVQSLPGIGRKITAWLFAEAAQPLAERDYQVIRTHGGVAPVTKQSGKRRQVVMRHGCNPRLRHALYHMARVAMQRDVHFSSVYAALRAKGQRHGQALRNIGDRLLRILMAMLRHRTGYDASRIRCKPVV

SEQ ID NO: 234149 - protein, 326 aa, unidentified
MTASGEEVFVGIDVGKADLYVAMYGSETIWQVTNDGEGIGRLVTRLRALSPALIVVEATGGLELPVVAEMACGGLPVAVVNPKRVRDFARSIGQLAKTDRLDAKVVAHFAQAVRPQVRPLRTEEEEHLAGLVTRRRQVIEMLVAEKNRRSTTRPQLRERVQKHIEWLEEELKVLDDEIADFIQSSALWKAKEALLRTVPGVGPVTAATLLADLPELGTLNRQKIAALAGLAPLNKESGKKRGKRRVFGGRAPVRSTLYMATLNAVRHNSVLKPFFEQLLKRGKEKKVALTACMRKLLVILNCIIRDRQPWHPFKRTSRVIPDLAGV

SEQ ID NO: 234150 - protein, 338 aa, unidentified
MELSVIGMDIAKNVFQLHCVDRQTGEIERIKLRRNEVLPYFARRTPALVAMEACGGAHWWARQLQQLGHTVRLLPAKAVRPFVLRNKTDAADARAIWTAVQQPEMKTVAIKTEYQQSILALHRMRAQLLKFRHMQTNAIRGLLLEFGHPVPESYLALRKAFPTVMATLDKQLPGILIETLREQWARVQSLDNEIALIEGRLKRALAETPTCQMISDIPGVGLMTATAAVATMGDPASFKTGREFAAWLGLVPRQTGTGGRIRQLGISKRGDAYLRTLLMHGARAIIARRTYSDWVAGLIAHRPYSVVIAAIANKLARTIWAVLATGKRYDGAAFAAAI

SEQ ID NO: 234151 - protein, 367 aa, unidentified
MKQVTTFVGIDAHKKDLFIAMLIGDQSTPVTWQLANEPNAVRRLVRKLEREAPGPVRACYEAGPCGYALQRQMTTTRVRCQVIAPALVPRKPGERVKTNRRDARKLVELLRAGLLTEVRPPTPEEEAVRDLCRARDDARTDLQRCRHRLGKLLLRRGLHYCGRNWTRAHRQWMDSLAWTHAAERVVVEDYLLAIDQVEARLRELDAHLTETAQTDPYREPVGWLRCFRGIDTLTAIVILAELHDFRRFQSPRALMAYLGLVPGEDSSGEKHRRGRITRTGNTLVRRLLVETAWHYQHRPTVGIALTRRRKGQPGRVIAIADKAQQRLCRRFRKLAAEHKPAPKIAVAIARELAGFLWAALQPPVVAN

SEQ ID NO: 234152 - protein, 337 aa, unidentified
MRYVGVDLHKTQFSVCWKEEDGSSKFERYGMSGEGLGRFRERLDGETEVGVEATANSKYFYDQVVGSANRVRVINPLQFKIISESVKKTDREDARVIAEFMSKGLLPEVRVMEKDRRELKSLIQTRDKLVKHRSSLKNKIHGILLENGIQSKREMFSSMKALKKVLEVPVSETARFELEVIVEQIVSLTEGIKALEGKIKDKGKGMKGHGNLKSITGIGDLSSTIILCNIGNIADFENKKKLAAYAGLVPRVYESNETVRHGRITKRGDKIFRTTLVQVALIAIKYNGYLRSFYNRLKVKKGSGKAIIATARKMLEIIYDTLKNEWVFEDFNNFVLA

SEQ ID NO: 234153 - protein, 415 aa, unidentified
MKKHNNSPKKSEPTSKRAKSRGPVQRDPKEVLAELLGKLREKLDPRVVAGSAGEEDGGGELRPTLDRLTVGVDLGDQWSHYCILGLEGETLAEGQMRTTQQDVAGFFAGLNAARVVVEVGTHSPWVREVICGYGHEVLVANPRLMEGSKRRKRKNDRIDANKLARLGRVDPQSLHPMQHRSPEVRQDLVMLRARDALVAARTELINATRGLVKSMGARLPQCSSPSFAHKAEEAVPVAIREALLPLVRMTAALSDCVKGYDEKIEKLGREKYGHTTLLRQVKGVGPITALAYVLTLENPERFAKSRDVGPYLGLVPKQEDSGESQPQLGISKAGDTMVRRLLVGSAQYILGPFGPDTDLRRYGLRLCERGGKNAKKRAAVAVARKLAVLLHRLWVTGEVYEPLRHAISVPIAAAA

SEQ ID NO: 234154 - protein, 454 aa, unidentified
MGKKFKSYKKAELPKHFLQLNLCAAGIDIGSKSHFVAVPEGTDDQPVREFECFTADLNRLADWLTSCGVTTVAMESTGTYWIPVFEILESRGFEVKLVNARHVKNVPGRKTDVVDCQWIQRLHTYGLLEGAFRPPEQVCAVRAYIRHRMNQVQCAASPIQHMQKALTQMNLLLHNVVTDITGVTGMRIIKAILAGVRDTRVLAELRDRRCKNSVETIAKSLEGNYRPEHLFSLKQAVETYEFYQTQIADCDREIEALLATFDSATEDTEPPQADGANKPPKAKRNVPTFDLQKELLRVAGVDLTRINGIDTLTAAKVLSEIGFDMSRWKSEKHFASWLGLSPGSKISGGKRLSGKTKPVANRAAAALRMAASTLYRANCALGAYYRRMKGRLGAPKAINATAHKLARLVYSMLKYGTDYTDVGQDYYEQQYKSRAIKNLKTRARQLGFELVETA

SEQ ID NO: 234155 - protein, 355 aa, unidentified
MKYYTSTTEFNCGFDLHARQMYVCLMDRQGKKLVHTNVKDNDFAYFLKLIEPYKHSLTVCCECMFGWYWLADACQAAGLTFVLAHALYVRAIHGGKNKNDRIDSEKLAHLLRSNLIPPAYVYPTQMRPLRALLRQRIFYVWRRAQLLARIHCHQLAHNRVPAKQSRWTRDDWEERLLKAELHPLRQLALQNDLAMIRHFDHQIFEVEKELYRQTKQLAAREYALLQTVPGIGENLGLTILYEIGDIQRFPTVKDFLSYCRLVKGTVASAGKIKGLRGAKLGNPYLRWAFGEAAVIAKRDPFRIRPLAQRLEAQMQGNKFKANTVLAIKLARSVYFMLKNKTVFDPDRLVAALARN

SEQ ID NO: 234156 - protein, 396 aa, unidentified
MNDVAERVVIGMDPHKRSVTIEVMTADEDVLGGGRFGTDTAGYKSMLDYLHRWPDRVWAIEGCSGIGRHVALRLLADGQDVVDVPPKLSARARVFSTGQGRKTDATDAHSVALVGTRMSGLRPVVDDQQLAVLRILVDRRRSLGEDHTRMISQVHRLLLELIPGGAKKDLSAAQAKALLAKVRPRDAAGKARRRVAAELIGDLERIYRRSKDADKELKELLAATGTTLMDLHGIGPSGAARLLVEVGDITRFPDRDHFASWNGTAPIDASSGDQVRHRLSRKGNRQINRVVHIMATVQLRNPTEGRAYYDRRKAEGKTSMEAMRALKRRPSNIVYKTMLDDAMSRSASGAKTGPGGQRGNDSDSSAAGSHPHTGSSDKPLPGPASPNPRAPLPATS

SEQ ID NO: 234157 - protein, 456 aa, unidentified
MSRKRKSSKKIGAPVLHCLNPNAAGVDVGATEIYIAVPPDRDEQPVRHFSTFTEDLQAAAAWLKSCHIETVAMESTGVYWIPLFQILEGQGFTVFLVNARYVKNVPGRKSDVSDCQWLQYLHSVGLLRGSFRPEQAVCTVRSILRHRDSLVQMASSHVQHMQKALDQMNLQLHHVISDITGVTGLTIIEAVLRGERNPHTLAALRDGRIKASEGTIAKSLIGDYRREHLFTLRQSLEAFRHYQKLISACDTEIEQYLEAFESKVDPPEGSTPTSREEQKPKGGESTFNLQSHLHRIFAVDLTKVPGIHVLTTQTLLAEIGPDLSRFANGPAFTSWLGLCPDNRVSGGKVLSVKTRKVKNRAATALRMAAQSLHHSQSYLGHFYRRMRAKLGAPKAITATAHKLARIIYHMVTTGQAYDETICAQNEKHNRWRLELKLRKQARELGFEVVAAKPVAI

SEQ ID NO: 234158 - protein, 296 aa, unidentified
MTHHLSSATAAAVFAGIDTHADFHHVAVVDADGHKLGDQAFPTTVDGYAQAAAFLTSWGHPARTGIEGTASYGAAISHLLAAADHTVIEVNRPDRRARRAAGKSDPADAYAAADAVRTSRASTLPKLSSGTIEALRLTTITRRSAVKARTQTINQIRSIIRSAPAALADSLRGLPLTELITRLTRWRADTTNHATLPATKTALTRLARRWTYLTEEISAADHTITELTSQIAPELLAIDYVGPHTAAQLLITAGSNPDRLHHEASFARLTGVAPIPASSGRTRRHWASPQIVEDFS

SEQ ID NO: 234159 - protein, 353 aa, unidentified
MTKPCPLPQRSWTAGIDPASESFVAALMTSLDEPVQATDEFDNTKAGYAAFQRWLEERHVQADEVLICVENTGVYSEALCYSLYERGFLITLAVPYNVHKASEDGPKNDHRDSQKIAQYALRYRDRLSPWQPQEALTERVKAILTTREQLIKQKTATQNSLRAMRRKAVETPSVLQALETIKTSLTEQIEALIEDLKRLISEHPRVAQMVEVVDSAPGVGLLMASHLLVLTNAFTTPVSYRELAAHLGISPREYTSGKSVWRPSKGRGYGPSMMRKLLYLASGSLVRHDERFSQYYARKCAEGKSKLLVRNNVSNKLLRIICAMIKNKQPYIDTYQSIRPRLQKTPSKPLTKS

SEQ ID NO: 234160 - protein, 403 aa, unidentified
MNNVAGIDVSKGKSMVSVLRPFGEVVAKPFSIGHTGSELKELADYLKSLDGETRVVMEHTGRYYEPVARFLHEEGVFVSAVNPKLIKDYGNNTLRKVKTDKADARKIARYGLDNWAELRQHTPMDTIRMQLKTLNRQQSLYAKTKTMMKNNLIALLDQTYPGVNALFDSPVREDGSQKWVDFATAFWHVDCVRNMSLTAFAERYRKWCKRHGYNFSQSKAVEVHAGAQDLIAMLPRDALTKTMVRQAIDALNAVSASLERLKAEMQALAAQLPEYPVVMAMHGVGDSLGPQLMAELGDVARFTHRNAITAFAGVDPGADQSGTHEAKSTRVSKSGPPELRRALFLVMDCLLKTQPQDDPVYRFMDKKRAEGKPYLVYMTAGANKFLRIYYGRVKEYLASLEEN

SEQ ID NO: 234161 - protein, 340 aa, unidentified
MGNVTTIGLDLAKNVFQVHGVDAEGVAVVRQRLTRGRMLKFFAKLPPCLVGIEACTTSHYWARELVALGHDVKLMPAQYVKPYVKRSKNDAADAEAICEAVTRPTMRFVGIKSPEQQSAMMLHRVRLILNRQRTQLSNAMRAHLAEFGIAAPIGRNGIEQLLDVIADPTDERVPADARFCLEMLAAQLRIVKEQILENDRRILASARETELGRRLMEIPGVGPLLASAIVATVPDPAIFRSGRNLSAWIGLVPRQNSSGGRERLGGITKAGHQYLRQMLIVGAMAVVRFAERNGAKRPWLVQLLARRKTKVAAVALANKNARMIWAMMASGERYREPLVA

SEQ ID NO: 234162 - protein, 451 aa, unidentified
MTKKKMELDIINPNCAGIDIGSKSHFVAVGQALEDVKEFGVYADDLTAICLHLKEYGITSVAMESTGNYWQNLYVELEKHQMEVTLCNGKFTRHAKGKKTDVKDCRWIQKLHALGLLTGSFLPDETTEQLRTYCRQRTNWIDLAAEASHKMQKYLKLLNFRLDVVVKDICGLTGLAIIADICKGNLDPEKLSQHRHGNCRKSQEEIAKALKGNNRTDFLFGLKQEYDSYFFFQKKIDACDVQINSFLKTQINTYPDKKKLQTDNKIHKRINKNAIKGIDLNQAAYQYFNGVDLMKIEGLSHSTILTIMSEVGPDGFIKFETAKQFTSWLRLAPNNKISGGKILSNKIPKGSNRLKIALRHAANAIGNLKDTHLSDFFKRVAYRKGRATAVSATARKLAVIVWNMISKRIAYKPPTEYLFVDQKRKLRLIQKIKNNIAKFELKPEDIGFVTE

SEQ ID NO: 234163 - protein, 401 aa, unidentified
MKTVLSVDVAKNKSMIMLMNSDGEIFIDTKEINHNLEDFEKVKEEIKEINPQNLTVFMESTGTYHLPVERYFKENGFNTLVINSLTTKNNYDTIRKTKTDKKDCYRLAKLFFVNEVEYHDLSKKDLYANLKAMTRQYFYLLQNNVSCKNRYKRLINIYFPELEKIFKSTRIYDDTALNFIKEFPHAEIVKEKRIDALYNNLYKTNGRNLNFYKKLATTIKTASINSYPGVDKEHEDVKNLSYMAKIVQNNNNIINELREKMIETAKQSPYYKIINSFYGIGDTLTAEILGELGDITRFDSPKEIIAFCGLDPTIKQSGKSINVKGAISKRGNKYARYILFNCSQMVVKLGASNYPEHPVYIYYQNKKAEGKHYYESLTACSTKILRMLYSMCKNNKQFLEN

SEQ ID NO: 234164 - protein, 341 aa, unidentified
MLIIGCDLHTRFQQIAMVDTTTREMVTRRLEHENGEVRKYYAGLGEKARVGIEATGCTQWSERLLAELGHELWVGHPAEIRARAVRRQKTDTRDAEHLLELLLSNRFPCIGVPSGEERDARPLLRHRDKLVQMRTSVKNQRHYLAMSQGVCRKRQLWSKRGRQELERLPLGPWASRRRQELLELLDRLEPRLEELDQAVKAQAEGRAEAVRLMQQKGVGPVTALAFVLTLGPVERFPNSRKVVSYLGLNPREDSSGGRQRLGHTTKQGNQMLRWLRVEAGQSAAQHDPELRRRYQRLKFRRGAHVAKVAMARRLAVLLYWQLRQAQNAAPPAGTSTGKYHG

SEQ ID NO: 234165 - protein, 365 aa, unidentified
MTKSISRKATQRSEQLGAYSDRVSTIGIDLGDRSSHCCGIDDEANIVAEFRVATDATSFEEAFRGIARKTIAIETGAHSPWVSRLLESLGHEVIVANSRKLRFIYENRRKDDRVDARSLARVARLDRTLLEEIRHRREGAQVDLELVRARDVLVTTRTRLVNHVRGVVKSFGKRLPACDPSALPRKATTAIPPVLLEALTPLLDMIESLSDQIRLYDRAVEHLATIEHPEVAKLRQVSGVGALTGLAFALTLDDPHRFRQSRSVGAWLGLVPAKDDSGERRPQMRISKEGDHYCRRLLVGSAQYILGPFGPDCDLRRHGLAIAARGGKNSKKRAAVAVARKLGVLLHKLWVSDAVYEPLYNKIAA

SEQ ID NO: 234166 - protein, 341 aa, unidentified
MMIIGCDFHPRFQQIAFVDTQTGEYGERRLLHTVEAEEFYRSLPGRPVRVGVEATGNFGWFRRLLGELGHELVLGDATMIRASNPRQQKTDKRDARHILRLLVEDRFPAVWQPGAANERLRQLLLHRSSLVRMRTRVENQLDSLGKNEGLVESRGWTAKRRRAVEALELEGWYAARRRDMLVLLDGLEERIGPLEQAVRAAAEADPQARLLMTHPGVGPVVSLAFVLTIGDWRRFPRGKQVASYLGLIPAEESSGDKRRLGHISKQGNPMLRWLLVQAATIAQKYDAHWRRQYVRLSLAKHHGVAKLAIAHKLAVRLYWMLRSGQDYRQVMERGSRAGQPV

SEQ ID NO: 234167 - protein, 379 aa, unidentified
MNQYTTLYIGLDVHKESIAVAYAPEEPGTEPIYLGPIGTRQCDIDKMIRQLHAKAPRLRFVYEAGPCGYWLYRYLQKSGLECIVVAPSLIPRKPGDRVKTDRRDAVQLARLMRSGDLKAIYVPNIGDESIRDLCRLREDMMNDLRAAKQRLKSFLLRHDVRYTGRASWSPRHLRWLAQEVSLATPQQQIVFQEYLRSVTHLAERLALVEEELREHVSGWRLQPVVSAYQALRGVQFHVATTIAAELGDITRFDTPRQLAAYVGLHPSEYSSGGNRHQGGIAKSGNSHARRVLVEGAWSYRHPARVSKEIQVRLECLPEEIRDIAWKAQVRLCKRYRRLSARGKHQNIITTAIAREMLAFMWAIAKKVKIAESSQTALAG

SEQ ID NO: 234168 - protein, 438 aa, unidentified
MLRVSFGAAPSKNVALAPLSGAGCRYGRFVRTLRIRRAWTPPGQPVWRPALHFMIVGGPQAHVILDFMTALAPSDRVHLATKRPGLGEGANVRFIIGCDFHPSFQQVAIFDNLTQEVRQLRLAHPQQAEEFYRSLPAPARVGTEAGGHNQWFQKLLVELGHELWVGDAARIRASYVRKQKTDRHDARHLLELLRQERFPRIWVPSAAERDLRQLLVHRHSRVRMRTQVKNQLQALALNQGLQKKRRLWTELGRAELEGLVLLPFAGARRTALLDSLDRLNQEIAVLDRQVERAALAHAGATRLMTHPGVGPVTALAVVLSVGPVARFRRAKHLASYVGLVPSEHSSGGKQRLGHISKQGSSFLRFVLVEAAQSAVRLDPAMKRQYVRLALRRQRAIAKVAAARRLLRRLYWMLRWECDYPALLARMQASPSHAVTRSA

SEQ ID NO: 234169 - protein, 391 aa, unidentified
MVYLGIDVAKDKHDCYIVNSDGEILANVFTIPNDQAGFNLLFQKLQSVAPDLSKVKVGLEATGHYSYNILGFLLDKGLHTYVINPLHVNLFRKASNIRKTKTDPIDARTIAEMIMSNVVLTSYTAKSYHNEELKSLTRYRFDKVQERAKLKTSVARLVSILFPELEKLVPTLHMHTVYALLTEFPGAHQIASCHLTRLTHLLSESSKGRYKRDKAIQIRETARSSIGSVMPAKSLELKHTIHLIEVLTEEIDEIELSIRQIMDADPSPILTIPGINYRMGAMILGEIGDFSRFSSPDQILAYAGLSPSTYQSGKLDNAYPHMEKRGSHYLRFALFNATRFVCNWDPTFASYLAKKRAEGKHYYVAISHAAKKLVRLIFALVRSGQVYSPAT

SEQ ID NO: 234170 - protein, 354 aa, unidentified
MRTSGKNIFEGQLTIGLDLGDRSSAYCVLNAAGEIVLEHKLATTPEAMKQVFGSLPRCRIAMETGTHSPWDSRLLMALGHEVIVGHAQKVRLITKSRKDDRLDARTLARLARIDPELLSPVKHRSAQAQLHLTEIRARAALVSTRTALVNAARGLVKSYGERLRKCHTQQVGREMTRELSMGLREALKPLLQEVESLNERIQEYDRRIAKMAKEMYPETALLKQVKGVGDLIATAYVLTIEDPHRFRKSRDAGCFLGLQPGRRNSGESEPQMRISKEGDEYLRTLLVQGAHYILGPFGEDSDLRRWGQKLSGRQNECAQAPRDYRRCDGPHREGHEHFHRQQRAHCPCNPWRIR

SEQ ID NO: 234171 - protein, 364 aa, unidentified
MSTLHYVGMDVHKETIDVSLYKENDPRPYCEKRIPNRDASIKKLFRGIMKTGSAVACYEAGCMGFTLQRTLEGMGVTAVIAAPGKMPRRSSDRVKTDRRDARTLATYLRNGDIEAIRVPTEDEEVVRDYLRGREDVRLDQARTKQRLQKFLLRHGYVYESVRYWTGRHEKWLRSLVFKNSLMKETFEEYHLGVQELEGKLRMMDKRVEEIALSELYAPKVKKLRCFKGIDFLTALTLVVEVGDFKRFKSAEAFMAFLGLVPREYSSGEKRRQGGITKAGNTHVRRLLVESGWHYRYSSPPSKRLMERRYGQPADVIAYADRAMKRLQHKFFKLILRGKTSQAAVTAVARELAGFVWGMMVGCTA

SEQ ID NO: 234172 - protein, 451 aa, unidentified
MTPQKSNTISMDVLRPNAAGIDIGATSNYVALPPDRNQAIREFGSFTCDLNQLADWLLDHSITTVAMEATGVYWIPLFQILEDRGLEVFLVNAHHVKAVPGRKSDVKDCQWLQHLHSVGLLKASFRPQQEIVAIRSLARNRAKLVRYATQHVHHMQKSLTQMNIQLHHVISDITGVTGLAIIDAIISGQYEPSTLAELKDRRIKASKETIAKALKGDYRPEHLFTLRQAREALRFTERQISECDAEIERNLREFTVSGEEPRPSKVERANSHKKLRLRSGRDHIIHAEMIKAFGIDLFELPGFATDTVLTAFTEVGTNFGKFRSAAAFASWLALCPDNKITGGKVRSTKTRQTKSRLAAALRQAACSLANAKSYYGDLYRRLRAKFGAPKAVTATANKLARLLYHLVTTKQEFDDSKFAEVNAKYAQRQLAGLKKKARSLGYTLLPNEQPA

SEQ ID NO: 234173 - protein, 318 aa, unidentified
MQDTINFVGIDMAKNDFYACLSDIIEPQKFNNDTKGIKSFFNHLKHCDFQKENTIIGVESTASYHLKLCIETSERDYKIKVINPLIVRKQNQTSLRRVKNDQKDSRLIRFCLIGGAGCLFDNDPEAIILKSLIRQRDSLVFSKLKFMRQQDDIRLKEKCLKQGISPIYTEIINALEDKINLLKADLRLYRPKEQYLLESIPGVGPITAAIFISEVGDINRFKKPEQLVAYVGIDPRVHQSGISINGKGYISKRGNKILRTRLFNAASVAVLHDNLFKTFFKKKKDEGKPYRVALVATMRKMTHVIHAVWTRGTPFVKG

SEQ ID NO: 234174 - protein, 370 aa, unidentified
MKKLIMYVGLDVHKNSIEVAFADAGRDGEVRSYGKIDGNLTALDKVIRKLEAKGSELHFAYEAGPCGYEIYRHLSSNGYDCIVVAPSMIPRQSGNRIKTDRRDAQMLARLHRAGELTSIYVPALEDEAMRDLTRAREDAKSVEKKAKQRILAFLLRHGYRYSGKTPWSKAHFRWIAILKMPHPAQQIVLQESLDALSECTERVNRLTDQIQRLLPQWHMLPVAQALQTLRGVSLIVASTTIAELGDLTRFASPVELMSYLGLVPSEHSSGEQTKRGSITKTGNGHVRRVLVEAAWAYRLPARVSRALLLRQEGMSQNVCAISWKAQLRLCNRYKRLLERGKAKQLIITAIARELCGFMWAIAHEVETPSS

SEQ ID NO: 234175 - protein, 482 aa, unidentified
MKAQQPEKGKPAIPARRCKWHEMNRKQRREIMRRLQSKDLSMEVIHPDAAGIDIGNESHYVAVPQQRGSQPVRRFGCTTAELRAMADWRKQCGIRTVAMQSTGVYWIAVFGILEEAGFEVYLVNARETKNLPGRKSDVQESQWLMKLHTYGLLRNSFRPAQEIRTMRTYGRQRNDLVRSACRHIQRIQKTLTQMNIQLANVLSDLSGATGQAIIKAILGGERDPHELAGFPDPRVKASEEEIAQSLEGHWQPDLLFVLKQEQEGYEFCQRQIAQCDRQLEQYLLQREDRSHGAPLPEEKRKIRLKKKKNGNKPQFDLRAELFRMTGTDLTRLDGVDVMTATTIVSEAGYDMSRWQTENHFVSWLRLCPDNRISGDKIIGQGRLPTNNRATIALKMAASTLRTNQTYLGAQFRRLRTKLGAPVAIKAMAAKLARLLYRMLRYGMNYVDQGVEFYEAQHRKLQINSLKWKAAQLGFQIIEAPAT

SEQ ID NO: 234176 - protein, 388 aa, unidentified
MFFLGIDVGKNTHVASLVDEKAKIIFKAYSFANTLDAAEALLVKLEPYKDSLEIGMEATGHYWLSLYSFLAEHKFIVHVLNPIQTDGWRKGIEIRKRKTDVIDSVLIANLIRYGNFLETSLADEDILSLRNLSRFRVYLVNSVSDLKRKAIAVLDQIFPEYASVFSNVFGQTSKELLKSLSLPSDYENLSATKIEEVLSNITQKKKASKTISTLSDKASRSFGISFCKDSFAFQLKLIIEQICFIEEQIASVELEIDQLMSKLGTNIKTIPGVGSVIGAVILGEIGDIERFDNPSKLVAYAGLDASVSQSGEYEASSSKLSKRGSPYLRKALYMAAQRAEFCDPVFHAYYEKKRNEGKHHLVATNAVARKLCHTIYAILKKDIPYEVQ

SEQ ID NO: 234177 - protein, 327 aa, unidentified
MEPAYIGIDLHKAFFQVCAVNGAGERTWEQRWPTTDAGIAALLTRCDTQSRLAVEASSPTWAFVDRIVDHVATVTVVDTRKTRIKAGYAAKTDRLDAQRLADALRRDSVVGIYYPSPAIRDLRELCRYRCHLARLQASLKQRIHALLLRQGVDAPRALFTKRGAQWLEGCSLAGWAGHELQGLRRVMTDVRTQLVPVVAAIRTIAATDPVAHALDQRRGFGPVFSVTLRAEVGTIRRFPDGPHLASYAGLVPRVERSAGRRWTGRITKAGSPWLRWVLIEAAIHQFRRQDAFGRWARRLAVKAGMLKTRVAVARALCTEVFEAWPRE

SEQ ID NO: 234178 - protein, 317 aa, unidentified
MDKIFVGVDVSKERLDVHVLPAGETFSVERTGAGIDALALRLKPLQPTRIAIEATGGFETIVAAGLAGAGLAIVVVNPAQVRSFAQALGQRAKTDPIDAKVIARFVMATLPELRVLADEETEFLAGLVGRRRQIVEMIAAESQRGRRVADKRASGKRLAKSIARVKKALEAELAELDAMIDEAVRGSPLWHAKENLLASVPGVGPVVARTLIADMPELGRLNRKQIAALAGLAPFTRQSGQWKGKSFIAGGRASVRTVLFLAAQSAKRHNPPLRVFYQRLIAAGRPKMVATIAVARKLLTILNAIIKQQTPWQPQNA

SEQ ID NO: 234179 - protein, 352 aa, unidentified
MDEKYVAMDVHKASVVIGVRDGTGKMIARAMVETKAQTLKDYVRGLSGTIHLTFEEGTQSAWLYDLLRPLVAECIVCDPRRNKLLEDGNKSDDIDVTKLSELLYLGRLRPVYHGAAGTRALKELAHNYEALVKDQTRVKNRLKAIFRGRGISYEGDEIYDCQEAEQWLAKLSERGVRERARQLYQQLAQLAEWVGGARRQMLAESRHQKAKKILQLIPTLGEISVAQLIATVDTPFRFRSKRQFWTYCGLAVVRHTSADYHFEQGELRRRLKPGPTRGLNRNYNRRLKRIFKTAAQTGSTKGPFKSYYQGLLGRGLRPELAQVTLARKIAAITLTLWKKGERFDPEKLVKSD

SEQ ID NO: 234180 - protein, 332 aa, unidentified
MYLGIDIHKRYAQVAVMDENGKIDREVRVENANLDKIAQEYAGSEAAIEATSNYYPIHDTLSEYLDVTVAHPGKLKLIADSDKKTDRVDAKELARMVRLGSVPESYVPTDEIRECRALVRGRQKLVESRTEYANKIHGLLADHGITRKVKPLSVEGREFLRELSLSTPWDALLTAHLEVIETLTEEIERLEATIEERAGSLEETQLLMSIPGVSYYSALMIYAELGEIDRFDRDKEVVSYAGLNPVIRESGDSRFEGGISKRGASGLRWILVQCTNVAVHTCQDTYLSRFYNRLANRKSSKEAMVATARKLLVSIFHMLDRKEVYDPPGVSA

SEQ ID NO: 234181 - protein, 343 aa, unidentified
MQIHSVGIDLGKTTVHLVALSAAGKVLLRKKFSQKQLITFTANMQISLIGMEACAGAHFLSRTLREQGHEVKLIPAQFVRPFVKSNKNDFLDAEAIAEAVDRQNMRFVPIKTDDQLDLQAIHRVRDRLVARRTSVINQLRAFLLERGMTFAKTPFKLKLAMPDILENAEANLTPRMRNLVSLLWSEWKDLEQQIVGMNEEIEQIASSDPACQRLRQIPGIGPQVATAIVAAIGNGAAFHKGREFSSWLGLVPRQHSTGGKARLFGISKRGNRYLRKLLVHGARSAVLRVKRERSPFGSWLDTLETRAPINVVVTAAANKLARIAWAVLSSGQDYRAPVNTVAA

SEQ ID NO: 234182 - protein, 408 aa, unidentified
MRLFVGDDWAEDHHDIEVMDQAGAVLARRRLPEGPAGIAQLHALVGACLPEDAEDPEVVVGIERDHGPWVGALAAAGYAVFAVNPLQAARFRGRHQVSGAKSDAGDAHVLADVVRTDSHQLRAVAAGSPEAEGIKVLARTHKTLIWERARQVQRLRHQLLEYFPAAVQAFSDLAAPDALELLGRAPDPAGAARLTRAQVAAALKRARRHHTPDKTTAILTALRSEQLGQPAALTAAYAAAVRSLIAVITVLNEQIAALEGQVTEHFGRHPDAEIYLSQPGLGPVLGARVLAELGDDPHRYASAKARKNYAGTSPITRASGKRTVVAARFVHNDRLTDALNRQAFSALTASPGARACYQAHRANGHSHHDALRRLANRLVGILHGCLKTRTRYDEATAWSHRTQITPAA

SEQ ID NO: 234183 - protein, 375 aa, unidentified
MARSVVNRQGSSRRREPRVQGTLGVSQPTRKRKETLVEHQQQYVGIDLHRRRSVIVRMTEKGEVLSTVQIENDPVALAMVVAEAGPNPEVALESTYGWYWAADLLQAEGAKVHLVHPLGLHWDTRRVKNDVRDATALANRLRQHDLPESWIAPPEVREMRELVRYRAKLTALRTSAKAQIHAVMAKHGIIPELGRMFGPTGQVLLDKMCFEGVYGLRVESLRDLLEIYDRELTMVEREMRAMFKNHAGYHAIQAITGVGPVMAGIFVAEIGDVSRFPTARHLCSWVGGTPKVRDSDEKIQRGHITKQGSGLVRWAAVEAVARYHGGDPIRPSYKRIAERRGKMIARVAAARRLLTLVYYGLRDGEIRCLTRKEAS

SEQ ID NO: 234184 - protein, 342 aa, unidentified
MVPDRPAPAIYVGVDIAAATLAVVRHAAGQPAAPAQACANSAAGWQQLQAALTAAGAAPATTLVVMEATGGSWQGLATALAGAGWVVSVVSPASVRHYAQARLRRAKTDAVDAATLAAYGRDLQPAPWAPAPADVQALQLLVRQRDDLVALQTETRNRQHALSRLPAVPEAARAALAAVLATLREQIAALDEAIRRQAAAAATIARDVARLQTVIGVGLLTAAVVVVETRPLRERATPGQVVAYAGLDPAPHESGSSVRGAGHSSKTGNARLRQAVSMAAVSAVRDNPPLRAFYERLLRRGKPKKVALVAAARKLLVLLVTLLQQGRDFDPDWATKHPRRPR

SEQ ID NO: 234185 - protein, 366 aa, unidentified
MLIIGCDYHPSVQQIAWVDTETGECDEKRLMHSDGEAERFYRELNRKGVQVRVGMEATGHSRWFERLLAELGFELWVGDPAEISARRVRKQRNDRRDAEHILKLLMEDRFPKIWTPSPENRDVRQLLLHRHRLVGMRTRVMNQLQAIAMNEGMRRKKGLWSKKGRARLESFSLAPWASRRRQELLELLDRLRPMIDELSKAIEQEAEQRTEVRLLMTHPGVGSITALAFVLIIGTPERFHCGRQIASYLGLIPCEDSSADHWRLGHLSKQGNALMRFLLVEAAQTVARCEPEWRQYYFHLVQRRGRAIAKVALARKLAVRLFWMWRKGQDYQQVKKFGSHTGQLETPNGVKSITVKLIEHPAPSMA

SEQ ID NO: 234186 - protein, 313 aa, unidentified
MAMPSSSTVIGVDVAKAELVIYRQDLDQLKTHANDKAGCAQLLKTLPPRCLIAIEATSTYHLLLIEMAYRQGHRVYVIDGYRLTHYRKGIGGRAKTDACDARLLARYLASEIDSLRPWNPPSKAYTSLQRLLRRRALLVKTRTALKQSVGEDPQFKSLFKPLIERIKRIELLIEKRLHDTLKAAGLLEQAQRCRGVEGIGGLTAAALTMAFERGAFQSADAFIAFLGLDVRAKDSGTFTGRRKLTKQGDPEIRRLLHNAALAAARKGHWKQLYEQYQARGLRKTQALVILARKLARIAFALMKKREDYIPRTA

SEQ ID NO: 234187 - protein, 396 aa, unidentified
MDAALLWSEEGEMPAKRKVVDPLEPERHRCARVEMSSNHSRDRGSAMNITTYALDLAKQVFQVHWVEPDTGEIRRKALLRAEVNAFFAQRPPGVVAMEACGSAHHWGRVLRGLGHEVRLVAAQFVRPFVKTNKTDAADAEAIWEASQRPGMRYVALKSEEQPAVLSLHRMRQQCIKVRTMQAHQVRGLLYEFGAVVPKGWRALLAQAVPLLADETRCAVPELVRRQLLTQLEGLRALTRRVTELERQIGSWQRGERECQRIAAVPGVGKLTATAVIATVGDARAYRSGREFAAWLGIVPRQSGTGGRIKLLGISKRGDPYLRTLLIHGARTVLNHQSRADRQLDPWLKGLISRRPKNVVIVALANKMARTIWALLAHGREFDRCWSRAWMPAPALS

SEQ ID NO: 234188 - protein, 354 aa, unidentified
MDIKYIGMDVHKETISIAVRRGDGKLVMESIIETKASTILQFIEGVRGDLHMTFEEGTWAAWLYDLLKPHVTELVVCDPRKNALMKEGNKSDEIDARTLADLLRGGYLRPVYHGENGLRTMKELARSYLTISKDLTRVMNRVKALYRSWGIGCAGQQVYAPRHRSEWLNKIGETGVRRRAEFFYQQLDALRVLHKTVRRDLLAESRKHGATKLLREIPSIGAIRAALLLALIQTPHRFRTQRQLWTYSGLAIDTRDSAQYRYVNGQLQRSKKPQQLRGLNQNHNHDMKAVFKSAATMASGGEGPFHDFYQGLLTKGMEPAMARLTLARKIAAITLTVWKKGAHFDAKQLKPQAA

SEQ ID NO: 234189 - protein, 362 aa, unidentified
MESMRWVGVDVHAKESVAAVLDQATGEISTHRIAGRPEDVLLWLTTVAQPFRAVYEAGPTGYGLVRRAEERGLDVVVCAPGHILKNATDHIKVDKRDAVRLARLLSAGELRLVRVPQPDEEQLRDLVRSREDVRVDLTRIRNRIGKFLLRRELYPPRHAESWGVLHRKWLQQLRFEDRASELVFQDAMQAHDILVARREQLEQALAEIAANSPWSRTVARLRCLRGIDTLSALGLVAEVGDFRRFVHPRFLSSYLGLVPSEHSSGEKRRQGGITKAGSKHARRLLVEAAWQYRHVPRTSHHISQRQQGQDPRVIDIAWRAQRRLYKRWQRLHEERRKRSTVVAVAVGRELATYCWEIATLTG

SEQ ID NO: 234190 - protein, 452 aa, unidentified
MPARKDELMHFNKLLQMLDGSSYLSVGLDVGADFTWMSIALPNGSFPWKPFKIIHHDPYSRELAVAKIKEAQELYSLKSRCFLESTGIYHIPLLCFLRDKGLDCSVINPIITKNSTNINIRKLHNDKFDSKKAALVGLNASLKTSIIPDEDIADLRNLVRDYYYFKDLQSSVVLKLNAELKVSFPAYLKVFSKVTTQSSLKLLGAYPLARDMLAAPGEELVGIIRSTARFGETYALSRYEAIPEAAKDSAIFGRALPSHAVRIRLYIESYQTYQKHLDTLLLALHEAVDRLHGTPVYDRICLLQSLRGVGFLSAVVLMAEMGDFDLFSSPKKLYAYFGLDPAVKQSGKLNGDKVHMSKRGSSLARRVLHMVALNNLKVDKGTKTPVNPVIYNYYTGKCANKKKNVAVGAVMHKICNIIFAMLRDNKPFEIIPPEVHCKQYVLNHTASVTNAA

SEQ ID NO: 234191 - protein, 348 aa, unidentified
MSKHSVQAGDIAGLLRRFAQLKEKARARTGRDFPIVVIQETGLDGFWIHRMLQSEGIESHVVDAASILTSRRGRRAKTDRIDGETLVRTLMAFKRGEPRVCSMARAPTPQEEDRRRVCRERRTLVGERVTHVNRIKGLLFAQGVFGYEPLRKGRRERLEDLRTGDGRPLPVHLKAQIIRELDRLEVLLEQLKTVEVERDALLKPATDEAASPAAMLARLKGIGPQIAAVLWSEGLFRQFDNRRQVAAYAGLAPTPWQSGSIDHEQGVSKAGNPRLRTTMVELAWLWLKNQPTSALSLWFHERVRLLGGRMRKTTIVALARKLLIALWRYTTAGVVIEGAVMKPAPVTI

SEQ ID NO: 234192 - protein, 416 aa, unidentified
MKLFVGLDVSSEKLDACFMTDDSTCSVLKEASYGNSQLGASQIKEYILEFSQKFEIESLVIGMEATSLYSFHPAMFFKEDLELNQLNLMVSVEQPNKIKKYRDIFEENKNDQIDAFYIADYFRIQRQVNSIIKEEEYLALQHLTRTRYQLIKQLVRTKQHFIENIYYKCNTLSKELKAEGGSVLSATLVTLMTEDYTMDQLAELSLEEFANLIQKLGKYRFKNPEGIAKAISKAIRSSYRLGKVHQDSVDIVLGVLAKEIRSLEKLIKDLDKAIDDLVVVLPEYQCLTSIPGIGPVYATGILAEIGPINRFSDESKLAKYAGLYWRQNQSGNSEYENTPMAKRGNRYLRYYLVEATNSVRRYEPEYHAYYKKKYAETPKHKHKRAIVLTARKFTRLVDTLLRNHQLYMPPRSVIDK

SEQ ID NO: 234193 - protein, 345 aa, unidentified
MIACKQVSQYVGLDVHKKTIYGYVMDIQGHLIFEKEFKTQPHELDMFLLNVKKDDSIVAIESCSCWQYAYDYLDDAGYNLKLAHPLGIKALKKIKKHTDKYDAKLLADLLRMNSLPESYAAPEDIRVKRQITRHRHSLTNIGNEIKNKIHAILLRHGYEVPYSDAFCKSAIAYLREINLPECDRFELHQYLDTIELLNKQKSRCSEVIENIASDDPQVRLAMTMPGIGHYAATTFVAEVGDIRRFDKADQVASFAGLVPKVHQSGEKTKLSHITKQGNTNLRHVMVQAANVAVQHDKTLRKTYNRLKHKGHNIAIVAIARRMVTLLYVMLKNNIKYHDLQIHKAT

SEQ ID NO: 234194 - protein, 327 aa, unidentified
MTASVASHNQIFIGIDVGGLSFEAAWHRGGSTQYQNRPDAIAAFVARLSVEKQIIRIAVEPTGGHEKALVKALRGAGLPVEMVHTSRFAAYRKLIGAKAKSDTSDARLLAAYAAAPEEVRGRKAGHVVLPQDDVREQLAELAARRDQLKHMIHAETCRLSTVRSPSIRDEITAHLQALRQADRKTHDAMMLLVRQRDELRNAKRLLQTIKGIGDKTALTSIAAVPELGLISNKAAAALVGVAPFVRQSGTMKAPARIHGGRALVRNAFYMAAVTASRHNPVLAPFYARLIAAGKPVKVALVAVMRRLVVYANAVLRSGQPWKGAEIG

SEQ ID NO: 234195 - protein, 388 aa, unidentified
MDAAREICIGFDVGKATHRACAVSRTTGEVIFNKSLENREGPIDEILRLVGPDTVVVVDQKRNIGALVIERAHAAGVDVAYLPGLSMKRARDLFPGIAKTDEIDAEVIARTAAGMPWCLRPISEDGESGTEIRLLASQRRFTTRSIVQAKNRLRAVLAEADPAFEAQLDLGLGWQVGVFKELGGPAGIASVSRRRYDGLAKRYGAPLRAASAFRDAALASAASERLHTRAEDMLVRMLAERIGEDERRAALVEERMGCLMESDKTYRALLTIPGIGPKTASALVAGVDIDLFANHGKLASFAGLAPCNKQSGTSLDSSSPSKGGNKELKNLLIFSCNSLVDTKNEFGRYYDACLARGMRHNKALKAVARKRLKVIFAVMRDIRPYSPS

SEQ ID NO: 234196 - protein, 482 aa, unidentified
MGWLPADAVPLWPVEGRRLVGRWEPPRGPFSVASSTRTRFATPFAAPAGNRLVGDVRRTVMLHDSEDTEEIIERVAALDFGKAELVACIRVPNPDRPGRRAQEIKTYSTMTRSLLGLADRLHVLGVTRVVMEATSDYWKPVFYILEARGLDPWLVNAKDVKHLPGRPKTDKLDAVWLAKVAERQMIRPSFVPPPEIRLLRDLTRYRVDLVAVRTAEKQRVEKLLEDAQIKLSVVASDIFGVSGREMMAALIAGERDPKALAGLARTTMRTKIPRLEEAFVGRFSDHHAFLLRTMLVRVDETSADIAAVETRIEELIIPFGQAVERLDEITGVGITAAHVMIAEIGLDMSRFPTAAHLCSWARFAPGVKESAGKNKGRGATGHGNRYLARVLGEAAVAASRTDTFPGERYRRIARRRGKKKAIVAVGRSILVIVWHLLSDPEARFHDLGPDFYDNRLGPDRKKRNHVRQLEALGYKVTLELAA

SEQ ID NO: 234197 - protein, 419 aa, unidentified
MRIIKTKKHEIVNGRTLLVAVDLGKSKHMGYYRCPDGTDIKPFEFSNNRLGHQKFYDRICQAKAAHHLQEVVVGFESTGVYGEPLIHFLNDKGIKLVQVNPMHTKRMKELEGNSPGKTDRKDPKVIADIMELGHFLTVVIPEGVSAELRRLTQARERSVERRTAFYNQLQDLVFIIFPEFLEVMKDIKTRSAQYLLRHYPTPQAILQLSVDELSLVLRRVSCGKLGRQRAEALYEATARSVGIKEGQRSIVLEIEEILLGIERCESFIAKLEREMHCLLEQIPYSRSILSVKGIKAVTAAGLIGEVGDFRKFRTISELLKLAGLDLYEISSGNQRGNCHITKRGRSLLRKLLFFASLNMIRKGGVMHEPYQRYIGRGMPTHKALVAISRKLLRILFALVRDHTEYVVNYSERENLKLAA

SEQ ID NO: 234198 - protein, 401 aa, unidentified
MFVGIDWASETHAVCVVDDAGAKLANFPITHTADGFQLLVGRLRRLGDPAELPVAIERPDGRLVDRLLEAGHPVVPVKPKAIRTWRQDEVPSGAKSDLGDAQVIAEYLRLRRHRLRRLEPFSAQTRALRAVVRTRDDLVTQRVAATNQLGAMLDAFWPGAKAIFAKLDSQITLALLERYPTPESAAQLDQRRLAAFCAKHRYSGRRSPAELLARLRAAPAGLVGTVEVGARHDALLALVGVLKALNTAIKRLDRSVVAHLGEHPDAKIFTSLPRSGQINAAQMLAEWGDCRPAYAGAEAVAALGGASPVTKQSGKHKAVHFRWACNKRFRLAITTFADNSRHASPWAAKVYRDAIARGHDHQHAVRILARAWIRVIWRCWVDRTPYDPNRHEGAARLAAAA

SEQ ID NO: 234199 - protein, 342 aa, unidentified
MKFYCGIDLHATNSFLCVIDDKDNISLKEKVKNDLGAILYALQSFSPRPSVVVEATINWYWLVDGLQEAGFDVKLAHTMALYMITGAKIKTDRRDAFSLAKLLRLDAIPEAYIYPKNKRPIRDLLRKRKKVVNLRANAYGALRRVLLQHGIYGYSQAAIKSLTEEQLDQHLEHCATQAGCHLEVQRIRFYSYQIKTLENRILSSVDDDRGFELLQTIPGIGKILALTILYESGDIERFQSAKQFCSYARVVPGIAQSGGISKRGRGSKQGNAHLKWAFCQAAALSVRYNTRIRKFRQRHLARRRSKAKKLVTLCIVAHKLATAAYNVLKDRVPFKQELMFGS

SEQ ID NO: 234200 - protein, 400 aa, unidentified
MLSIGIDVSKGKSTVCGMKPGGEIVYTPFEIQHTREGMSDLVSLLRSSGEEVRAVLESTGSYHCPVVTALLENGIFVSVVNSLRMKRFCSQSIRKVKTDRIDAMQIALYGLAYWQELQPAKLPEDTYRELQLLARQYYQMTSLLIKAKVDFNAICDQVLPGMQELMNDHAGRRKLSDFVLRYHHTTHILEMGETRFRKDYCKWAEKKGYRNCERMAALIFATAQNGIPVLPNAPSTQIVITEAIRVLHTVEASRDAILTQMQALAKTLPEYSLVREMPCIGDTLAPRLIAEIGDVRRFHSKRALIAYAGIDAPPYQSGKFCANNRHISKRGNRYLRKTGYEVMQSYVMHKPANDPIFTFIEKKRSEGKCGKLAMVAGLNKFLRVYYGKVTELYRSLPAIE

SEQ ID NO: 234201 - protein, 312 aa, unidentified
MYHIEEEVVYMGVDIAKAYLDAAIGNEKRRFGNDALGHRQLINWIKQMPASVQVICEPSGGYERALVRALVGAQLKISLVPANRVRQFARAAGILAKTDRIDAKLLCAFGQAMQPGTISASELEQENLRELESQRRHLTHLLVMEQNRAARMSDAFVCKLSRRLLTQIKKQIEQLDLLIQEQIKASPELCTKAQKLTAISGVGARTAALLLAQMPELGQLNRRQVAALVGVAPFNRDSGRMRGKRAIYGGRRPVRHGLYMATLVAARHNPILRGFYLRLRAGGKPAKVALTATMRKLLIVLNSALKPDPNYA

SEQ ID NO: 234202 - protein, 407 aa, unidentified
MGWSAASAARGLTTGKRDRLAPGCTPVALLGERRAAPPGTRLREEFCHCVLAKQRMVAKQQRRHPMKIHTIGIDLGKTSFHLVGLSERGEVIVRKHFSRAQLLRFTANRKVHVIGMESCGGSHFLGRALQEQGHEVRLMPAQYVKPYVKTNKNDYVDAEAIAEAVGRPTMRFVPIKNDDQLDLQSLHRVRERWVMRRTAVINQIRGLLLEGGITVRKGRRYIEAALPGILEDADAKLSGTLRLLLAQLKGELDQTALRLEEAEALIEQTVQKNEACQRLVKIPGIGPVTATAVIAAIGNGAAFRKGRDFAAWMGVVPREYSTGGKQKLLGISKRGNRYLRKLFVQCARAVLQQKTKQTPGLKAWLEKLTAHTHRNVAGVAVANKLARMAWAVVATGEAYRAPLPAAA

SEQ ID NO: 234203 - protein, 337 aa, unidentified
MSEITLIGVDTAKHVFHLVGVDGRHRVVWRKKLTRARFLAALAQREVTQIVMEACGASHHWARRLRELGHTVRLIAPQHVKAYRRGKKNDYRDAEAIVRAALTVETHFVGIKSVSQQAEQALHRVRSRLLSHRNAAANSLRGLLGEYGLAFGKGLGPLREGARCFAQTEQAQTLGLVGMIHDVLQEMDDLEVRIKAYEGRIGQRVRSDRVSQRLQDELAGVGVLSASALRTKVADTRDFGNGRNFSAYLGFAPNHSGTGGKVRIGRLSRSHDPYLRQLLIHGARAVVSRLGDKQDAQSRWLREIVARRGFNIACVALAHKNARQAWAILSRQQRMTA

SEQ ID NO: 234204 - protein, 415 aa, unidentified
MEGLSPLHRRVAGIDVHRMLHVVTVLIEQPDGSISKHCREFGGFKRDCRALATWLAELQVQLVVMESTGIYWKSVYAHLENAGITAWVVNAHFIKHVPGRKTDMLDSEWLAVLARFGLVRGSFIPPKDLRELRLVSRYRRKLNANCASQINRLHKMLDDAGIKLGAVVADIHGVSARAMVRGLIEGQPLAVLLSHARGALKRKTEELTASLDGELSERHLFVLRHLSDSIDAMQRQLADIDAYLLRAMQPYAWAHALLQTIPGIDQIAAALILIEIGDDMGRFGSPARLACWAALSPGNQESAGKRRSGRTRHGNNVIRYILCECANAARMTKSTLASKFKSLVVRKSHKKAIVALAHKMIRLIYILLSRRQPYLDQSIDYAAISAKKNAPRWIKQLRAIGKWPSHNPPAASAAH

SEQ ID NO: 234205 - protein, 355 aa, unidentified
MTIMMLGIDLGKNSCSVAGLDAAGKVVLLRRMQPKTIVSFAAKLPPCVIAMEACCGAHHLGRLLANLGHEVRLMSPEYVRPYVKANKNDERDAEAIAEAATRPTMRFVELKSQEQLDVQSLHRVRSRLVSSRTNLTNQLRAILLERGMTIAQGRRKLEHVVDMRLADPNFMANTRIRRLVAEMREEWSDLDRRIEALDREFIELARDNEAAHRLVSIPGIGVLSATALVAAVGDGTTFARARDLGAWLGLVPRQHTTGGKPRLLGISKRGNKYLRTLLIHGARAALPSLAQSQTRLGTWLRNLLARRHRNTVVVALANKLARIAWAALRYGVTFEVSSQQRLKEIGRRRYEGSAA

SEQ ID NO: 234206 - protein, 418 aa, unidentified
MKQIDEERIAVWVGLDWADEEHVYALRMAGSKRIETGSVKQKPEDLREWINSLRDRSGGGWVAVAVEQSRGALLYALMDYEFLFIYPVNPKSLAKYRQAFYPGGGKDDPRDADLILDYLLKHRDRMRLWQPESPEVRCLRMLSEERRKLVDLRTELTNQLTANLKNYFPQALQWVSPLKETTACEFLERWPSLQELQKPKPSVIRRFFRSHGARGLERLEARILEMRQAQALTRDWAILTAGGMLTQSLARQIGQLNESVALFDRKIEELFKNHGDHVIFSSLPGSGPALGPRLLALFGDDRERFDSSEQVQAMSGVAPLMSQSGKTRIVHYRHACPKFMRQSIHEFAAHSRKWCPWAEAFYQTQVSKGKKHNMAVRSLAFKWLRIIFRCWKDGTPYDDALYMASLKANNAPLLAYLR

SEQ ID NO: 234207 - protein, 427 aa, unidentified
MSEERSVELRVSVDVGYRRHSVAMGLSSGEVLEEFEIDHRPEGFQEFFSRIEKHQKAKSYTVAVAMEGYNGHARPLDSLVRQRGYRLYNLNNLKFARFKEIFPGAAKSDRIDARRGLELFQLSDHLPLAKEVLQEVRGTPKENEVLKRLTRRRRRLVNERVRVVNNLQADLQAVCPGLLEITSEASNQWFLNFLVSADSLSQLARLRKSSLLKIPAVGRKYAGLIQDWQKRAHFSEEAGWVSEMIQEDAKRCLELEEKIKTLETKIEQVAKDSKIAKILLSIPGFGPVCTSELAGEIGTVERFNKEGSLALYLGMSTLDNSSGNYQGTKAPKHVNTRAKAAMMIALDRHRKYVPESQRYYEKKRTQGKGHNQAIRALGRHLCRIIYKMLKEQREYQLRSKEGDTQARVRSRSCVKTKIRRSKISRTG

SEQ ID NO: 234208 - protein, 323 aa, unidentified
MTKDQYPFSQFVGVDVAKAKLDFAFADDKQTFTINNSQGQIVVDLIGRLENPKTTIVVMEATGGYENRLVTLLHQHNIALAVVNPRRVRDFAKGIGIDAKTDPIDARVIAFYAQVIKPESQLVKSKEEKKLRALVDRRRQLLDLINQENNRLQQTADREIQGYIRQALETLKKQVETIDQRLAECVKADTANARKVEILESVKGIGPVTVSTLLAELPELGKLNRGQIAKLVGVAPMNRDSGQVSGKRRTFGGRSYVRRILYMATLVATRFNSKIKAFYQRLVAQGKPKKVALTAAMRKLLTILNTLIKNDVLWNEEPNEAGV

SEQ ID NO: 234209 - protein, 316 aa, unidentified
MTETTKASVGIDVSKSQLDIAVHETGETWSTSNEPNSVAALVAQVKQLHPTSIVLEATGGYETLVTANLSAAGLPVIVVNPRQVRDFAKATGQLAKTDRIDARVLAHFAAAINPEPRPAKSDEGQHLEALLARRRQIVEMLVAEKNRLTNNRDRAVVKDLKTHIAWLERRLKSSDEELQRVLKASPTWRERDDLLQSVPGVGRVLSLTLMAQLPELGQLNRREIAKLVGVAPFNRDSGKWRGSRHIWGGRATVRSPLFMATLCATRINPTIKCFYQRLLKAGKAPKVAITACMRKLLTILNVMIKTQTSWRIASSS

SEQ ID NO: 234210 - protein, 415 aa, unidentified
MPPLVRWVGRAIGLDVHREFCVVAICEDGKVRSGGRVPSTPDGLKLLAESLLPTDRVALEVTASCWEVTRVLEPFVDRVTVVSPDDTGIASARAKTDKLDARTLALLLWKGEIDAVWMPDERTRILRRRLARREQLVHARSRAKNEISAVLQRRLVKRPPFADLFGVTGRRWLAEVELPVEERESVDAGLRQIGFLDGEVKAVEKLVAQQALGWPEIRRLMTVPGVNLICAATFIAAIGRADRFLTNRKLVAYLGLDPKVRQSGEAPARSGRISKRGSASARWALVEAAWSVVKQPGPLRAFYERVRARRGHGKAIVATARKLSILFWCMLTRGEDYAHQRPALTKKKLRELELTAGAKPRTKAAAGIWSTNRAIRDAERALTEQAEISYKRMVTDQQAGGPSRKVGASATPERA

SEQ ID NO: 234211 - protein, 338 aa, unidentified
MKLYGAIDLHSTNNVMVVINEHDQVVYQKRLPNDLSLIAQQLSSYRRSLEGIVVESTYNWYWLVDGLMEKGYRLHFANTAAIQQYNGLKYTDDHSDARWLAHLLRLGVLPEGYIYPKQERAVRDLLRKRGQLVHQRTANLLSIQSLISRTTGNSINAQYIRALNIQRVDGVLSNPNHVLALKANLAVMNSADGQIEILEKAVQDRVKLRPQFRFLKTVPGIGPILALTIMLETGQIERFASVGNYASYCRCVGSKKISNGKRKGSGNTKNGNKYLAWAFVEAANFAIRFNSKIKGFYQKKKSKRNAIVAIKAVAHKLCRACYYIIKDQGAFDITKAFA

SEQ ID NO: 234212 - protein, 386 aa, unidentified
MQRNDLSKSLVAFDQDSTLVAVIELSASSWLVAAQVPGLDRAPLKKQGADAAALLRLLYRWRDEASKAGKSIGRMVVAFEAGRDGFWLARWLRDQEIEVYVIHPNSIPVSREHRRAKSDRLDTQLLMRSLLGWLRGEAKHCSMAAIPSIAEEDARRANREHEMLVGERTSIANRMKATLVRFGITGFKVTLKKAPALLAELRGPEGVPLPPNTQAELRRDMARLQLVREQLKEIERTRLERLAKAPREGTHPMMLMVAMLKGIGIETADVLVHEILSRNLRDRRALARYAGVTGSPDESGSKRREKGLARSGNARVRRSMIQLAWRWLMFQKESALAQWFEARTTGLKSSGRKTMIVALARKLLIALWRYVTSGEVPEGAILRPAA

SEQ ID NO: 234213 - protein, 346 aa, unidentified
MMIIGCDYHPSWQQICWLDTITGETGEKKLEHASGEAERFYRQLPAPALIGMESTGNCQWFVELAATLGHDLWIGDAAKIRASDVRAQKHDRRDAELILKLLREGRFPRIWTPSGEEKDLRQLLIHRYKLVRIRAQVKTELQHLAMNQGITKKRRLWSKAGEKVLRELPLAPWASQRRKDLFRVREMLDGQIDLLDQAVVEIAEKNEKARLLMTQPGVGPITSLAFVLTMGDVSRFQRGKQVASYLGLIPREYSSGGHQRFGSISKQGNRFMRMLLVEAAQGAVRCDPGFRNEYVHRCHRKPKGVAKVAAARKLAIRLYWMLRTNTGYPEVVGVESSSRVPLVSAS

SEQ ID NO: 234214 - protein, 356 aa, unidentified
MDKVIREGAVRVGVDLAKRVIQVHAVDAGGRVVSARALTRDKFIEWCVMLPAGCIVAMEASSSAHHWARKLVGLGLDARIISAQLVSPYRSQGATGKNDANDAAAICEAASRPTMRFVPVKSIEQQSMLCVHRLREGIKEDRTACINRIRGLLAEFGLVFPQGASELQGVLSDVLEDAGNELGTLARLTLQRAQSQWRELDEHLAWCDERIAAHAKGSDAVKAAASLLGIGPVTASAVVATVGDFKQFKSGAQFGAWIGLTPRQHSSGGKNNLGGITKRGDTYLRTLLIQGAKSAVMTAHRRQDRISKWAVALRERSGWQKAVVALANKNARILWAVMTRGEAFDADHLSVKPASA

SEQ ID NO: 234215 - protein, 415 aa, unidentified
MTEQRWYAGVDWASESHHVFLTDGEGRKIGEKIFKHSGEGLAEMAAWLMAASGAHGPDRIYVAIEVPHGPVVETLIERGFKVHALNPKQMDRFRDRFTMAGAKDDSRDAETMASALRTDPRCFRLLAAADPTVIELREWSRMADDLSAERNRLTNRMREQLWRYFPAMLDLESDLGAAWLLDLWELAPTPSKAARIREATVAKLLKRNRIRRFDAARVLGVLRKPPLKLAAGTAEAASAHIASLIERIRLVDRQLKNAHRQLDVLTARLIPSAEVEPGQTKQHDVEILASLPGVGRIVLATLLAEAWDALQRRDYAALRSLTGVAPVTKRSGKSCIVIRRQACHDRLANAMYHWARVAVQHDARSRAKYAALRGRGHSHGRALRSVADRLLNVACAMLKTGTTFTPLLAAQKDAC

SEQ ID NO: 234216 - protein, 334 aa, unidentified
MENIALIGIDLGKNSFHIHCQDRRGKAVYRKKFTRPKLIEFLATCPATTIAMEACGGSHFMARKLEELGHSPKLISPQFVRPFVKSNKNDFVDAEAICEAASRPSMRFVQPRTESQQAMRALHRVRESLVQDKVKTTNQMHAFLLEFGISVPRGAAVISRLSTILEDNSLPLYLSQLLLKLQQHYHYLVEQIKDLESQLKRKLDEDEVGQRLLSIPCVGTLTASTISTEIGDGKQYASSRDFAAATGLVPRQYSTGGRTTLLRISKRGNKKIRTLLVQCARVFIQTLEHQSGTLADWVRDLLCRKSNFVVTCALANKLARIAWALTARQQTYVA

SEQ ID NO: 234217 - protein, 343 aa, unidentified
MNTYVGLDVAQRKTAVCVVDDDGKTVCHGTVDTRPEMIRAFLEAKGCSHAKVGMETGPLAVWLYHSLRKLNLDIDCIHARHVHSALTVQLNKTDRNDARGIANLVRSGWYRPTFVKSLECHNERLLISARDRLVRVRVSINNQIRGLLKTFGVVLSPGRNDVFRREVLAADPSVEAVKSVILMLLDTWRHVSLQIRACSRMLEKRAAQDPVCRMLMSIPGVGALTALSYKTAIGDPARFRRVTDVGAYLGLTPRKYQSGDVDRNGAISKQGNRQTRSLLYEAASCLLSRYGTETSLARWAGMIRQKKGYKKAVVALARKLSTVMLSMWRTGQLYKDPAPPVGR

SEQ ID NO: 234218 - protein, 391 aa, unidentified
MIYVGIDVAKDKHDCFITNSDGEVLFKAFTITNNLDGFNDLYQKIETVMKDITKVKVGLEATGHYSYNLLGYLIDKGLPTYVINPLHTNLYRKSLSLRQTKTDKVDARTIASMLMSDVNLKSYSDISYHNEELKSLTRYRFDKVKERAKLKSSVSRLICILFPELEKLVPTLHMASVYALLYEFPGAKQVANAHLTRLTNLLSEASKGRYSKDTAITFRDAARTSIGSNMPAKSLELKHTIKLIKELDSEIDEIENEIKIIMDEINSPILSIPGINYRMGAMIIAEIGDFSRFDSPDKILAYAGFSPSTYQSGHLYGAYAHMEKRGSRYLRYALYNAAKYVCHWDPTFTAYLAKKRAEGKHYNVAISHAVKKLIRVIYHLEKTNQQYIKAS

SEQ ID NO: 234219 - protein, 332 aa, unidentified
MLIAGVDISKDDFHVCIKEKSDDGAVKIKGSRSFPNNPKGFSELSGWVSKREHANLGTWYVMEATGTYYENLAYFLYEKGCRVSVVLPNKIKHFAKSMNLKTKTDKIDAAVIAGIGIERSLAEWKPMSKDFKELRDLSREMLALKQERSRAKCQRHAMVHSHEKTASVLKLKESQIEFYDNAILEIESEIKRIIDADPVLKGRIDNIATVKGLGVLTIVAVLCETNGFGQFNSIRQVLSYAGLDVQFKESGNFKGKTRISKKGNARIRQCLFMPALTATMHNEKIKNLYLRICERNPDIKKKGVVAGMRKLLVLIFVLWKKNEEYNPLYQWN

SEQ ID NO: 234220 - protein, 402 aa, unidentified
MNAVGIDVSKGKSMVAIMRPFGEIVSTPFEIKHTTSDIHSLVELINSVEGESRIVMEHTGRYYEVLAHQLSEANLFVSTINPKLIKDFDNDSLRKVKSDKADAVKIARYALDKWQNLKQYSVMDELRNQLKTMNRQFGFYMKHKTAMKNNLIGILDQTYPGVNTYFDSPARSDGSQKWVDFASTYWHVDCVRKMSLNAFIDHYQNWCKRKKYNFSQSKAEEIYGKAKELVPVLPKDAITKLIIKQAVDQLNSASTTVESLRTLMNETASKLPEYPVVMAMKGVGTSLGPQLMAEIGDVSRFTHKGAITAFAGVDPGVNESGTYEQKSVPTSKRGSADLRKTLFQVMDVLIKMMPQDDPVYQFLDKKRSQGKPYYVYMTAGANKFLRIYYGRVKEYLASLPES

SEQ ID NO: 234221 - protein, 343 aa, unidentified
MDYFAGLDVSVKDTSVCIVDDTGRITREVKVASEPDALLTVLRNPAYRFKRIGLEAGPLSQWLFSALAEADLPVICVETRHMRAVLKAQINKTDRNDARGIAQMMRVGLYRPVHVKTLRSQKLRMLLTHRKLLQEKAIAVENDLRATLRNFGLKVGVVGTVKFEARIKELVENFPDLAALVEPLLIVRRVLREQISILHRRVLATVRNDEVCRRLMTVPGVGPVVALTYRVTVDVPARFRKSKSVGAVFGLTPARDQSGESDRPGAISRCGDEMMRTTLYEAAQAMLFCSAKWSWLKAWAMKIARHRGMKKAIVALARRLAVIMHRIWVDGTEFRWTREAAAA

SEQ ID NO: 234222 - protein, 357 aa, unidentified
MNIIGCDYHPRFQMIAHLEKATGELTVRRLEHENGEAKRFYASLPKGALVGIEATGSTQWFERLMAECGHELWVGDPAEIRARRVRKQKTDERDALHLLELLWTNRFPRVWVPSPEERDGRQLLQHRSKLVGMRTAVKNQLHGLAMGQGLCRKQKLWSERGRKQLEGLELGPWASRRREELLRLLDELDPQIEALDEAVEAEAARRPEVVRLMQLKGVGPVTGLAFVLTLGPVERFRRSRQVVSYLGLDPQEDTTGGHQRFGHITKQGNTMMRWLLVEAGQAAARLDPELRRVYKHLKARRGANVAKVAIARRLAVRMYWILRPDPDKAPPVRMSGSPTQSMVDRRPDSVGTSPSTL

SEQ ID NO: 234223 - protein, 384 aa, unidentified
MSKDSIIFIGLDTHKSFIQVAVLQEHRGANPQQLGRIKSNKSALIKLAKQLQSKYPKATLHFVYEAGPCGYWTYRLITSLGHCCYVVAPSLIPKKPGDRVKTDKRDAVKLAKLLKAEELTPIYVPEAEDEAIRDLSRARETAMKDLKDAKFQLKGFLLRNNIQATVNDNWSKKHLRWLTDLILPHHSQQIVLQEMIITINERIQRLQRLDNELLHQVKNWRYYPVVKAIQAMRGVRLLVALGTIAELGDLRRFDHPRKLMAYLGLVPTENSSGGKTRRGSLTKCGNSRARRLLVEGAHTYKHKANISVELQLRQEGLPKEIVDIAWQAQQRLCRRYQRLLQKGKHRNVVVVAIAREMIAYIWAIAREVVISDVDPKTRIARLPA

SEQ ID NO: 234224 - protein, 451 aa, unidentified
MTKKKMELDIINPNCSGIDVGSKSHFVAVGQALEDVKEFGVYADDLTAICLHLKEYGITSVAMESTGNYWQNLYVELEKHGMEVTLCNGKFTKHAKGKKTDVKDCRWIQKLHALGLLTGSFLPDETTEQLRTYCRQRTNWIDLAAEASHKMQKYLRLLNFRLDVVVKDICGLTGLAIIADICKGNLDPEKLSLHRHGNCRKSQEEIAKALKGNNRTDFLFGLKQEYESYLFFQKKIEACDVQINSFLKTQINTHPDKKKLQTDNKNHKRVNKNSIKGIDLNQASYQYFNGVDLMKIEGLSHSTILTIMSEVGPEGFIKFESSKQFTSWLRLAPNNKISGGKILSNKIPKGSNRLKIALRHAANAIGNLKDTHLSDFFRRVAYRKGRATAVSATARKLAVILWNMITKGIAYSPPIEYLFLDQKRKLRLVQNIKRNIAKFEIKPEDVGFASV

SEQ ID NO: 234225 - protein, 400 aa, unidentified
MIDTGDIDVYLGLDVGKGEHHATALTPAGKKTFDRRRPNSEPKLREVFAKLQAKHGTVLVIVDQVASIGALPLTVARDLGCHVAYLPGLTMRRIADLYPGEAKTDAKDAFIIADAARSMPHTLRSVDLDDETIAELQMLVGFDDDLAAEATRLSNRLRGLFTQIHPHLERVLGPRMQHPAVLRLLDQFGSPAQIRKAGRRRLITLIRPKAPRMAERLIDDVFTALDEQTVVVPGTDAAALIVPSLASSLQAVLDQRKLLAHRIEELLEAHPLSKVLMSMPGIGIRTGARILIDVGDGTAFPSAAHLAAYAGLAPATRTSGSSIRGEQPSRRGNKQLKRAFFLSAFAALADPASRSYYDKKITQGKHHTQAILCLARRRADVLFAMLRDGAFYQPPTPITP

SEQ ID NO: 234226 - protein, 356 aa, unidentified
MSRYGMELAEGTEIFAGIDLHERTWTVTVRTREVELFTKGIPGKWLMLRGILERYKGSKIRAVYEAGCFGYWLYDELRANGVSCIVTPPSLVPQEHGNKVKTDRRDSRKLACLLAKGLLKGIWVPMEEDRYHRTVIRRRHQIIQERVRIQHRITSELRVYGIKLPEEVSKWSTAYVSNLKSIRFRDHFMQESFNRLLREYDFFCEELEAQTRLVKELSETGKYRKHVDILCSIPGVGVITAMEFLLEIQDVSRFERADQLAAYVGLTPCQYSSGDKVRMGRITKIGKNHLRALLIEASWQIIKKDSQKRARYENIKMRAGGKRAIVGIARRLILTMRRMLLNTRTYREMKDAKKAA

SEQ ID NO: 234227 - protein, 413 aa, unidentified
MADETFRWFAGVDWGSAKHQVCLLDRAGKVVGERAFAHGGAGLAALCDWLVSAAGDPGSVAVAIEVPHGPVVDALLDRGFAVYAINPKQLDRLRDRISVAGAKDDRRDARVAAAGLRTDRPLFRRVLAGDPSVIELREWSRLAEELQQERVRLSNRIRQQLWRSYPQLLELSDDMTAEWVLALWTLAPTPAQAARLREATLARLLRQHRIRKLDAPAVLDILRQPAITVAPGVTEAAVLHLRSLVARLRLANQEFHQAARKLEELCTALSETDSAAQDSGPGDAAILRSLPGVGPVTLATLLTEAAGPLARRDDAALRTLSGVAPVTKRSGKTCVVVMRYAAQVRLRQAVFHWARIAVQIDRTCRGRYEALRARGHSYGRALRSVGDRLLGVACVLLQRQTLFDPDHGAPAGP

SEQ ID NO: 234228 - protein, 353 aa, unidentified
MSHTLNAAGVIGIDIGKNSFHIVGLDQHGAIVLRQKWSRSQVAARFSNMPPCLIGMEACVGAHHLSRKLQEFGHDARLMPAKYVRPYSKGQKNDFRDAEAIAEAVQRPTMKFVATKTAEQLDLQALHRVRERLVSQRTGIINQIRAFLLERGVAVRQGLRFLRAELPRLLATPPDVLSPRMVRIIEDLTGDWRRLDERVEGLSSEIQAIARQDSGCERLMSVPGIGPIISSAMVAAIGAGDAFSKGRDFAAWLGLVPRQMSTGDRTVLGKISKRGNRYLRVLFVQAAWVVLIKPKSWERHGLKPWIEAAKKRLHRNVLAIALANKLARIAWSVLARGRSFEACKIDEVTAQPA

SEQ ID NO: 234229 - protein, 408 aa, unidentified
MEVIHERCAGLDVHKETVVGCLRVRERGQVRREVRRWATTTAELLELGDWLRQAGCTHVAMEATGVYWKPVWHVLEGEFELILANPAHIRNVPGRKSDVNDATWIADLLAHGLIRASLVPPGPIQELRDLTRTRKQLMREIVQHKQRIQKVLEDANVKLASVVSDVFGESGRRMLKAISAGQTDARQLAALGDGRLSASRETLAAALQGKVTTHHRFLLSQHLRMIEHLEQTVTAFEGQIEAAVQPFRAAREHLVTIPGVSATAAHVIIAEIGVDMSRFATVGHLRSWAGLCPELHESAGKVMSRRLRHGAPWLKTVLVQCAWAATRNKNNYLQAQFVRLRARRGSKKAIIAVAASILTTAYFLLRNQVPYRDPGALYFARIDQERTAQRLARRIKELGYEVQIRKAA

SEQ ID NO: 234230 - protein, 359 aa, unidentified
MDAQEGAVRRIIGGVDTHKDLHVAAVVDEQDRVLGTQSFASTRQGYRQMLAWMRSFGEVQRVGVESTGSYGAGLLRFLQQAGVTVLEVTTPDRQDRRRRGKNDDFDAQNAAHAAFAGIRTVTPKSRDGMIEALRVLSACRKTAVTARRIALQMIQNTIVCAPESLREMLRRMTRMQLVRTLAAWRPDLTAYRDVEAAYRISLKSLARRYLELHDEIADLDAMIAAIVDELAPNLVARNSIGYVGAAQLLLTAGDNPQRLRSEAGFAALCGVSPVPASSGKTARHRLNRGGDRAANSALHIIAIGRLRTDARTQAYVAKRIGEGHSKLEAIRCLKRYIAREVFTLIKQRQREINQTQIAA

SEQ ID NO: 234231 - protein, 397 aa, unidentified
MNKIVHYIGLDVHKDSIAVAIAPQNSTEVRRYGIIGGTLDAMDKLLKRLSQPNIELRLVYEAGPCGFVLCRHLRSKGIHCDLVCPSLIPKKASDRVKTDRRDADQLARLYRAGELSPIHVPDQEDEAIRDLIRARTAAVGDQRQARNRLKGFLLRLGFRYTGKTSWNDAHKRYLSGLLMPRPAQQIVFQECIHAIDDASERVARLTQAAEDALAGWKWEPVVRALMSLRGLQALSAMTVIAEAGDLSRFGNPRSLMHFFGLTPSEHTSGDKRVLGGITKCGNAHCRRVLTESAWHYRLKPLVSEAMQKRQEHQNKEVRLIAWKAQQRLHKRFKQLAVRKKSVVAVTAVARELVGFVWAIACQVKPAQQPPAPEVIRTCRGKVYRLDPEKKMPKARNS

SEQ ID NO: 234232 - protein, 323 aa, unidentified
MPSVIGIDIAKHTFDLATRQPNGNYRTKANLPNKKADFTVLRDWLNEHSEPGAWVVMEATGTYHEALAEWLLGQGYRVCVLNPAQIAHYARSQLQRVKTDKVDAKLIAEYGERHQDELRLWQPEPPAVKRLKALVRRLDDLREIEQMEHNRLEVADANVKASIESVLEHIGQEIKETLKAINKHIDNDPDLRCKRDLLTSIDGVADKTAALLLAELGDPQRFANSRAITAFAGLNPRLQESGSYRGQTRISKMGSSRLRAGLYMPAISALTYNEAIRAMGERLRERGKTGKQIVCAAMRKLLNIAYGVLKSGQPFDAKLALAH

SEQ ID NO: 234233 - protein, 370 aa, unidentified
MNDIIFVGLDVHKATVAAAVAEGIRGGEIRQLGNMPNRVDQIAKLAERLGKNGQRLSFCYEAGPCGYGLHRQLTALGHECIVVAPSLIPMKAGDRVKTDRRDAAMLAKLHRAGELTAVWVPDTAHEAMRDLVRARATAVRVLGKARQHLQGFLLRHARVYAGKRGWTLAYRRWLTTVRFDHPAQQVVLQDYIHAVTDAEARVERLTKQIEDLAPHWSMVPVVEAVQAMRGVAFIVAVTVVAEVGDFSRFNNPRQLMAYLGLVPSEHSSGATVRRGGITKAGNALARRALIEGAWTYRMQARVSRKLHDRIENLPQSIRDIAWKAQVRLCARYRRLTASGKPKVVVTTAIAREMVGFLWAIARQVEVKSAA

SEQ ID NO: 234234 - protein, 368 aa, unidentified
MSVYAGIDVHRKRSQVAVIDQDGEVLASRNVPSGVKPILGVIGGLPAGTPAAFGAAFGWGWLVELLEGYGFAPHLVHPLQCKAIASARLKNDKVDAAILAQLLRADLLPEAWIAPPTVRQLRALLRHRIQLVRLRTLLRNRIHAILADHGHDRPGGCWSGPGRAWLAALELPAASREVTGDGRALIDARQEPIDRLDGEIRQHARRDPRVKILTQLPGVGPFTALVILAETGDISRFASARKLAAWAGLTPTVRGSDRTVRHGHISQQGPVWARWILCEAAQTAKRHPGFAASYQAIARRRGKKIATTAIARKLLTRAYHLLTSAEVRAQATATAPAPAPPARLQNGGRQAPGELAKPHEPATPRSMT

SEQ ID NO: 234235 - protein, 412 aa, unidentified
MDVIHPRCAGLDVSKKDAKVCVRINGAGRRKTSETVTTFGATTRQIMSLRDHLAAQQVTCVVMEATGDYWKPFYYLLEDLPGVEVMLVNARHVKNLPGRKTDVADATWLAQLGAHGLVRGSFVPPEPIRQLRDLTRTRTAITRERTREIQRLEKLLEDAGIKLSSVAADLNGASSRAMLEALLTGETDPAAMADLAKKRMRVKIPQLTEALYGRFTSHHAFLTRMHLDLIDQHTAAIEQLTDRIEVVMEPFRSFRDLICTIPGIGGYTADVVVAETGADMTRFPTAQHLASWAGTTPGNNESAGKVKSRRTRPGNPYLQGALGTAAMSISHTRDTYLAAKYRRIATRRGPLRANVAVQRALLVAIWNIAVTNTTYHDPGGDYFTRLNPQKARNNAVRQLEAMGYHVTLDQAS

SEQ ID NO: 234236 - protein, 348 aa, unidentified
MALTIVETRAITGGVDTHADVHVAAALDPVGGLLGVREFPVTPAGYAGLLGWLGGFGTVCLVGIDGTGSYGAGLARHITAAGVRVVEAGRSDRQDRRRQGKSDPLDAVSAARAAQSGRARGAPKGRDGSVEAIRALMVAKRSARAERTQTTSQARSLIVTGPDDVRARFARHTVAALVAETAALRPRPGSTVGYATRIALRELGRRAEFPGGQLERPGELIVPLVTARAPGLLALYGVGPDTAALLLIAAGDHPGRLRSEAARAHLCAAAPIPASSGKRTRHRLNPGGDRQANHALWRIVITRMSSHPPTRAYVERRTGEGKSKTEIIRCLKRYAAREIYPQLRAAAD

SEQ ID NO: 234237 - protein, 355 aa, unidentified
MNDAKYIGMDVHQATISAAVRDSSGNLVLEATLETKAETILEFVHGLRGSLRVSFEEGTCAAWLHDLLQPHVSEVLVCDPRKNALLRVGNKNDREDARKLAELLFLHKLHPVYHGEAGIRTLKELARSYLTITRDLTRVMNRLKAIYRGWGIACAGQQVYAPRYRAEWLAKIREAGVHRRAEIYYQQFDGLAALRQEARRELLAEARKHPALRLLRQIPAIGPIRAALLIALMQTPHRFRTKRQLWAYCGLALRTYDSGEYRFVGGQLKRSKKAVTIRGLNKNHNHDLKNIFKGAARRAAATVGPFQKFYEARLASGMKPPMARLTLARKIAAITLLVWKKGVCFDAKQLKQQAA

SEQ ID NO: 234238 - protein, 349 aa, unidentified
MKILAIDLGKYKSVACNYVTATGKARFTTIVTHVLELDRLLRQESPDLVVIETCSIAGWVHDLCCQRGVKCQVANPNGEAWKWKNVKRKTDRDDALNLAQLAALEQLPTVFVPAPETRQRRALLKYRQSLITRRVAIQNHLRAIVQREGILLDRGRRAWTVAGLEAIQQLAKPLEECSAEELWRGEAALELQAFEAVTKLLREVERKLETFAASNENVKLLRTIPGVGRCTAEVVVAYLDNPHRFENGRQVSAYAGLVPKQFQSGETDRQGRISRRGPSLLRKMLVEAGWVLLRYNSWAQRLMQRLSRGQKTRRKQAIVALARKLLVRCWAMLRDGTAWHEPPPHTATA

SEQ ID NO: 234239 - protein, 335 aa, unidentified
MKEITTVGVDLAKSVFTVHGVDATGHTVLRKTIRRERLMELVAGLPPCLIGMEACGGAHEWARKFQGHGHRIGIMMARYVAPYRKSSKNDGNDAEAICEAVARPNMRFVPVKSAEQQAILSLHRVRQGFIEQRTATINRIRGLLAEFGVVLPQRAEQVRRAAVVVAEELPVLARDAIADLRAHLAYLDERISRYERQLVELARQREAAVRIQRLPGVGLLTASAITASISDGHEFANGRQFAAWLGLVPRQYSTGGKARLGRITKRGDAYLRTLLMLGARAVLQSAAQKSDRLSRWAMALRARRGYHRAIIAVAAKNARIIWALLANNREFTLPA

SEQ ID NO: 234240 - protein, 332 aa, unidentified
MNNFYFIGVDVSKKKLDFCVMFENKVIHEEVVANHQGAVIALIRQLESDYGIDNAQMLICAEHTGQYTYPLVCACESVECKLWLEHPSNIKYSSGVQRGKNDKIDARRIAIYAARFEDKVRYYERPEKEIERLKQLEAERSLYVVDLAKYKAQLKDQKEYMAERTYNDKARRLKKLMKGLEEAIKSITDEMESILSSTEVLDRQYKLLQSIDGVGPVVALNMIIVTEGFTRFDNARQFNCFAGLAPFQYTSGSSQHSRARVSHRADKCIKALLHLSAVSVISKAGGELKEYYLRKVEEGKNKMTVINALRAKIVARMFAVIKRNEFYKPIFS

SEQ ID NO: 234241 - protein, 324 aa, unidentified
MRHCSRLIRPCIIPPVQRKSASFLCLQSQKFANTTKGHDELVSWLKGHKIDHAHICIEATGTYMEPVAECLYDAGYIVSVINPALGKAFAQSEGLRNKTDTVDARMLAEFCRQKRPAAWEAPHPLERALRALVVRHQALTDMHTQELNRTETAREVQRPSIDAHLLWLEAELKRLEKQIKDLTDDDPDMKHRRKLLESIPGIGEKTSAVLLAYIGLKDRFAHARQFAAFAGLTPRRYESGSSVRGASRMSKAGHVSLRRALYMPAMVATSKTEWGRAFRDRLAANGKKGKVILGAMMRKLAQVAYGVLKSGVPFDASRHNPVAA

SEQ ID NO: 234242 - protein, 350 aa, unidentified
MPGEELDAVIGVDTHRDTHTAALVDMVGRQLAVLVITADAAGYAHLLAWMAEHVPSGRVLWAIEGTRSHGAGLCRALAAAGAQITEVDRPTRRSRRAGKSDPIDALLAARAALAASNVRQPRADGDREAARLLLAERDRLVRHRTAVLNQMRDLVLTAPEELRERLRDRSIAGLIAACSSLRSRASDDIETRVRVQSLRRLARRVRALTDDAKTVETDLKALTATNVAHLLAEPGIGPIVAAQLWVSWSHPGRIRSEAAFAALAGTSPLPASSGQVTRFRLNRGGDRHLNRALHQVMITRLSCHSPTREYVLRRISDGKTPREAQRCIKRYLARRIWRLLEHGTPTRTAA

SEQ ID NO: 234243 - protein, 349 aa, unidentified
MHHVGIDLHKLESQICVIDETGEVLAEVRVPTRRDSLATALTPWVGGQVLVEACNESEWVARHLEQCGHTVVVADPNYTPMYGHRHRGYKTDRRDARALASASVQGLFRRAHRASEPRRVVRAELVTRDALVRTRTRYISVIRSRLRAEGWRVRSGDAATFVTRVAELALEPELAAQLQPLLRVMEIVNQEIATADRALERKAKAEPIVHRLQSVPQVGPITALAFVAALDDVHRFRNAHQVESYLGLVPREHSSGEHQMRGHITKTGDKRVRWLLVECGWGIVRSQKASVEALREWADKIRMRRGRRVAAVALARRLAGILYAMWRDEVPYDPMRLGHPRGLAEVARS

SEQ ID NO: 234244 - protein, 407 aa, unidentified
MRRVIGMDIHRTFAEVVLWKDGKLHPAGRVSMTRSGLEGFGRSLGKQDEVVIEATGNAMAVVRVLSPYVARVIVANPLQVKAIAHAHVKTDKIDAGVLASLRAADFLPEVWLPDPDTERLRRLVARRNQIVRHRTQIKNEVHAILHAHLIPPCPHADLFGRLGRIWLAQQVMPDDECAAIERHLRELDRLSEDLGVLDTQIAQAGSADPAVKRLLTITGVNLIVAAGLVAAIGDVRRFTSPQKLVSYVGLNPRVRQSGLGLAQHGRISKRGRSHARAMLVEAAWAAAKAPGPFRAFFLRIRARRGHQIAAVAVARKLAVLCWHLLTKSADYQWARPALVANKLRAMELQAGQPARKGNKRGTAYAYNVKALRDAEIELARHAEQAYEHFVSQWQRRGTAKQRTGAAK

SEQ ID NO: 234245 - protein, 348 aa, unidentified
MRCYNAQHRFYAGVDLHARSMFTHVLDHQGKTVFEKDLPAEPEFFLDAVKPFRDGLVVGAECMFAWYWLADLCEDHAIPFVLGHALYMRMIHGGKAKTDRIDAAKLASMLRGGLFPMAYVYPRAKRQTRDLLRRRSFFVRQRAQLITHIMNTNTQFNLPPLSKKLTYAANRSPQIAERFEHPSTRLSITADLGLIDAYDQQIADLERHLVQNAKVDDPVTFGLLRTVPGIGPILGLILLYEIDTITRFPEAGNFLSYSRLVRCAHVSAGKVKGSGGKKIGNAHLKWAFSEAACLMLRALPAAKAWMQRQERKRGKKKALSILEAKLGRTAYHLWRKQVPFDAKRFLAS

SEQ ID NO: 234246 - protein, 319 aa, unidentified
MESPQVSFKQVVSRGCGLDVHKKVVVATIDGEGIKKQTREFGTVTSSLKELRDWLLEYGVTHVVMESTGVFWKPVYNVLEPAGLTVWIVNAAHVKYVPGHKTDKQDSAWLCKLLLAGLLKPSYIPAKEQRELRDLTRYRTTLIQSNASNKNRIIRILEDANIKLSSVLSSTSGAVGTKLIDKLCEGKEITMQDIEDVYHKKLEASKEEIYEACQGFITEHHVYMLQIIRQEIAATLQTIENLNQRIKTVLSPYENALELLKKVPGISSKSVEDLVAEIGLDMSVFPTENHLSSWAGMAPGNNESAGKKKADEQLRETSK

SEQ ID NO: 234247 - protein, 369 aa, unidentified
MNTVKFIGMDVHKNSITIAIAEEGSRYSARVYGTINNDLDALNKFCRKMVSTANELYFVYEAGPCGYGIYRHLTGKGFNCIVAAPSMIPKKSGERIKNDTRDAKTLARLHRAGELTAVYVPNTQDEAMRDLSRAREDAVIAGRKAKQRLSAFLLRHGMIYSGKTKWSKAHFKWISDIGMPHPAQQIAFQEYIDAVHENLDRVKRLTEQIRQILPEWRLAPIVDALQAARGVSLIVAVTILSELGDLNRFEHPGQLMAYLGLVPSEHSSGDNIKRGGITKTGNGHARKVLIEAAWTYRMQPRVSRALLKRQENLPEPVRQIAWEAQLRLCARYRRLMAKGKPKQVVVTAIARELSAFLWAIAKQIEPSVA

SEQ ID NO: 234248 - protein, 475 aa, unidentified
MNIKGSKKKNQVLSVNIFEQQGIIAKADAIKAGLKASTWHELETRGKFDKNDKLSFVSDDMLILGCDIGSETHYVRAIDTRGRELSKSAFGFSNTAEGFESMLDWSAKLAAANDKKQIVLGLEPTGHYWFCLTTWLVAKGISVVQVNPYAVKQTKEVEDNSQLKDDIKDPKLIANLVKDGNFGMPYLPEKLYADIRRLSMFRDQLNEDRIRNLNRLHREMKIYFPEYMDAFGKIDGTFSLELLKAAPFPDELAALGTEGMKQIWHEAKLRGRGYANASSILEYARKSVGIKDGADASRQAVKWFVSRIIELDGQLSDIENKLNERCMEIPHAKNILAISGIGENILSGILAEMGDISRFDDVKEIQKLSGLGLVACSSGKHTGETKISHRGRKRLRYWLFQAAKSAVAHSEEFKELHVYYTTRKQNPLKKMQSLIVIACKILRVIFTILTKGTTYDPKKLLGDIVRPNQAVPQAA

SEQ ID NO: 234249 - protein, 371 aa, unidentified
MGAYYVGLDVHTRETVFVIQDPTGGVIGRGALSTTPEAFARMCHQYQLPAGTPVALETGTSAFYVARALSALDLKPIVIDAHEVRVKARRPGQKSDRRDAFELCDGLRRDVYRSIVHIPSPAISTLRTALSRRRHFVRIQTAEVNATKRLLRGAGWLGGNRGSLRNASGWERLIDALASEPALQTHTRFHYAVWQQAGAQVRAIDHLLGDLGRGFRDDVRRLETVPGVGPIVALTAVAVFADVERFGSAKHVASYAGLVPSTYQSADRDCHGHITKRGSAELRTMLCEAAHHARRPSHPLHPYFLKLCARRGYKSAVVAVAHRLCRVLYALLRDGTDFQPSRLGIEEGPFTQTVTRRFRLTPKSAGRLALV

SEQ ID NO: 234250 - protein, 343 aa, unidentified
MTNFVGLDVSQKITSICVVDDGGRRIWRGQCASRPDDIERIVRKQAGGDARIGIETGPMTPWLVHELRRFGLDPICLDARHARAALRMQLNKTEANDAEGLAHIMRAGWYRSVHVKSYVAHRARALLGARAQLVGMITRLSNHIRGVLKIFGLLPGGMRGLSFATRVETLLADRPDVIPIVSPMLAAWRQLRAQVTAFDKAVHAIVKSNPDCRLLMTVPGIGTLSVLAYVSAVEDPERFRRSRSVGAHLGLTPRQYQSGEVDRSGRISRCGDGLTRTLLYEAAVVILYRVKRSSPLKDWALAIAKRGGAGKARIALARKLSAILHSIWRSGVPFRWAEGSVPA

SEQ ID NO: 234251 - protein, 449 aa, unidentified
MHGAHIGGQRAGAFLDLVRGVDPERVLLVGIDVAKATWFVVASNLLGEVVVDGVRLVADRAGLAELERVLGAASARVNAAMVVVGIEAAGHQHQTLTAHLLDRDELVVRVLNPAQVAAVRKQQGNRRRKTDWLDAAAICELLARGEGALVHLDGSAAAALRPLWSGRKDLVDTRSRLRQQAGALVDCLWPGCSAKDTVAGVTPVLCDLFATKAGRVLLELLAQGWTPARVAANSVAALRGLFAVRGCRLTRPLATRLIGRAQAALPAHPAATAGKAATLAALLGTIDTLDREIACLEAAMAPLLARTQGAKLTQLRGVGVVAAAGFVAFVGSTDRWAEWSKVWRAAGLDPARSQSGPADARLGISREGSAWGRRAILDLAAAVCQQPGPWRDRLRTRTTQQHKPAKVALAATANAIGRTLFALMASGADFDPRFEAKRAAARKAGGQAA

SEQ ID NO: 234252 - protein, 345 aa, unidentified
MLYAGVDTHKKYSKVVVTDSTGHRVAEASLVNDLSSFQEFFGHSEEPVKAVVEAGRTWGVIYDILESIGVAPVVANPLKTRAIAEAKIKTDAIDARTLADLLRADLIPMVHVPSREVRAQKNLLRQRLWLVGLRTMVKNRIHHILDRNHVILSPCSDIFGASGRSQLDQAEIASPDNLLLKAHLELLDNIHDQIKDAEKWINQALSHHSGMAILRTISGLGKRLSALVALEVDDVHRFSHPGKLCAYAGLVPSTYASGGKVRHGHLLPTCNRWLRWAYVEAAWIAQRTSPYCHNYFERIKRRKGANSANSALARRLCEITWYCLKENRAYEERELAQLPSKVLGR

SEQ ID NO: 234253 - protein, 367 aa, unidentified
MKKHTPMSVGLTLNRKCERLTIGLDLGDRSSCYCVLDEAGDVLLEQKVSTTPKAMREVFGAMPGCRIALETGTHSPWVSRLLSELGHEAIVAHARSVRLIAESKRKDDRLDAFTLARLVRIDPQLLCPVRHRSSDAQADLIVIRARAALVRNRTTLVNAARGLTKSYGEKLGRANARSMKPKAAQDLSPELKNALGPLMREIQSVSERIRDYDELLDSMAQNKYPEAERLKQIKGVGTLIALTYMLTLEDPHRFRKSRDAACYVGLQPGRRNSGQSEPQMHISKEGDPYLRALLVQAAHHILGPWGVDSDLRRWGMKLAEHGGKRGKKRATIAVARKLAVLLHRLWVSGDLYVPLQRIGQAAVPAVA

SEQ ID NO: 234254 - protein, 411 aa, unidentified
MIKENYMYVGIDLHKETHTAVMIDCYNQKLGEITFPNRPADFPKLVAKVKKCNTAGKEVVYGLENAYGYGRALAVWLIDKGYLVKDVNTAISHRQAKHRGAMYRKSDSDDAKAIALATLNMLDKLPDACPNDAYWSLGQLVHRRDNIMKQRTRLVNQLHEQLCIAYPSYKQFFNDISRPTALYFWEHYPSRKYLKGKSVEDLRAELVPVSHNKCSTKTCEKILDAVASDKVKNNAYQDARDMVTLSIVSDLQHYDSQLTEVDKMLEQMYKMLGCTLTTIPGVNVITAVKILAEIGDIKRFGNANKLAQFAGIAPLHLSSSGKGKDVATKQGNRRLQATIYFLAIQMVQVSSKGTPRNPVVRAYYEKRKAEGKTSQQALICISRRLISIIYGMLKNGTEYRMPEVENAGENM

SEQ ID NO: 234255 - protein, 420 aa, unidentified
MKPWTEITHYAGFDWAKDHHGAVIVDAHGRIVADFEFNHSLDGWKSFGEKTSAFPNLAVAIETSQGAAVDQLLQRGFTVYPVHPVAAQSYRERKAPSGTKTDRLDAWGLADALRVDGHGWRVLQPTDPMTEQLRLLCRDEVTLIEQRTALVNQLQQALAEYYPAVLQAFDDWTKDFTWEFVIAFPTPQSLVKAGKRRWENFLHTHKLWRPQTSEKRLQIFARADQFKASAPIVAAKSQLAVSLCKLLRTLDLQLELYREQIEALFKQHPDHHLFGSLPGAKDFLAPRLLAAIGVNPDRYGGHEVLQCIAGTAPVSYQSGKLHKVRVRWACDKFLRHTVHLWANCFCKASAWGRAYYQQKRDEGMSHACALRCLGQRLLKILFRMLKDKKPYDAELHARNQQKHGSWVLKLVNAPLTKPCE

SEQ ID NO: 234256 - protein, 413 aa, unidentified
MLFVGDDWAEDHHDVEIVRDDGRRLVTKRLPEGLDGITRLHGLIAGCMPPEEWAELEPGEAAALVKVGIETDRGPWVASLVAAGYEVFAINPKSSAHYRELHTTSGAKSDRGDAHVLAEIVRLDRAHHRPVAADSAHGESLKLVARAHQSMVWERTRHVLRLRSALREFFPAALAAYGDLDEPDTLQLLTIAPDPDSAARLSTAKISAVLTQARRRNVAARAQRMQDVLRAPALRQPGPVQAAFAAIATSEVRMITAINTEIAALGQVVAEHFGRHRDAEVYLSQPGLGVILASRVLGEFGDDPDRYADAKARRNYAGTSPITKASGTKKVVLARYARNTRIADATQQWAFGSLRGSPGARAYYDELKARKIGHRAALRQLANRWVGILHGCLKTQTLYDEKTAWGHRNATAS

SEQ ID NO: 234257 - protein, 342 aa, unidentified
MTIVTIGLDLAKHVFQIHGIDERGQVELRRRLRRTEVELFFRNLSPCLVGMEACGSAHYWARQISALGHEVRLIAPTRVKAYVQRGKKNDANDAAAIAEAITRPHMTFVPIKSENQQGVLMLHRTRDLLVRQRTMLINGLRAHLAEFGIIAAQGWCKVRELIISLDSAVIPELARTALQLIAEQIEECGRRAEALEKLIVTWHRTNEPSRNLATIPGIGPITASAIAASVPDPTVFRNGRQLAAWLGLVPRQNSTGGKDRLGRITKAGDSYIRRLLVIGATSLIRYARDKAPGEGEWLKKLLERKSARLASVAMANKMARIAWSVLIRGEVYRKIDPRMAVA

SEQ ID NO: 234258 - protein, 323 aa, unidentified
MAKLSFGGIDVSKDRLDVMILPEERCSSVPNDAAGWADLVERLSGSLIAAIGIEASGGYERGVVRALLAAGMPVRQVNPFKLRQFARASGVLAKNDPLDARMIASFVTIMPTRPAQRQTPAAERLAEMLAIRRQLSAEKVAAENASRLLEDAMLQRLSRRRIVRLAADIDLLDKRMVEIVATDDALVHRYRLLTSMPGVGAVLLACTLIALLPELGRMSRKQVAALVGVAPYAFESGTLKGRRCIWGGRAHIRQVLYMAAMSASNWNPVLKAFHDRLTAAGKLPKVVIVAVMRKMITMLNAMVRDDVVWADRLSGRHVLPTAR

SEQ ID NO: 234259 - protein, 407 aa, unidentified
MDSLKTVFGIDVSSRKSNVCIMVNGQKVNDYAISNDMVGFNQLLDDLKQVTNPQIIFEATGVYSRRLQAFLDMHDLRYVMMNPLEAKRKTKDDLHQNKTDKLDAMYLAKMQSEHPQRLAYVQSEEYQELMANNRIYEQASHDLITNKNRLHKAIQLTFPEIEHLLANPRGKNYWSIVLKFPHPNIVLETKEADIIDFLKSLSGIGEKRANDLAQRLIRLAKLACPAVKKSSAHIRGLEMAINNILSAEETCQTALKEMAKLAPKRDLEILKSIPGIAENTALRIISELGDIRRFNNPNQLNAFVGVDPQVYESGNLTAHLSISKRGTAIGRKVLYLAINQIQSAKKAGNPCHIADYYEKRKRSSETASHKKAAIASIHKLLRTIFALITNDQLYSYDIAKHNQRLLS

SEQ ID NO: 234260 - protein, 348 aa, unidentified
MPNYNQPHQFYAGVDLHARSMFVHVLSAKGKTVFERDLPAEPDVFLDAIKPFRKNLVVGCECMFAWYWLADLCEDKRIPFVLGHALAMKHIHGGKAKSDKIDAGKLANMLRGGMFPLAYVYPRAKRQTRDLLRRRSFFVRQRAQLITHIVNTNSQFNLPPFAKKLSYAANRSAEIAERFPDPSTRLMIHADLHLIDAYDAQIAELERHLLQSAKLDDPVTFGFLRTIPGIGPILGLILLYEIDRISRFPEAGNFLSYSRLVRCAHESAGKVKGFGGKKIGNAHLKWAFSEAACLMLRTCLPVKAWLQRQEQKRGKRKALSVLEAKIGRTVYHLWNKQQAFDVKKFLHS

SEQ ID NO: 234261 - protein, 394 aa, unidentified
MFFVGIDVAKRKHEAVVIDDKGRIVQKSFSFPNSLSGYNSLISCVKRITSTRKDIVFGMESTSHYWLALYSHLIKDGYTAHVINPIQSDAFRGLFIRQTKTDPIDAVIIAEVIRFGKYSSTHFPQHKILALREMCRNRLYMVDAISDLKRKTIALIDQVFPEYDQLFSDTFLVSSIEVLYRYPTPKKLLHIRRDTLTNLLIKTSGGHFGSAKADEIIHAAKNTFGIDDPYDVYADLIQTFIKQIKFIQKNVAEIDQKIAAIMDEIASPITSIPGIGVTLGAVILSEIGDISRFKSADKLAAFAGIDPSLKQSGDYSSIRNHMSKRGSPYLRRALWMACIPATQVDPMFRAYYLKKRSEGKSHMKTMGHVAKKMICVIYAVLRDNKEYQPVLTAA

SEQ ID NO: 234262 - protein, 374 aa, unidentified
MADYSEVFVGIDTSKLHNAVAIAEGERNGEVRYLGAIENTAAAVSKLVKKLAAQHQRLTFCYEAGPTGYGLYRQIKALGHDCVVVAPSLIPKKPGDRVKTNRRDALNLAKLLRAGELTAVWVPDERHEAMRDLVRAREAAVDDLKSKRQQVLSLLLRLGRHFTGKRTWTRAHMNWLVSQKLVHREQRIAFEEMLLAVRQADQRVIRLEQAIAAAVPDWSLAKVVTALMAVRGLDLISATIFLAEIGDLSRFASPRQLMAYLGLVPGEQSTGDRVWRGGITKAGNHRARRILVECSWSYRHPPRVGKKKLAKVEAASPAVQEIAWKAQARLTARYRALARRGKRPTLVVTAIARELSGFIWAVSQAVGAPKTPAV

SEQ ID NO: 234263 - protein, 358 aa, unidentified
MNDITTFVGLDVHARSIKACAFVPATGELERRSFGYEPGELASWVASLAQPAKCVYESGVTGFHLCRELRAMGVDCVIGAVSKMRKPAADRCRKTDRRDARFLAVQLALGVVTEVHVPDPECEGARDLARALADARDDVVRAKQRLSKFLLRHGLVYDERTPSGRPKGRWTRDFWAWVGRIDLGDASAMATLDHYCERVRRADEEKAALEAKVKSLAQAPRWKPVCDALRCLKGIDAVTAASMACEADGFSRFAKASGFAAWVGLVPSEHSSGESQSRGGITKAGNRHLRKLLVEAAWHYKGASRAPKDLAKGQDVAPGARRHTNAGVRRLVDRRRAMDDAGKQSSVANVAVARELAC

SEQ ID NO: 234264 - protein, 361 aa, unidentified
MHDSITWVGMDVHKESIVVAVVNGAGGTAARWETPNTAKGKERLAKRLSEFGTIRCAYEAGPCGYDLRRFLEAKGIPCDVIAPSLIPKKPGDRVKTDKKDAEKIARMHRMGELTAICVPTPAQEALRDLLRAREDANEDLVRRRHRLQKFLLRQGRRHEGKNWTRDHWRWIRAQKFEDRNSETVLSEYTAAIDQEIERIGRLDAQIEQESKNPEIAPSIARLMTLRGVKTLTAMTILSELIDLSRFPSARKLMDFVGLVPGEYSSGQKQWRGSITKSGNSHVRRVLVEAAWHYRHSPRKTGEAIRKRREGQPPEVIETARKAELRLYKKFTRMVMRGKKTTVAATAVARELAGFVWAISRI

SEQ ID NO: 234265 - protein, 414 aa, unidentified
MQNLTPNLFRFVVGIDWGSQRHRVCLLNREGTVIGERWIEHSASSLADLVDWLRAQTSASPGEIAVAIEIPRGAVVETLMEHGFAVFAINPKQLDRFRDRYSPAGGKDDRRDAFVLADSLRTDLHCFHAVRLDDPTLIRLRELSRLEDDVGQEQNRLTNQLREQWHRFFPQLLQLSPSADEPWIWELFQSASLPAKAVKLSQARITRVLSRHRIRRLDAQQVQATLASAPLPLAPGAAEAASEHALLLLPRLRLLHQQRSEIARRIQALLDELAAPGEATGPSEHRDAEVLLSLPGVGRHVAATMLSEASQAIADRDYHALRCYAGSAPITQRSGKKTVVIMRRGCNERLRNALYHWSRVSVACDPHSKKLYAEMRARGHSHGRALRGLADRWVAVLISMLRHRTLYDPQRRAA

SEQ ID NO: 234266 - protein, 338 aa, unidentified
MALYCGIDLHSRVSWIAILDERLKVVRLTKVDNDLEGILGVLESYREELEGIAVESTFNWYWLVDGLQDEGYRVHLTNTCAVKQYDGLKFADDKHDARWLARLLVLGILPEGYIHPRRVRAVRDLLRRRSFLVRKRTSMLLAMRGAFSCRTGLTTTANDVKKWKDADVEPYLDDPVEILGITCMIEPINALNVQIQRLEKEALTRARLRDEFALLQTVWGIGRILSLAVMYEVGDIGRFRKVGNFASYCRLVKTARLSVGKLKGSGNSKNGNPYLSWAFSEAAHFAIRHHDEAKRFYQRKKSKTNGIIAVRGLAHKLARASYYVMRDQVDFDPVKAFG

SEQ ID NO: 234267 - protein, 314 aa, unidentified
MARSECFIGIDVSKGTLDVAVIPDGKDLSFPNDADGIRALCKKIKRMRPSLVVLEATGGLQIPAVAAFGLAKLPISVINPRQARDFAKATGQLAKTDRIDARILAEFGKAIRPEVRPLKDAEALELSALMTRRRQLVEMLVMEKNHLLTASTAIRPRIEASVRWLEEQLDDLNTRIGVVIRSSPLWREKDELLRSVPGVGPVLSATLLAEMPELGTLNRKEIAMLAGVAPINSDSGKHRGQRRIWGGRSRVRTILYMACMTAIRFNSVLSSFYKRLIEAGKAHKKAMTACMRKMLVILNAILKSGQPWAVATEV

SEQ ID NO: 234268 - protein, 346 aa, unidentified
MKHYAGIDVSLESASVCVVDERGLIVREGKVASEPEALIAWLGKPGAKVELIGLEAGPLSQWLHAGLSQAGLMVELVETRHVRAAFKAMSVKTDRKDARGIAQLMRLGWYRPVHCKSLPAQEMRALLVARKLLQEKLHAVEMSLRGILRNFGAKVGQTTARGFEGRVRTLVDGQPTLQAVADALLAARTTLARELATLEKRVRSTARHDDRVKLMMTAPGVGSIVGLTYVAAIDVPERFRSSSSLGPHFGMTPKRYQSGQIDISGRISKIGDGTVRSALYEAAHIILTKPVKDAGALKRWALAIAKRAGKKKAKVALARKLAVILHRMWMDWKPFDPTKAVGSAAA

SEQ ID NO: 234269 - protein, 358 aa, unidentified
MNNITRVGVDLAKNVIQVCAVDVTGKVVLNKPLPRDKFLTWCAELPKGCLIAMEACSGSHHWARELNKLGLNAKIIAASHVSPYRMEGKGGKNDANDAAAVCEAASRPNMRFVPVKTSNQQGILCVHRMREGFKEERTGCINRIRGLLAEFGIVVSKSPNKLREKLQDILEEAENSLDWLARLAIQELYTHWCAIDEKIDWCDKRINAHISDDVQAQSAKQLIGVGALTASAAVATVVDFKQFKNGAQFGAWLGLTPKQSSSGGKTKLGRITKRGDTYLRTLLIQGAKAAVMSAHMRHDPISKWLFQLKEKSGWQKAAVAMANKNARILWAVMTKGINFDPAYVSVKPGGSIGAALAV

SEQ ID NO: 234270 - protein, 416 aa, unidentified
MNAISVGIDVSKGQSMVAAIRFPGETVWSPRKVMHTAAALERLAYDIKALVYNNGSEVRVVMEATGRYHETVAQELHEVGNFVSVVNPKLIKDFGNNTLRKVKTDKADARKIARYGLQNWNDLREYTPVEAARVKLKQFSRQYNLYSKMKVQLKNNLIAMLDQVFPGANELHDSPPKADGRQKWVDFVTTFWHCECIADMSEAAFIERYRKWCKRLGYNFSESKAADLYICSLGHITTLPKNANTKLLITEAAKQLTNISRMVEIFRFEMLRLAQTLPEYDVVMGIYGVGPTVGPQLMGEIGDVRDFVNRKQLVAFAGIDPGSDQSGKHNSDSESTSKRGSPLLRKCLFQAVGAYVKKRPADEPVFLFYAKKRAEGKKYYVCTTAAANKFLRIYYARVKEHLDKTLPEEDRFPCQG

SEQ ID NO: 234271 - protein, 909 aa, unidentified
MPLYPVRALERAMKISEVITRAISGKINWIQAAEILGMSDRQLRRWRRNWAKYGYSGLFDRRTQRPSPKRVPMADVEKVLRLYREKYFDLNVKHFVEKLHGEEQISLSYTWVKTALQNAGLVQRYAKRGRHRRKRPRRPLTGMMLHVDGSRHRWIPGLDQYQDLIVIFDDATSEVYDVQLVDEESTATVMAALKRVVETRGLFCSLYSDRGSHMAWTPKAGGPVDHQKPTQIARALDQLGIELILAYSPQARGRCERLFGTWQGRLPQEFRLRHITTVEAANEFLRQDWGVMHDASFSVKAEQTGTAFLPYSGNDLDKIFSKHHERKIDNDNTVRFEGRCMQIPQQTFRFSMARCRVLLCEHLDHTFSVHYGPHLLGRYDAAGQILQFSAEHQPRRSADRRRIMKADAICDRNEERKKSIMTVPVTTKDEKGWQLDYGSGGRNRERGCWFTGAIKPAKKSSPEAERHNKLLLSLFFDDKHAKENLTQDGFPRTGLKGAVMQVVHECCAGFDVHKKSVYVCILRCEENSTRKQYIRSFGTMTKDLLTMTDWLKEQGVTHVAMEATGVYWRPVWAILEGQFQLLLVNPHHIKALPGRKTDVKDCEWIADLLQHGLLRGSFVPPIEIQDLRDLTRYRAELTQARNRVANRIQKLLEQANVKLSSVASNALGVSGRQMIEAIIDGEGDPGRLANLAKRRMRSKIPALESALQGRVRDHHRFLLKEFLDEWKGLGARIAKVEQEIQRHLGPFQQAISLWQSIPGMDWVTAANLVAEIGVDMKQFPTAQQLASWAGLCPGNDESAGKRKSGRTRDGNRWLKRTLCQASWAVTRKKNCYLAAQFRRIAAKRGLKRALIAVAHTMIIIAYKMLQTGRTYEELGGEYLETVNKNYIQRYLVRRLQTLGFKVTLEPAAA

SEQ ID NO: 234272 - protein, 326 aa, unidentified
MEHELHYIGIDTAKEKLDVDVLRPDGRHRTKKFANTTKGHDELVSWLKGHKIDHAHICIEATGTYMEPVAESLYDAGYIVSVINPALGKAFAQSEGLRNKTDTVDARMLAEFCRQKRPAAWEAPHPLERALRALVVRHQALTDMHTQELNRPETAREVQRPSIDAHLLWLEAELKRLEKQIKDLTDDDPDMKHRRKLLESIPGIGEKTSAVLLAYIGLKDRFAHARQFAAFAGLTPRRYESGSSVRGASRMSKAGHVSLRRALYMPAMVATSKTEWGRAFRDHLAANGKKGKVILGAMMRKLAQVAYGVLKSGVPFDASRHNPVAA

SEQ ID NO: 234273 - protein, 396 aa, unidentified
MYYVGIDVSRHHHDATAIDATGQVVIAPFRFLNTRQGVNTLLARLQTLDGRVNIAMEATGHYWLPLYEALVAKGYSVSVFNPFQIKAYRQIGLRKTKTDAVDSLWIADFLRIGRARPMVVPSPAIRQMRELARFRFSLLQRQANIRRRALTILDRVFPEYRTLFPRPFSPSSRALLRRAVAAETFAAWPPEDLAQTLRQASRGHFGPEQARQLLHLAQNSLGIRSLGAVANQEMQFLLDQLALLDDQINTLDEELDRLLQQTGTYLTTIPGLSTTLAATILGEIGDIHRFTTLKQLVAYAGLDPTVHQSGQFQATHSRLSKRGSVYLRRALWMAASVARQYDPDLKAFYQRKRLQRKHHSVVIGAVCHRLLARIYVVLKEQRPYEIRTPDTNHSTT

SEQ ID NO: 234274 - protein, 310 aa, unidentified
MEVIIDKGCGLDVHKDTVASCVMGSGIKKEIRTFRTMTGDLYKLKEWLEEKGITHVAMESTGPYWKPVFNVLENSFEVVLVNARHIKNVPGRKTDVKDGEWICRLLRSGLLTASFVPPRPIRELRDLTRYRRKLTQAISSEKNRIQKVLEDANVKLSSVVSDTFGVSGSRMIEAIMTGDFDLDSIANLAVGRLKSKKDDLKKALEGHFRDHHRFMIQASLDHIESLEKIIAQLDQEISEKLKDYHREVELLQSIPGVKEQGAALIIAEIGADMDVFPTEGHLSSWAGMSPGNNESAGKKKVLKLSKETNI

SEQ ID NO: 234275 - protein, 408 aa, unidentified
MNPLYVGIDVSSKSNVVYLMLPNGDKHSNFELKNSHDGSSQLVKRIFSAMTSHSLDTVLIGLEATSVYGDNLVYFLREDATLAPFNRKIHVLNPKQVNKFKESYNDLPKNDYVDSFVIADCLRFSRINKEVYLGDYHYKALQNLTRARYFAVQNLTKEKQRFINVLFKKYSTMTQEKVFTDTFSTTALAVYNEFESAEALANMDLQELTDFIIEKGKNRFPDPDSVAKAIQKAARSSYRLPKTVNDSVNQVLSISITSMKALESQIKEFDKAISAQMELLPNVLVSIPGIGPVFSAGIMAEIGDINRFENHAQLAKYAGLAWKQHQSGGFEAQTTRLIHSGNRFLKYYLCEAAFSLVRCDKEYSDFYHLKYKEVNRFNHKRALALTARKFVRLVFVLLKDNRLYRPAK

SEQ ID NO: 234276 - protein, 326 aa, unidentified
MDHIIRIGMDTSKHVFQLHGVNAAEEPVLRRKLRRNDMVVFFERLAPTIIAIEAAGASHHWARLLRSFGHEVKLIAPQLVKPYVKRGKNDAADAEALCGAMSRPTMRFVPPVKTAERQAALMLLGLRDRLVRNRTQLANAIRGYAAELGLAAAKGIAHLAPLLARIQSDESLAGLARELFAAHAQEYAQLQAQIDEVEGKLMAWHKTNPGSRRLAQISGIGPIGAAMLIMKTPAPEMFRSGRQFAAWIGLTPKDHSTAGKGRLGVITRAGDEGLRSALVVGATAVIRHLRNGKGRSMLSAWVEQLLKRKPPKLAAVALANKLARIA

SEQ ID NO: 234277 - protein, 283 aa, unidentified
MWARPRWMLLWKGKHAVKLFANSRQGIGKVLRYLGKADAPMVVVEATGGHEDALLEACCDAEIWITRVNPRQARAFAQAAGDLAKIDAIDARVLASMGSLFLGRLRRYDAPASWQRQSCDGLRRRGQVIVTLQAQKQQLALTPAPTPVRQGMARTITVIKRELAAIDDAIAKLIKTHGTPAIHSCKGLRPISQASSLALLPELGKLDCRQIARLVGVAPINHDSGQSRGKRHIRGGRAPVRVALYRATLSAVRWDPLMKAHYQQLRARGKRGESEILCVSRLL

SEQ ID NO: 234278 - protein, 465 aa, unidentified
MPRRKPPSLPPEPAIAALLQTLNPHAAGIDVGATELWVCVPPGVRATPNSSAPGAPTVLPSHVHRFGTFTADLHAIAAWLRQCQVTTVAMESTGVYWIALYDLLENTGFQVLLVDPRQVQRAPNRPKTDVHDCQWIQRLHSLGLLTAAFRPEEPIRVWRAYQRHRATLIEDAGRHLQRIEKALEQMNVKLPEVVSDITGVTGMGIVRAIVRGERDPKALARLRDHRCKASAAVIARALQGTWQPEHLFALQQSLALYDYYHEQIQACDRVIEAHLKALALPEVSALEPTRRVRRRRDNEVTFDARQRLHHVAGVDLTAIEGIEESTALVVLSEIGTDMDRWPSEKHFGSWLGLAPNPKKSGGKVQSSATRPGVNRAAQALRLAAKNLQRSKSALGAFFRRIAARRGLAKAITATAYKLARIVYALLKYGTAYVAQGLAAYETAYRERMVRQVKRRAAELGLVVVE

SEQ ID NO: 234279 - protein, 458 aa, unidentified
MGRSKSTGKVRRAMAMVHPNAAAIDVGATMHVAAVKADRTPEPVRSFGTFTSDLHRLVDWFAECGVDTVVMESTSVYWIPIFELLDARGFAVFLVNARDAKHVPGRKTDVSDAEWLQRLHSYGLLRASFRPKGQIVELRAYLRQRERLLEYGASHIQHMQKALTEMNVQLHHVVADITGATGLRIIRAILAGERDPAVLARLRDSRCHATVETVEKALTGTYCAEHLFALEQALALYDTYQEKASACDTRIEAVLKELSIRRGREAGPLPSPRHRKRRQPNGMDFDVRAALYALLGKDLTQINGLGPYLALRLIAECGDDLSAWPSAKHFTSWLCLAPSNKISGGKVLSSRTRRSGSRAAALLRLAAATVGRTDTALGAFYRRLSARIGKAKAVTATARKIAVLFYNAVRHGMEYVDPGASFYETRYRARVIDNLHRRAKVFGFALQPIEPTPAIPVS

SEQ ID NO: 234280 - protein, 397 aa, unidentified
MTHDYAVYLGLDVGKGEHHAVGLDHTGKRLHDAPLPNTEPKLRAMFDKLATHGPILIVVDQPATIGALPVAVARACGHEVAYLPGLAMRRIADLYPGNAKTDARDAFIIADAARTLPHTLRRINVDDDALAELDVLIGYDDDLAAEATRISNRIRGLLTGIHPALERVLGPKATHLAVLEILSRCGGPAGIRKAGRRKLASIATTHAPRMGTKLVEDILAALDEQTVVVPGTGAADTVLPRLADSLKSVLLQRKTVAAEVEEFLDAHPLAQVLTSMPGIGVRPSARILLEIGDASAFKSSGHLAAYAGIAPVTHRSGSSIKGEHPARTGNRKLKRAFFLAAFAALADPTSRAYYDRKRAEGKKHNAALICLARRRCDVLFAMLRNRTHYHHPDTPKA

SEQ ID NO: 234281 - protein, 371 aa, unidentified
MKDYSTYVGLDVHKDSISIAIAEGCRNGEVRYYGSTGGDLESLDKVVKKLRSQGGELHFVYEAGPCGYVIYRHLSRQGLSCTVVAPSRIPKRSGDRIKNDRRDAESLARLHRSGELTAIYVPREEDEAIRDLTRVREDAVKAQRVARQELGAFLLRHGLRYTGKSHWTAVHRRWFAEIKMGHMGQQITLQEYINTEREAVERIERLTEQIRQHVDNWRMAPVVKALQAMRGISLIVATTTLAEIGDLSRFANPRELMAYLGLNPSEHSSGDKIKRGRITKTGNGHVRRSLIEAAQAYAHPARISRRLVGRQESLPKAIRDLAWQAQLRLCGRFRHLIARGKNRNTAITAIARELCGFIWSMAKEVSLQPTA

SEQ ID NO: 234282 - protein, 408 aa, unidentified
MEVLYPRCAGLDVHKDMVMARVRCVNEPRVDETRSFATTTNALVELQEWLTSHGVTHVAMEATGVYWKPVWHLLEEHLELVLANAQHIRNVPGRKTDVNDAAWIADLLAHGLIRSSFVPPAPIQALRDLTRTRKQLVREISQHSLRIQKTLEDANLKLGSVLSDVLGSSGRAILTALIAGQSDAARLAELAQGTARRKRAALIEALHGRITAHHRRLLKLHLDLIGALEHALEEVDADVGKLLAPIRQCARLLTTMPGVSDLTAQVVLAEIGADMARFPTPGHLLSWATMCPRNDESAGKRRSTRTRKGSPWLKTALVTAAWAAVRVKESYLQAQFLRLRGRRGAKKAILAVAASMLTAIWHMLKNGVEYRDLGADHFARRDRSKAILRLVRRLNDLGCDVQITPQAA

SEQ ID NO: 234283 - protein, 351 aa, unidentified
MESQQTAPPKLFIGIDIHKRSWKVHCATDLFGGKSFSMDPEPEQLKDYVLKHFSDYEVSSAYEAGCCGYSAHRAFESYGWNSLVVNPADIHRKGKERHTKTDKIDAQLISRELKDGRLDGIHIPEVDREELRSLFRRRNDLVKDFRRIKSYIKMQLLYFGIKEPVEFDNDHWSHKYRKWLDDMVFKYPTAKATLDSRMRFFRFVDQELRDVSTQLRRYCKMHHKKDYMLLRSIPGIGGIVACGILCELGDLRRFNSIKHLAGYVGLAPGVHQSGSNYKTLGITPRAHRLIRSYFVEAAWQAIRADPIMQSYYRKHQGRNVKSIIIKVARKLLSRTLAVIKTETPYVIGVIE

SEQ ID NO: 234284 - protein, 352 aa, unidentified
MMIIGCDFHPRFQQISFLLEETGECGQRRLMHTAEAEQYYRSLCGAKVRVGIEATGSYGWFRRLLSELGHELLVGDATQIRASNPRRQKTDKRDAEHILGLLVEDRFPAIWQPPAENEQLRQLLLHRSRLVRLRTRVTNQLDGMAKNEGLLVPGGWSVKRRKAIEALPLPGWYGERRKDLLALLDRLEERIAPLDKAVSQAAANNAEACLLMTHPGVGPVVSLAYVLTIGNWQRFPRGKQVGSYLGLIPAEESSGDKRRLGHISKQGNTLVRWLLVEAASTAQRYDPSWHRQYLRLSMTKHHGVAKVAIAHKLAVRLYWMLRSGEDYQHVRERGSHARQSECPGGRSTRPIE

SEQ ID NO: 234285 - protein, 451 aa, unidentified
MMKSKRLSPERDFVPTHPNAAAIDIGSRMHVAAVPPDRDPVPVRSFGTCTGDLKQLADWFERCGVRTVAMESTGVYWIPAYELLEQRGFEVVLVNARDAKHVPGRKTDVSDAQWLRRLHEYGLLRASFRPKGELAALRAYLRQRERLLDYSASHIQHMQKALMQMNVQLHHVVTDVTGETGMGIIRAVVAGERDPAVLATHRDRRCHASEQEIAAALAGNWREEHVFALGQALELYDAYHAKVVECDLRIEIVLRRLRDAAAKPAGRLPPARHRDKTANAPTFDARAALHAVLGVDLTQIHGLGPSLALKLIGECGTDLSAWPNAKHFTSWLCLAPANKISGGKVLSTRTRRSGSRAAALLRLAAVTVGRTQTALGAFYRRLSARVGKAKAVTATARKIATLFYNTLRHGIDYADPGASYYEDRYRARVLANLRRRAKSLGYMLHEMPAPG

SEQ ID NO: 234286 - protein, 385 aa, unidentified
MIHVGADVHIRNSVLNAKDEDGQVLARGRCGNTMLELSGFFAPLERRSKARGEPIRVVMESSGNSRAIQRLLTHYGREAGIDLTAEVLHARKLRVIAESVNKCDRVDADILTELSRSNLKLPTCYMPDDEEFALREHLRARNDLVRIRTALKNRAHAILHRRGILTPKGDLFGRAGGVFLDQLNLDQAGQDTLGRFRELIGRLDESIKDSTTSVRSLMREPRWAKYAALLQTMPGIGLITSMTILAELGNLTRFRSRAAVANYAGLVPRHRDSNGKRWSGRITCRGSAHLRGVLIEAAWMAAPRVPVYAALFDRVAGKKNRKTAIVAVARRMLEDAWMLLIKDEAFRYVPVPVGDTHGERTRSSAEPEHRELRSRAPQATSSVAG

SEQ ID NO: 234287 - protein, 346 aa, unidentified
MELQIQRGCGLDVHQATVVACLLTVLADGKVKKQIRAFGTTTRELLALSQWLQGEGCTHVAMESTGVYWKPVYAVLEGTFELIVANAQHIKNVPGRKTDVKDAEWIADLLLHGLLRPSFVPPKPIRELRDLTRYRRKLVESRSAERNRLLKVLETANIKLASVASDAFGVSGMQMLTALAEGKATPAEMAELAKGRLREKIPQLEPALEGRMEEHHRYLLKLQLRRMRDLDQDLAELEERIQQRLEPYREQLQLLEEIPGVDWTLAAVIIAELGVDMKVFPTASQLASWAGVEGVPIVVEGSQGRRIHLTLFSPSKVAWLRCSPGRERRPGPRGSRGRRSVGNAFR

SEQ ID NO: 234288 - protein, 340 aa, unidentified
MQIHSVGIDLGKTTFHLVALGAAGKVLVRKKFTQKQLLTFTANMQTSLIGLEACSGAHFLGRALRKQGHEVRLIAAQFVKPFVKSNKNDFVDAEAIAEAVERKNMRFVPIKTDDQLDLQAIHRVRDRMISRRTAVINQLRAFLLERGMVFAQTPTKLKAAMADILENAEADLTAQMRNLIDMLWGEWKLVERQIEELNEELERISAAYAGCTRIRQIPGIGPVVATAIVAAIGNGAAFRKGREFAAWLGIVPRQHSTGGKTKLLGISKRGNVYLRKILIHGARAAVLRIKRDRAPIGAWLDALDSRAPKNVVVVAMANKLARIAWAVLSSGNDYRPVPAQ

SEQ ID NO: 234289 - protein, 451 aa, unidentified
MAQGSGLTRGDRNRNRKLAAVREGVRRDRAVLAIDLGEDKQVAVVMDHECRVLARKIVKAKAHELGGLLEWGAGRAGKGGLAGLTVACEPTGHRWKALMGLADGAGHGFVCVQPMAVHRAREGDDYTLGKTDHRDAYLIGKLVTRLECYLPERADEAWARLRHLGARRAALVTDLTAARQQAADLLGCAWPAALGAAAEPLESVSWMAAMAVITARCAGRPERLRKLGYDRFLAAVRRELPRWGGQRIRHSVVKALWAALGSTEGVLAQRPGAVERVELLMEDWRELRRKLAGTESRMLAVLDQLGLAELASSIDGVSALSAAVILAESGDPRRFASGRALVKHAGLNPSEHTSATLNGQTRISRRGRPGLRCAAWRATWGALRGNTVLQAKYAHLTGRADSRRLAGGQARIACAAALLRWLWAVITSGRAWDPRIAAGETTARPLIAAAA

SEQ ID NO: 234290 - protein, 390 aa, unidentified
MSQPFDASRSLTAFEQDSTLVAVIEMSQSNWLVAAVVPGVERQPLKKLDAEADALLKLLLRWRDEARKAGRVVRRIVCAYEAGRDGFWLARWLQAHAIEAYVIHAASIAVSREHRRAKSDRIDTELLMRSFLGWLRGEKRHCSMVAIPTMAQEDARRPSRERESLVGEQTRIGNRVKAVLALFGIGGFNPKLRKAAEKLETLGTVEGTSLPENTRAELRRDLERLRLVRDQIRAIEGERLRRLAAAPRTATGPHAMVRLLARVFGIGIETADMLVNEALSRNLRDRRAVARYAGLTGAPDESGKRRREKGLARAGNGRVRRGMIQLAWRFLTWQKHSRLAHWFRERTADGRSTTRKTMIVALARKLLIALWRLVTTGELTEGIKLRPAGA

SEQ ID NO: 234291 - protein, 338 aa, unidentified
MDKYAMCGIDVSAKQLVVVVQREGRNQPARSFANSRQGHKELKRYLAGAGSRLRVCLESTGLYGLDVALFLHADTRFEVMVANPRAVKNFAQALLERSKRDPIDARVLAEYAARMPFQAWQPPSPAALSVTALARRIHALTESATREKNRLHALSATATTLKVLVADLKRSLQSMAQAQARLAREARKIIAADALLERRFRLLLSLPGVGQTSALQLLGELALVPVDAEVRQWVAYAGLDPCECTSGSSLAKRPRISKVGNRHLRRALYMPALTAAHHHPAFGSYYRALQERGKCKMVALVAVMRKLLHAVFGMFKHDALFDGARVCPSLAVPTSVAA

SEQ ID NO: 234292 - protein, 397 aa, unidentified
MYRYFVGIDVSKDSFSVSGLNSEGAVVFSLGATMDKHGFYELLKVISSCIDDPSMVIVAMESTGSYHVNLVSFLKSKGFPVVVVNPLLISNFTKLSLRKTKTDKKDAHTIARFILAHRDSLTCFAESQGNKHLKDIARERESILKFIGAAKNDIKRMLQSTFPEVEKMCDVFSDVMLLFLKKFPSARIISAADPSEITRAFSHADGRMRIRLSIEDLVKAAHHSVASHHPALEAILPGKITTLIHLNERLDEVTKLLIRFCESVMKEDLEIIISIGGISTKTATPFLAEMGDYRNYKSYKNFIAYTGLDPSIHQSGTLEGISKLSKRGNRHLRRVIYLMTFCAVRVHGPFKEYFQRRKKEGLPFKKALFATAHKLIRTIFAMLTKRTYYRCKEMIIS

SEQ ID NO: 234293 - protein, 332 aa, unidentified
MNNCIGIDVSKSTLNIHISKNNQDLQIENTVAAVKKLYTKLKKIYKKELEELVFVYEPTGSYSEMLRKFCADRSIKCFIINPKQFSNYAKALGIEVKNDEVDARVLAQAIVLAKASQIKVPVYDMDVEQIKELMSFYKFTCKQTAQLKGHLESLVAKAGDSFAIKELRKSIKASKEREKRIIEQVHQLIQSNADYKKAYENITSIIGVGQIGGIALLHLFLKYPEANQRQITSLTGLNPIYRQSGSSLQSNYKISKSGSIFYRGALFMGVMTAIRYDDNFKAFYERLKANGKHTTQAQIAVMRKMIIVAHSLYKNDTQYVKKVPNLEEKTMN

SEQ ID NO: 234294 - protein, 414 aa, unidentified
MRIVYQNVAGLDVHKKVVAAAVIVQRADKSWQQEKRTFGTMTVDLLALSDWLLNLGVTHVAVESTGEYWKPIFNILENNFEIILVNAQHISKVPGRKTDQSDAEWLSELMQYGLLKASFIPPPGQRELRELTRYRSSFVRERSTLMNRVQKVLESANIKLGSVVSDIMGASSRSMLEAIIAGQASPAEMAELAKGRMREKRDALAKALEGRVQAHHRFVLTELLCQIDSLEETIARFDKEIEEYCRPFEAAVQLLDTIPGVARATAEIIVSEIGTDMSRFPSAAHLAAWAGVAPGNNESAGKRRSGKTRKGNKSLGAALTQAAQAAAHTKDTYLSALFHRIAARRGKKRAIIAVAHSILVMGYHMILRNQPYKELGSNYFDQRDVEKATSRLVGRLEKLGYAVSLQHNTAPALA

SEQ ID NO: 234295 - protein, 318 aa, unidentified
MNIIAIDVSKNTLDLLIGENPQKAKAWKIENSNEALEELLQKEIVSEDSEVVMESTGDYHRTASIFFLKKGFKVKILNPILTKQYTNTTIRKIKTDKTDAEKIMKLALEGEGGEITLEGLNNPSKELLRLSHFMTKLKTQLKLKLESVQTKGLIKEEPIDDMMEIIDRMEEIVKNLDGEAIEDMDDQSKLIDTIPGFSAKLSQIIVSECGDITRFKDANALVAYAGLDPKITQSGHSVHSTGRLTKRGSKFLRYALFLAARVAWRYDAQLYEYYEKKRGEGRSFTETICIISRKLLHRIYVVVKRQTPYEIKKVNFTA

SEQ ID NO: 234296 - protein, 411 aa, unidentified
MRRVIGIDVHRTFGEVVFWESGRLRHAGRIDMTRTALEGFGKTLLASDEVVLEATGNSMAVSRVLAPFVARVIIANPLQVKAIAQAHVKTDKIDAGTLASLHAAGYLPQIWTPDAETERKRRLVARRYQVVRHRTRLKNEVHSILHAHLIPKCPHADLFNGRGRAWLAAQQLPDDERAAIDRHVRELDRLAEDLALLDREIAQDAIEDSAVNRLMTITGVNLAVAAGIMAAIGDISRFNSPQKLVSYFGLNPRVRQSGLGAAHHGRISKIGRSHARAMLVEAAWAAAKAPGPLHAFFVRIRARRGHQIAAVAVARKLTVLCWHLLTKGEDYLWARPALVANKTRAMQLQAGHPQQKGSRRGPTYAYNIKVLRDREMSIAAQAEQSYERFVSQWKPRRPRAGARAPQFGKTK

SEQ ID NO: 234297 - protein, 360 aa, unidentified
MSQDHHVSLLANVPALTIGVDLGDRTSRTCELDAAGRCVRETTVATSEAAMRRYFAARPRSRVVFETCTHSPWLARLVRGLGHEVVVANPSAMFTRGARRRRNDALDARFLARQGRADVALLHPITHRSLDAQHALAQLRARDQLVKVRTQLINHVRGAVKAVGQRLSAASAESFARRARAELPAALAAALGPLVEVIATLTERIRAADRALARLIVERYPVAQCLQQPAGVGPVTALAYVLLIDDPHRFRRSRDAGPYFGLVPRLDESSTATPQLRISKAGDGLGRRLLVSAAQYILGPFGPACDLRRHGQAIAQRGGKNAKKRAVVAVARKLAVLLHHLWVTGATYDPDYLLHRTRSA

SEQ ID NO: 234298 - protein, 415 aa, unidentified
MYYGLDVHKEFIQVCRLALKGEQRQDFRIPTTVQALEAFAHTLCRRDQVALEVTFHTWAIYQLLVTRAGRVVAVNATKVKAIAAAQIKTDKIDAHTLAELLRANYLPAVQMPSPQTWALRQLISQRRLLLKQQTALKNTIHGILQRRLIRLPPGWTPFAQKTRRWMTDLALPSAERFMLDNALEMLAQTELRVAAVDAQLLQHAQISESAKLLMTIPGVDVIVAVGLLAAIDDIQRFPSPQKLAAYFGLVPRVRQSANRCFHGRITKAGNRTGRALAIEAAQVLARSSSPLAATYYRVRYKRGHNVAVTALARKLIHVVWHLLTKREPYRYAPLARTRVKLTRVSSARTRARVIPQTIEEVYAEAGLPPLPAASSGERRAAANNRRTRTRIAHTSGKPSGGKKMRKEVATRLTNS

SEQ ID NO: 234299 - protein, 379 aa, unidentified
MSAITIYLGLDVHKDSITIAFAQPGPKGEIRLFGTIANSLHAVQRTLTRLRQAHPEARFEVAYEAGPCGFGIARRLKQLNVPCLVAAPSLIPKQPGSPFKTDKRDARTIARLLRAGELTAVYIPEPTDEAIRDLCRARTDAVDDTRRSRFRLKAFLLRHDYRYQGKANWSQAHLRYLRELVLPHPAMKTILEEYLQGIDAAHARVQRIEASMLQLLESWRLKPAVQALMAFRGFQMVAAMITVSELGDIHRFAHPRPLMTYLGLVPTEDSSGPRQRRGGISRCGNGHQRWLLTECAEHYASPPKVSKELSARQEGQTQAVRDLSWKAQNRLHLRFTRLLARRVPRNKAKVAIARELCGFIWALLRSQECYGSSTGGAAS

SEQ ID NO: 234300 - protein, 343 aa, unidentified
MQIRTIGVDLAKNVFQVHGVDSAGKVVITRQLRRKQVIEFFSKIPPCLVGMEACGTAHHWAREVSKLGHTVRLMPPSYVKGYVKRSKNDAADAAAICEAVTRPSMRFVAVKSTDQQASLMLHRTRDLLIRQRTQLINALRAHLAEFGLVAETGREGVAQLAALITDESDREALPFAMKQALQAIVDQLAALELQVGTLDRAIHAHHRANDMSSRLETVPGIGVIGATAIASAVTDPSNFKSGRDFAAWIGLVPRQHSTGGKERLGGISKQGDRYLRRLLVVGATAVVRHARQHPQKHPWVMRLLAKKPAKLVAVAVANKMARIAWAIMAKGGHYRAPELAIAA

SEQ ID NO: 234301 - protein, 431 aa, unidentified
MNSDAKRLEWFRQFRSEVRGSNDHLVIGIDVAKEKHHAFFGTSGGRTLYKRFVFTNTREGFERLLGLARDLQQRHGLSERVFGLEPTGVYHKPLLAYLIEQGERVVQVSNVAVQRNRELLDGRWDKNDVADTANVADLVGQGRVLFPDAPGEPLRELRNLVRARVRLKKREHALRMRIRNHLVAQFFPELERAYGQGIADQVVLQVVRHCLDPREIARMEFDAFWNRVALPRWDVRQERKVREVWEAAKTSIGCPMDEAIRWEAPRVVEELEWVRAQLAEVEKRMRESLRQFMEAQSLLSIPGVGVVVASMVLAAIGDPHRFRHRRQVLRLAGLDLCASRSGKTSDRAVPKISKQGKGALRYALVHAAIIAANKNPAVRRYFTRCLEGRQHERGIRQKMYVKLAAKLLVVAWHLMKTGTQFDPEAFLAGQT

SEQ ID NO: 234302 - protein, 349 aa, unidentified
MIAEGLDFVVGVDTHLDEHVLAIIAAPSGALVAQRSMPASARGYAAALRFAANKGSGARVWAVEGTGSYGAGLARFLADRGEVVLEISRTPRAERRLRGKDDSLDASRIARAALASETLALPRSGERREALRLLLVARRSAVDVRREALGQLRGVIVTAPDELREQLRGLPVGRLLERCSRLRRSRAASADELATRLVLRSLARRIEAATLEAAELKRELLGHVRILAPALLDEPGVGPIVAAQLIVAWSHPGRLRSEAAFARLAGVAPVPASSGKTTRHRLSRGGDRQLNRALHTVVLHRRQHDAGTKDYIARRIAEGKTRRDATRLLKRYLARHLYRVLEQQTPLVT

SEQ ID NO: 234303 - protein, 427 aa, unidentified
MPYKIAGIDVHKRMLVVVVSDVEVHDEYQFERRQLSSNPAQLRLLAAWLLEQQVEEVVMESTAQYWKPVWGALERHWQPACQQREDARPTSGRLHLAQAQSNRARHGRKNDFADAERLVKRLLANELTLSFVPAVEQRLWRTVMRTKYQLRCNQVQVQNRLEALLEEAHIKLSSLVSDLLGTSGRRMLNALANGETDPAALAALAHYTLRATPEQLCDALDASRDLHPLYRRLIKTALENWERIETQITELEREMAALLDPYQDQVERLAEIPGLGVDSAQQVIAEVGATAATFPSAGELASWVGACPGEDESAGVNHSRRSPKGNRPMRRILNQAANAAVKLKGSIFALLYRRYVTRLGHNQTIGIIVHRLCRLVWKILHEGVRYEEHGPAVSQKSKRDRAARMIRELRNLGYRIEPGTSQAFSPA

SEQ ID NO: 234304 - protein, 352 aa, unidentified
MEVPMARSTLQKNVQTAKYAGIDYHKKFSLVTLGDEHGEPIEQIRLWHDDVPNITRFFKQHKGLVCAIESCRGYEWFLDLMTELGLEVHVCNPVRMKIICQTAFKNDKIDSRKIMDLLARNYLPTSYQATPAERHLRERVRWRAGLVRKTTSTKNAIKAILAKENISLKDPYSEKGRMQLASVPLSTTHRELLDEMLEVLDANQAAVSSQDKWIRKHAKNDYQIELLKTIPGFGDISAIAFIAEVGSLGRFKKPNQLSSYLGLVPRLSESADRSWRGGITKQGSSLMRTLLVQDAWRALSKSAELRRRYTGISRRRGKQVAIVAIARKLAEIAYCVLRDQTPFCESKLTRTE

SEQ ID NO: 234305 - protein, 378 aa, unidentified
MKAARFTADEIERVSYLTSKGYLPVAVDVASRVFQVCYYDLGAKHIRNYQLSRVKFFEFIDDTQMPRKLIGIEACGSCNYLCRYIEEHNHKCHILPAQKVKAFLHLDKTDRIDALGILKALITPSMQHIPARTQENQYLLNLITVREQLNKQFVQTVNAAHAILYESGVVAGTVSVASATKVTEALKALCNTETEKEHSEDDCSYSHLNCISESLLSNIESLQTKIKEINTHLLSYASNNEICSNLQTVPGIGKLSAVALYAAIGDPERFSSSRAFAAFIGVAPVTTGTGGKTTVLGIRKSGIQSIKKMLYMCAMVYLRQAMKNGTESSWLKLRLNQNRSKKIIICAIMNRLARIAYAIAKSGQPFDETKCNMIKKLR

SEQ ID NO: 234306 - protein, 384 aa, unidentified
MEKSITLHVGLDVHKDSIDIATADIGRDGEVRHVGTIGGDLPALDKALRKLTSKGHRLHVVYEAGPCGFVIWRHLTALGHACEVVAPSSIPKRSGDRIKTDRRDAMLLARLDRSGDLTAVRVPGAADEAVRDLVRAREDGVRECRNARHRLKALLLRNGIAYTGKSSWTAAHLRWLATLKLAHDAQQIGFQEYLHSITEATARIERLEQAMRDTLPDWSLKPLVQALMALRGVQLIAAMTLVAELQDFLRFASPRKLMAFVGLVPGEHSSGPKRRQGSITKAGNSAARRMLVEVAWHYQHSPRVSPIIATRQDHLPKAITDIAWAAQLRLHAKFKRLLARRVMKNKAVVAVARELAGFVWAIGCEVQTSGWQGVTVESATAVAN

SEQ ID NO: 234307 - protein, 319 aa, unidentified
MAQNDLIVAGIDVAKDKVDVCIRSLSLRRTFASTAEGRRELASWLRRQKVGKAVMEASGGYEREWAKALRDAKIEVRIVDPRRVRSFAQSAGRLAKNDTIDAEMIAWFAETFDEARGQAYDASREQLHQMVNARQALKDMQAKLESQGEHAVPAAVQRTHARILKTIAVELVKIDAAISAMIQATPRFTELAEIIESVPGIGRTTSAALIAAMPELGQANNKIVAALLGAAPYDDDSGRRRGERHIKGGRRRTRNVFYMACLGAATRHNPVLKAFYDRLVAKGKEKKVALIACMRKLICILNVMITRRQKWDANRYALS

SEQ ID NO: 234308 - protein, 338 aa, unidentified
MSKLKNFVGIDISKLWFDAALIKADNPSQIIHQQFAQKTEGFKKMQEWLLMPEVKPDAETLFCMENTGLYSTGLINFLVKNKAQLWVEMPLRIKKAGGFERGSDDKTASIKIAGYAMRYQDNVKPWQPADSNMEKIKNLIAQRDRIINAVTQLTVPVKELKDCGCEAEAKQMEKVQKPALGALKKTKMNIEMLITKTVQQDEQINKKVKFVQSIKGIGPVTAVALLVYTKRFDKFDNAKQLACYCGVVPFKKKSGTSVWYKPTVSPFANKKLKKLLHLCALSAIKNDKELHQYFERKVMEGKNKMSVINAVRNKLIYRVYAVLRDERMFEENYVRKCA

SEQ ID NO: 234309 - protein, 342 aa, unidentified
MDKLYVALDLGSRHIELVAMRLNGKVIKQRRFSTSESNLRQEFEALTGEVHVHMEAGELAAWVREVIKSYAKSITVAHARHNAWIAKDPNKRDRVDAFKLADLLRMNRVHPVYYPEDRARRDFKQLVQHYGDLTAQEVALKAMIKSRLRTQGVIVHNAAPFTEQGCKDVLARVPSAEIRKAIRQLYKVLAHTLEVRDEAKSAMVKAGRQFPEIKLFAEGVPGVGAIGAARFSAYVQTPHRFSNKRKLWRYCRLGIAYRSSDGQLLSHPKLDRAGCGPLKDVVRKAFEVAVNGEADNQFKRAYEQALARTHDKTHARLTVMRKIVSVLRAMWLTNSPYQDELG

SEQ ID NO: 234310 - protein, 328 aa, unidentified
MKFQHIIGIDLSKESIDLFCHQLNSYFKIENATTGFLQLLKWLKEQKISYCQVMIVMEHTGLYSHHFESFLHKHKIAFAKVPALAIKKSLGLARGKSDKIDAKRIARYGFEKRDVLISQPNPDKVLQRLKLLYSSRRRLVRLRTSLKSAVTELRPITNASDVIITSHRRLIKDLTDEIKKIETEIKHLRSQNASISYNANLLQSVKCVGEVLLTATIVKTENFTRFSNVRKFCCYCGTAPFEHSSGKSIRRRTKVSHLADKEMKSLLDRSACSAIQYDKELRAFYERRLAMGKSKQSTINIVRNKIIYRMFAVIKRQTPFIENYLQTA

SEQ ID NO: 234311 - protein, 403 aa, unidentified
MIFVGDDWAEDHHDVYLMEETGARLASRRLPDGLTGISQLHGLIAEHAEEPDQVVIGIETDRGLWVDALVGAGYQVFAINPRAVTRYRDRHHVSGAKSDASDAKLLADLVRTDRHNHRPIAGDSAEAEAIKVLARAHQTLIWTRTQHTHRLRSTLREYYPAALEAFDELDNRDALAVLDRAPTPEEGAALPLSAIRAALKRGGRQRNIDERARMIQARLRTEQLAAPAAVSAAFAAITRATVAIIAELNHQISELETILAAHFETHPDADIYLSQPGLGVILSARVLGEFGDDPNRYTDTKSRKNYAGTSPLTIASGKKRAVLARYVRNNRLYDAIDHWAFCALLTSRGARAFYDQHRAAGDTHHQALRALGNRLVGILHGCLHHRTPYDEHKAWAHRMATAA

SEQ ID NO: 234312 - protein, 366 aa, unidentified
MDPIYIGVDFHSRQQTTCYLKTETGELVISELQHQDKEQVRAFYQQFQGAVIIGLEASGYSPWFEAMIERLGGQVWLGDATEIRRRARWRQKSDRRDAELIWDLMVHHEFPRLHRPSEPSREVLRMLRYRQKLIKLRTMSKNSLQAIAMQAGLAKGRQLFTAAGQQELLITDMSPVLQWQRDHWLDLMKPFNQQLLETMVWFKTQSKDDVHIKLLRTHPGIGLLTSLCLWHTLQPVSRFRNQRKVVAYAGFDPMIRSSAERAIHLGISKAGSRMLRYLLVEAVHTAIRYDEDLKRFYKRVAERRGRPKAKVAAARKLLIRAYIMLRDEIDYGELRRRAVAARFARRSQGPTKVPEVLIGQSASPGA

SEQ ID NO: 234313 - protein, 394 aa, unidentified
MEREDIRLEQFRRLRKEIRGSEDYLIVGIDVGKDKHNAYLGTPRGKTLYRRLIFENSREGFEKLMFQVQAIRVQQSLNQVVFGMEPTANYHKPLGEFLINQEHQVVLVSPEAVKQNRKLLDGRWDKHDGKDCANVADLIAQGKCLYYEYPLPALHDLRNLLSLKRKLKKLEQGLRLRIRNHLVAQYFPEMDQYCNWGEQEGLALVRWCLDPAVMARLSEAEEKIEQVCLRFKEYPCLLSIPGFGPSLSAMVLGAIGNPWRFQNGAQVIKMVGLDLSASQSGKSQGPPSISKKGKAEIRYALYQAALVASSRDKHFVAYFTDQLRGREKEKGIKTKRRVKLAAKMLMIAWTLMKKQELFDPRYLSPQAEPINARKTMKTENRGIPEVQRGSDRGL

SEQ ID NO: 234314 - protein, 418 aa, unidentified
MKKHNNSRKKSEPTSKRAKTRGPMRRDTKEVLAELVGKLKEKLDPKKVAATSAGEEHQRGELRPNLDRLTVGVDLGDQWSHYCILGLEGETLAEGQLRTTQEDIAEFFQALNAARVVFEVGTHSPWVQEVICGCGHEVLVANPRLMEGSKRRKRKNDRIDANKLARLGRVDPQSLHPMQHRSREVRQDLVVLRARDALVAARTELINATRGLVKSMGSRLPKCSSPSFAQKVEETVPVELRDALMPVVRMAAALSDCIQGYDEKIEKLGREKYEHTALLRQVKGVGPITSLAYVLTLENPDRFVKSRDVGPYLGLVPKQEDSGESQPQLGISKAGDTMMRRLLVGSAQYILGPFGPDTDLRRYGLRLCERGGKNAKKRAAVAVARKLAVLLHCLWVSGEVYEPLRQGMYATMTPAAAA

SEQ ID NO: 234315 - protein, 317 aa, unidentified
MSQEYTTFIGIDIGKFECVATLHGSKETHTFANTPEAIASYVQAHRDILSKSLVVLETTGGYEKQLLLYLIHHGVRVHRANTRKVKNFIRSYGTFAKTDALDAAALALYGAERYPKLSLYEENPYEQLRLLQERRQELVCMRTQEKNRLQAPGNTWMRGSFEKVLQVLEAEITALEKEMQTMIQGDPVLKEKVTLLMTIDGVGVLTAQNLLAQIPELGTLNKKQVASLAGVAPHPNQSGTKKGYTRTRGGRRQMRPTLFIAAFTAARSKARLGQFYQRLVAAGKPKMVALVAVMRKIIVIANARIKEAFPPLPEKTL

SEQ ID NO: 234316 - protein, 403 aa, unidentified
MCEADLPVKPRVGLLETRAACIIKKQTHNRRSAINYSNTLFVGLDVHKEAIAVAYVAEAPGAEVLSLGSIGTRQCDIDKLIRKLKGKASKLFFVYEAGPCGYWLYRYLTKHQLTCRVVAPALSPRKPGDRVKTDRRDAVQLARLMRSGDLTAVYVPAIEDEAIRDLSRARQDTMPDLKAAKYRLKAFLLRQDIRYEGRASWSPAHLRWLAEVVCPTPAQQIVFQEYVRTVSEHQDRLQRLESELQTAVKTWRWGPVVEAIQALRGVQFTVALTLIAELGDLTRFDNPRQLMSYLGLTPSEYSSGPMRRLGGITKAGNTHARRALIEGAWAYRYPAKVSRHLQLRLEKVPKAIQDISWKAQVRLCKRYRQLTARGKHANKVVVAIAREMAAFVWAIARVVQEAH

SEQ ID NO: 234317 - protein, 313 aa, unidentified
MENISQVYIGVDISKDHLDVCIHPLGRSLKIKNSEADIAKLAQELKSYTVASIGCEATGGYEKLLVKTLQDHSYNVWIIDPRRVKGFIVATGCKSKTDKIDAQKIAQFVAQNPRSFEAIDKSEAEEKVQALVDRKQDLMKFLVAEKTRFKHPSHAFHGANIKKFIALLEREIEKLDIQIQKLLQDDENLHRRASILESIPGIGTSSAAVLLSSLPELGKIGNNQIAALVGLAPFDNASGRYSGKKFIRGGRATPRNALYMCALTTIKHNPVLKAFYDHLIAQQKPFKVAIVAVMRKMIVLANALLRKNELCRV

SEQ ID NO: 234318 - protein, 412 aa, unidentified
MDILYPVCCGVDVHKTFLIATIITTKDGSLLPQYTQKRFSTFNSSLKKFAAWLIEHDCFHVCMESTGKYWTPVFNILEQQSIHTIIANPKWVRSVQGNKDDKKDSKRIAELFRLGMVPASFIPDKDTRILREYTRYISKLIAARSSEKNRLQNAFTVCNVALDSVVSDMFGKSATAITDYLVSDDTFSPEHCISLLQGSLKKKADLVLDSILGYDIEDVQKTRITLIRKHIDFINTLIDTLESNIDSMVVQYEEHIRRLCTVPGIKRTSAIKIISEIGVDMSQFASSRRLCSWAGLSPRRDESAGKKHSVHISRAGVYLKPALVQVALAAVKDKENPYYAKKYERISKRRGKKRAIIAIARMILTAVYAILSTGQVWHPTDLDRIKSLEQHQLEKQTQQAIRFLESQGFSVG

SEQ ID NO: 234319 - protein, 310 aa, unidentified
MERIFVGIDVAKQHLDIHVRTTDESFRLLRDEAGLGRLVERLRPLGPVLVVLEATGGYEVPVAAALGSAGLPVAVVNPRQIRDFARATGQLAKTDTLDARIIALFAEAVQPEARPLPTAQAQALGELVARRRQLTDMLGAESNRQQQAHDPRLQRRIATHIRWLTKALAELEADLDDTIRSSPLWRAQDNLLQSVPGVGGVTAFTLIADLPELGHLDRRKIAALVGIAPLNRDSGAWRGRRMIAGGRPTVRCVLYMAALTAIRFNPVIAHFYQRLTAAGRPKKVALIAAMRKLLTMLNAILRDQRPWQLA

SEQ ID NO: 234320 - protein, 342 aa, unidentified
MSEVSIIGVDIAKRVFQVHGARADGSVAFRKKLSRAQFVPFLAAQPFCIVAIEACATAHGLGREIEKIGHTVRLIPTIYVKPFVKRQKNDAADAEAIAEAASRPTMSFVAVKTQDQQARAMLFRTREMFVGQRTQMITALRGHLAEHGVVAPRGPAHVKRLVDALGDEHLTFPKMVRQLGCVYVEQIRMLDDRIADIDRTMRVEASQAEMTRRLQTMPGVGPITAMAVETFGPPIESFRRGRDFSAWLGFVPRQHSTGGKQRLGKTSKIGQRDIRRLLITGAMAVIRAASRYGASEGSWLERMLAKKPRMLVAIALANKMARRLWAMMTKQENYRNPAVVTA

SEQ ID NO: 234321 - protein, 369 aa, unidentified
MKTYTLKAVPTAGAVEPKNNNKAAKAKRILVGVDVHLRGYQAGRKIDNSAIGVVENFRSETELMLYVEKQLQQADEVVVVYEAGPLGYSLYRKLTARGVLCYVCAPDSSQQRKKRRKNNKIDARSLTSKLFNYLNGDQHALQLARVPSEAQEQQRMASRQHDQLVEERKRLGAKGNAMLLSQGLGSWSNWWRPKAWSQLSRVAPQWLLERLQIWVDVLKILDEKISQAKAALARACSGPRPKGVGALSQMQLQSEVLDWSLYSNRRKIACLAGMVPSEWSTGEKESRGSITKVGVPALRRIIVEMVWRMVLFQPQYQPVQKWQEVLKGPNPALKKKAVVAIGRQLMVDLWRLQTGRVTAQDLNLIMVEN

SEQ ID NO: 234322 - protein, 387 aa, unidentified
MQKPHDNSKVCRAAFVQDSTLVVVIEMSLTGWLVAGMIPGVDREPLKKIAPDPEELLRLLYRWRDEAIKAGKEITRISVAYETGRDSFWLARWLRARGIDAHVIHATSVAISREHRRAKTDRIDTAMLRRGFLGWLRGEPGHCSLAIVPTVAEEDAKRPHRERESLVQERTSTVNRMKSILIQFGVRNFNPVLRKASEKLDAVRTPEGIPLPPNAAAALRRHMERLRVIKEQIKAIEQTRLQRLQRDPADKMNAMVFLLAGIIGIGVETAEQLVHEILFRDLRDRKAVARYAGLTGSPDESGSRRREKGLSRSGNARVRTILIQLSWRLLKFQPGSELTLWYKKRTADAKGSRKPMIVAFARKLIIALWRYVNTGLLPQGFELKPTA

SEQ ID NO: 234323 - protein, 351 aa, unidentified
MNILAMDLAKSNTVVCFYDSEKSKGVYRKIKTLPQQIHDTIVEYGPDRVVFEICSIAGWVYDIASVLVNEVEVADVNGQAWRWKNVKSKTDRKDALKLAQLSSMGQLNCVHIPKKKVRQKRSLITFRQSLVGRRTQIKNSIHSILDKEGLGHVLPKGKKGWTKHSIKMLSNMSQKLEDCSEDSTWRGQLHIELAELERVSEKIAETEAKLDKLAKDDKHIRVLRTIKGVGPRLSEAVAAFLDEPNRFSSCKQVGSYAGLTPKQYQSGSMDRQGRISGQGNRLLRSLLVEVSWLGLRNNEWMRETYHRILRGSASRKKIAITAVARKLLVRCWAMMRDGTEWREVKQTKDAA

SEQ ID NO: 234324 - protein, 312 aa, unidentified
MYHMKEELVYLGVDIAKAYLDTAMGNEKSRFSNDALGHRQLINWIKQKPAKVQVICEPSGGYERALVRALVGAQLKISLVPANRVRQFARAKGILAKTDRIDAKLLCSFGEAMQPGTINASQLEQQHLRELESQRRHLTHLLVMEHNRAARMSDLCVCKMNRRLITQIKNQIEQLDLLIQGQIKASPELSTKAEKLTAISGVGARTAALLLAQLPELGQLNRREVAALVGVAPFNRDSGRMRGKRAIYGGRKPVRHGLYMAALVAAHHNPILRNFYLRLRAAGKPAKLALTATMRKLLIVLNSALKPDLSYA

SEQ ID NO: 234325 - protein, 460 aa, unidentified
MEQALAQRNPSISLKPGKSRAALTITHPNAADIDIGSASHFVAVPPDRDDEPVREFPSFTVDLNALADWLKACGVDTVAMESTGVYWIPLFELLESRGFTVLLINARHVKNVSGRKSDVLDCQWIQQLMTYGLLRGAFRPADQVCVLRSLWRQRGMLLRSQSRHVQHMQKALTQMNVQLANVISDVAGETGQKILRAIVAGERDGHVMAKMKNARIRASIDEIAKSLQGNWRAEHLFALKQALNGFDFIGTQLAECDREIEQQLQRLQTHEGEPAKGKQRGRARNAPKFDLRTQLFKMCGVDLTRIDGIDVTTALAVVSETGVDMSRFPSAGHFASWLGLCPGTRITGGKVMSGKTKRCANHAAQALRLAAAALRASQSALGAYFRRMCSRMDKPKAVTATAHKLARLIYTMLTKGEEYTDQGQDYYEERYRERVLRQLAQRATKMGMKLVAAEEPEAVL

SEQ ID NO: 234326 - protein, 292 aa, unidentified
MDHFAGLDVSVKDTSVCIVDETGRIVREVKVASEPDALLAVLTNPAYHFKRIGLEAGPLSQWLFSVLAAAGLPVICVETRHMRAVLKAQINKTDRNDARGIAQMMRVGLYRPVHVKTLRSQKLRMLLTHRKLLQSKAIAIENDLRGTLRNFGLKVGMVGTVKFEARIKELIANLPDLAELIEPLLIARQVIRDQFAILHRRLLAIVRDDEVCRRLMTVPGVGPVVALTYRATVDVHARFRNSKAVGAVLGLTPAKHQSGERDQTGGISRCGDEMMRMMLYEAAQVMLMRSVK

SEQ ID NO: 234327 - protein, 329 aa, unidentified
MAQERALWGLYTQEVGMSKRYVGIDVSRDTLDVHVRPTGEQWQVSNSPRGHVALARRLGGLNPELIVVEATGGLERPVSRALTGAGLPVAVVNPRQTRDFAKSTGRVAKTDALDASDLARYAEVVQPEPRTLADEQTQALAELVSRRRQVVKMAAGEKNRLRVCSGELRAGIEAHLAWLEGAQEELDREIAARVLSDPRWKARAELLMSVPGVGPVLSSTLVACVPELGQVGKKEIAALVGVAPFNRDSGKKRGKRRVSGGRGHVRSVLYMGTVAAVRCNPVLRPFYQKLVGAGKEKKVALTACMRRLIVILNAIAETGTPWDKARVTP

SEQ ID NO: 234328 - protein, 351 aa, unidentified
MEHQSQKKLYVGIDVHKKQWSVSIFTAVIHHKTFSQAPEPLALQTYLNKYFKQYQVVCAYEACKFGYWIHRELSSFGYTCLVVNPADIPTTNKESSEKTDPVDSRKIARALQAGLLRSIHVPTEATLGERQLFRYRKKLWADLVRVKNRIKDKLLFNGIRIPVEYDNSYWSKAFLKWLEEVKYESAHTRMTLDYLLEQYEMIYRHFLRVSIEVRKLHKLPKYKEDAKRLRQIPGIGPLTSVQLLIEIEDINRFKNFNHFNGYLGLKPMVHSSGEKDNKGYMTYRSHHALRSSLVECAWTAVQRDPVMLSCYEELIKKHTKKRAIVKIARKLASRIYRVLKEKEPYEIGLVK

SEQ ID NO: 234329 - protein, 376 aa, unidentified
MLSARPAGATTRPHRFERMAITTMAHPTPPRVTVGVDTHKDTHVAAARDQLGRRLGTTQVPASSAGYAQLLAWAHALGEVAAWGVEGTGSYGAGLARFLAGHGQRVVEVNRPDRQARRRRGKSDAVDADAAARAVQAGEATGVPKAQDGVVEMLRALRAARQTAVKARTQAINALKGLLVTAPAELREQLGGLPTGRLVGAAAELEVGTLTTPTAAVRLALRGLGQRYQHLDAEIALLTEQLDALTARHAPKLRDLHGVGPDCAAALLIAAGDNPRRLHSEAAFAALCGTSPVEASSGKTRRHRLNRGGDRQANAALHRVVVVRLRWHQPTRDYATRRTTQGKTSKEILRCLKRYVAREVFAVLRQIDDPGLAAAA

SEQ ID NO: 234330 - protein, 430 aa, unidentified
MTKRSSTPADAVLVAIDMSKHRQEVLIERPEGGRRRRMTIMATKADYDRLADELGSIGRPIVVGFEATGNYHRTLAHRLLSAGFELRLISSVALARTREALHNGWDKNDSKDAQVILHMLRIGATQRYVDPLAAGINDLQEMSKTHEAISKAKTQTWHRILTHYLPLYFPEIERFAGNSRSDWFLALLERFPTPASMTALGQEGFTREAWSLVGRKVSKARLINDIYETACASVALPINENSVAITMFRMVIAQARSLIRHRDEIERTAHAMLSDNRDYQLLRMIPGIGPINALTILAEAGDLRRFAHHRQFLKFCGLDLATCQSGTFRGRTKLSKYGNARLRRTFWMATQVAIRQRDNSFRDKLGRYVAGHGNDPDRRRKAMTALTAKMARVAHAVIKTGAEYRPFVERADTRWKDPSLLCREGATATL

SEQ ID NO: 234331 - protein, 316 aa, unidentified
MSEHESFVGIDVSKAQLDIASRPSGERWQVRNDPAGCSSLVERLLRLRPSLIVLEATGGFEAAAATALATAGLPVAVVNPRRVHDFAKATGQLAKTDPISAAVLAHFGEAIRPPIRPLPDATTKELQHWLARRHQLVEMLTAEQNRLPGTLGAVQAQIRELITCLRRQLHSADRKLKDLIQQSPVWREQEQLLRSAPGVGPVLATTLLADLPELGQLNRKEIAALVGVAPFNRDSGTWRGQRTIWGGRAPVRAVLYMAALVATRANPVIRVFYQRLLAAGKPKKVALTACMRKLLTILNAMMKHRTAWKPAAEMAA

SEQ ID NO: 234332 - protein, 594 aa, unidentified
MRAATTSAPLERIGVGIDTARYGHRVSFLRPDHKPAAKPLTVLENQAGYHELQLRLESLRQQHPQAQFHVRIDAAGQYAANLEHFLRGLPLPLSISIGEPKRNKDYQKAHFPKRTSDDTESQAMARFAVVELPEATLPVPPPMTMLREITSRLQAQVKQSTQAINRLHNLMARAFPELATLAKDFSASWLLRLLERYPTAERIANAQLRSIEQIPYLPADQAEALHLAAKASVASLRGEVPETMVRELVAQVQHSMQHEEKLRQLLEKAFAELPPSGHQQLQTISGIGPATAAVLTAKIIDMDRFVSPEHLVGYFGVFPEEDSSGVDKDGNPLPPGTLRMSHKGNDLVRGYLWNAARSAAQHNPAVRALYKRLRARGTRGDVALGHCMRKLLHLVFAVWKTNRPFDPNHFPWEPNDGAPPATPAPAASTTEAVPAARNDRAVGHTQAMPAEEVVATAKAKVEQATAPVNAAAPTAAEATPPARPWVDYAYLREQITMEQVLCFLGLFAGLRGSGQQRRGCCPVHGKAGTKERTFSVHLGKNVFQCFKAECGVHGNVLDLWAAVKGLPLYEAAVHLAETFKLRRNREEEPVGGTR

SEQ ID NO: 234333 - protein, 317 aa, unidentified
MEVTPIFVGIDVSKAQLDIEIRPSGEKESFANDKVGTKALVKRLAKIGPTLIVLEATGGYERQVTRALVSADLPAVVVNPRQVRDFAKATGQLAKTDSIDAGVLAHFAEVIRPQLRPLPDAVTLELRALTSRRRQILEMIAAENNRMEMTSKAVRKSIGAHVRWLEQELERANQELDRAIEQSPIWKENEELLRSAKGIGPVTSRTLLAELPELGTLDRKQISALVGVAPFNRDSGSLQGRRSIWGGRAPVRCALYMATLVATRRNPVIRDFYNRLIAKGKLFKVALVACMHKLLTILNSMIKHKTFWSETFSRQTT

SEQ ID NO: 234334 - protein, 372 aa, unidentified
MNYNTVYVGMDVHKESFSLCAYTIEAEKASHYQRTEADYKKVLNYLEFLRTIYGDDANFICGYEAGCFGYTLYHQLTANNVKCIILAPTTMLEQRSKKRIKTDRRDAEIIAKCLAQHNYSPVHIPTAKDEETKEFLRMRDDHKLALKKVKQQILAFCLRHNYRYDGKSHWTAAHLKWLKALTPEALYKEILDEYLLTYQTLSDKIERLDKRIEELATQDEYKEAVKKLCCFIGVKTHTALSVLVEVGDFKRFASAQHFASYLGLVPGEDSSGDDQNRLGITKAGNRHVRLLLTEASQCYARGQVGFKSKELKSRQSGNTPAVIAYADKANERLRRRYYKMVLNKYKKHNVAKTAIARELACFMWGMMTDNLA

SEQ ID NO: 234335 - protein, 312 aa, unidentified
MDAMVIGIDVSKDRLDVAVRPTGESLIFKRTGVGIEDLIARLGALSPKMVAIEATGGFEAVVAAGLAGAGLPVVVVNPAQVRAFAQALGKRAKTDLIDAAVIAHFAEATKPKLRQMPDEVTRLLADLVARRRQIVEMIAAEAQRTRRMTDKRLTKSVARLRKALEKELSELDGLIDDQIRGSAVWVEKEDLLASVPGVGKTIARTLIAELPELGSLDRRQIAALVGLAPWTRQSGQWRGKSFIGGGRKSVRSSLFVGAMVAARYNPQLKSFRDKLVAAGKPKLIALVAVARKLITILNAILRDRRPWQPIPA

SEQ ID NO: 234336 - protein, 320 aa, unidentified
MNSEQFVGIDVSKSCLDVAIYESNKVHQWANDDSGVKKLIKFLKPLPVTLIVLEATGGYEALAASMLNESGLPVVVANPRHVRNFAKATGALAKTDQIDARNIAHFASAVRPAWRELKDEQTKLLTALNARRRQIVDMLAAEKNRLHTAPKANKKNISQHIKWLEKNLKQINKDIQKAIQESPLWRETDDIIRSYKSMGPVSSATLLSDLPELGTLNRKKIAALVGLAPFNCDSGRYRGRRRIWGGRAHVRKTLFMAARSAIRFNPVIKSFYEKLRDAGKPHKVALTACMRKILITVNAMVKNKTYWSQGYKNLDFEHGC

SEQ ID NO: 234337 - protein, 500 aa, unidentified
MRRDDRDMVRKAPLESSFDAPSGERQNQALQPFPYGIGIDCHSKFIQVCVRTSLNSKDVFDKEFPVDWKELLAAREWAVNMLRVHVPCFRDGPDFRYTIESTGCYHLPVIRAWAGSPSVVNPLLAAPTRRKTDKLDARLLAYHAITGLWPASFLSSDQLQNLRVMWNERMDGRRAATRCSNRINNVVLRYGHTYGNSCKIMDSHGRAVAEDLVAGRVPLVAGFCPMGLTAEARDVVRGLIANFDVAEAHAKEFEQLATAYVKGTYWPSPAGPIHGKELLRILTSTPGIGPITAIAWLCEIGDPGRFENAKQVAAFCGCDPSLKVSAGKVTRHVRRKGNKKLHQALLQAGLRLVSKHGEPFGEWGYAIARRSEKGGMKRGAAAVARRLGCALWHVHRTACEFSYEKYKILETPEVPAVELEFMGITIAEAKLLRAAGYGTSAAVAEGWYRGINRVKGVGPKCLEKLRNWLAQNKTSQRGSFLLAQCSVAPGDLSAKTKPRS

SEQ ID NO: 234338 - protein, 436 aa, unidentified
MRGCRCSMIMGFTKPIEHFNPQRKKVITMNTLYVGIDVSSKSNVVFLMLPNGDKHSNFSVANSHEGSTLLVKKIYSALTSHSLDTVLIGLEATSVYGDNLVYFLREDATLAPFNRKIHVLNPKQVKKFHDTYNDLPKNDYVDSFVIADCLRFGRINKEVYMGDYRYKALQNLTRARFFAVQNLVKEKQRFMNVLFKKYSTMTQEKVFSDAFSTTALAVYDEFESAEALANMDLHELTDFIIEKGKNRFPDPDAVAKAIQKAARSSYRLPKTVNDSVNQVLSISITSMKALESQIKEFDKAIIALMELLPNVLISIPGIGPVYSAGIMAEIGDINRFDNQASLAKYAGLAWKQHQSGGFEAEVTRLIPSGNRFLKYYLCEAAFSLVRCDKEYSDFYHLKYKEVNRCQHKRALALTARKFVRLVFRLLKDNRLYCPAK

SEQ ID NO: 234339 - protein, 324 aa, unidentified
MASNENTPVFVGIDVSKANLDVSIRPTGESWQMSNELEGIGRLVEQLGQVSPALIILEATGGYEAACASALAVAGLPVAVINPRQARDFAKSLGRLAKTDRIDAAVLAHFGEAVRPEVRKLADEQTVQLQALIVRRRQLIEMLVAEKNRVALAHRTVRPHLLEHVNWLEKELDQIDKGLREQLQKSPIWRENDDLLRSVPGVGLVTSTTLLAELPELGKLNRKKIAALVGVAPYNCDSGQMHGKRAIWGGRATVRSALYMATLSGIRYNPVIRAHYQHLRHLGKSAKVALVACMRKLLTILNAIIFSKSTWKETLAAPKSMNTP

SEQ ID NO: 234340 - protein, 369 aa, unidentified
MGKYIEVFVAFDVAKKKHAVAIAEGGRTGEVRFLGDVENSPLPIERTIKRLAGRYDRLHICFEAGPTGYGLYRQIQALGHECMVVAPALIPKRSGERIKTNRRDAVTLARLHRAGELTGVWTPDAAHEAVRDLVRAREAATDDLRRKRQQLLSFLLRHSRIYSGGGHWTMAHRRWLANQKFEHAAQQIVFQEGIDAIEDAVQRLRRLEKQLALIVPEWSMAPVVEASQAMRGASFLVAVTFAAEIGDVRRFDTPRQLMAFLGLVPAERSTGDTIRRNGLTLAGNRRARRALIEAAWTYRYPARVSETLRARLEALPKPVRDIAWKAQIRLCARYRRLSATGKKLPVVVAAIAREIAAFLWAIGREVAPA

SEQ ID NO: 234341 - protein, 416 aa, unidentified
MEVVYPRCCGLDVHKKSISACVVIRAGGKPQKLEQRFGTYTGQLEDLAEWLEQHQVTHVVMEATGVYWKPVWNVLEGRFELLLVNPQHVKALSGKKFDRGDAAHLADLLQHGLLRGSYIPPPAIRQLRDLTRNRARTVQEAARIRNRIQKILEEANLKWSSVATDALGVSGRLILQQVVGGEQDAVKLADLARGRLRKKRDQLLLALAGKVTEHHRRMLDKLLRAVKTREDEIAEDEKDIREAVEPFRQAVQAWMQEPGIDAVTAWSLVAEMGPDMAPFATAEEAASWSCLCPGNHESAGKQANGRMRKGNPWLRSAICEAAWGAARTKNSYFHAQFNRIRARRGPQRALMAVAHSMIVVGFYLIKYDQQFRDLGADFFDRRNREHVMRRAVKRLNALGYRVTLEETPPEVLSGTA

SEQ ID NO: 234342 - protein, 407 aa, unidentified
MAMVCGLDLHRRQITFDTLETVSGEEWRGRIWQPDRARFRRWLREDVARRANGEVALAVEGCTGWRYVVEEITAAGFEAHVAEPADTQAARGRKHRAKTDRTDARLLRDLLAGGELPESWIPPEPVLEWRERVRLYKSLVDQRTVWCQRIHAELYHHGVAVLEGAIRSDKTRGMLADPHVQLSPAARERIAVGYRMIDLTDTEAQPLKKALTRFGTRQPACKALVEAQYGIGGLIAVAAWSELGDCRRFSRSDQAVRHTGLDVSVDASDRRRAGGYLSRQGPETLRWALYEAAKNASHHRSPDHDYYAQSRSVTAARSRRSRSLGSSRRPPTRTQSTAPSRWQPGSCRHPRGPVRVTSGSELSRSLAAAIKSSRPIRLVGGATRLCPSTGSARTAGNTTSIPSAPTE

SEQ ID NO: 234343 - protein, 330 aa, unidentified
MATQHWVGIDVSKAVLDVHVLPLGESWSVANDGRGIAALVKRVSSLPDALVILEATGGYQHEAAVELSRGGIAVAIVNPRQVKDFGRALGQLAKTDKISAEVLALFGERVRPEARFLSDSRQELLSALVQRRRQLLEMLTAEKNRLGMTRARVVQGEVRKHIQWLEKRLKDTDRQIDESIRESPLWRAKEDLLRSVPCIGPATTRTLLADLPELGHLNRKQISALVGVAPFARDSGTLRGRRSVWGGRAPVRAGLYMATLVGVRHNPTLRAHYQHLIAAGKCPKVALVACMRKLLVILNAILRTQTPWRELEPAGRQTSHSGLRLLAATP

SEQ ID NO: 234344 - protein, 318 aa, unidentified
MNTKINQSINVGVDTGKTQLDIHIRPLDLFFSVENNDKGIKKALKTIKSHSPERIVIEATGRLEMPFVLACAEAQLPIVRANPVHIKRFAGAIGRRAKNDRLDAELIAHYGEAIKPALTIIKPKNIRLMSDLVIRRNQLLSMQTMEKNRIQILPASLHSTIKPMLTTMKNQITKLEEKLVKLIEDSPEYQAKNTILQSVPGIGNIAAASIISNVPELGYITNKQAASLIGVAPITRESGRYKGKRVIQGGRSQVRTVLYMAMMSAMQCNPIFKATYARLLAAGKPKKVAIIACVRKMVVTLNSMLRDGAMWDENAAKN

SEQ ID NO: 234345 - protein, 412 aa, unidentified
MLKIVYPICCGMDVHKSFVVACIATTNDHGVTNYKSKRFSTFTGDLRRCADWLSENNCKDVCMESTGKYWIPIYNILEHTCNIVLAHPKYVKAIRGKKTDKRDAKWIADIFKHDLVSGSFIPPADIRQLRDLVRYHWKLTNFNVGEKNRAQNCLTVSNIKLDDVFSDVFGKAASAITTRLLESNEPFDVKPYLTKNIKKPIEQIQAAVDGEMCAEQAEKLRIIRSHMDSLELCKLNLESLILSTAEKYIPQLNLVMTAPGIQSFAAIGIISEIGVDMSVFPTSKHLCSWAGLTPQNNESAGKKKTTRISRAGAYIKPLLVQCALCAIRTKQFPEVRNRYLALKKRRGHKKAIIAIARMLLTAIYNILKWNEVYNSELYRKADRPPAHREVSVEEAVFILQRQGYLVTSPAVT

SEQ ID NO: 234346 - protein, 470 aa, unidentified
MSRRASVVQPSSLQSGSASSPPEANPWSEAPALLGLDVSQAEVVACLLLSDGREVTPRFAIPNNQPGAQALAERLVSLAKQHRFGRLRVGLESTSLYWFHLACFLKGSPILSHLSPEIYSFNPKLIHGLKKVYSDRGKTDSPEANAFFIAERMRVGRLPAPFEADLVFAPLQRLTRFRSHLAQTLAREKNYFLTFLFLKFSAFCQVDPFADSFGVTSSAFLDEFTTEQIVQAPLEELLGFLEANGRGHFEKPDELAKTLKRAAADSYELAHALKEPISLVLATTMATIRTLKSQLQEVDKTIARELLALPPARRTIDSIPGLGPVLTAGLVAEIGDIHRFENEASLAKFAGLVWHPHQSGEFTAEDTSLAKTGNAYLRYYLVEAANSVRLHCPEYRDYYQAKFAQSPKHAHKRALVLTARKLVRLIDALLRAGMVYRTPDQRQDRREDHTPPHSARPAVPKQASLRHSAG

SEQ ID NO: 234347 - protein, 363 aa, unidentified
MIESTTVAVGLDVHARSIRLAAVRADELVEERTLPYDEEAVERVLRQWPAVRCCYEAGPTGFGLYRHLVERGIECAVVAPGLVPQRPGDRVKTDPRDARKLARLLAGGLLEPIHVPTPELEAARDLVRAREDARLDRMRDRHRLSKFCLRHGRLLPTSSWTVVRRKWLGEQRFEYPAEQITFDTYLHAVDLVDRRIEALERSIRETAEQGPWRELVARLRCLRGIETLTALALVAEIGDFSRFRSAEEFMAFVGLVPSEHSSGERRRQGSITKVGNSHARRLLVESAWHARRRPTVGYELSRRHRGQDALVTERAWRCQQRLYQRWQRMAARGKPHQKIVVACARELGGFVWAIATDQPLRST

SEQ ID NO: 234348 - protein, 387 aa, unidentified
MPQPNDLSRSLVALDQNSTIIAVVELSQSSWLVGGVVPGIERQPCKKLDPSPERLLAMLHRWRDEAVRAGRTITRIALAFEAGRDGFWLARWLEARGVEAHVIHPSSVAVSREHRRAKTDRLDTELLKRGFLGWLRGERGHCSMARVPTIAEEDAKRPNRERECLVGERTRIVNRIKSTLARLGIRNFKPTLRKAAERLATVHTPEGMPLPPNTLAELQRDMARLGCVVSQIREIEQARQKRLEQQPETGPHAMVRLLARIVGVGVETADMLVHEVLSRPMRDRRAVARYAGLTGAPDESGAQRREQGLARAGNARVRRGMIQLAWRFLMFQKESALAVWYRARTADSRRGTRKTMIVALARKLVIALWRFVTTGEPLEGVVLRPAS

SEQ ID NO: 234349 - protein, 338 aa, unidentified
MDHYAGIDLHSNNSYTAIIDNDNKKVFKKKTKNDLRLVLHALKPYRDQVKGIVVESTYNWYWLVDGLIEEGYKIHLANPSAIKQYTGLKHSDDVTDAFHLANLLRLGILPTGYIYPKEERPVRDLLRKRTQLVHQRTLQIQSFQNLVSRNLGKSMKGTVVKKLSEDDVEHLFHDKHLVVAGKVSIATILFLAEKIKQLEKTLHKVAKLKDEYRLLMTVPGIQKILALTIMYETGPIERFAKVGNYASYCRCVGSRRLSNEKVKGKGNRKNGNKHLCWAYVEAAHHALWHYEYVERYYQRKMAKTNLIVARKTIAHKLARACYYIIRDQKEFDPTRVFV

SEQ ID NO: 234350 - protein, 309 aa, unidentified
MKEELVYLGVDIAKSYLDAAIGSEKRRFANERIGHRELIKWVKQLKVPVQVICESSGGYERALVQALAGAEVKVSLVQANRVRQFARAAGILAKTDRIDAKVLCAFGKMMRPETISASRLEQEHLRELESQRRHLTHLLVMEQNRAARVSDSCVRRLNRSLLNQIKKQIQRLDLLIKEHIEASPELSAKAQKLTAINGVGARTAALLLARMPELGQLNRREVAALVGVAPFNRDSGKMRGKRAIYGGRKPVRHGLYMAAVVAARHNPILHAFYLRLRAAGKPAKLALTATLRKLLIALNSALKPDLNYA

SEQ ID NO: 234351 - protein, 317 aa, unidentified
MNALVNQKEVSVGVDTGKDQLDIYIRPFDIHFSVSNSKNGIAEAIKKLRPYKPTRIVIEATGRLEHAFILACSKANLPFIVANPAHVRKFAGAKGQLAKTDKLDAELIAHYGEAMNPPLSTIKPAVMQLMSDLLSRRRQLMKMQTMEKNRLQSMPKNIAGLIKPMLTTIKNQLEKIDVKLLKVIENCDEYKLRNDILQSVPGIGNVVAFSLLSDMPELGYITNKEAASLVGVAPFNRESGRYKGQRRIRGGRYQVRTLMYMSMLSAIQCNPVFKTTYQRLVLAGKPKKLAIIACIRKMIIIVNTMLRHEVMWETKAA

SEQ ID NO: 234352 - protein, 410 aa, unidentified
MEVLYDRVAGLDIGKASLTVSVRTPGARRGRHQETRTFKTTTGSLAVMRDWLLEQGVTIAAMESTSTYWKPPFYCLEEVMEVWLLNAAHMKAVPGRKTDVRDAEWIAQLLEHGLLTPSFVPPPPIRRLRMLTRYRIQLHGDRTREIVRLELMLEDASIKLSTVASSLKTVSARAILGAMIDGETDPRVLAEMAKGKMRRKIPDLAQALEGHFDAHHAQLARSILDRIDRVEQAMVELDRAIEAACVPWAHQIELLQTIPGVGPKVAQVIIAETGGDMSKFPTAAHLASWAGLAPAIYESAGKRTPAGRRRGNKWLSAMLVEAAGSVGRMHGKNYLAVQHSRLTRRRGMGRAQIAVAHSILTTAYYMLKRDEPYRDLGPEWLAKRNEEAHTRRLVAQLEKLGHTVVIDPAA

SEQ ID NO: 234353 - protein, 316 aa, unidentified
MSDTLYVGIDVAKDSFDVASDPAGLTLSLTNDPTGRQHLLDALRNHPVALIVLEATGGYERSLVADLLGAGHKVVVANPRQVRDFARGIGQLAKTDRIDARVLAQFASMVKPEPRQKASEQAVNLAELVTRRRQLSDLMTQESNRLPHARHPDVRRSLKKSLRALEGQIDDLDKLIRQNIDSDDGLRRKDEIVQSFKGVGPGTSAMLLSHLPELGRLNRQQIAALAGLAPWDFKSGQWAGQSKIWGGRMPVRNMLYMAALSAIRSNPVIRQFYQRLESHGKLFKVSITACMRKMLVILNTLVRNDCLWSPPLPKNA

SEQ ID NO: 234354 - protein, 497 aa, unidentified
MPNKTSIYSRCNPQLLKLFERAGHPAKVLCVALDYAKAQHTALICNGLGDLLKSSFAVANTAPGVAQLLKEVRACAQSRKVRAEHVFFGGEDYPSYAENFVRQLRQEQFLVVRVNAWEAKQQRDNFQASSDSLDLLGIARCCLHRRGEPVRDLPQAYPNLRIATRDRDKLVRMRTAVSNRIHSYVDRLFAGFLSADQSGLEPFGRASLELMEDRFSPAQLRRRPRQALAQWLGRRGVTQAPEKADQLKQLAKRVLPPAPEQTAMLQQSLAQLVGLYRNLEQSIGRIDREVACWLARTPGAWLTSIPGFGITLAAGWTAELGPPSQWHSVRQLCSYSGVVPKSKQTGGPDKEPVVGAVQRRCNKRLKNVVLQAAEKVIQYGPEELRQTAQQLEARGAHTAFAIAKRLVRLGKYLAVTGTVYRPKALMDPDTPQAPLAAHYQQVWEKLLPKWKDKADLREVFAPEHPLGQWRKMVQDLYALELRLPQPRAAQKSSALTP

SEQ ID NO: 234355 - protein, 387 aa, unidentified
MIYVGIDIAKLNHFASALSSDGEVLIEPFKFTNDSDGFFMLLSKLSSFDKDSIVIGLESTAHYGNNLLMFLVPKGYKVCLINPIQTAVLRKNNIRKTKTDKVDTYIIAKTLMMNDFRYVTLQDIGLIQLKNLGRFRLKMVKQRTRLKIQLTSYVDQVFPELQYFFKSGIHHKGCYALLKEAPSPEAVASMHLTHLTHLLKTNSHGHFKKETALELRVLAQKSVGGGDKSLSIQIAQSIEQIELLDSQLKRTEQEITDIITSLDSVIMTIPGIGAVNGGMILGEIGDIKRFSSPSKLLAFAGLDPSVYQSGNFQAKRTRMSKRGSRAFRYALMNAAHNVVKNNATFKAYYDKKRDEGPSHYNALGHCAGKLVRIIHKMLTDDVTFDLD

SEQ ID NO: 234356 - protein, 332 aa, unidentified
MNLVSTLGIDLAKNTFSVHGVNTNGAVVLHRAVSRSKLSELVAQLPACLIGLEACSGAHEWARRFSGCGHTVKLMAPKFVAPYRKSGKNDDNDAEAICEAVARPNMRFVPVKSVQQQADLTLHRVRQGFIEERTATLNRIRGLLAEFGYVLANGAIQIRRQVPPLLDALPPRVARCVRDLLEHADRLAAKALEYEREIRIGIRHNDLARRAHTRQGIGPITASALVATVGNGHDFKNGRQFAAWLGLVPRQYSTGGKTRLGHITKRGDPYLRTLLVMGARAVLQRAAREHDSLSRWAMAVQARRGYHRACVAIAAKNARVAWALLAKESVAA

SEQ ID NO: 234357 - protein, 353 aa, unidentified
MKYVGLDWAYRTAQWCALAPGGEIAGEGRIAADRDGLARLVLELGDEVTACLEMMSGALWVRDQLVECGWQVEVADARKVKTVAPLAAKTDKVDARLLAELSRRELVPALWLPSLDERALRERLRRRMHLVRLRTSAKGRIFGLQTQWGVRVSLARLRRADGLTLLERAGVPEVWRRSVGECLALIDFLDARLEPLDAELRPFAKADPRAVLLDTIPGIAELLALTIAVEVGEISRFASPEKLVSYGRLAPRVRQSGQARPRSGPLSKSGSRLLGWAAVEAAQQAWRESNPWHGLYVDVSARSGNRNSAKAAVARKILIAAWHMLSRNQPFNPAPRSTRGDSVPASSRLALAA

SEQ ID NO: 234358 - protein, 331 aa, unidentified
MNVAGIDVSDQTVTLTISRDGRLGNAREFKNTPQGHATLINRLRKAKVSRVCLEATGQYHLDLALALDDAGFAVMVINPKAAKRFAEAMQTRNKTDAVDAAVLAEFARRMPFEPWQRPDDLALAIRACARRIAALNKLRTQTKNQLHAAQLTATTPDFLITDRQHSIAHREAQIEHLRRHVLDLIATDEELQQTVARLISVTGIAHASAIQLHGELLVMPEDMSAKQWVAMAGLDPRQHQSGSSVNKKPRISKAGNRYLRMALYMPALSAAQHDPQVRAYYQHLIETRGLKKLQAVCAVMRKLLHAIHAMLKNRTSFDSSRFYAPSETVAQ

SEQ ID NO: 234359 - protein, 386 aa, unidentified
MQKLNDLSRSLTPLKPDRTLIAVIEMSLSSWLVAGIVPGIERQPLKKLEVDESTLLKLLIRWREEAKKSGHSIERIAVAFEAGRDGFWLARWLRARDIEAHIIHASSVAVSREHRRAKTDRLDTELLKRAFLGWLRGERDHCKMVAIPTIKDEDAKRPNRERESLVGEQSRIVNRMKAALVRLGIRGFNPKLKKAVERLDGLRTPEGEPIPPNTLAELRRDMARRRLVSDQIRQIEDTRLERLEQAPRDGPHAMVRLLARVIGVGIETADMLVQEVLSRNMRDRRAIARYAGLTGSPDESGRKRREKGLARSGNARVRRGMIQLAWRFLMFQKDSTLAQWFRARTENARSARKTMIVALARKLLIGLWRLVREGVVPDGVVLRPVS

SEQ ID NO: 234360 - protein, 344 aa, unidentified
MITIGIDPHKASLTAVACDAAGHQLGHLRLAVSPASTRELRQWAVRWPQRQWAVEGATGLGRGIAQKLTTVGEDVIDVAPKLAAQARLLGTGNARKTDRIDAAAVAAVARHRTDLPRVQLEDQITELRLLTERRDDVVRERTRCLNRLHGLLRDMRPGGAPTGLHAKAAAELLRKIRPVTSCDTRRKAIARDLLSDLRRHDNTLTSVDVEISELVRASGSSLTDIHGVGVITAAKILALTGDIDRFASQDHFASYCGTAPIEASSGDIQRHRLSRRGNRQLNAAIHVIAVCQVRDAGPGQDHYRRKIASAKTSAEARRSLKRRLSNVIYRRIRADQQRALSLAI

SEQ ID NO: 234361 - protein, 343 aa, unidentified
MGTQIIGGVDTHLDVHVAAVLDEHGGLLGTASFATTPDGYDALGEWLSSFGEVALVGVEGTGSYGAGLTRRLRAAGMKVVEVDRPNRQRRRRAGKSDTHDAVSAARAAFAGDALGAPKLRQGNVEAIRVLRLARTSACRDRTKALNQMRALVTTAPDELRTQLRGLTIPKLLRTAAGFRPAGRADVISANRLALKTLARRALALAAEIQALDELLAPLVAETAPEMIERVGVGTDTAGALLVAAGENSSRIRNERSFARLCGAAPLDASSGKQQRHRLSRGGDRQANSALWRIVITRLSYDPATRAYLQRRCAQGKTKTEAIRCLKRYVARELYACLPPETLA

SEQ ID NO: 234362 - protein, 391 aa, unidentified
MVCVGIDVAKDKHDCCILDSDGTIRADCITIPNNMDGFKQLLQTIRDCTKRSDKIKVGLEATGHYSYNILGFLLDNDLAVYVMNPLHTNLYRKSLSLRKTKTDRVDARTIATMLLSDVDLKSYTDTAYHNEELKSLTRYRFDKVRERAKLKQSVSRLVTILFPELEKLVPSLHIASVYALLSEYPGAKQISEIHLTKLTNLLVTASKGRYGKDKAIRIRDAARTSIGSVMPAKSLELKHTIKLIRELTSEIDEIEVSIQKIMDELNPPILSIPGVGIQSAAMILAEIGDFSNFESPDKVLAYAGCSPSTYQSGKLTNCYAHMEKRGSRYLRYALYNATKYVCYWNPVFAEYLAKKRAEGKHYNVALSHATKKLVRLIYALQKSGKAYLTAA

SEQ ID NO: 234363 - protein, 319 aa, unidentified
MAQNDLIVVGIDVAKDKVDACIRRFTLRQTFPNTAQGHRKLVAWLRKYQVGKAVMEASGGYEREWRNVLHNAGIEVRIVDPRRVRSFAQSAGRLAKSDPIDAEMIAWFAETFSQAPGQIPDAAREELAALAKARIALVDLKIRLQAQDEHAAPEPARKAYTRILKNLAAEIAKLEAVISAKVKVTPEFAERAEIIESVPGLAQVTSPIIIAGMPELGQVSDEIAAALVGVAPYDDDSGKRRGERHIKDGRRWVRNALYMPCLGAATQSNPVLKAFYQRLLAKGKEPKVALVACMRKLIIILNTMLARRQKWNPGRHAMG

SEQ ID NO: 234364 - protein, 319 aa, unidentified
MNVVGIDVGKKSLHVSLLTGEQVYSKEFENTVSGLTSLKRWLSYRKISPAHVCLEASGGWSEGVALSLHEHGFLVSIVNPSRIKAFAQSELLRTKTDRVDAALIARFCRMHCPAEWVPPSPESQALQAFVRRQEVLIRLRADELNRSEAPMIHEEVKASIEATILSLNSELARIEKAIEQLFSAGGTLQTQRDLLTSIPGIGKTTAARILGEMPNIARFRDSKAVAAFAGLSPRHYESGSIRWPSRLSKSGNASLRRALYFPAVTAIRFNPIFRNFAARLKERGKSNMTIIAAVMRKLLVLSYAMLKSGSAFDMMRAGA

SEQ ID NO: 234365 - protein, 410 aa, unidentified
MDVIVERPAALDVHKAQVTACVRVPVSGGGRQAHLAEFSTTVAGLLALRDWLAAHRVSQVVMEATGVYWQPVWHILEDDFDLMLVNARHVKQVPGRKTDLSDAAWLCQLAEAGLLKANFVPPKPIRELRQLTRYRKTQIAERQREANRLHKALEDTNIKLDCVASDLLGVSGRAMLDALVAGTTDPHVLAELAKGRLRQKLPQLREALEGRFDAVHALLIGAILAHLDFLDEQIQRLSEAIEERLVPFVTAVELLCSIPGVQARTAQTILAEIGPDMHVFPSARHLASWAGQCPGNDRSAGKQRSGRTRRGSKWLNDALKDAAMSAARTHDSYLRTLYERQRARIGHAKAIGSVKHSILVAAWHILATGELYRDAGADYFTHRDPARATRRLVAQLERLGHTVTLQEAAA

SEQ ID NO: 234366 - protein, 366 aa, unidentified
MKKLTTTTMQRIHKQSEGLTIGLDLGDRSSFYCVLDEKGDVLLEGKVSTTPKAMRETFGAMPLSRIALETGTHSPWVSRLLSELGHEAIVAHARNVRLIGESRRKDDRLDAMTLARLVRVDPQLLRPVKHRSAEAQADLTVIRARAALVRTRTLLVNAARGLTKAYGERLRGCNARGMKPKAAQDLSPELKSALNPLMREIESLSERISEYDQMLQSMAVNRYPEAERLKQIKGVGTLIALTYMLTLEDPHRFRKSRDAACYVGLQPGRRNSGQSEPQMHISKEGDPYLRTLMVQAAHHILGPWGVDSDLRRWGLQLAEHGGKRGKKRATVAVARKLAVLLHRLWVSGDEYVPLRQNRSTTQLIAA

SEQ ID NO: 234367 - protein, 355 aa, unidentified
MDSKKYIGMDVHKESISIAVRNAAGKIVMECVIETKASMILQFFDGLRGDLHVTFEEGTWAAWLYDLLKPHVRKLVVCDPRKNASMREGNQSDQIDARRLAELLRLDHLSPVYHGEHGLRSLKELVRSYLTLSKDLGRVMSRVKAIYRSWAIPCSGKQVYAPRHRAQWLAKITEPGVRRRAEFYYQQLDALRTVRKEVRRELLAEAKKHPAWKRLCQIPAIGPIRSAVLLGILQTPHRFRSKRPLWTYSGWGIETQSSADHRRVDGQLERVKKQNSIRGLNRNCNHDLKNLFKGAAIVAASKPGPLQEFYSALLSKGLRPEMARLTLARKIATIVLIVWKRGVSFDAQHLKPQTA

SEQ ID NO: 234368 - protein, 386 aa, unidentified
MHQATTFPVPQRTSSRGDWATLFVALELSRSTWVATTLAPGSTKMSKHTLIDGDGRKLLDLLARLKSRAEQRIAAPVKVVTIHEVGLDGFWIHRLLEANGVESHVVDPASIAVPRRHRRAKTDAIDGETLLRTLMAWQRGEPRVCAMTVPPSPSEEDRRRITRERAKLLQERIRHTNRIRGLLFGQGITNYNPLHKNRREGLEELRTGDGRSVPAHLKSEILREIDRLELVVRQIGEVEAERDEMLRLAQPSSPAALLMRLKGIGPEFATVLYLEGLFRQFDNRRQLAAYAGLAPSPWKSGSIDHEQGISKTGNPRLRTTMVELAWMWVRYQPASALSCWFRQRVGSKRGRVRRISIVALARKLLIALSRYVSHGEIPAGAIIKAG

SEQ ID NO: 234369 - protein, 356 aa, unidentified
MKDAARRDLFHWVGMDVAKATFDAAMVLSHQHYPDTPLRDIPGATFARSREGVAKFLTWLDAFDVNPDEVRVVMEATGRYSSELAVWLLEIRPALCPAIAPPAYTAAFIKSLGVRNKTDRLEARALGFYGVERTPIPYEPMSAERAELRELNRYRDQLVRQRTAMKNRRHETCTSAFIQKNQTKRLRLLTGDITRVEQAMKELIEAHPELKRDMELLCTIYGIAFLTAATVLAELGDLRRFTYARQLTAFTGMSPSHRQSGTSIHGRSRLSKQGNPRIRQALYLSAMIAIKGDTPFRRIYRKLIAQGKPRMVALVAIMRKQLILMRAILISGKPYQPLGITPSTRGKQHKKRINFA

SEQ ID NO: 234370 - protein, 323 aa, unidentified
MNKYKETFGVDISKDVFDVYGSECGHSQFKNDEQGFKLFVKTLAADSLVVMEATGYYHYRLAQFLYKNGITVSVVNPLSVKRFIQMKLAKVKTDKSDAKAICNYGLSNEVPLYNALSDVQAECLQLFRLMDSYLKKRTATKNKLHGEEVLGIPSKYVYRSLKRDLKHLNKEVKGIEDRLLELVKQDQQQQLTLLTSIPGIGIKTALFLVVITDGFAKFERASQLCSYVGITPTIRESGSSVRGRSRISKVGNKKLRNLLFLCAFNACKHNKGCREIYERIVAKGKSKKLALIAVANKLLKQAFAIAKSGLPYDENYVSVLAKG

SEQ ID NO: 234371 - protein, 362 aa, unidentified
MLYLGIDQHHKQITVSIRDEEGTVILRRQVSTQPDKVRAFLDDVRRQSGDEGFLAVVEVCGFNDWLMELLPEFGCREVVLIHPDKRSKRKTDRRDASKLSELLWLNAQRLRASQKPQGLRRVVPPSVDDQQDRQLTSLRKRLGQQQTRTLNKIQNILRRRNLTWQQPTQTFQTRKVRQWLQRLELSEIDRLEMDQLLDQWALWEKQLEQLELRLEKRFPQSRRAQQLATVPGVSAYSALAIASRIGSVERFASPRSLANYFGLTPGCRNSGEATDRLGSITKDGSKMVRFMVGQIVLHVLRKDRGMREWYARIRRRRGSKIARVAVMRRLVTIFWHMLKHQEPYQPGGPPRLKLKRETTLSP

SEQ ID NO: 234372 - protein, 405 aa, unidentified
MGAEQVAHGWAGIDVGKAHHWVCLIDEAGSTLWSSKVVNDEAAILDAIAEVLARAQRVSWAVDITGTSSALLLALLTAHGQAATYVPGRTVNQMSTAYAGEAKTDARDAYVIAETVRLRGDLTPVDVPATLVAELRLLVTHRTDLVADRVRMINRLRDVLSGYFPSLEREFDYSTSRGAVVLLTGYQTPAAIRARGRARLTTWLRVRKVRNAEQIATAAVKAAQSQRTTVPGQDVAASIVAEIATALLGLDGRIRVVDARIGDTFHAHPQAQIIESMPGIGTILGAELIAAAGDLSRYVDAGHLASAAGLVPVPRDSGRRTGNLHRPVRYSRKLRRVFYLSAQTSMMREGPNRDFYLKKRGQGHGHVQALIALARRRVDVLWALLRDNRAFEITPPTREKLPQTA

SEQ ID NO: 234373 - protein, 365 aa, unidentified
MNEITTYVGIDAHKKDLFVAMLIGDAQTPVTWTVPNEPAAVRRLVRKLERESPGPVRVCYEAGPCGYVLQRQMTTARVTCQVIAPALIPRKPGERIKTNRRDARKLGELLRANVLTEVRPPTPEEEAVRDLCRARDDAREDRQRCRHRVGQFLLRRGLHFPRCHWTQTHRAWINSLVWTHAAERTLMEEYLLALDQIDARLLALDQQLTDIAETAPYREPVGWLRCFRGINTLSAMLILAELHDFRRFTSPRALMAYVGLVPSEASTGETHRRGHITRAGNALVRRLLIEAAWHYHHRPAIGAALLARRKGQPGRVIAIADRAQQRLCRRFRRLVEHHKPVPKVAVAIARELAGFLWAALQAPAV

SEQ ID NO: 234374 - protein, 308 aa, unidentified
MRYVGIDVSSRWLDVAISGDSICRFTYDQGGLRQLQRILVTQSPALVVMEATGGLERTVSKLLEAAGLPVAVVNPRQIRAFARASGRLAKTDAIDAQLIACFAEAIKPPVRHLSDSHEQELKDMDARRRQLVEMIIAERNRLRTASPTVGKQIRRHLGWLEKEAKALEEALSESLAVDPKLSGKARLLESVPGVGPVTSACLLAGLPELGTLNRRRIASLVGVAPFNRDSGTRCGKRIVWGGRAHVRSGLYMAALVATRYNPLIRTFYSRLVAAGKPKKVALVAAMRKLLTLLNSIIHSQRPWSATAE

SEQ ID NO: 234375 - protein, 455 aa, unidentified
MPKRTTGGGPDLKPVNLGAAAIDIGSKMHMAAVNPACTDTPVRAFGTFTQDLHELADWFKACGVTSVAMESTGVYWIPVYEILEQRGFAVILVNARYAKNVPGRKTDVSDAAWLRQLHSYGLLRGSFRPDAEIATLRAYLRQRERLVEYAAAHIQHMQKALMEMNLQLHHVVSDITGATGMRIIRAIVAGERNPDVLATYRDVRCHSSIETIRAALVGNDRHEHVFALTQSLELYDAYQAKMLDCDRKLEVLISALNTKGAGPVGKLAKPRVKTKQVNTPTFDVRTALYGVLGVDLTEIHGLGPSLALKLIGECGTDLRAWPSAKHFTSWLCLAPGNKISGGKVLSSRTRRSSSRAAALLRLAATTVGRSETALGAFYRRLSSRAGKSKAVTATARKIAVLFYNTLRHGISYRDPGADQYEQQYRSRVLANLQRRAKLLGFVLQAIPGDANPAVS

SEQ ID NO: 234376 - protein, 375 aa, unidentified
MSKANTLFIGLDVHKETSDVAWVSDKSAETVHYHGTIPTNLRSFDKLIKNQTAKTSKLCVIYEAGPCGFWLYRHLLRRGIECWVVAPALIPKAPGDRVKTDKRDAMTLARLARSGDLHSIYVPDERDEAIRDLIRCREDAMLDLRQARQRLKSFLLRHGHPCTGRQNWTEAYRRHLADINFPQSATKITFQHYIHIVTERYERLQRLELELQSLAESWRWYPLVQRLTVLRGVRFLSAMTLLAELGDLRRFASPRSLMNFVGLTPSEHSSGQRERRGGITKCGNSHARRILIESAWAYRFPARVSRELESRQQEHSVKLQTRSWEIQQRLCRRFHALKARGKEYNKVVTAVARELTGYIWDLAQGFDADMPQQAY

SEQ ID NO: 234377 - protein, 336 aa, unidentified
MFQLGIDVSKNTLDLCLLREGVKGRVKTRRLKNDVNAASSVITWLGKQQCAPADVHIIMEATGVYHEPLAYGLYKAGAKVSLANPHRSREFARGMDILTKNDQIDAYMLACYGALKEPEPWVPPPESIRYLSALLRRRDALVTDRSREKNRLEKCRATDIPPVIAESIENVLRNLSAEIERLDELLLTHLNQHPELKKDFDLLTSIKSVGFRLGLNMLVILRGHRFDTAGQLAAFLGVVPVEKSSGTSIRGKPKLSKNGPPEIRAKLYLASMCGLRFNPVMKAMYERLCLSGKAKMCVIGALMRKLVHLCYGVLKTQKPFDAEHLSSDAPSACKAA

SEQ ID NO: 234378 - protein, 403 aa, unidentified
MNAVGIDVSKGKSMVTILRPFGEIVSSPFEIKHTSSDIHSLIKLIHSIEGESRVVMEHTGRYYEALAHQLSAADLFVSAVNPKLVKDFNNDSLRKIKSDKADSVKIARYALDKWQSLEPYSITDELRAQLKVMNRQFHLYVKQKTAMKNNLIGLIDQTYPNANTYFNSPTRSDGSQKWVDFVSTYWHVDCIRKMSLNAFVEHYQNWCKRKKYAFNKSKAEEIYTKTKELVPVFPKNEITKHIIRQAIDQLNSTSVTVETIRTLMSETASKLPEYSIVMQFKGIGPSLGPQLMAEIGDVTRFTHKGALTAFAGVDPGVNESGSYAQKSVPTSKRGSSNLRKTLFQVMDVLIKTMPQDDPVYQFMDRKRTQGKPYYVYMTAGANKFLRIYYGRVKEYLSVLPDPS

SEQ ID NO: 234379 - protein, 344 aa, unidentified
MLIIGCDFHSGFQQLAVFDNQTGEVVEKKLLHAAEASEFYRGLSEPVRVGMESGTPCQWFRRLMGECGHELWIGDASRIRAAEVRRQKTDRRDAELILKLLLEGRFPRIWVPSEEERDVRQLLLDRHHRMRMRTRVKNQLQSLALNQGLQKGRKLWSEAGREQLRELPMMEHAGRRRDQLLRTVAELDGQIAELNGLVRSQAEGREDARRLMTHPGVGPQTALGMVLTLGEVGRFAGARQVASYLGLTPREHSSGGKQRLGHISKQGSSLMRFLLVEAGQSAVKGDAQLRRAYARLAAKKSRAVAKVMVARRLAVRLYWMLRKQWTYAELARHAGEPGSFCGEQ

SEQ ID NO: 234380 - protein, 352 aa, unidentified
MIIIGVDFHPQFQQMAWVDTDTGEFQEKRLAHREEAENFDRALAGKKVRVGMEARGHARWFERLLAELQFELWIGDAAEIRSKRVRQQKTDRQDARVILQLLLEDRFPQIWVPSWENRDLRPLLWHRHRMVQARTRIMNQLQAVALNEGLRCKKRLWRERGRQQLESFRLAPWASRRRRDLLELLDRLNPTIAELTQAIEQEAEKCPPAQRLRTHPGVGALTALGFVLIIGEAERFSCGKPVASYLGLVPLEDSSGNRRRLGHITKQGSSILRFLLVEAAQVTVRSLPQWRRKYFHLAMRRGRKIAKVAMARKLAVSLYWMWRKGWNYEQWTKFGSHAGQPGNRHGVQSNTE

SEQ ID NO: 234381 - protein, 312 aa, unidentified
MLEVNTIGLDLAKNVFQVHCGDASGSVLFRKKLRRDQVLGFLAMQPTCTVAMEACAGGHYWAREIAKLGHAVRLIAPGYVKPFVKRQKNDAADAEAICEAAQRPTMRFVAVKSEVQQAAVMVFRVRDLVVRQRTQTINAIRGHLAEFGLVAAQGLFHVTKLVAAIEKDSTIPEAARPILFLLVEQLRSLDARVAMLDREIAQRAREDAEARRLMTIPGIGPITATALAALAPSAQTFKRGRDFAAWLGLTPLQRSSGGKQKLGETSRMGERTLRRLLIIGASATVRWAARKGSMTDPWLSPWPTRWRASSGR

SEQ ID NO: 234382 - protein, 401 aa, unidentified
MQDTQQHDAVDVFVGVDVGKGQHHAVALDRNGKRLYNKALPNDEVKLRALIAELKTHGRLLFVVDQPSTIGALPVAVARAEGVLVAYLPGLAMRRIADLHAGEAKTDARDAAIIAEAARSMPHTLRSLRLADEQLAELTMLCGFDDDLAAQVTQTSNRIRGLLTQIHPALERVLGPRLDHPAVLDLLERYPSPAALAGTSEKTLANRLTKLAPRMGKGLAAEIVQALSEQAVIVPGTQAATIVMPRLAQQLAALRKQRDEVAAEVEQLVLAHPLWPVLTSMPGVGVRTAARLLTEVAHKAFASAAHLAAYAGLAPVTRRSGSSIRGEHPSRRGNKVLKRALFLSAFAALRDPVSRAYYSRKIQQGKRHNQALIALARRRCDVLFAMLRDGTIYQPKSAPTA

SEQ ID NO: 234383 - protein, 347 aa, unidentified
MKVTTVGIDLAKNVFQLHGVNEAGRPVIKKQLRRDQVAAFFINLPLCLIGMEACGSAHYWARKLEGFGHTVKLISPQFVKPYVKTNKNDAADAEAICEAVARPNMRFVPIKNIEQQSVLSLHRVRQGFVKARTAQANQIRGLLSEFGLIIPQGIGHIANRVPELIEDASNELPGSFRLLVQRLLNHLKELDTQVDELESQIVRWHRQSAASNKLAQVPGIGPITASALVASLGDAKNFDSGRQVAAWLGLVPKQHSSGGKQNLLGMSKRGDSYLRTLLIHGARSAIYHAGQKTDQNQTCKWINAIVIRRNKNVAAVALANKNARIVWALLTHDREFRPDYTRQTVGV

SEQ ID NO: 234384 - protein, 315 aa, unidentified
MVTGIDCSKDYFDIAVLKEGKVAFKGRFANNSKGFTDMLRHTQGSHVAMEATGPYYFQLARFLYDSGTRVSVVNPLVIRRFAQMRLSRAKTDKKDAMVIAAFVQMTSPKLWEPPTEAIQSIRNLETYLEGLKQRRHMLGSQLHAFEAAGTIDRLLYDEITEEVESHDKRIGEKERQIEILIKQHYAEMASNIRSVPGIGPRSVSMLIIATDGFGMFKNYKQVISYFGLAPRIYESGTSVKGKGHICKMGMGQVRKVLYMAAVSAIKCNKACKDLYERLRGKGKPYRVAIIAAVNKLIKQVFAIAKSGEPYKVQLS

SEQ ID NO: 234385 - protein, 377 aa, unidentified
MSDVTASIAPTDVRLWVSLDVHKFSIVAATLPPTGGKPEVSRIETTEKAIRRFIDRLGGPGGLAVCYEAGPGGFALWRLLSGMGVACDVVAPSLIPVRAGDRVKTDRRDAKKLVELQRAGLLRYVMAPSTETEGLRDLLRCRDDLRCARTAARHRVLKALLRHGRIFRDGKTTFTLKHRRWVNTQRLDDPLAQLALEQMLTHLDSIERQLDTLDAQLEQIAASERWQGQAQILTRFRGISTLTALGLIAEIGDFARFSHPRELASWLGITPSEYSSGDQQHRGHITKAGNRHARRLLVEVAWHYRHTPRRPASGPAPDERAWQAQIRLHHRYRHLTENGKRPTVVNIAIARELTGFLWAAMTDQPLTNNNQPQENAA

SEQ ID NO: 234386 - protein, 315 aa, unidentified
MTKRSVFVGIDISKAQLDVAVRPEGCWAVPHDARGIATAVTRLQALGPTLIVLEATGGVERPLVRALVAAAVPVVVINPRQVRDFAKATGRLAKTDQLDAAVLAHFAEVIRPAVRPVPEADTQALADLLARRRQVVDMLTAEQNRSSSASPAVRKRIQRHLHWLTAELGRVDDELDQAIRHSPIWREKDDLLRSVPGVGPVVTTTLLAGLPELGTLSHKHIAALVGVAPLNRDSGRWQGKRSVWGGRAQVRAVLYMGALVATRFNPVIRVFYQRLLAAGKAKKVALTACMRKLLTMLNAILKSGTPWRVAASQPA

SEQ ID NO: 234387 - protein, 309 aa, unidentified
MQATPHFVAVDVSKAMLDLASPQGAWRTPNTPSGLASLRRRLAKQERPWVVCEATGRHSRLLARQMHQAGIPVSIVNPRQIRDFARASGQLAKTDAIDAAVILRFAHAMQPPQTPPVPESRQRLAEQVVRRRQLVDMLAAEKQRLSELDDPDTVASIKDHLAFLKAQIEACSTRIETLIEADRELAEKASLLRTIPGIGATTAAVLLTEMPELGEADKKQIAALAGVAPMNRDSGQWRGQAHIKGGRMSVRCALYMASIVAIRFNPAIKTFYRRLRADGKPPKVAITAAMRKLLIIANTVVKQKQPWHS

SEQ ID NO: 234388 - protein, 340 aa, unidentified
MRNVTTIGLDIAKNVFQVHGVDAEGTAVIRQRLTRGRMLKFFTKLPPCLIGIEACATSHYWARELVALGHEVKLMPPQYVKPYVKRGKNDAADAEAICETVTRPTMRFVGIKSPEQQSAMMLHRVRLILNRQRTQLSNALRAHLAEFGVVAPIGRNGIDQLLDVIADPTDERVPADARICLEMLAAQLRIVKDQILENDRRILASARETELGRRLMEIPGVGPLLASAIVATVPDPAIFRSGRNLAAWIGLVPRQNSSGGKERLGGITKAGHQYLRQMLIVGAMAVVRYAERNGAKRPWLVQLLARRKTKIAAVALANKNARMIWAIMTSGERYREPQVA

SEQ ID NO: 234389 - protein, 318 aa, unidentified
MIYVGIDVSKDTLAIDAGDLYTGTIRNSKSALGKAIRTIRKAAGGRNARITYVAEHTGCYSLLVHIELAKAGEAVSMVDPKRVRHFAKVMAVAAKSDPLDAVVIRKFAEFAKPEPTPLPSENLVESRETIRSRSLLMKVKVMLGALASVTISATCKAALKTVIAAIDRQVDNLDGKLLELFKRADATTRRKVVEMEKIRGVGRLTAFSIATAVPEIGTLGPQRAASISGLAPFVRQSGKWKGYQKISAGRSEVRRALYMPAVCAIVHNEVLRKVYRHLTIDLRKPKKVAITAVMRKLIIHMDRVCAALPSAEATVAGE

SEQ ID NO: 234390 - protein, 335 aa, unidentified
MQVYGIDLSKEKFDVNFIDAKGKEKNREVKNAVVSISRFLSSVSEDSILCAEHTGVYGDILVYLCNQMNISIALVPGYTIKHSLGLLKGKSDPLDSKRIREYGERFSDKLEYAEYAEENFAELKQLYTLRNQLVKQRRALRTVDAGRGHLPMQSISVHNHIHAVFSSLDNEITSIEDEIEALIKANQDLNENYELAKSVFGIGPVIATDLLIKTGNFKTIDTHRKAASYAGVCPFPNTSGKMVGKSRTSPHADKKLKSLLYMGAKAVVKNNKEFRLYYQKKQLEGKPHYLIMNNVSNKLLRIVFSVVRNKTPYTSDHVCLDPREKNNNSSTKKVA

SEQ ID NO: 234391 - protein, 380 aa, unidentified
MRTVSGLDVHKDSIFMCILDGQGKKTEEKFGVTTREIKRMASVMHTHYVSDVCMESTGIYWIPVWRLLENDFGLHLVNPQFLKQLPGRKSDVKDAQWIATALLKELVRDSFVPDGNIQRLRQYGRRVNEINKDLVRCEQRIDMILQRCNIRLSNYVSRTKNKSYRKVVDALIAGETSADVLVRLIHGRTVNRHGKPAVHDALEGCICESDRDLLWQYTQTFDMLQIQKQQCLDAMVRMCKQLYPEAFSFLLTVPGVKLVSAAIIISEIGDNMELFATAAALVSWAGLRPRNDESAGKIKSRKITHGNKYLRKALMECANGAARTKGSVFYLRFWHLKGMKKHHNAIIVAIARQILTIIWTLLSKKENFDKTYQIKKKTAS

SEQ ID NO: 234392 - protein, 413 aa, unidentified
MERIVERCAGLDVHKSSVTACVRIPDESEGLHQEIREFATTTRGLLLLRDWLASFEVRLVGMEATGVYWKPIYYMLEDDFELWLLNARHLKNVPGRKTDVKDAEWICQLVEHGLVRPSFVPPKEIRELRNLTRYRKAQIEERTREVQRLEKVLQDAGIKLSSVATRVLGASGRAMLEALVGGTTDPEVLAELARGRLRSKLPALRDALEGSFSSHHALMVGKILAHIDYLDESVGDLSLEIERVIAPFSEQVELLDTIPGVNRRTAETLIAEIGVDMSRFPTHRHLASWAGMCPGNEESAGKRRSGKTRKGSKWLRSALTESARAAARSKGTYLAAHYARLRGRRGSKKAAVAVGHSILVICYHVLERSVPYEELGEDYFDRRRSSEAYAKRLVRKLERLGHKVALEPLPHSA

SEQ ID NO: 234393 - protein, 345 aa, unidentified
MQLHTIGIDLGKTVFHLVGLNPRGEVVVRKKFSRKQLLLFTANLQVELIGMEACGGSHFLGRALREQGHEVRLMPAQYVKPYVKTNKSDYIDAEAIAEAVGRPKMRFVPIKSDDQLDLQSLHRVRERWVMRRTAVINQIRGLLLERGITVRKGRRHIDAALPGILEDASNRLSGTLRVLLVQLKLELDHLQMRIDEVDATINKAAGENEVCRRLVAIPGIGPVTATAIIAAIGNGAAFKKGRGFSAWLGIVPGEYTTGGKQKLLGISKRGNSYLRKLFVQGARAVLQQSAKQSSGLSAWLAQLTPRLHSNVAAVALANKLARMAWAVLAKNEPYRPPIVVGAATA

SEQ ID NO: 234394 - protein, 414 aa, unidentified
MRIIYQRVAGLDVHKKVVVVAIIVQKADGSWHLERRSFRTMTADLLELSDWLMSHEITHVAMESTAEYWKPIFNILEPNFEVILVNAQHLSKVPGRKTDQSDAEWIAELMQHGLLKASFIPPVGQRELRELTRFRSTFVRERATLINRVQKVLESANIKLASVATNVMGVSGRAMLEALIKGQNSPEQMAEMAKGRLREKREELVKALEGRVKPHHRFVLAELLCQIDSLDETIARFDQEIEVYCRPFEQAVVLLDTIPGVARATAEAIVAEIGTDMSRFPSADHLAAWAGVAPGNNESAGKRRSGRTREGNKPLGSALNQAAHAAAHTRNTYLSAQYHRLAARRGSKKAIVALMHSILVMAYHMIQRNQPYHELGGNYFDQRRPEVTVDRLIKRIEKLGYTVTFQQFPTSAVV

SEQ ID NO: 234395 - protein, 345 aa, unidentified
MYNMLTGVDLAKKEIQVCVAKSNKIIRNMAMTPTAFSNWLATQKPMTVVFEACATSNYWYQCAREYGHDARLISAKLVSNIRQNQKTDKNDAEAVLQASQLSNVNFISGKSKVQQELQSLVRMHQLSVKHKVAYGNQLCSLLLEFNIKLSPTDTGLNSAIQSILEDAENGFSAIFRDALHTAWHQYLKSIELVKHYEQSVARASRASEACKNLMKIEGVGPTNAVNLYIALGCCELGVFKKARDAAACIGLTPIQHSSGGKVRLGSIGKNIRNSSLRANLVAGAMSAVNQAVKRDSRTKKDEWIKGLVERRGKRCAAVALANKTVRTAFSLLRNGTEYKAELLAA

SEQ ID NO: 234396 - protein, 369 aa, unidentified
MEERIKVYVGLDVHKDSIAIAVAEAGRSAGRLLGQIAHDVPKLLKALAKLGEPGALHVVYEAGPTGYGLQRALSAKGYRCEVIAPSLIPRRAGDRIKTDRRDCLRLAELARAGELRAVWIPNAGDEAIRELSRAREDAVNSRTQARHQLKAFLLRHEIRYSGKTAWTKSFYRWLGELNFGDASSQTAFTEYHLAVQAADQRLERLTKALTASVAGWRFEPVVQSLQALRGIDVVSAIGLVAEIGDIARFDHPRKLMAYLGLVPSEHSSGDRVRKGSITKTGNAHARRLLTEAAWNYRFTPRIGRAAQVRQEKLAEPIKAIAWKAQLRLSGRYARLNGRGVHHNKVCVAVARELAGFVWAIAHASAAQPH

SEQ ID NO: 234397 - protein, 366 aa, unidentified
MRKVMAGMDLHGNNVMVGIVDDQGARLQHRRLACELPEIIEFLAPYKAELESIAVESTFNWYWLVDGLRAAGFPVVLANPAKIDQYSGIKHADDKNDAYFLAELQRLKILPTGYVYDPELRPVRDLFRRRMSLMRQRTTLFLSAKSLHQRTTGRGLELRRLKAMEPEEAAALYTHPANQLIAQIQKEHIDSLDQSIRQIEKAVLKVALQQPYYQRLQTIPGVGIILGLTISMEVGDIARFAGPGQFASYCRTVDAKRISNGKTKGDNNQKCGNKYLAWAFVEAAHGARRFDATCRRWYDRKAGKKCTTVATKALACKLAKAAWYVMAKGTEYQAGKIFPGLTEPKAEEISGEQASASKGVGPNPED

SEQ ID NO: 234398 - protein, 354 aa, unidentified
MSQNPNAGIAIVGIDIGKNSFHIVGLDQRGAIVLRQKWSRGQVEARFANMPLCLVGMEACVGAHHLSRKLKEFGHDARLMPAKYVRPYSKGQKNDFRDAEAIAEAVQRPTMKFVATKTADQLDLQALHRVRERLVSQRTGIINQIRAFLLERGVAVRQGQRFLRAELPRILATPPNVLSPRMVRIIENLAGDWRRLDERVQNLSDEIEAVARQDAGCERLMSVPGIGPIISSAMVAAIGTGDGFSKGRDFAAWLGLVPRQMSTGDRTILGKISKRGNRYLRVLFVQAAWVVLIKPKSWERHGLKSWIEAAKKRLHPNVLAIALANKLARIAWGVLARGRNFEARTNTNATVQAA

SEQ ID NO: 234399 - protein, 434 aa, unidentified
MEEVEDEPLFCDRVAGIDIGKATVMVTIRVPSEARAKGRQQEAREFGTTRRELLALADWLRGWQVERAGMEATSDYWKPVLFTLEQEGFDCLLYQASQVKALPGRPKTDKLDSVWLARITEQGSLAGSFVPPEEIRRLRTHTRYRRKLVQMRTAQKERCEKLLEDAHLKLSSVISDIHGVSGRDMLRAIAAGERNPKVLAQMARGVMRSKIARLEQALDCSFFTGEHAFILTMMLDSIDSLTAQAGVLDARIADMCQPYQRQLEQLDEIPGFGITTAQDLIAEIGTDMNVFPTAGHLASYARQAPRVKESAGKRKGKNATGRGNPYIGGALGEASISAGRTQTFLGEKYRRLTRRMPKRKAQVAIMRSQLVIAHALLSDPDARYQDLGPDYYERKADIRRRARNHARALERLGYKVTLEAPDPETGEYLPVTTS

SEQ ID NO: 234400 - protein, 337 aa, unidentified
MSSVPVFVGLDYHDEGIEVNVMAAGGEILATRHCPNDWKAVVAVVPSNCRIVGAAIEACCGAADFAEELIQKAGWSVDLAHPGFVARMKQNPDKTDFGDARMLADLERVGYLPRVWLAPQELRQLRRLVRYRQQLAEERKNLKLRIGAALREDRIQRPAARPWTQAWIHWLTKTADLGEQSRWVIHRQLRKLEQTAQELTMVERRLAKLMANDPVVQKLLMQQGVGLITAVTLRAEIGRFDRFRTGKQLARFCGVTPRNASSGKRQADAGLIKAGNPQLRAVLIETAHRLMRFDARWVILGASLRHRTRSGSIAAAAVANRWVRWLFHQMQTIGEAA

SEQ ID NO: 234401 - protein, 346 aa, unidentified
MASTAPTADPVVGIDISARWFDAARGAELRRFPNTDAGIRACLRWLTAPGGAVRVGLEATGTYSLPLASALHAAGHTVFVCNPLSLARYRQATLARTKTDKLDAQCIARFCAAHALHPWAPASAAHQRLHVLVAARQTLVEQAHRLRNRQHAAGYPACPDLVRELQAPVLAALAAQVARIEQELARIAEADTPIGTDLRLLTTIPGLGLITAATLVASLPVARLATPKHVAAYVGLCPREKSSGVSVRGRSTIGSFGPAHLRRALYLPAIVAMRANPTLRAFAERLRAKGKPAKVVIVAVMRKLLLLAWTLLRSGRPFAQAPRPTPPGDSPRPPAPPPATTPPAGT

SEQ ID NO: 234402 - protein, 344 aa, unidentified
MEEYVGFDVSKEETAFCVMDKAGKILSQGKALSDPRSLFEALRDHTLCPDRIVLETGTMSAWLARELRGLGLAVDVIDARQAHAVMKLQHNKTDANDAVLLAEIARTGFCRPVSVNSEAAQVQRMLIKARTHLVRQRRDTENAIRGFLRALGIRFAKGSGKLAGRVREALEERPDLKVMIEPLLASVEALKTQIKRLDEDVVLKARGSPACRLLMTVGGVGPITALAFAATIDDAARFAKSRAVGAYLGLTSRRFQSGEMDYSGRISKHGDAMLRSLLYEAANSMLTVVRRAHPLKDWARRIRKRSSHKKACVALARKLAVIMHRMLVTGEPFRWPQIEAAATA

SEQ ID NO: 234403 - protein, 371 aa, unidentified
MNSILYVGMDVYKENYTLCCYSFDRDKVEYRQTVPSDYRLILKYLEQVHGKYLEEVEFICGYEAGCLGYSLYHQLTDHGVKCIILAPTTMGITNTNRVKTDRKDAANIARCLAFHTYSAVYVPDGEDNAVKEYLRMRDDQKLALKKIKQQITAFVLRLGKQYTGSKSLWTENHLKWLRGLDLTLLEKETLQEYLITYDYLTDKLERLDARIEELARNERYGERVRRLGCFIGIKPHTALSLLVEVGDFRRFEKAPNFAGFLGLVPGEDSSGGGRNRLAITKAGNSHLRRLLVESSQSYSRGTIGFKSKELKKRQEGNPPEVVAYADRANERLRRRYYRMTLKNGTKRNVAIVAVARELACFIWGMMTDEIA

SEQ ID NO: 234404 - protein, 327 aa, unidentified
MNDRQVVYVGIDVSKDSLSVDAGALFKGDVPNTPASIRGLVMKIRKRAGDGCVPHFCFESTGPYSEPLFLECCGVGAAASVLNPAKVRHYAEAMSESAKTDPIDARVIRLFAEARSPDPTPPPSAAAVALRKLVLARDALTKCVVQLSGTLEGASGGDAGSVLRSTVVQLRKKIKKLDRLIAEALKGDARLAGLAGALTGITGVGILSAAKVVALVPELGTLGRRRSAAIAGLAPFTRDSGKCKGKTFISGGRAEVRRTLFMPAMVAIRHNPVLKAAYQNLRKAGKAYKVALTAIMRRLFAHMDAVAAKWLRETAATASSAASTALP

SEQ ID NO: 234405 - protein, 357 aa, unidentified
MPAQSKAAKPSTQIAVIGIDIGKNVFHLIGLDKCGAIVLKAKCSRGQLENRLANLPPCLIGMEACVGSHHLSRRLIALGHDARLMPAQYVKPFLKGHKNDYRDAEASAEAVQRPTMRFVAAKTEEQLDLQALHRVRARLAAERTATINQIRAFLLERGIAMAQGIHRLRKALPDILAKATDALSPRMTRIIEALAADWRRPDERVEEVSTEIEMLARKEAPCQRLMTVPGIGPLISSATVATIGAGDLFSKGRDFSAWLGIVPKQLSTGGRTILGKISKRGNKYLRMLFVQAARVVLLKRVSWERYGLKSWIEAAAKRLHHNKLAIALANKLARIAWAVLHHGRNFEVKHEYTPQPA

SEQ ID NO: 234406 - protein, 296 aa, unidentified
MENFYFIGVDVLKKKLNFCVMFEGKVVHEEETSNHQGAIMSLLHHLEEDYGIASGQMLVCAEHTGQYTFPLVCACKAVECRLWLENAAEIKYSSGVQRGKSDKVDAKRIAIYASRFQDKVRYYERPTEDIERLKQLESERTLYVTDFAKYKGQMKDQKEYMPKSLYERKMKRLQALMDDLEEAIQSITDEMDEVIASCPVLFRQRELLMSIDGVGRVVATNMIIATEAFTRFDDPRKFNCYAGVAPFSYSSGSSQHSKARVSHRADKVMKRLLHLAAVAVTHRIGGELKKAKTRCP

SEQ ID NO: 234407 - protein, 443 aa, unidentified
MNTPHPYDLVIGLDRSDKKADLCLITTATGRRRSEIIDTAPEALWEWLLQLRQEHPQTRVGLCLEQPAVHLIAFLEAYEWITLYPINPITLQKYREAFVTSRAKDDAKDADYLADLLLTHHAKLKPWAPEDSPTRAVQQLVFHRRAVVDERTALTNRLMALLKSYFPQALVLCGEDLWRPLATAFLLKWPSLQTVQKAKPATLKQFYYLHGSRSARLLEQRLALVQKAVPVTDEMARIKSFTLRVQLVCRQLQLVQQSVTEFDRQMAAAYAAHPDRLIFASLPGAGPVLGPRLLASLGSQRDRFAAATDLQHYTGIAPVTKRSGGSCYIHRRYLCPKFHKQSFHEYAKESILWSRWAAAYYLQQRTKGSPHHTAVRALAFKWQRIIWRCWQDHKPYDEPTYEAALRRNGSDLVKLFDRVELGKSPFKKPVNNLKISVDGLPQR

SEQ ID NO: 234408 - protein, 317 aa, unidentified
MDQPPAADRFVGIDVSKGRVDVHVRPDATVFACTTDPEGLAVLVNRVTSLQPQLIAMEASGGYEGVVAAALAEAGLPVAIVNPRQVRKFAGAIGRLAKTDAIDAGVIAHFADAIRPAPKPMPDALMLRLRELLARRRQLVVMINAEKQRLAKAADKLAQRSFKTILRSLEAERVRIDRAIDKLIEDSPLFCAKQDLLKSVPGIGDVVARTLIVELPELGTVDRHQIAALAGVAPMNRDSGRYRGKRRIQGGRVEVRAPLFMACLVAIRHNPPLRSFYRRLRDAGKPARLAIVAVMRKLLTTLNAIIRDNKAWAFAQS

SEQ ID NO: 234409 - protein, 428 aa, unidentified
MKNRNDQKLKAITPGTLIVGVDIAKETQWARFVDYRGLELRKAFKFKNHKNGFDSILASIKEICKKRRLDNIIIGMEPTGHYWKPLANYLLIHEVNVVMVNPYHTKRAKELDDNSQTKSDKKDALTIARLVRDGRYYEVYMPQDIFAELRVLSNSRISLMKRSNALKNTITAVMDEYFPEIVTVFKYPLKGKAAMQILKSCPFPSLILELGIEGVLTEIKKAVKKTVGRKKAQQLVETAKSSIGVGYGLVSAKLRLGLMIEELELLTKQLEQLEKAMEKALADTGYGELILSIPGIGVVTAASLLGEIGDPMRFDHPRQICKMAGYNLIEDSSGKNKSKTKISKRGRKNLRSVLYQMARTMVAVNTEMKELYQYLKTRPNNPLKKKQALVVISKKIVTVIYNLIKKQTGYQAELVFNKFRKNQMKQVA

SEQ ID NO: 234410 - protein, 405 aa, unidentified
MDILIERACGMDVHKDSITACTMTPEGKEIQTFSTKTVFLLQLIDWIKKHGCTHVAMESTGVFWKPIVNLLEAEDIEFLVVNAQHMKALPGRKTDVKDAEWIAQLLRHGLLKASFIPNRVQRELRELVRYRRSIIEERARQHNRIQKVLEGANIKLGSVVSDIMGVSSKDMLNAIANGEEDPEKLAGLARRTMKKKKDELELALRGYVNPHQRMMLKTILAHIDFLTEQIEMLDQEVSQRVILHQEDIERLDSIPGIATRMAEQILAEIGTNIKDQFPSAAHLCSWAALVPGHNESAGKRKSSKGKKGNKYLKSALTEAAHSVGASKNYLGAMYRRTLARKGRKRAAIVVAHAMLRIAYYLLTRKEMYVDLGEDYFDKQKLGSIVRNSVRRLETLGYNVTISEVS

SEQ ID NO: 234411 - protein, 344 aa, unidentified
MPSIVGGLDIHRKQLTFDYMDTVTGEVSCGQIVPADRAHFRSWLTRFENPAEVAFAAEACTGWRYVAGELQRAGMEAHLAEPADTAAARGRKRRAKTDRADARLQRDLLMQGRLPECWMPPEHILECRALLELYHDLRTEHTAWVQRIHAVLFHQGAPAFHDLSRADAPAQLAELARGHLSPAGQVQIGIYLRMLAVLEAELAAVRHRLLAAARQLRGAKVLAESIYGVGPMTGLALTCWLGGAGRFSSARKAVRFAGLDITVYSSDGKRSPGHLSRQGPPVLRWAVYEAGKTHARLVAPDHGYYAAVKDRKDGKRAALSEARKIIRRACHILSELGDDALAAA

SEQ ID NO: 234412 - protein, 415 aa, unidentified
MSEQRWCAGVDWASESHHVFLTDGAGRKRGEKIFKHSGEGLAEMAAWLLSASGAESSSQISVAIETPHGPVVETLIERGFMVHAINPKQMDRFRDRFTLAGAKDDSRDAEVMASALRTDPHCFRLLAALDPTVIELREHSRIASELGAERNRLTNRLREQLWRYYPAMLDLEEDLGAEWLLDLWKIAPTPGKAAGIRVGTVANLLKRHRIRRLDAAHVLDVLRKPALKVAGGTVEAASAHIKTLIARLRLVNRQIKEANRQLDALTAKLVPTEEAGAGQQKQHDVEILASLPGVGRIVLATLLAEAWDGLKRRDYAALRSLTGVAPVTKKSGKSCIVIRRQACNNRLANAMYHWARIAIQNDAASRAKYAALRGRGHSHGRALRSVADRLLNVACAMLKNGALFNPSLEAQKTPC

SEQ ID NO: 234413 - protein, 342 aa, unidentified
MSKINVIGLDLAKNVFQVHGINEDGDVAVRKQLKRADVLRYFARLPPCLVGMEACMSAHYWWREISKFGHVVRLMAPALVKPYVRGNKNDRNDAAGICEAVQRPNMRFVAAKTPEQQAVLHLHHARQLLVQQRVALNNHLRAVLLEYGISLPVGVKVLAQALQALLEDGDNALPMLTRHLLAELKTAHDALNAHIQMIENQLQAWHQSNPMSLRLAQIPGIGLLTATALAATIGDIKAFKNARHLAAFLGLVPKQHSSGGKDKLLGISKRGDGYVRGLLIHGARAVMRHIQRRIKIGQASGNAWVEQCLQRMHVNKVIVALANKMARMAWAVLTHQQDYRAA

SEQ ID NO: 234414 - protein, 326 aa, unidentified
MSPDLQGRDWEMAAFSKTLGLDVSKRQLDGHFWPDGVSVSVGNNEAGFTALLRHLAERPVDAIAVEASGGYERKLVEAMRQAGFRVLVLQPRDVRLFAQMRRQHAKNDRLDARVIAEFAALFGEERPARSQVLERLAAYLTYYEQLSAAAAQAKTQLEGFVDDEVRALVSEQVKRLAADKRALLARIRALVEEDQDLDKQVKRLQSMPGIGFLNAVTLAVRVPELGRLTRHAIACLIGVAPFDDESGQHKGRRYCRGGRERVRTMLYMAATTAKRCNPLIKLFCERLKAAGKPHKLIIVAAMRKMIVTLNAMVRDNKEWEAMPHSP

SEQ ID NO: 234415 - protein, 342 aa, unidentified
MYYIGLDVHKKTISYCVKDAAGKIHQEGKIGSTRRELDAWINTLPQPRMIAMEATIFTGWIYDHLLPHAEKVKVAHPLMLRAIAAAKRKNDKIDASKIADCLRCDFLPECYMTSTEIRDRRRTLRYRGLLVKQMVQMKNRISGLLMETGASFNKQRLHKVGYFTELMSGNEEIDCVRPLLKLSRETINRSQKLDYALVSSLERDPLLSERLERLRTVPGVGPITALTWVLEIGDVARFQSIKNAISYCGLCGAEKRSADKVVRTPISKQRNKHIQQVLVEAAKLAPRYSHELSLIYEKEKQRGNRNRATLAVARKMVAWMVAVERRKQDFVPAEKRGGTAAA

SEQ ID NO: 234416 - protein, 340 aa, unidentified
MEPTIVAIDLAKHIFQVHFVEPDSGTIRSKPIKRAQLLPYFANLPPSRVVMEACGSAHYWARKFASFGHDVRLIAAQFVRPFVKSNKNDRADAAAIWEAAQRPGMRFVAIKTEEQQAMLALHRMRQQLVRFRVMQVNQLRGLLYEFGIVLPQGRCAGVAAAEVALAELAAQLPAMLVDSLQDQLSRLLTLDEQIARIEQRITAWRRSDEACRRISEIPGVGLLTATAAVAVIGNAQSFKSGREFAAYLGLVPRQNGSGGKVKLSGISKRGDVYLRTLLIHGARAVISSARHLPEHLKSMLARRPTNIVAVALANKMARIIWALLAYGRTYQVPVAPRMPA

SEQ ID NO: 234417 - protein, 344 aa, unidentified
MKLYVGLDVSMKETSICVVDKVGKVFREVKVATEPTAILAVLMDETLAIERIGLEAGAFSQWLYGALAEAGLPVVCVETRHMKAALSAQRNKTDRNDARGIAQMMRVGLYRPVHVKTLTSQKQRMLLTARQLLKAKAIDIEGDLRGTLRNFGLKVGVVGAAKFEARIRELIKDDADLAEIVEPVLIARRTLREQLGVLHRQLLELVRHDPVCRRLMTAPGVGPVVALTFRATVDVPSRFKNSKTVGAAFGLTPRRYQSGETDRMGAVSKCGDRMMRVMLFEAALALMVCSRKWSWLKAWGMKIARHRGMKRAIVAVARRLAVILHRMWVDGTEFRWTREQAVAA

SEQ ID NO: 234418 - protein, 446 aa, unidentified
MTDLKEHAQSFAAYIGLDWADKKHNWTMQTADGQRSRGELLHTPEAIDAWAAELAQRFGGRPVAITLEQARGALIAMLSKYGHLHLFIVDPSRLNYYRKSVSPSGAKSDPVDGDLILDFQRKHPELVRCLAPDTVETRSLQFLTEQRRALVNQHTRYVQVLTHWLKQVFPQILEWFDDVSTPLVGDLLKRWPDLVKLKKVRPETLLQFLHDHNCRSVERNQQRLKELRTAVAATHDTALLKTANLMIATTIEMLATLRTSIEQFDDQIHAVYETHPDRFLMESLPGAGKALEPRLIAAMGTDRGRFRSAADMACCFGIAPVTESSGNSRWVHWRWQCSKFIRQTFHEWAACTVRKDGWARDHYERQRAKGKGHHAAVRSVAFKWIRILYRCWRDRVPYSEQRYLEALTRAAGKGKPAVNAAEPSVGLPSVQWKNCGGFSKPTKLSS

SEQ ID NO: 234419 - protein, 403 aa, unidentified
MNAVGIDVSKGKSMVSIARPFGEIIAKPFNVPHTSTGMQDLLSRLATLPGDTRIIMEHTGRYYEPMAEKLSSAGFFVCAVNPKLIRDYGNNTLRKVKTDKADSLKIARYGLDNWQDLRQHTGMDKKREQLKLMNRQFDFYMKQKTAAKNNLIALIDQTYPGANTLFKSPARSDGSQKWVDFIASFWHADCVRKIGSKAFSERYHKWCLRNSYYFQPDKPEKILAASKELLPTLPKDAMTKLLVQQAVKQLNTISALVEQLRAEMNRLASELPEYPIVLAMCGVGPSLGPQIMAEIGDVTRFAHRGSLTAFAGVDPGVSQSGTFEAKSRHASKRGSAQLRKALFQVMTVLLKTAPQDDPVFCFLDKKRAEGKQYYVYMTAGMNKFLRIYYGRVKEYLASQSKPE

SEQ ID NO: 234420 - protein, 316 aa, unidentified
MNESAAQRINVGVDTGKDFLDIHVRPLNEYFRVSNDSKGISEAIKRLRKLSPERVVIEATGRYEAAFITACGKASLPFCLVNPIHVKRFAGAIGRKAKTDKLDAALIAHYSEVIRPALSSLKPDAIRLMADLVSRRNQLMDMQTSEKNRLQIMPKATQGSIKSVLLTIKKQIQKMDDELAALIENCPEYKAKSDLVQSMPGIGKVSAATLISYLPELGLLNSKEIAALVGVAPMNKESGRYKGKQVIQGGRSQVRTVLFMAMMSAMQCNPVFKRTYNRLVEAGKPKKVAIIACVRKMIVILNSMVRDGVMWEVKST

SEQ ID NO: 234421 - protein, 424 aa, unidentified
MNRTQNEKILQIKNETLIVGIDIGKDTHYARAFDFRGIELSKLLRFSNTSQGYESLENWMQEIMKEKGKAEAIVGFEPTGHYWFTLGDHLQRKRHRLGIVNPFHVKCTRELDDNSQTKNDKKDPKTIAMLVKDGRFREVYIPEDVYQELREAVSERERLVEQMISLSNQVIRWIDIRFPEFSKVFKKWSGLAALLTLKNFPTPAKVVTAGASGIVSVWGKEMKKASYKKAERLFRLASESIGRTAGSEAAEASLQNLLKQYEMVLQQIQEIEKLMQELLLKVPNASKLVDIKGIGMVTAAVIVSEIGGISRFKDPRQIQKMAGLSLRENSSGKHKGKTTISKRGRKRLREGLFKAIITMLATNHEFRMLHQRNLNREKNPLNKMESVIALCGKLIRVIFAILTKGNDYDAKKMIEDMSKSMKAA

SEQ ID NO: 234422 - protein, 326 aa, unidentified
MQGKEVSEQETEGEAYVGIDVCESWLEVHVLPAGKAFRVANTSQGQRQLKRRLVADKVVLIAIEATGKWHRQTHRSLHASGCRVAIVNPLRARLFAQAIGLLAKTDRLDARMLALFASNLAPSAKPPLSQAIEDLKELVQARDSAVGEQTALQNQLASAATTFLRRQLKRRLGRIAIDIAALAREILLQIKADEGFARRYAILVSIPGFGPIVAATLLAQLAELGECSDKQIAMLAGLAPVADDSGKRNGQRIIRSGRPAARRVLYLSALSATRCHAAMKDFYQRLTAAGKPPKLALVAVARKLLVLANALLSNDRVWQPLPPNHA

SEQ ID NO: 234423 - protein, 391 aa, unidentified
MPEDARRPAQAAIRTELRAIFVSLELSRRTWLITSLSPGGGEKMSKHSVPASDVAGLLRRFAELRRKTAARTGRDFPIIVIQEAGLDGFWIHRVLQSEGIESHVVDAASILTSRRRRRAKTDRVDGETLVRTLMAYKRGEPRVCSMARAPTPQEEDRRRVSRERRTLVGERVRHVNRIKGLLAAQGVFGYEPLRKHRRERLEELRTGDGRPLPLRLKAQIIRELDRLELLLEQLKTVEAERDTLLKPMPGETASPAAMLARLKGIGPQTAAVLWSEGLFRQFDNRRQVAAYAGLAPTPWQSGSIDHEQGVSKAGNPRLRTTMVELAWLWLQNQPTSALSLWFHERVRRLGGRVRKTIIVALARKLLIALWRYTTAGVVIEGAVMKPTPATI

SEQ ID NO: 234424 - protein, 463 aa, unidentified
MNKVRSAENDTDPALEENGLAVLRRNVAGIDVGSTSHWVCAPTVDGTAREVEQFGATTPELEKLAQWLKQRKVESVAMESTGVYWIPLHEVLERHGLEVVLVNTRELAHVPGRKKSDRIDCKWIQRLHSCGLLRGSFRPAEQVCMLRTLVREKANLAAERADWVRRMQKSLDQMNVRVHRAVSDTEGTTGMAIIQAIVKGERDPMQLAKWRDPACRKSVEEIAEQLSGHWREDHLFSLEQSLKMHAAIEERIQAYQTEIQRRLAEMERVDREGQQAPALKNKNKAKKIRQRREEPMRQALYRMSGVDLTAIDGVGVGVVEIVLTEYGSDLSCFPTEKQFVSHMTLAPKKPVSGGKPLKKKKRGSASSRVASALRSAALSLRHSQTALGAYFRHIQHRLGADVAAFATARKVATLIYRLLRWGHAYVDEGAEAYEQRYQAARINRLVSTAADLGYQLVAKPTNS

SEQ ID NO: 234425 - protein, 412 aa, unidentified
MSKIEITAVGIDVSKGKSTVAVRRPGGEIVMMPFTVLHTTEGLAELTNTLRSIGGEIRVVMEHTGMYWRPIALALKEGGFFVSVVNAMLIHDFSDNSIRKVKTDRADSLKIANYALTFWQDLRNYSVEDETRQMLKIQSRLYERTLNSSIALRNGLISLLDQTFSGANKLFDEQRTKAGHIKWVDFVRRFWHKDCVAASSLSSFADTFQKWCKRTGYHYSLSDAERIHGIARNSVATLTKNDSTKLIITQAVDSLNAVYDTLQILRNEMKHLASMLPEYEVVMAMQGAGPITGPQLMAEIGDVRRFTSKGALVAFAGVDAPPFQSGTFDSKSRHVSKRGSPHLRRVLFTICSVILQHSDHENAVFQFMDRKRAEGKHFYVYTVAGGAKFLRIYYAKVKEYLNSIDSRSDCVV

SEQ ID NO: 234426 - protein, 322 aa, unidentified
MSIYTDYFGIDISKETFDVVNKKGKHYQFLNDNRGFAKFKKIITDGSICVMEVTGIYHLRLAKFLYSKNIATAVVNPLRIKRFSQMLLRRNKTDKADACMICLYAQDQQVDLWKPAPKVIEQSKDIYQTMEQYIEFKAGLKNKLDALKVKKAASFLIDSVTNQIKVISESIDALQNELDSLVKIYNPVMLQNITSIVGIGQRTASLLIIATEGFQHFDSAKQVSSYFGLAPTETTSGTTINGSRQITKMGNPLVRKKLYMCSLQASRYNLSCVNLYQRLLAKGKPKKLALIAVANKLLKIVFAIAKSGLPYDRLYKSYMTIV

SEQ ID NO: 234427 - protein, 363 aa, unidentified
MERNRTSVGLDVHARSVVACGLDGETGQLFERRLCPDHGEVAGWVRSLPGPVGVCYEAGPTGFGLARFLTREGIDCQVVAPSKLQRPCGDRVKTDVRDARHLARLLHLGEIVAVTVPSVEQEAARDLVRAREDVRGDLMSARHRLSKLLLRHGLVYSGGQAWTGAHDRWLGVARQTVFDRPGLRWAFDTAYDTVLATTARRDRLDTAIAEMAADSEFTPVVVRLGCLRGVSTLTAFGLAVEIGDWSRLTGRTIGAYLGLAPTESSSGATRSQGGITKTGNGHARRLLIEAAWHHRPRYRPSAQLRRRQNQAAPGARDRAERANRRLHARWASFDARHKRPVVANTAVARELAGWSWSLAVLEE

SEQ ID NO: 234428 - protein, 505 aa, unidentified
MSAPSRKRLDLMASAGHVWQARFWWRLVGQHSSDLALEVFRQTVRLLVVRRRDRCWDDVPREVCGEHLTIRSPVVSSTLPRGSAQCRPGQEAGMLFVGDDWAEDHHDIEIVDEHGKVLARRRLPEGLEGVTRLHGLIAEKMPAEWVNLGPAEAAGRVKIGIETDRGSWVAALTSAGYEVFAINPLSVARYRERHSTSGAKSDTADAHLLAEIVRLDRAHHRPVAGDSDEGEAIKLTARTHQSLIWDRTRHVLRLRSTLREYFPVALLAFEDLDAPDALELLGRAPDPDQAARLSLTVITAALKRARRCRTEDRAKELRTVLRAQELRQPPVPQSAYAAVVASEVAIIGALNVQIDRLGGVVAEHFGRHRDAEIYASLPGLGAILGARVLGEFGDSPDQYADAKARKNYAGTSPITRASGTKKVVLARYTRNRRLGDALQQWAFCSMRGSPGAKAYYQQLRARKIGHQAALRQLANRLVGILHGCLKTHTTYDEHTAWAHILAATA

SEQ ID NO: 234429 - protein, 328 aa, unidentified
MKLQHIIGADLSKESIDFASYQFQTHLKIENSFNGFHQMLKWLKDQKISCSNVMIVMEHTGLYSYHMEAFLHKHRINFTKVSALAIKRSLGLVRGKNDKIDAQRIARYGFEKKDTLVIANQPNKLIERLGMLHSTRSRLVRHRSSLICAVKEYRNILRQSDVIITSQLGLIKSFTKQIKNIEAEINQLITKEQPVNQNFQLLKTIKGVGEVVATAAIVKTKNFTQFASARKFACYCGTAPFEHSSGKSIRRKTRVSHLADKEMKTLLDQSAKSAIQYDKELKSFYQRRIAIGKSKKSTINIVRNKILYRMFAVINRQTPFIDNYLQTA

SEQ ID NO: 234430 - protein, 372 aa, unidentified
MDERIKFFVGLDAHKDSTSVAACEAGREPARFVGTIGPDVQVLLKVLAKAGDPAQVSVVYEAGPTGYGLYRELCRRGYRCEIVAPSLIPRRAGDRIKNDRRDCARLAELSRSGELKPIWVPDEVQEAMRDLYRAREDAVGMRLKVRQQLKAFLLRHGRHYPGKTSWTKSYAHWVAEQRFEHLGERIALSEYQLAVQSAQERVQRLTDALEEAVKGWRFEPVVAALRALRGIDTVSAAGLVAEIGDINRFATARQLMGYLGLVPSEHSSGNSVRRGSITKTGNAHARRLLTEAAWNYRFPPRLSTTLRARSTSLPEPVRNHAWKAQLRLCARFNRLSSRGVQPNKVCVAVARELAGFVWAIAHQAGSVTTLTH

SEQ ID NO: 234431 - protein, 319 aa, unidentified
MNNIILGIDISKKTFDVALLNNHKVNTKKFSNDSKGFSTLKQWLVSKSIHDAHACMEATGGYEVSLAEYLYVNHFKVSVVNPACVKGFSMSRLSRVKTDKADCELIAYFCQAIQPDLWQPVPSHVQELQQWVRRLDSLITNKHQETRRLEGACNIISANIRIHIDFLDKQIEEIEELIFSHIKKHQDLNDRNTLLASIPGIGEKTIGVILAFLNVENFNSAKQLAAFVGLNPKPRQSGSSLRGVGRISKTGDANLRKAFYMPALTAMRFNPIIKNFSERLSNTGKSKMVIVIAAMRKLLHIIYGVLKNKTPFNRDIKTI

SEQ ID NO: 234432 - protein, 414 aa, unidentified
MDVLHERCAGLDISKKDAKVCVRTPSTKRRGSFTTETTTWGSTANAVLALLDHLLAAEVTLVVIEATSDYWKPFYYVLADDLNVILVNARQVKNLPGRKTDVSDAAWLAQLGAHGLVRPSFVPPQPVRELRDLTRARTTATRERSRVVQRLEKLLEDTGIKLSAVAADIMGVSGRAMLEALINGERDPQTLADMAKRRLRSKTPELTEALTGRFREHHAFLTRLHLDQYDQLTTMIDQLSGRIEEAMAPFRDALDLLDTIPGINQATAEVIIAETGGDMTRFASARHLASWAGVCPGHHESAGRTKNTKVRPGNPYLKGALGLAAFGAVRTKDTYLAARYRRLTARRGPLRALVAVEHSIITAIWHMLTDHKPYNELGGTYFTQRDPERATRRAITQLNQLGYTVTLNPMETAA

SEQ ID NO: 234433 - protein, 418 aa, unidentified
MTATDTTASTLLVAIDISKHRHEVLIGVPGKKRRRRLTITNTLDDFQRLASILTDYGLSVRIGFEATGNYHRPLAHHLGQAGFDLKLVSSVGLARTREALHNSWDKNDPKDAQVILHMLEIGAVQFFHDPLATGIADIQELSKTHEIVSRSKTELWHRILTHYLPLYFPEAERFHRSSRTDWFLAFLEKYPTPHMITSMSREAFVVDAWQVVGRKVSKERLLSDIYATAVGSVGLPVHPDSDAVRMFRLVLAEGRSLVRQRDEIEVRAVKLLSDHPDYQLLTTIPGIGPINALTILAEAGDLRRFRHHRQFLKFCGMDLATVQSGMFRGQSRISKYGNARLRRTLWMAGQVAVLKRTNSFRDKFERYIARDRHNAHLRRKAYTAIAAKMARTVHAVVKHGEPYRPFFEGVSPGGRTLV

SEQ ID NO: 234434 - protein, 271 aa, unidentified
MKVTTVGLDLAKSVFQVHGINAAGHREFNRQLRRGLVVETFARLEPCVVAMESCAGANHWARRLQALGHQVRLIAPQYVKPFVKTNKNDAADAQAICIAALQPEMRFVSPKNTEQQGVMALHAMRSGAMKARNAIANRLRGLLAEFGVIVPQGIGHVYKRVPEALEDASNELPGFLRVALQAEYEQLRLQEQHLQAMHSMLQRWERESVACRAVERIPGIGILGASALVASMGDVNAYANGRQVSAWTGIVPKQHSSGGKQRLLGISSVRR

SEQ ID NO: 234435 - protein, 416 aa, unidentified
MNAAGIDVSSRKSTVAVLRPFGEVVRVPFEVSHTAEGLASLVRQLKAIDGETRVVMEHTGRYYEAVANVLHEAGFFVSAVNPLLIKEYGGNSLRRVKTDKADAVKIARYALDNWAELRDYTPMDRIRYDLKTLNRQFHLASKQKTATSNNLIALLEQSFPGIHKCFDSPVRRDGTQKWVDFVHTFWHADCVRKRSLAAFTERYRKWCKRHGYNFKQSTVQEVYNLAKSAVVLVPKHDLTKVLVQEAANQLTIISKSVETYRAEMDRLASQLPEYPVVMGMYGVGDSLGPQLMAEIGDVRRFERKQSLVAFAGIDPMPNQSGEKNVRSNKASKRGSPYLRKALFNVMTCYLQKAPADEPVFQFLNRKRTEGKPYYVYMTAGANKFLRRYYGKVMEYLSTLENLPPVDLDSTGLLKHQ

SEQ ID NO: 234436 - protein, 355 aa, unidentified
MYGLKHQKEKRSMDHFAGLDVSVKKTSVCIVDDTGKIVREVKVASEPEALLAVLKNPAYQFKRIGLEAGPLSQWLYSALAEAGLPVICVETRHMRAVLKAQINKTDRNDARGMAQMMRVGLYRPVHVKTLRSQKLRMLLTHRQLLLSKAIALENDLRGTLRNFGLKVGMVGKVKFEARIRELVETLPDLAVLVEPMLIVRRVLREQIVILHRRLLAVVRDDEVCQRLMTTPGVGPVVSLTYRATVDIPARFRKSKSVGAVFGLTCAKYQSGEVDWDGRISRCGDEMMRTMLYEAAQAMLRSKKWSWLKAWAMQIARRSGIKKAIVALARRLAVILHRIWVDGTEFRWTREQAVAA

SEQ ID NO: 234437 - protein, 349 aa, unidentified
MSILGGLDVHRAQITFDWVDRDSGEARRGRITPATRAGVGAWLGELPGAGGGFAVEGGTGWRFVVEELQAAGLVAHLAEPAETSSLRGPKRRAKTDRTDARLLRELLEQDRLPSSWIPPTWILDLRTTVRLRKTLVDQRTAWQQRIHAALFHHGLPRPTQELLSRASRAWLEQVTMPPASRQALAVALRQIDGLDAELDPIDQWLRALARRQAGCRALMSHHYGIGAITAPTILAELGDARRFVGGDQVVRYMGLDITVYASDGKRSPGHLSRQGPEVLRWALFEAAKAAARPSSPDFAYYQQVKARQGGNRATLAVARKLARRVRHTLASLGDAALAPVEDLAVAEAA

SEQ ID NO: 234438 - protein, 451 aa, unidentified
MKKEVVKKSVVKIGTGLPVFNPHAAGIDIGDTLHCVAINDGKGGHEVKTTSAFTCDLHEIVDYCLNNGVTTAALESTGIYWLALYILLEEAGIDVYLVNAKHVKNVTGRKKDDTDAIWIQKLHTCGLLQKSFQPDNEIRKLRDYIRQRKNLILLGAYSVRRMQKSLELMNIKIHTVISDILGKTGMKMVKAIISGERDPSVLVTLCDPRIKATQEEIIKSVQGIWKEEYLFMLEQAVENYEFHQMQIKNCEEKIKQQLIKQVAIIKEGDITCLEEKKKSKATPKKNQFNFAVSPYLLAMAGVNLCKIPGINEVTALGFIAEVGLDMSKWKSPKHFAAWLNLTPNTKISGGRIISSKMMKKKNKAGQYLRQAASSLSTNKSPIGDFYRRMRGRLGGQGAALTTAHKLSRIIYTMLLKQTEYNAGMILDNQEKFREEKIKKLEKQIARLKQAS

SEQ ID NO: 234439 - protein, 457 aa, unidentified
MSRKSKPTKGIEEARPFAGMSRVNEEAAGVDIGATEIVVCVAGDENTQIVKAFGNYTVDLQAIGLWLQEHNVKSVAMESTGVYWLPLFEVLENMGFECLLISSRSLRRVSGRKSDIIDAQWIQTLHSYGLLEGSFRPPADLVALRTLLRHRAQLLEHRAPHILHMQKAMLQMNVQLSQALSDITGETGIAILRAIVAGERDPQKLAAYRDRNCKKSAEEIGQALTGTWRAEHLFTLKQSLELYDFYTRQVESCDAEIERLYALTRPDWEAGALKPPTAGKRNSHSKNAPGNQQAIRQHLKRISGVDISAVDGIGVLSAQTVIVECGTDLSQFPKEGNFCSWLGLAPKHEISGGKVLKNKTLKTKNRAGQAFRMAAQSVKNSDCVFGRMFRRFRARMDNRQATVATAHAIARVVYRMLKYKVEYEQIDVTEYEKQYAEQQVKYIKKKAAKLGFQLVPA

SEQ ID NO: 234440 - protein, 414 aa, unidentified
MSVAEEPTGTPPCAGVDWAKDDHAVCIVGAGGEALQRFMVSHDRAGLKDMVRRLLRSGVDEVGIERPDGPIVDALLMAGLTVLVISPGQVKSLRSRYGSAGNKDDRFDAYVLADVVRTDRRRLRPLERDTAATTALRTTVRARRDIVIHRVAVANQLRAHLQIVFPAAAGLFDKIDSDVSLQFLERFSTQGQADWLSPKRLGSWLASIGYSGGTDPAVIHARITAAPRGTTGPDAEILAGTTHAYVAVLRTLNMQIRTLAAGIAEQLDVHPDAKIFTSLPRSGSVRAARLLAEIGDARGRFPTASSLACLAGVAPSTRQSGKVKAVTFRWGANMELRDALCDFAGDSRHSNPWAAAVYAKAIARKCDHQHAVRILARAWAGIIWRCWQDNTTYDPANHGALQHLLNQDQQTVAA

SEQ ID NO: 234441 - protein, 411 aa, unidentified
METIVERPGALDVHKEQVTACVRVPIEGGGREQHIAEFPTTVAGLLTLRDWLGAHEVQQVTMEATGVFWKPVWAILEDEFELLLVNARHVKQVPGRKTDVSDAAWLCQLAEAGLLRSSFVPPKPIRALRNLTRYRKTQIQERQREANRLHKALEDTGIKLDCVASDILGVSGRAMLDALVAGTTDPEVLADLARGRLRSKLPALQEALEGRFDHLHAVWIGAILAHLDFLDEQIDTLTVTIGEQIVPFERAVELLCTTPGVQRRAAESLIAEIGLDMSVFPTAKHLASWTGQCPGNDQSAGKRRSGKTRNGSKWLDWTLEESALAAIRAKDVYLAAQYARLRPRRGHKKALGAIKHSILCAVWHMLSTGELYRDLGGDYFRRRDQERITKRLVTQLEALGHTVTLQEAAAA

SEQ ID NO: 234442 - protein, 400 aa, unidentified
MITNHADIDVFIGIDVGKHNHHTVALTRDGTQLLSKALPQNEAKLRALIDKLRLHGTLLVVVDQPATIGALPVAVAQAESITVAYLPGLAMRRIADLHPGEAKTDARDAGNIAEAARTMPHTLRGIRVSDENIAELSMLCGYDDDLAQQATATSNRIRGLLTQIHPGLEAVIGDHLDHPAMTALLMKYPTPKALRRAGTRRVQTLLRTHAPRAWKRWTSAIFTALDGQTVVVAGTDAAGIVLPQLARALAQTRTSRDEVFSRIEELVESHPLFELLTSMPAVGVRTTARILTEVVGKDFATAGHLASYAGLAPVTWRSGTSIRGDHSSHRGNKVLKRALFLSAFAALKDPLSRAYYDRKRAQGKKHNQALIALARRRCNVLFAMLRDGTYFHAPMETTVA

SEQ ID NO: 234443 - protein, 413 aa, unidentified
MGHKTAEVELHYERCCGLDVHKELIVACFRNGSKNTVMEFGATSKELQRLAEWLINVDCEMAVMESTGSYWKPVYNILELLGLDVMVSNAREVKNLPGRKTDVNDAEWMARLLAQGLLRPSYIPDRPQRELREVTRYRKSLTEERAREINRLGKMLEGANIKLTSVVDNVLGKNSRALLEAAIAGEPITGITIEGMLNGKIKGKAALLVDAMDGVLSKPQRLLIKAVLDHIDDMTRRISDLDDIIRGEMEKYNEAIRRLDTVPGIGPESAQTILAEIGLDMSQFPTAGHLAVWAGVCPGNNISAGKSKGGSTRKGNQTLKTTLVQCAQSATNTKGTFFRAQYDRLVVRRGKNRAKMAVAHSIIIAIWHMLKYESDFIELGGDYYTKFNPEKKINMYLKKLAELGWAPPVPAVA

SEQ ID NO: 234444 - protein, 341 aa, unidentified
MSEVSTIGLDLAKNVFQVHGADASGAVLVRKKLRRDQVLKFLAAQPACTVAMEACASGHYWAREIAKLGHEVRLIAPDYVKPFVRRQKNDAADAEAICEAAQRPTMRFVAVKSEEQQAAAVVFRARDLVVRQRTQIINAMRGHLAEFGIVAAKGPFHVAKLVTAIEDDRSGIPEMARPILRLLVEQLRSLDERVALLDRELARRAKEDAEAKRLMTIPGIGPITATALAALAPTAQAFKRGRDFAAWLGLTPLQRSTGGKQKLGETSRMGERTLRRLLIIGASAAVRWAMRKGSTADPWLARMLNRKPPMLVIVALANKTARIAWALIARGGTYRAPAAAK

SEQ ID NO: 234445 - protein, 391 aa, unidentified
MSLYFVGIDISKYKHDCCIISATDQKVISKFSIKNDKVGFEELITTFNSLSSPEDIRIGFESTAHYALNLELFLENAHHSFMEVNPVLIKEYKKSTTLRRTKTDSVDCESIARWLMTVEYKPHSKGFYHAYSLKSLTRLRDKLIRQRSFYLIKITNVLDHTFPEFKPFFNERLSKTALYLLENYGSAEKMARMNSASYEKLRSLSRGKFSPQQFLRLKELAANTVGVNNSIFDVELNSLLSLYKSLVKEINTIEKEINKLIEEVHPHYMSVPGIGPLSAAVIYSEYGDISNFTNPGQMLAFAGIEPGINESGTESHGGKMVKRGSSQLRYTLINCCLPLIRFDMTFATYYAKKRGEGKPHRVAITHVAKKLIRVIYALERQDIDFNAQKLR

SEQ ID NO: 234446 - protein, 325 aa, unidentified
MPRLNDLSRSLVTLEQDATLIAVIEMSLTSWLVAGIVPGVERQPLKKLGVDERALLKLLHRWREEAEKAGHRIKRIAVAFEAGRDGFWLARWLRAYGIEARVIHASSVAVSREHRRAKTDRLDTELLKRAFLGWLRGERDHCRMVAIPTIKDEDAKRPNRERESLVGEQSRIVNRMKAALIRLGIRGFNPKLKKAAERLDGLRTPEGDPIPPNTLAELRRDMVRRRLVSDQIRQIENARLERLEHASGDGPHAMVRLLARVIGVGTETADMLVQEVLSRNMRDRRAVARYAGLTGSPDESGKKRHEKGLARSGNAQSCPAITLQT

SEQ ID NO: 234447 - protein, 322 aa, unidentified
MSQPGSLCVDIDVSKAILDIAASSAIEQFSVGNDSDGFDAIIAELRMYAIALVLMKATGGLETAIVCALQAEGFELAVVNPRQARDFARAMGYLAKTDSIDARVLSQMAEVLNRHPERERFIRALPDTECQVLTAMVVRRRQLITMLVAERNRLHPAHPLNRKSINIIIKALEDELARLDADMNSHIHSHFKELAKRLSSIKGVGTMTAAALLAEVPEQGNLSRREISVLVGMVPVNRDSGTMRGRRTIFGGRAGVRTALYMAALVATRFNPVIKVFYMRLLAAGKPKKVALVTCIRKLLTILNAILRKNEEWNESYHHVAP

SEQ ID NO: 234448 - protein, 363 aa, unidentified
MTKNSTSKGIATVIGLDLADMESRYVGIDDRGSVVEEGTAATTQAGLEKMLRGRPESIVAIEAGTHSPWVSRLLGGLGHQVVVANPRQVALIYRSKRKSDRLDAMTLARLARSDPELLYPLTHRGEEAQVALGVLRSRAALVSARTNLINHVRGSVKSFGGRIPSCSAEAFAARAIEYVPAPLRAGLLPVVEEIASLTARIRSYDKEVARLISQEYREALVLQQVDGVGPITSLTYVLTIENPGRFATSRDVPAYLGLTPGRRQTGASDPAMRITKAGDVFLRRTLVQSAQYILGPFGKESDLRDWGLRIAGPPVEGRKGRRLGKKRAVIAVARKLAVLLHSLWTTGEVYEPRRQGVDLARAS

SEQ ID NO: 234449 - protein, 315 aa, unidentified
MSEIIVEKFVGVDVSKATLDIYIDPATEAMHVVYDDEGVAHVVNRLLKVAPTLIVVEATGGLEMRLASELAAKGLPVAVINPRQARDFAKATGQLAKTDQVDAVVLAAFARAIRPAVRPIKDADTRELDDLVTRRRQLIEMRVQETLRLGTASRIQSKSLKAHIAWLDKRIASLDDDSTKRLRASDAWRAKDDLLQGIPGVGAVTTLTLLAKCPELGTMNRRQIAALVGVAPLANDSGQHRGKRRIWGGRADVRTVLYMATISAMTWNSDIKAFATRLQQAGKLPKVVIVACMRKLLTIMNAMVKNNAQWAPKTA

SEQ ID NO: 234450 - protein, 400 aa, unidentified
MTSTDGIDVYLGLDVGKGEHHATALTPTGKKVFDKALPNNEPRLRELFTKLQAKHGTVLVVVDQPATVGALPLAVARDSNCRIAYLPGLTMRRIADLYPGEAKTDARDAHVIADAARTMPHTLRDLVPSDETVAELEMIAGFDDDLAGESTRIKNRLRGLLTQIHPSLERVLGPRLDHPAVLALLERHGSPSQLRKTGRRRLITLLRPKAPRMAERLVEDIFTALDEQTVVVPGTEAAALIVPSLATSLTAVLDQRKLLATRIEELLEAHPLSPVLTSMPGIGVRTAARILVDVGDARAFPSAGHLAAYAGLAPVTRASGSSIRGEHPSRRGNKQLKRAFYLAAFASLSQPESRAYYDRKRREGKHHVAALVALARRRIDVLFAMLRDGTLYQLPTAVTG

SEQ ID NO: 234451 - protein, 334 aa, unidentified
MENIALIGIDLGKNSFHIHCQDRRGKAVYRKKFTRPKLIEFLATCPATTIAMEACGGSHFMARKLEELGHSPKLISPQFVRPFVKSNKNDFVDAEAICEAASRPSMRFVQPRTESQQAMRALHRVRESLVQDKVKTTNQMHAFLLEFGISVPRGAAVISRLSTILEDNSLPLYLSQLLLKLQQHYHYLVEQIKDLESQLKRKLDEDEVGQRLLSIPCVGTLTASTISTEIGDGKQYASSRDFAAATGLVPRQYSTGGRTTLLGISKRGNKKIRTLLVQCARVFIQKLEHQSGKLADWVRDLLCRKSNFVVTCALANKLARIAWPLTARQQTYVA

SEQ ID NO: 234452 - protein, 339 aa, unidentified
MNRIVVGVDIAKRVFQLHWVQPETGEIVALQLKREKFLEHFANRSGCLIGMEACGGSQHWARSLQKLGHEVRLLSGRMVKPFVGGNKNDAADARAIWTAMQQPGIKAVAVKSEEQQAVLALHRMREQLVKFRTAQINGLRGLLTEYGEVMPQGRAGIKRDIPGALGRLSDRLPAMVIETLREQYARLGELDERISQIERRLRQWQREDPATLRIAAIPGVGLLSATAAVASMGDAKAFKSGREFAAWLGLVPRQTGTGGRVRLLGISKRGDKYLRTLLIHGARAVLTHSKSPPEWLSELLKRRSKNVAIVAMANKMARTIWALTAHESEYQSGYVRRPA

SEQ ID NO: 234453 - protein, 416 aa, unidentified
MEVGMVWVGVDVGRYSHALCAIDASGSVIWERKRVLNTTWAMRRVLVKLLHFLRGRSVHFAVEEPNGNAAALVRLLTADDLPVLLAQPLRVYRFHLALGQPHKTDPYDAQVIAQFARQNASKLPPVRILTPTTQSLRVLSRRADAVGKDMRRCVSRLRGVLAEYAPEWLACRVFRDWSSAAALGTLERYGCISKLQRTRVSQLGRALSKWTQGRYGETHARTLIEAFSEVALPPQLERAYHQVICSLVKQIRALVAERRHLLSLIRAQGEALPAIAELQSEFGYGPELSAIIVSEVGDMADFPSEARFATYCGVTPVKRKSGVSRGSSRLSRFTNKRLLRAVTQAARTAATHEPESRTYYQRKLAGRSDPHTKTLALIALARHRTRRLYKLLRRVSTQPEELVAQSIPDSPKKALD

SEQ ID NO: 234454 - protein, 361 aa, unidentified
MKKPTQHLITEVPRRQAKVEMTIGIDLGDVWSHYCTLNQDGDVVDRGRFRTTAKAIEKWFAPVPHARVAMEAGVHSIWISEQLEQLGHEVIVANVRELRAISHSDRKSDDVDAEKLARYARLDPEILRPISHRTVEQQEALTLIRARELLVRLRTAAVNAVRGLTKACGHRMPASSTKCFAQRGQAAMPPGLKLALGPILAQIAEMTLKIKQYDRDIQRMTQSEYAETQPMMTIHGVGHITALTFVLTLGDKTRFGRSRDVGCYLGLRPKRSQSGERDPQLGITKAGNAYLRSLLIECANHILRPHGRDSALRQWGLHLTARGGKQAKNKSVVAVARKLAVLLHHLWTTQEPYIPFYQQAA

SEQ ID NO: 234455 - protein, 419 aa, unidentified
MEVIVERPAALDVHKAQVTACVRVPGEDGVRVEQVQEFKTTVRGLLVLRDWLKSHRVTQVTMEATGVYWKPVWHVLEDDFELLLVNARHVKQVPGRKTDVKDAQWLCRLAEAGLLQSSFVPPKPIRELRQLTRYRKTQIAERQREANRLHKALEDTGIKLDCVASDILGVSGRAMLDALVKGTTDPDILAELARGRMRAKLPELREALEGRFEALHGLLIGSILQHLDFLDTQILTLSEAIEALLGPLAPGAGMLLCTIPGIGERTAQNVIAEIGLDMSVFPTAQHLASWAGQCPGNDQSAGKRRSGRTRKGSKWLNIALKEAAMAATSSRDSYLQALYRRKKAQGGHNKAIGAVKHSIICAIWHMLSTGELYRDLGPDHFHQRNPERQTRRLVDQLQRLGHVVTLEPTTTTAAELVAA

SEQ ID NO: 234456 - protein, 351 aa, unidentified
MNISHYIGFDVHKKHINFCIKTADGTVVEEGKLLAQRAALRNWAAQQVAAWHGAMEATLFSAWIYDTLKPYAACLEMAHPLMLKAIAASKKKNDTLDARKIADLVRCHLLPACYVATPQIRELRRLLRYRNLVVRESVRMQNKIAGLLMESGAPFHKQKLHGKKYFAQLLDTLEEVPDSVKDLLNLSRSAMEMFQATQKRLLGELLAHPQLRQRVERLASIRGVGPVTALTWALEVGDPFRFSCSAQAMSYCGLTSALQSSADKQQRGPISKQRNPWLQTALIEAAKLAPRWNPQLAALHARELERGHRNRATLAVARKLVAYLLAVDKSGQPFQLRPLTAVIVPAAQQAS

SEQ ID NO: 234457 - protein, 377 aa, unidentified
MHIRVGCEHPTLYREKIPNRRQPGAPWDSKARERAWAPPVIMHTSALSRGLKMPVSARKDRMNASPSLNLGIDLSKEWIDAYLLPEGETWHVDRTPHALTSWISQLPPGITLAVMEATGGFETIVAALLTDAGIPTAIVNPRQIRNFASALGTRAKTDAIDARVIARFAEAVKPTPRPLPSEQQAELGELVARRRQLVETSTAEKNRLATVQNPLVRRSIQTHIRWLSKQTKDIEDRIKNLIKNSPVWYAKKKILTAECGVGDVTAFTLLAELPEMGMLSRRQAASLAGLAPFTHASGKWRGKSFIQGGREPVRQVLYMYINSAVRFNPVISEFYHRLITQGKEKRVAHTACMRKLLTILNAMIRDNFIAPPNQLPA

SEQ ID NO: 234458 - protein, 455 aa, unidentified
MSRSKSPKVGDLPMVVAGAAAIDIGSTMHMAAVNPDADDRPVRAFGTFTGDLHDMARWFKACGVTSVAMESTGVYWIPAFEVLEEHGFQVILVNARYAKNVPGRKTDVNDAAWLQRLHSYGLLRGSFRPKAEVATLRAYMRQRERLIEYSASHIQHMQKALMEMNVQLHHVVSDITGATGMRIIRAIVAGERNPATLAEMRDVRCRATAETICSALTGNWRDEHIFALCQSLALFDFYQTKIVECDRKLEISLRELEGGNGHDTARLPKARTKTKQVNAPDFEVRSALYRVLGMDLTQIHGIGPSLALKLVGECGTDLAAWPSSKHFTSWLCLAPGNKISGGKLLSSKTRRSSSRAAALLRLAATTIGRTDTALGAFYRRLSARAGKAKAVTATARKLAVLFYNALRHGMAYHDPGAAQYEERYRSRVIGNLQRRAKAFGFALQELPEDQEMAVS

SEQ ID NO: 234459 - protein, 366 aa, unidentified
MAIYCGVDFHARQQTIAWCDTRDGEIHFADLAHHVRESVREFYSQFTDRVIVGFEASGYSAWFEEMITELGHEVWIGEAAEIRRRARSRQKTDRRDAELLLDLLLKDEFPRVHRPTLESREILRQLRYRQRLVRLRTAVINSLHAISLSAGVSLKAKLLTKAGRKRLLELRLSLAHEQQRTEWLELIDQLNKRIERIEKQIEEIAKADPRVQRVRTHPGLGLLNGLALVHTLWPVERFRNRRQVAAYIGLEPREYSSGEKQRFGRISKAGSRLLRHLLVEAVLTAVSPKNGDENLRRLYFRLTHRRDKARAKVAVARHLLIHAWIMLRDEINYAEFHRRGVEVRSARKVQRPEVPGDLIGRPTSGC

SEQ ID NO: 234460 - protein, 364 aa, unidentified
MLIIGCDYHPGFQQIAFVDTDTGELKERRLPHREQAEQFYRELKQQDLTVRVGMESSGHSRWFERLLDELGFELWIGDPAEIRTKRVRKQKTDRQDAQLLLRLMIEDRFPRVWVPDAENRDLRQLLWHRHRLVQMRTRVMNQLHVVPLNEGLQRKKALWRPAGRKELESIALAPWAGRRRKDLLDLLDQLTPKIQELTRALEEEVEKRPVTRLLMTHPGVGPLTALAYELVIGTPERFHCGKQLASYVGLVPEEKSSGDRRRLGHISKQGNVLLRFLLVEAAQVTVRSQQEWRSKFFHLAMRRGRKIAKVAMARKLAVHLYWMWRQGLDYGQTQKLGSHAGEPGNRDGVQSNTDVMIGHPAPNK

SEQ ID NO: 234461 - protein, 290 aa, unidentified
MKLTVIGMDIAKHVFQLHAVNANTGEIERIKLKRSQVTDFLAQRERSLIAIEACGSAHRWARELQKLGHEVKLISVRSVRPFVLRNKTDAADARAIWTAVQQPEARFVAIKSEQQQTILALHRIRAQLMKFRIMQTNALRGLLYEFGEVLPEGSREFAEKISGALAKIANRLPAILIDSLREQWARVQATDKEIAVLERRLKVALCDNQECQKIAEIPGVGLLTATAAVAAIGDAKTFRSGREFAAWLGLVPKQTGTGGHVRQLGISKRGDTYLRTLLIHGARSVIIKGA

SEQ ID NO: 234462 - protein, 345 aa, unidentified
MTQYKRIAIDTSKAVFTVHGIDQQDRPVLRINLRRAQMIPFFAKLPRTEIAMEACGSAHHWGRELTALGHEVRLIPPQYVKPYVKRGRNDRNDAEAICEASGRPGMHFVPVKSVSQQAESMVLKVRESLVGQRTQLINALRGHAAEFGIIIGKGVSKIGPLLTVIEQEASLPSEAKAMAALLGQQIADLDAKIKEIDAKLTTMHKANAVSQRLATIPGVGPITALTLALAVDPKAFESGRHFAAWAGLTPKEHSTGGKQRMGGISRAGNERLRVLLVTGATSVIQAAMKPGSQQMTDWLRALLQRKPRKLVALALANKMARMAWAMMSRGEVYRRPVTAIGAAAR

SEQ ID NO: 234463 - protein, 343 aa, unidentified
MPHYVGLDVSQKTTAICVVDEQGKRLWRGVCATDPGAISARVSQHAGVDAKVGIETGSMTPWLVHGLRSAGLDVQCLDARKVKAALQMQLNKTDENDAEGLAQIMRTGWYRAVHVKSLDAHRARALLGARAQLVGMTTRLSNMIRGVLKTFGLLPGAGRGLRFDRKVEALLESAPEIALVVRPLLATWRQLREQIAVFDKAVLQQVRADPICRLLMTVPGIGALSSLMYVSTVENPSRFSRSRAVGAHLGLTPRRYQSGETDRSGHISRCGDGLARTLMYEAAIVILHRVKRPLHLKDWAEAIERRSGSGKARVALARKLSVILHSVWRSGEPFRWSAPVMAA

SEQ ID NO: 234464 - protein, 329 aa, unidentified
MKVQHIIGADLSKKSIDLVCHLLHTHIQIENSIAGFKDLLQWMCKQNVNSSETMIVMEHTGLYSFCFESFLHKHQIAFCKVNALAIKRSIGLVRGKTDKLDAARIAAYGYEKKDKLAIDVPVSDVLKRLQMLHSTRERLVRHRASLTCAIKEYKHIGISEKDIIMQTQLQLIKNFDKQIEKLMAEIEAIINEQEPLKQNFHLLQSIKGVGKILALTAIIKTHNFTRFANARKFACFCGTAPFPHDSGTSIKKRTRVSHLADKRMKSLLDLSAKSAIQYDKELREYYLKRTEGGKSKMSTINVVRNKILYRMFAVIKRQTPFSENYLQAA

SEQ ID NO: 234465 - protein, 355 aa, unidentified
MDSKKYIGMDVHQATISIAVMDSRGKVVMDSVIETKAATILEFIQGVRGALWVTFEEGTCAAWLYELLKPHVAMVVVCYPRNKALLKVGNKHDRIDARKLAELLRGGLLSPVYHEGASVRTLTELARSYLTITKDLTRVRNRIKGLYRSWAIPCAGQKVYSPRYRSAWLKQLTEAGVQRRAEWLYQQLDDLQPLRREARRELVAESHKHPANKILCEVPWLGPIRVALLIALIQTPHRFRTKRQLWAYSGLALRTRVSGEYRVTGDQLQRVKRQPSLRGLNENHNHELKALFKSTATRASTAAGPFGDFYAALLATGMRPTMARLTVARKIAAIILTIWKKGDRFDPEHLKRQAA

SEQ ID NO: 234466 - protein, 496 aa, unidentified
MNPTKKEVLAMAKRKKSTFERLRDGEKLKQWERKEVERQFRAEDPGWEVVHRDVAGIDVGSESHFAAVDPKLALPSVREFGSWTAGLQTMADWFKQCGVKRVVMQTTGVYWIAAQEVMEGNGFQVAVVDARGTKNLPGRKSDVQECQWLRKLDRFGLLRESFQAPEAIRGIRTTWRLRQRWVSDAGRSIQQMQKALTTMNVQLANTISDVSGVTGLAIIRAIVGGERDPWKLAQLRARNIQASEEEIARSLEGNWREDVLFELGEVLEAYDFQQQRIVKCDEQLKKYMGTQPTREVGGGVEVTGEEVAEGPKQGGRKKKGPRKPRKNQPAFHLEAELKRVMGVDLTRIDGVKVMTAQTIYAEVGADLSDFPTESHFASWLMLAPKRDVSGGKVIKHLSFKGSNRVANSLKMAAESLKDSDSYLGARYRSLRGRLGGVRAVKAMARYLSCLIYRMLTKGEAYVDRGAAYFEKKRQDRDLVYLRRKAAALGLQLVAAV

SEQ ID NO: 234467 - protein, 417 aa, unidentified
MSNPLLVGVDVHRKTNTVCLMDGQGQEVAPRFTVENNRPGTEDFVRQVAAAVAAGDYDAIHIAAEATGLYWWHFFQTLAQDPFLNQWPVELYPLNPRLTANFKKTYIDLDKTDPIDAFVIADRLRLGRDLPAPFRYEERYFPLRCLTRYRFHVVHNLAREKAYCLAIIYLKASEYTRQDKRPFSNVFGAASRAILQEFASIEEIAAIPFDELVEFIDLKGKRRFPDPTENARKLKLVAQDSYPLPETLARPVNLILRMSLKHISFLERQEKRLASAIAERMETIPHTLDTIPGFGPVFSGGIIAEIGNLARFDYHQAKVAKYAGFKWRKIGSADFEAEETRLTRTGNRYLRYYFCEAANQVRMRDPEYAAYYERKYREVRKHQHKRAIVLTARKLVRLVVRLLTTNQPYRPRRRWQR

SEQ ID NO: 234468 - protein, 441 aa, unidentified
MDNIDDVGVFLGLDVGKSAHHGHGLTPAGKKVFDKQLPNSEPKLRAVFDKLAAKFGTVLVIVDQPASIGALPLTVARAAGCKVAYLPGLSMRRIADLYPGEAKTDAKDAAVIADAARTMPHTLRSLELTDEITAELTVLVGFDQDLAAEATRTSNRIRGLLTQFHPSLERVLGPRLDHPAVTWLLERYGSPAALRKAGRRKLIEVIRPKAPRMAQRLIDEVFDALDEQTVVVPGTGTLDLVIPSLARSLAAVHEQRRALEAQIGQLLEAHPLSAVLTSIPGVAVRTAATLLVTVGDGTSFPTAAHLASYAGLAPTTKSSGPRSTANTRHEAATGNSNARCSCRRSPRCTIPPPAPTTTDAGPEERPTPRHFSAWPASGSTCCSRSCATAPSTNPEPHASLDERHRGTPPGRGTPPASRRRRLSRCRAAPRPAPARSAGDGR

SEQ ID NO: 234469 - protein, 448 aa, unidentified
MPHLPQAQAQSTPNAETAEFDWYVGIDCGGATHQVCVLDAPGQRVGERAVAHSGLELTAFVAWLHELAGPSLARVAVALETPHGGPVALCLEHGAAVFTINPKQLERFRERASAAGAKDDRRDAFVAASALRTDRAAFHRLAPEAAALVQVRELSRVSDELREEAARLSNRLRAQLERYFPQLLTVVPAADEPWLWALLTQAPTPAAAARLSERRLTRLLRDYRIRRLSGADVRALLQAPALPVAPGTTEAVSAHVALLVPQLELVTRQHRACLAQLEAALTALAGPEDDPPAPAAPNADEGAGPEPRGADRLGPVVRLLRSLPGVGVGVAGVLLAEAAPALLAADYHALRTHGGAAPVTKQSGKQRLVVMRYACNHRLRTALFHWARVSIQHDTAAHQYYAALRARGHSHARTLRSLADRWLRILTAMLTTGTAYDASRFAVSAPTP

SEQ ID NO: 234470 - protein, 401 aa, unidentified
MQEFQQHDAVDVFIGVDVGKGQHHAVALGRNGKRLYNKALPNDEAKLRALIGELKVHGRLLFVVDQPATIGALPVAVARDEGVLVAYLPGLAMRRIADLHAGEAKTDARDAAIIAEAARSMPHTLRSLRLADEPLAELTMLCGFDDDLAAQITQTSNRIRGLLTQIHPALERVLGPRLDHPAVLDLLERYPSPAALAATSEKTLANRLTKLAPRMGKGLAAEVVQALGEQAVIVPGTQAATIVMPRLAQQLASLRKQRDDIAAEVERLVLAHPLWPVLTSMPGVGVRTAARLLTEVAHKAFASAGHLAAYAGLAPVTRRSGSSIRGEHPSRRGNKVLKRALFLSAFAALRDPISRAYYARKVQQGKRHNQALIALARRRCDVLFAMLRDGTFYEPKSAPNA

SEQ ID NO: 234471 - protein, 340 aa, unidentified
MNQSMTIGIDLAKHVFFVAALDGSGKPPRRKKLRRHEVLSFLANHPGAVVGMEACSGAHHWAREIRALGHSVQLLPAQHVKAYLRGQKNDYNDALAIAEAVQHGRIRCVEIKTVDQQLDQSLHRLRQALVTEQTGLINRTRALLAEHGVDLPEGKHRFRQAVIAQLEDAQNGLPWRLRELLGRQYQLFIALEQELAWYEREIKTKAAENEACQRLMSVPGYGPIVSSAFYGWLGSGQQFRCGRDVAAALGLVPKQYSTGGKTVLGGISKRGDRHLRALLVHGARAVARYAKERDDRPSRWVCSLIERRGYNKAVVALANKLARIGWAVVVRGQPYQAIAA

SEQ ID NO: 234472 - protein, 354 aa, unidentified
MFHVGLDIHTKHIAICALDEKGQVVHRSQVRTIQDLVRVLTGLPDRCEVCYEASCGYGHFHDLLRPLATRVLVAHPGQLRLIFRSKHKNDRNDAERLAKLLYLGEAPAVHVPSLEVRTWRELINCRSQVIAKRTRAKNTVRALLRSAGVTPPKSPGLWSKKGLAWLRQLDLPTASQQLRRDLLEEIEGLIRPVRRVEQQLNRQAGQTGAVARLRSIPGVGIRTAEAMAAFIDDPQRFGDAKAVGCYFGLVPCQDQSGDKNRLGHITREGAPVVRQLVAEAAWQAQRRSPTVRAYFERVQRDDPQRKKIALVATAHYLVRVMWAMLKRGTDWQEGPALATASGAAAGGDPAPEVD

SEQ ID NO: 234473 - protein, 412 aa, unidentified
MTATNQFATHVGLDWADKKHDVCVQFKNGERVFHVIEHTAEALDVWLTELHQKVKGRIAIALELKKGPVVYALQKYPFITVFPVHALSLARYRQAFSPSGAKDDPQDAELALELMLRYPQKIKAIEPDNADIRLLQQLVEQRRQLVEDKRRFVNRLINTLKQYYPQPLEWFSHRGSLLLCELLIRWPSLQQLKRARHDTIRNFLNAKGGRAMALTEQRVVSIDNAIPLTTDPSVIEANALMATALATQIKVVSEIIKTYDERIETLFDTLPDSGLFKSLPGMGPCMGPRMLAALGDNRDRFNSAEEIQNYAGIAPVTERSGQKSWVHWRWLCAKFVRQTFVEWAAKTVNSSYWARLYYQGLREKGKSHQSAIRALAFKWIRIIYRCWKTRTQYDEAKYLLALEARRSPLLKP

SEQ ID NO: 234474 - protein, 320 aa, unidentified
MSGIITVGLDVAQNVFQVHGASCAGRAVLRSKPRRAQVLEFFSQLPSCVVAMEACGGAHVWGREIGKLGHDVRLIPPASVKPFVKRQKNDAADAEAICEAAQRPTMRFVPVKSEETQGAAMVFRIRERLIRQRTQAINALRGHLGEFGQVVPQGAANAAKLIAIVEGSDSGLPADAVPTLKVLIAALARLEAEIGKLDTEIARRAKENEVARRLMTVHSPMSLGPLAFHGLIIGPLIATAIATRAPPPEHFRKARDFAAWLGLVPRQHSTGGKQRLGATTKMGERSLRRLLIIGANSVIIKRHVHAAARPGTWLGGMLTR

SEQ ID NO: 234475 - protein, 439 aa, unidentified
MTNSGLRYVGLDVHKRVVEACIVDHAGSVVRRERFVLNRRTLELFATKILRPADHVALEATTNCWAVADALRSHVARVLVSNPMATKAIAQAKVKTDKVDAHVLAQLLRCDFLPEVWQPDEATRKLRELTGRRSTLVGQRTAMRNRIHSVLAMRLIEAPAKLFNAEGLQWLETVELDTQGRMLVDSDLRQLEFLQTEINALDAELAKRGYASEPVKLLMTLPGVDVATAEAMLAAWGDANRFPDGDRAASYLGLVPSTKQSAEHCYHGPITKRGNSQARWMLIEAAHHLDKHPGPLGHFFRRLCRKKNRNVALVAAARKLAMIGWHMLATGEPYRYAIPKTTETKLSKLRVKATGERRKGGSPKGTKCTAKLAGGSRTIKSLAAACQSEGLPAPRPLSPGERRMVQRAECEAFVAEIAAAHVVPRSPKRGKVEEVAAHA

SEQ ID NO: 234476 - protein, 332 aa, unidentified
MFDHYIAVDWAQSNMAIARMTACSNKVTTIDVPSDIKELQLYLGKLKGKKILTVEESTASQWLYTELREHVDEMIVCDPYRNHLLKEGAKSDKIDATKTVQLLRAGLLKPVFHSGDDFIHLRKLVSGYIDLVKSGTRLKNQRSALFRACGRETGDGKLPGAAERFVLDGIERSIASYEEERLRYEEEFNNLSKKHKAITLLKSLPGIKDINAVKIAAFVVDPRRFPTVGHFWSYCGLIKLDRVSGGRSYGKKNPRCCRTLKSVFKTAAVTSAREDKNNPMRDYYLHLVNEKKLVDYHARNAVARRLATLAWGVLKSGKRFDPYRRGKCKKAV

SEQ ID NO: 234477 - protein, 351 aa, unidentified
MEKFIGLDVHAASTTFAVIGQSGRRLGTHVVETSGQALVAQLKAISGKKHVCLEEGEQSAWIYEILSPWAERVVVATVPQNRGQKSDERDAYRLAEQLRIGALKNWVFKEPGAYRTLRELGRTHAMVVQDVVRVQNRIKALYRSRGVAVSGTSVYSQKSRKQYLDKLPHASRGAAETLYAQYDAVEQIRRQAEKDLVTEAHRHPISRVLETGPGLGPIRVAQLMPVVVSPGRFRTKRQFWSYCGLGIVMRSTSDWVPKKGGGWMRADVQQTRGLNLNHNHRLKWIFKGAATSIITQLETDPLHQDYKRLTAAGTKPNLAKLTIARKIAAITLSMWKSKEKYDPTKHRKPSS

SEQ ID NO: 234478 - protein, 417 aa, unidentified
MSFPPGGFLIISEKGNSDVRFIGLDVHRSFAQVAVVEEGICRDEGRVGVKPEELREWAATLQPDDEVALEATTNSDAIAVLLQPLVARVVVSNPRKTRAIAEAKVKTDKVDARILAQLLAADFLPSTWVADDRTRMLRRLVTRRMHLVRQRTRVKNQIHAILARNLVPTCPHSDLFGGVGRRWLAKQEVPVDEQRSIDALLRQLDFHGEELAEVDHDLAIEAIDDPVVARLMTVPGIDVAVAISIVAAVGDFSRFDDPNKLVSYLGLNPKVRQSGDSPAVHGRITKAGRAQARGMLTEAAFAASRAPGPLRAFYRRIRDRRGFQVATVATARKMTVLCWHLVTKDDDYAFARPGLMARKRRNLELAAGHPPQIAKRGAAYNYNDADFRRREREFVEQQERAYELTVAHWQPRRPGSG

SEQ ID NO: 234479 - protein, 465 aa, unidentified
MTRKRKSKRSVPAGRPESIPIWNPNAAGMDIGAEEIFVAVPADRDGQPVQRFGKFTSESGRLSEWLQQCRIETVAMEATGVYWIPVYQILETAGFELCLVNARYFQNVPGRKTDVSDCQWLQRLHSAGLLRGSFRPAQEVCVLRSLTRHRDNLIRLASTHVLHMQKALDQMNVQLHHVLSDITGLSGLAILDAILAGERDPRVLARLRDGRVKASEETIVQALTGDYRAEHVFTLKQSLTAYRHYQKLMAACDLEIEQQLKRFDAKVDAKAKPLAPPKVRRRKIFSNEPNFDLRSHLYRIFGVDLTAVPGISVLTAHTILSEIGPDISKFRSAAAFASWLGLCPHNDISGGKILSVKTRRVNNRAALAFRMAANALFRSQSPLGDFFRRMRAKLGAPPAITAAAHKLARIVFHMLTTRDAYDEAILNKNERGFRARAEARLRAQAKALGYSLVAAPAQTAQPKTA

SEQ ID NO: 234480 - protein, 427 aa, unidentified
MGKIINSSNGKKLESAGKNTKAIKVEKTSESDRGRRTAKVAKPLTNGDVHPQQRWGVRNLLQKLETSKQQAREVVEARVEYHIGIDLGDRKSYYCFLDKHANVAADGSLTTTVTEFKMYFKQIPRSRIALEVGTHSPWVNALLEELGHEVYVANPRKMGGGKKKNRRKNDKLDAESLARQLKADPRLLYPIQHRGETARNALVLLRARHAVVCARTKLICGVRGMVKSGGQRLPGCSADSFHKMPAMNVPEALRNTLVPLFEQIGLLTKQIKKYDMDVKRMCRHAYPETEILQQVNGVGDITSLAFILTIDNPNRFVKSRDVGPYLGLVPKQYDSGDSSPQLRISKTGDRMMRQLLVQSAQYIVGPFGQDSDLRRHGLKLAERGGKNAKKRAIIAVARKLAVLLHRLWVTGEVYEPLRNSEPKQRAA

SEQ ID NO: 234481 - protein, 346 aa, unidentified
MKHYAGLDVSVKETTVCIVDEGGRICREMKVASHPNDLAEALKNPAWNLARIGLEAGPLSQWLFSGLAGAGLPAICIETRHAKAFLKAQVNKTDRNDARGIAQMMRVNLFRPVHVKTLMSQKRRALLTARKLLQEKAIAIENDIRGLLRNFGLKVGIVGVGKFADRIRDLSGDIPELRDIMEALLTARQRLREQFTVLHERLLSIVKGDTVCRRLMTVPGVGPIVALAFNATVDIPARFRNSKAVGPSLGLTPRLHQSGEDNRVGRVSLCGDAMMRTLLYEAAQVLLTVVKKWSWLKAWAMNVAKRRGRQRATVALARRLAVIMHRIWSDGSEFRWARENTAAVKL

SEQ ID NO: 234482 - protein, 316 aa, unidentified
MTEAGGFVGIDVAKAELEVVVRPSGARWTVTNNASGLAQLQERLQAAAPSLIVLEATGGYEVAVVAALATAALPVVVLNARQVRDFARATGRLAKTDAIDAGVLAHFAEVVRPPVRPLPDAMTQDLQAWLTRRRQLVDMLLAEEQRRSRAPRAIQRQIDQHVRWLRAQLGAVEKDVAQTLRESPVWREQEDLLRSVPGVGPILTTTLLGDVPELGQLNRKQIAALIGVAPLNRDSGTYRGRRAVWGGRARVRATLYMATLTAARYNPLIRAFYERLVAAGKPKKVALTACMRKLLTILNAMIARRTAWKPPAAVTA

SEQ ID NO: 234483 - protein, 344 aa, unidentified
MSMVRTVVGGVDTHADFHVAAAIDSNGGVLGVESFPATEAGYEGLVGWLVEFGVVSRVGVEGTGSWGVGLLRFLTDAGVEVVEVDRPNRQNRRKVGKSDPTDAVAAARAALSGAAAVTPKSRNGPMEQMRVLLVARRSARTQRIQTLNQLRHVVFTAPEPIRVRFKDRYKTGLVTEAANMRPRMGSDSVVFTTNVVIRNLARRIQGLNDEMKQIDQMLTTLIGDTAPSLLELHGTGPDTAASLLVTAGDNPDRLHSERSWAHLCGVTPIPASSGKVTRWRLNRGGDRHANAALYRIVLTRMSNHRETRAYVTRRRAEGLSTPEVMRCLKRYVARQIFKQLPMAA

SEQ ID NO: 234484 - protein, 408 aa, unidentified
MQVTFGIDVSKSTSTVCELIGESKNELTITNNRPGFIQLLHELTAFSKHPQIIFEATGVYSRTLQSFLEDYGYDYVILNPLKAKKEMDMGLRHNKTDKTDAYHLALIQRLYHHPINQLQSQTYKQLNALSRFYDQLTADLVMAKNRLHQALQSTFPEIENLFSSAKGKNYWQIVVRYPHCDLVRREDKKQLINWLMSLKGIAFKHALRTADKLIELAYQAYQVVSCSSIEVEQVQYYAHRLLNLSDQRENLIARMVKLAKSLPNHDLENLESIPGFAQTTAVRVLAELGDLRRFSNPNKINAFIGIDPGRYQSGEMDSNLSITKHGNAVARKLLYRAIGQIDNAAKTNPCHIADYYESKKLSSQTKGFKKIAIASIHKLIRTIYALIINDQPYDYNVATHNQKDFSRN

SEQ ID NO: 234485 - protein, 433 aa, unidentified
MEEAGEDPLFCERAAGIDIGRQSVMVTVRVPSETRRGGRAQETREFGATRRQLLALADWLRCHGVERAGMEATSDYWKPVFFLLEGEGFECLLFQASQVKALPGRPKTDKLDSVWLAEVTGRGSLAGSFVPPEEIRRLRTRTRYRRRLVQAQTAEKQRCEKLLEDAHLKLSSVVSDIHGVSGRDMLAAIIAGERSPAVLAQMARGRMRRKIAQLEEALDCSFFSPEHAFILQMMLENIDHHAARIAVPDEKIAVLCEPYERQIAQLDAVPGFGVTSAQELIAEIGVGMTAFPAAGHLCSRARVAPRARESGKRKGSTATGRGNPYIGGTLGETAATAGRTQTFLGAKLRRLCKRMPKKKARGAIMRSQLVIAHALLSDPAAEYRDLGPGYYEQRADIRRQAHNHVRGLERLGYKVTIEKTDPETDELITRTAS

SEQ ID NO: 234486 - protein, 461 aa, unidentified
MTKVRRKNGIGKDREFKVVHLNAAGVDVSPKEMQVCVPSDRDEKCNRTFGVYTKDLHEISAWLKKCGIDTVVMESTGVYWLPLFRVLKGDGFDVILVNPREAKNYAGKKTDEADAHWLMTLHTYGLLKACFQPDNVTREIRNLVRHRDNLIQSCSREVLHLQKEMEQMNLKLDNAFSDILGKSGQAIIKAILDGERDPERLAGLADWRCKKSKEEIKASLQATWDEDHLFIMKQSDDLYHYYKNLIKDTEAKIEELVNRYSASVDADKAAAMERSKKQKQLHNDVSFDIEQYAYNAWGVNVMRMPGMSKNSALRLLAELGPDFVEKFPDARHFESWANLVPNNKISGGKLLSSKVPNKNNPVGQVFRQCANALWRSNEPLGDYFRHIKARSGHLQAMVATGKKMAGIFYTMVKNKKEYDVSIYAKSKEKTLERRIKKLQAKILRLQNEQAQSGLKVTDGTD

SEQ ID NO: 234487 - protein, 356 aa, unidentified
MQETETIKAKKTRKRKVNWVIGVDVSKCTLDYAIMHHDKFLFHYRGKNDKEEILKFIIRLKEDSKIQMASVVFCMEATGRYGQHLLFAIKKLKGRIAVVNPLIIKNFLGIIRGKNDKTDAIRIAQYAQKNLNDLVFWTPQRIPLLELKHLFALRERMLTTVVALSTPLKEQKDFIPPSQHKQILKLCAKSIEAIHADLMNIDALIDQIIKTDELINRLMTLIVSVPGVGRITALLILICTNEFKDISCPKKFACYAGVAPFKRESGQAVRKSRVSNFANKKMKSLLHLCALSAVRFDSEMKAYLERKTTQDGKPKLIVINAVRCKLIGRVFACVHQDRMFEKNYLNKKEITAAELD

SEQ ID NO: 234488 - protein, 339 aa, unidentified
MKEVTTIGLDLAKNVFQVHGVDAEGNVVIRRQLRRSQVLPFFRKLEPCLVGLEACATAHHWARELMALGHEVRLMPPHYVKPYVKRGKNDAADAAAIAEAVTRPTMRFVAVKSIEQQSILMVHRTRELLVRQRTMAINAMRGHMAELGIVAPSGVPQIRKLLAIIDDSEDDRLPPVARSCLEALARQYLALDAEINAAERQIHAWHRNDETSRRLATIPGIGVITASALAASVSDPNVFRSGRELAAWIGLVPRQNATGGKPRLGRICKQGDAYLRWLLVAGAMSVVRHAKRRGAASPWLAELIARKPAMVCAVALANKNARTAWAILMSGEGYRPAAA

SEQ ID NO: 234489 - protein, 349 aa, unidentified
MDTTVAPLASIGIDIGKEVFHLVGFGTDGKIAFRRKIRRLALVETFKKLPQSIIGLEACLSAHFVSRALRRLGHEPRIIPAIYVKPFVKGQKNDYNDAEAIAEAALRPNLRAVREKSQDQLDLQACHRVRSRLVSRRTATINQIRAFLIEQGIAVRAGSRALRNSLFEILKNREDEMSPRMSDLIVGLYEDWLWLDERIETITKEIEEISQREGNCVRLMSVPGVGPLISTAVVAAIGTGEAFDRGRDFGAWLGLVPRQYSTGGRSILGGISKRGSRYLRTLFIQAAKVLLMRPQNWRKFSFGAWLTNAAPRMHRNKLATALANKLARIAWSVLNTGKAFDTHLQLETI

SEQ ID NO: 234490 - protein, 391 aa, unidentified
MVCVGIDVAKDKHDCCILDSDGMVRADCFTIPNNMDGFKQLLQTIRNCTKKSDKIKVGLEATGHYSYNILGFLLDNDLAVYVMNPLHTNLYRKSLSLRKTKTDRVDARTIATMLLSDVDLKSYTDTAYHNEELKSLTRYRFDKVRERAKLKQSVSRLVTILFPELEKLVPSLHGVSVYVLLSEYPGAKQISEAHLTKLTNLLSIASKGHYGKEKAIQIREAAKSSIGSVMPAKSLELKHTIKLIKELTSEIDEIEDSIQQIMDELHPPILSIPGVGIQSAAMILAEIGDFSNFESPDKILAYAGCSPSTYQSGKLTNCYAHMEKRGSRYLRYALYNATKYVCHWNPVFAKYLAKKRAEGKHYNVALSHATKKLVRLIYALQKSGKAYLTAA

SEQ ID NO: 234491 - protein, 315 aa, unidentified
MRSAQVFVGIDVSKAQLDLALRPEGRFSAPNDEAGFAQVLERLSAVHPTLVVLEATGGWEIPLTGVLAAAGVPVVVVNPRHVRDFAKAAGKLAKTDTLDAQTLAHFAEVMRPEPRPLPDEQTQTLAAILARRRQLVEMLTAEKNRLGRARKSVRQSLRTHITWLERELAHTDRDLAHAIRESPVWREKEALLRSTPGVGPVLTTTLLANLPELGTLTGKQIAALVGVAPLNRDSGTLRGKRTVWGGRAQVRAMLYMGAIVAARFNPVIRAFYQRLRAAGKAKKVVLTACMRKLLIILNAMVKHRTPWCPQMAQCA

SEQ ID NO: 234492 - protein, 413 aa, unidentified
MSIDPSTAAARVTAGVDWAKDDHAVCVVGDQGEVLERFTVPHDAAGLKRMAARLLRAGVGQAGIERGDGPVVDALLQAGLTVFVIPPGQVKNLRSRYGSAGNKDDRFDAYVLADVVRTDVRRLRPMVCDSEQTTALRSTVRARRDLVGHRVAAANQLRAHLHNVFPAAAALFADIDSPITLTFLSRFTTQEQADWLSLRRMTAWLKSVAYSGRTDPAVLHARLLAAPRGQTGQHAAVHAGTTLALVAVLRALNAQIQALAASIGAQMDAHPDAVIFTSLPRSGTIRAARLLAEIGDARGRFPTRDSLTCLAGVAPSTRQSGKVKTVTFRWGADKQLRDALCDFAGDSRPASPWAAGIYDKAIARGCDHPHAVRILARAWTHVIWRCWQDHVPYDPAAHNSLQALLNQNRPVAA

SEQ ID NO: 234493 - protein, 423 aa, unidentified
MKRAAEQPFTALVGIDWSDKKHDFCLQGTGSSQREFGVVAHRPEAIDRWARALHERFGGPIAVCLEIAKGPLVHALQRYAFLMLFPVNPATIAKYREAFVPSRAKDDPTDAEIALELLLRHREKLQALKPQSTPMRALTTLVEQRRHLIGDKTRITNRLCSTLKEYFPQALDWFDDRDTVLFCDFLQRWPSLKHVKRARQATLRSFFWAHNMRRAELIEERLRGIRSARALTDDVAVIGPHQLLVQALVAQLRVILQAIDGFDAEITQVAQRLPDYALFAALPGAGAILAPRLLVAFGEQRERYTSAAQLQQYAGVAPVLERSGNKCWVHWRMACPTFLRQTFVEWAGSTIPRSFWASAYYQRQRDKGCSHQAALRALAYKWIRIVYRCWQTRTAYDESAYLLALKRRGSPLIPSVSVAPQSA

SEQ ID NO: 234494 - protein, 343 aa, unidentified
MQAVTTIGLDIAKSVFQIHGVDAAGHVVVRRKLKRRYVVPFFQKLPPCLIGIEACASSHHWSRELKALGHTVRLMPPAYVKPYVKRQKNDAADAEAICEAVTRTNMRFVATKTPEQQSCLMLHRTRHLFIRQQTAVINAIRAHLAEFGIVAPVGRNGVEQLLDVVADASDKRLPEIARACLVALGTQLRTLKAQILNFDRQIMAWHRSSEASKRLDEIPGVGPALATALVASVADAKAFRSGRNFSAWIGLVPKQHSSGGKDKLGSISKQGDRYLRSLFTAGALAVIRYAKIHGTKHRPWLTALLARRPTKVAAIALANKIARMAWAIMAKGDRYKEPVALAA

SEQ ID NO: 234495 - protein, 324 aa, unidentified
MIDGILGIDVCKNTLDVSISSYTKVRTKSFTNSPDGWRHLLDWLIAHKNQRVHACLESTGRYSLGIACALYEADHVVSIINPAQIRDFVRTKLGRNKTDGVDASHIREYCELFKPSPWAPPSEAHRRLGELQTIRSGIIAGLTEWKNRKNSGIVDAEAQALADATISHFTSQLGAVDKAIALTIDNDCDLQSKRDLLLSISGVGETLAGVVLAELPGPDVLRSSAEVVAYAGLNPRQHQSGTSIDRATRISKIGNAVLRAALYMPALSAMRYNSAIVALVSRLKSRGRLKPKQIVVAAMRKLLVLCFGVLKTGRPFDAAIAMGG

SEQ ID NO: 234496 - protein, 360 aa, unidentified
MGRGVFYAGLDVGSTVCELAVVGAEGEGVYAVQFSTNERNMIRAVEEAQEKCRGDFHLAVEEGEMAQWVGGMLRPRVTRLVVCDPKQNYWIARSSQKNDALDALKLATLLRGGYLKEVYHTSDEDRAEFKRSVQHYHDLTTSQAALQCQIKAKFRSRGILVTGAKPFQSEGREKLLKLLANPASREILQQEYGILEKTREAQEQAKRLMVRLGKSFPEVELLRTHPGIGPVWACTFSAYVQTPKRFRNKRKLWSYCRLGITERRSNGELLHRKSLNRNGVGVLKHLSFQAFACCMKGENDIRNFFQESLLRTKNRTHARLNTQRMIISNLYGMWKRGEPYRAANKEGSKKGEKEVQHLRA

SEQ ID NO: 234497 - protein, 363 aa, unidentified
MKIMTGIDLHSNNALCGLMDENGQRLVHKQLPCDLSCILQLLAPYKERIATVAIESTYNWYWLADGLRDQGYHVVLANPARMKPYDGLKHTDDVSDAFFLTELLRLNILPTGHLYDRQTRPVRDLLRRRLLLVHQRTSLILSFKSLNERTLGQRVALARVKALKPEEARARFTAPADQLLSGTEIELMGHLTQAINKIEAHVLNVAGKWHTYQRLQELPGIGKILGLTIALETGDAKRFAAAGNFASYCRCVKSLRTSNGKKKGENNRKCGNRYLAWAFVEAAHFACRFDDPCRHFYDRKKQQTNPVIATKALACKLAKAAWHVMAQDVPYDAARVFGPGKKTNFGEPRREPAKGSGPPSQPN

SEQ ID NO: 234498 - protein, 318 aa, unidentified
MPEAVFIGIDVSRDTLEIGSSTASSTWQYANSSDGIEAMTAELAKLAPALVVLEATGGYEFEAACALQAAGLSVAVVNPRQARDFARAMGTLAKTDSLDARMLAAFARVLHQHPQRERFIKQLPDAQLQRLQALVLRRRQLVTMLTAERRRLTLAHASARPSIEQTIKFLKSQIDDVEHDCADHVRTHHAELAQALSSVKGIGPATVATLLAELPELGSLCRRRIAALVGVAPLNRDSGQMRGQRTIWGGRAEVRRALYMATLVAVRHNMVFKSFYARLTALGKPKKVALVAAMRKLLTILNAMAKSGSHWNDSLHLA

SEQ ID NO: 234499 - protein, 369 aa, unidentified
MIYVGIDIAKLNHFASILSSDGKVLIEPFKFTNDNDGFCRLLDVLEHFDKDCLIIGLESTAHYGNNLVEFLVFRHFHVSILNPLQTSSMRKNRIRKTKTDKVDTFIIAQTLMTQPYRLFTQYDINLLYLKNLGRFRQKLMKQRTRNKIMLTSYLDQAFPELQYFFNGIHHKAVYATLKAAPSPDKIASMHMTHLAHLLKNASNGHFKKDKAQELRVLAQKSIGSSDSSISIQITQTIEQIELLNSQIEDVVSNIKNILLSLDTVIMTIPGISYLEAGIILGEIGNIQRFSTPHKLLAFAGLDPSVHQSGNFNANHTRMSKRGSRYLRFALIYAAYNVVRNTDIFKQLYNKKRDAGLNHYGALGHCAGKL

SEQ ID NO: 234500 - protein, 275 aa, unidentified
MHYLYYVGLDVSKETFDASLVAFEDANEMAHRKFANSRKGICSCLHWVEKRHGIRLDDVIFCAEDMGSYISEMAVCASDRTLNFNFSLISPLVIKYSMGIARGKTDRVDARRIAEYAITHYRKIALYLPAEKELCQLRTWLILRAHLAKQRVAKLVLLEKLDYKEKFADVSIQRSMLQEEIAYAETHMKTIEREMKELIAADSNICRNYKLLTSIKGVGPITAIVMLCSTLNFTKITDHRKFACYCGLAPFEHSSGTSVRPRNRNAFSRLARWFI

SEQ ID NO: 234501 - protein, 469 aa, unidentified
MKDSPEKKKKAKQLKKRVKKYAKKIKKIGVLEQINLDAAGIDVGSSEIYVAIPEDRTHQSVRKFGTFTQDLHQTVKWLKEHGVTTAALESTGVYWMPLYDLLEKAGIDIYLVDARKTKNVSGRKTDVEDCQWIQQLHTYGLLRKAFVPDEQTRKLRTLERQREMLSRYRASHIQHTQKAMEEMNLKLTNVLTDITGKSGMAIIRSIVAGERDPNQLAQHRDYRCRKSEKEIALSLEGNFDEGKIFVLKQALDLYDHYTNLLIELDGESEKVFKSFARKVDGKSKPLKKLSRSLKNRNKNIPNYDLRSQLYEITGVDLTQVNGFDVLVLQRIISEVGLDMSKWPTMKNFTSWLGLSPNNKITGGKIISSATRKTKSRANKAFRMSAMGVARSDCAIGVFYRKMRAKDGPQAAITATAHKLARIFYVMVSKQVEFSEELVKGNEEKNKKRMIKYLQRKAEKLGYELVETVA

SEQ ID NO: 234502 - protein, 429 aa, unidentified
MSFPPLTFEGGFFVKVIRPICCGMDVHKDIIVATIATTNQDGLAEYKQRQFNSQNYSLYELKTWLKENNCFDVAMESTGKYWIPIFNVLEDEIEVCVVHPKYTKAIKGKKTDKKDSKWIADLFRHDLIKSSFIPPKEIRQLRELSRYRIKLIGMRSSERLRYQNAMTVSNIGLASVLTDPFGKSATAIMKEAMNSNTIDEEKIKSLLQKSAKKKTEAVLKSLEGSHIETDQKLKMNIAMSHMEELDKHIEEVEFEMAKRCIPYAPLIACLIKIPGISYLAAMTIIAEIGVDMSQFETDKQLSCWAGLAPANNESANKKKSVRVSKAGSYIKPLLVQCALSAIKSNSEPYYRIKYTNIKKRRGHKKAIIAIARMMLVASYHILLTGEVFNPSDLEEIHKPKTSKNKLTAESALAFLQAQGYDVSAINLTV

SEQ ID NO: 234503 - protein, 371 aa, unidentified
MGTPAGSPVVDWSLETVAISDPPASRSDTRTVVWALDARMQSGVPTKVFLSLAGGAMQSNGGEVLIGADVSKAWIDVCRSETARVDRIVNTPEALAAWVAQARPTLVAMEPTGGYERALCFALAEAGVRYVKLHPNAILAFRKARGVRAKTDRIDAMLIARYLADARGRADLPATFRADERLRALAARRRQLVDARQAEGCRADLANDPFVRESLALVIGALTQSLEAIEEAIERHIAGDGELDRLAKVLRAVRGVGPVVAATLIADLPELGRLSGKQIAALVGLAPHTHESGKRKRQAKTGHGRPLVRSALFNAARAAIRHPSTMRDFYTRLAHTNNRPGKVALTAVMRKILVIANAVARDHLKAQHQNA

SEQ ID NO: 234504 - protein, 409 aa, unidentified
MVVHAAPVTRSTVVVAIDVGKNEFAVAVTDAARARLLKPRLGCPMTASSLRGVIETIQRLLPPGAQVRVGIEAAGHYHQPLLAAGFWPASWELLELNPGHVTEQRRVLGKRTIKTDAVDLEAMTELLLAGRGLPVRRRDTVLTELTAWSAHRTGRIQLRTATKNQLLGQLDRSFPGLTLALPDVLGTKVGRLVAAEFADPARLAALGSSRFVRFGATRGLQIRRPTADKLIGAAKNALPMPDAAIARAVLAADLALLADLDAQIEAATAELARLVPHSPFRPLLTVPGWAAVRAGNYGGAVGDPARFTTSRQVYRSAGLNPIQYESAGKRRDSVISREGSVELRRALIDLGVGLWLNDPAARQHATELRARGKKGPVIACAMAHRANRIAFALVRDQADYDPTRWIRED

SEQ ID NO: 234505 - protein, 328 aa, unidentified
MDPTTTTVAARLFAGVDVSKDRLDVCLRWSEPERHDEDAFVVSYDESGIDALVSRLLEERTVLVILEATGGFERSAVGALAAAGLPVVVVNPRQVRDFARATGRLAKTDRIDAAILACFAESVRPAPKPLPDREIRALQAIVARRRQLLGMLGAENNRLSSAAKPVAKRIKAHVRWLEKELSRTERDLEAAIESSPALGENEALLRSVPGVGPVLARTLLAGVPELGTLTHKRLAALVGVAPLNRDSGTLRGHRSVWGGRADVRAALYMGALVAARRNPVVREFYERLLAAGKPKKVALVACMRKLLSILNAVLKHRTPWRSPHYLSP

SEQ ID NO: 234506 - protein, 419 aa, unidentified
MSFKILKFNCCGLDVHKTWIYACIGITDSNNRTEYKQARFSSFTKGLNELCDWLAKYNCTDVCMESTGKYWIPVFNILEQHNLWVTLSHPKYTKPMKGNKTDRKDAKWICDLYMCGMVKPSFIPPADIRELRDLVRYRYKLTCMITGEKNRAQNCLTVSNLKLDDVFSDVFGKSSRSITEQILQHPGEKFDVAPFVHGLCKTPIEEIQAAVDGAISKEQAIKLRQCLDHIDELNKHISEVEQEILRLSDKYEAALNLIRTVPGFNKNPMTAIQVLSEIGCDMSVFPTDKHLVSWAGCCPRNDKSDRKIKSTRISRAGSYFKPVLVQVANALIKSKKHPEFITRYKRIKVRRGHKKAIIAICRMILTAIWHILSDLKPYTPEGFLESRPVKKEKILTTSQALNLLKLRGYVIKDDPLPTS

SEQ ID NO: 234507 - protein, 365 aa, unidentified
MIVIGTDPHKSQHTAAATQAATGELLDDLTVAAKPKGHAELLRWSRSLGRERLWAIEDCRHLTGTLERYLVAHRERVVRVAPKHMAGARRSVRERGKSDPIDALAVARAALREGPDQLPSAFLDDEAMQIKLLLDHREDLEQEATRIVGRLRWHLLDIWSELELPVRAFERMVWLDRIGRRLARAEQSTRVSICREQIRTLKALLRRSRELERELTVLVKVKNAALLELPGCGPLTAAKLIAQTAGAERFPSEAHFARLAGVAPIPVSSGRNDRHRLDRGGDRQLNCALHRIAVTQKRMHAPAQDYLARKQAEGKTKREALRCLKRQLVRSVLGQLRPVSSDRTDPLAMNKLTKIKEPLQVAALT

SEQ ID NO: 234508 - protein, 359 aa, unidentified
MKYIGLDCHKQYDFATLIDSETGEVRSRKLAHKEEEFKAFIGDGSNSKMVIESCWNWSKTYELAKGLVDEVILAHPLKIKAIASAKIKTDAIDSRTLAQLLKADLIPQAHLREADNRIKQKVIRHRAFMVAMRTRVKNKVNDLVNNRLLSPAVEETRPKNLFSKRGKNENGVVWLKSLEWSVEEDKRIFESSMRLIEHLSFEILASNRMMDEIYKKDKDAQLLSTIPGIGKTLAVLISTEIDGIGRFKSPSGLSSYAGLVPSTHSSGGKTYHGKMILEGNRWLRWALVEAVVPASYADDGIKQRLEALRKIKKANVAKVIMARWLLKVVYHVLKDGRPYVPFELRDTSRGRLSFALASF

SEQ ID NO: 234509 - protein, 451 aa, unidentified
MARKASSKKEVWTVINPHAAGLDIGAREIWACVPADRDETPVRCFGTFTPDLEALAAWLVACGVTTVAMESTGVYWIPIYELLEERSVQARLVNARHIKNVPGRKSDVQDNQWIQRLHSYGLLSASFRPEAEMVVLRSYLRHRAMLIEHRAAHIQHMQKALHQMNVQLTQVLSDISGVTGLAIIRAIVAGERNPDQLAQLRHGRCRRSAAEIAKALTGHYRAEHVFALKQALALYDAYTAQLVECDHQIEQQYSAFKPLFDPDDPAAPLGPDLKVNSHSKNAPDFDVRRQLFRLTGIDLTQVDGLDDSSVQQLLAETGTDMSKWRTVKHFASWLGLAPHNDITGGRVVRSRTLKNHNRAGQVLRLAAQSVGRGKSALGAYFRRMRARLGTEQATTATAHKLARIIYHMLKEHQPYRPQSATAYDQQQRQRELKRLQRQAANLGFMLQPRPN

SEQ ID NO: 234510 - protein, 327 aa, unidentified
MNTLNFDVGSEIFVGIDVGKLRLDIACGQDGEQYGVDNTDTGINALIARLQAPCEGTVPTLVVMEASGGYERIPLALLAKAGIKVALVPPKRTRDFARSAGLLAKTDRIDARMLAHFGERMRPPVRALAPAAHSELCEFLARRVQLVGMRTMEKQRLVQALSTKLQKLISGMIKFIDKQIAALEKDLDGWIDKQDAWRVNVELLSGTPGIGPATARSLVVRLPELGKLSEKAIAALVGVAPVAHDSGSHKGRRRIKAGRADVRTALFQATISAVRCNPPVMAMYKRLRAAGKPTKVALIACEHKLLNVLNAIIRTQTPWRNTTLQTA

SEQ ID NO: 234511 - protein, 341 aa, unidentified
MEYCGIDLHAEYSQICILDEGGEVMETSRVRTSRKALERFFSRDRMRVVLEAGGSSPWVSRLLDSVGHEVIVCSPRRVRLIAESKLKNDKVDAEVLARLVRLDPEFLKPIQHRSEEAQLLRGNLKVRSAMVEARTKWINTVRGLLRSFGYKVSGKVPHTFAERVDQMELPDDLRTVIEPLLEQLDLLSGEITRRNEHLGEMVEELPEVDHLRGVPGVGPVVATYFVLTIDDPTRFSNSRDVAPFFGLRPSMRESASVRHFGRITKEGDPEMRRLLVQAAHACMRTKADSELKRWALALAERKGKGKAAVALARKLAVLMHHLWVTGEVYQAFPNKETSQAA
